United States Patent Application Publication US 2005/0228172 A9 - sequence listing, part 97

SEQ ID NO: 444088 - DNA, 537 bp, Homo sapiens
tacaacaaatatttaatatctatgacatgtaaaaaggttttccaaatcaagaaaattcaaacaattcaatacaaatatcatcaataataacacatgaagaggtggccaaccttattaataaccagagaaatataaattaaaacaatccatcaacttgtaaaaaagatgaaattacccagagttggtgtaggtgatggaaaattgtcatgtttgtatactgttcatagaagttaaattgacataactttttggtcaggcaatttggaagtatatatctaaattaatagagaagttttctaataacctgggaatctcttaatctaagaatctttactgtagatttttctagaacaaatgtacaaacatctatgtacaagggtactcactgcagcattttgctaaggaaaaactcagaaaaaaatctatatgttcaacagagaacaggtacataatttatgacacaaccgcacaatatacaccactaaaataaaggatataaatttatrtatagtatgaaaaagatgtgaatgatagctt

SEQ ID NO: 444089 - DNA, 421 bp, Homo sapiens
gtaaaaaagatgaaattacccagagttggtgtaggtgatggaaaattgtcatgtttgtatactgttcatagaagttaaattgacataactttttggtcaggcaatttggaagtatatatctaaattaatagagaagttttctaataacctgggaatctcttaatctaagaatctttactgtagatttttctagaacaaatgtacaaacatctatgtacaagggtactcactgcagcattttgctaaggaaaaactcagaaaaaaatctatatgttcaacagagaacaggtacataatttatgacacaaccgcacaatatacaccactaaaataaaggatataaatttatgtrtagtatgaaaaagatgtgaatgatagcttgttggtgaaaaacagcaatgactggaatattgtgtgtaat

SEQ ID NO: 444090 - DNA, 395 bp, Homo sapiens
atctattccatatacatctctggatttaaaagatcatacatgcatatgcattaccttcaraattaaaatgataaagacaaaaggagaagctttgtatttgaatcatgatactactgtttgcaacttatatgaccgtggggaagtcgcctagcctcctggggtttatttcctcatttataaaaatagggaaagtaataatacttgtctacatatcttctagggttgttgggaggattgaatgtgataatgggttacagcattatgaattatttattcatataacacaattattataaaaatattttgctctgattaaaataaaagaaggacgagatcgtgtgtgtttttcagtcccagtagctttactaaccagaaagcgcctgctgatgtggtga

SEQ ID NO: 444091 - DNA, 395 bp, Homo sapiens
atctattccatatacatctctggatttaaaagatcatacatgcatatgcattaccttcagaattaaaatgataaagacaaaaggagaagctttgtatttgaatcatgatactactgtttgcaacttatatgaccgtggggaagtcgcctagcctcctggggtttatttcctcatttataaaaatagggaaagtaataatacttgtctacatatcttctagggttgttgggaggattgaatgtgatmatgggttacagcattatgaattatttattcatataacacaattattataaaaatattttgctctgattaaaataaaagaaggacgagatcgtgtgtgtttttcagtcccagtagctttactaaccagaaagcgcctgctgatgtggtga

SEQ ID NO: 444092 - DNA, 621 bp, Homo sapiens
ctatgtataagtaagagaatgagtttttgttttggggatatatatttatacgtatctatacagatagatatacacatacttaatttctgtctacctattaaggtgcagtgccagatggaaagtatttttaagcatttagatagcttattctatagcatatgtgtgcatatagcccccccataaagctttgtctcttttctggatatatttaacaagaggctagaacagagtccaaaatgtcagaaatgtttgaacattccatagaaatgaaggaggtgtttccaaatgacctatgtttctatggcaataaatagaacttgtgctgcgttggatgsgtcaggagtaaggaatataaacagtgtaagtatgactattccaggcagaaatctaccttgtaagaacagctttgtgcagtgagctcaacaacattgatcagttagcagtctggttcagtacaacattgatcaggtagcaagccggttcggcagtgccagtcggagacacagatggggacaatcaaagaagatgcaggtcaggacaaggatgcagacatgtacctgtcactaccatggacttcagcacttcttagtgagcaggtttatgattaaagaagaaagacat

SEQ ID NO: 444093 - DNA, 548 bp, Homo sapiens
tcaagagtctgttaggtactagacactgtaaactgggtcttggctgtgttacttgcttacatcctccatcatgtgatcttttagataacaaaatcgagatacatagggataatkggtgggctgattgaagaacagaacttgggccacacttctagatgcctgtgacttttctgcatctattcagatattaggaattgattatgaaatccatggtggtttgatgctaatgaactctcctctatctctccagcatgtgtgtaaagacttccagaggtacaggaagttgaggatgagctctcttacttccatctggtctccatgtaacaaatcatataactgcacaattatccaaatgcaaatgaaggagtcccttgatgtttggataaccacattcatgccttgagtttgttatttcttgaaattgcccttatccgtctcctgtttacccatgaacaacactacttaagggctggcactctgcaacccatggcagcttggctttttccggtgttttgtttttgtttttaaccgagaagacaggaaacagg

SEQ ID NO: 444094 - DNA, 548 bp, Homo sapiens
tcaagagtctgttaggtactagacactgtaaactgggtcttggctgtgttacttgcttacatcctccatcatgtgatcttttagataacaaaatcgagatacatagggataatgggtgggcygattgaagaacagaacttgggccacacttctagatgcctgtgacttttctgcatctattcagatattaggaattgattatgaaatccatggtggtttgatgctaatgaactctcctctatctctccagcatgtgtgtaaagacttccagaggtacaggaagttgaggatgagctctcttacttccatctggtctccatgtaacaaatcatataactgcacaattatccaaatgcaaatgaaggagtcccttgatgtttggataaccacattcatgccttgagtttgttatttcttgaaattgcccttatccgtctcctgtttacccatgaacaacactacttaagggctggcactctgcaacccatggcagcttggctttttccggtgttttgtttttgtttttaaccgagaagacaggaaacagg

SEQ ID NO: 444095 - DNA, 548 bp, Homo sapiens
tcaagagtctgttaggtactagacactgtaaactgggtcttggctgtgttacttgcttacatcctccatcatgtgatcttttagataacaaaatcgagatacatagggataatgggtgggctgattgaagaacagaacttgggccacacttctagatgcctgtgacttttctgcatctattcagatattaggaattgattatgaaatccatggtggtttgatgctaatgaactctcctctatctytccagcatgtgtgtaaagacttccagaggtacaggaagttgaggatgagctctcttacttccatctggtctccatgtaacaaatcatataactgcacaattatccaaatgcaaatgaaggagtcccttgatgtttggataaccacattcatgccttgagtttgttatttcttgaaattgcccttatccgtctcctgtttacccatgaacaacactacttaagggctggcactctgcaacccatggcagcttggctttttccggtgttttgtttttgtttttaaccgagaagacaggaaacagg

SEQ ID NO: 444096 - DNA, 625 bp, Homo sapiens
gccatccaaggtccaccacccataaacagggtggtgaatggattagtgctcatctaccctctatttgctcttatgccacccctatggttcaccatttatccactcaagaaatatttattaaggacctcctatgtcctagacacgrtccccgtggcggtgctttcagtctaatggggaagacaaagaataacaagtaagggaaacatacagaaacacaaattgtaacacaggctagtggaaatgaacttggtgcagtactcattggtgggcatcgagcatcttgcttagataggagatccagggaaggactcttggaggagattaggcataggaccaaagatcagaaacaggtatctggacctgactgtgatgctgggattagaaatgacacccacacatgtgaaaacacttattcctcagaaggtagtctacagctatttgttgccaattcccaatctaaaatatgtactatagctttatcttgaacatactcagctgatcgttggaatccagacagtgttaatcctccaagtatgcaagtatctactgatctctggtgatctcgattcttaccacgtcctttagatctgtgctgtttcatctcccagatcagtcatgatggatg

SEQ ID NO: 444097 - DNA, 529 bp, Homo sapiens
ttcaaatacaatgaatgtggtcagtgggtcacacctggagaaatcattttctaacctgtaatcaagactgaattactcccttcactggaaagaataaaatattaccacataaattcrtattatgataatggcccactatgaatgctttggtgttcttaattttcttaagatttattaatatttctgaagtaactactaaatgccaagcaatatattttctaatttaatctttcattgacttttactttcacttcaattgagctactcactttcatggctataaacttaacttttcaatcacttaaaaattgatttctaatgttataaactttaatgttccactctgtgacctgctctttcagactcttccttactgtcaattcaccttctcttctatctcttccagtgcctcagtatcttgactcttccattttcttttttctttgcttttattaagtagatacatgataatttcacatgttgatggggtacaatgtggtattttaatacatgacgcattgttaaaacc

SEQ ID NO: 444098 - DNA, 452 bp, Homo sapiens
tttagaacaagtttataaaattggtattattcatatttttgagataatcaaaggatcastaagtttaaataaatcaccatagtaacaaagcagttcacaatatattgactggataattgctagtgaaaagtagcaatgatgatcacattgaaaatcttgtgttaggtggtggttttctcttgcataagcctcttcatttgttgaaaccatagattctaagtttgctctatcaaagtgatcattagaaaaatataatgtacttagtgtataaattttagaaaatttcctttttagtcctgttattttgattgaatatgtgcattttgaattatgaatataaatatgaatatgtatggcataagaaatatgacttgacatcacagagtaaccttagatcgtggcaatgtttttttctgaaagcacctgcagaaatgtatcttctttctagtttc

SEQ ID NO: 444099 - DNA, 452 bp, Homo sapiens
tttagaacaagtttataaaattggtattattcatatttttgagataatcaaaggatcactaagtttaaataaatcaccatagtaacaaagcagttcacaatatattgactggataattgctagtgaaaagtagcaatgatgatcacattgaaaatcttgtgttaggtggtggttttctcttkcataagcctcttcatttgttgaaaccatagattctaagtttgctctatcaaagtgatcattagaaaaatataatgtacttagtgtataaattttagaaaatttcctttttagtcctgttattttgattgaatatgtgcattttgaattatgaatataaatatgaatatgtatggcataagaaatatgacttgacatcacagagtaaccttagatcgtggcaatgtttttttctgaaagcacctgcagaaatgtatcttctttctagtttc

SEQ ID NO: 444100 - DNA, 452 bp, Homo sapiens
tttagaacaagtttataaaattggtattattcatatttttgagataatcaaaggatcactaagtttaaataaatcaccatagtaacaaagcagttcacaatatattgactggataattgctagtgaaaagtagcaatgatgatcacattgaaaatcttgtgttaggtggtggttttctcttgcataagcctcttcatttgttgaaaccatagattctaagtttgctctatcaaagtgatcattagaaaaatataatgtacttagtgtataaattttagaaaatttcctttttagycctgttattttgattgaatatgtgcattttgaattatgaatataaatatgaatatgtatggcataagaaatatgacttgacatcacagagtaaccttagatcgtggcaatgtttttttctgaaagcacctgcagaaatgtatcttctttctagtttc

SEQ ID NO: 444101 - DNA, 452 bp, Homo sapiens
tttagaacaagtttataaaattggtattattcatatttttgagataatcaaaggatcactaagtttaaataaatcaccatagtaacaaagcagttcacaatatattgactggataattgctagtgaaaagtagcaatgatgatcacattgaaaatcttgtgttaggtggtggttttctcttgcataagcctcttcatttgttgaaaccatagattctaagtttgctctatcaaagtgatcattagaaaaatataatgtacttagtgtataaattttagaaaatttcctttttagtcctgttawtttgattgaatatgtgcattttgaattatgaatataaatatgaatatgtatggcataagaaatatgacttgacatcacagagtaaccttagatcgtggcaatgtttttttctgaaagcacctgcagaaatgtatcttctttctagtttc

SEQ ID NO: 444102 - DNA, 619 bp, Homo sapiens
cccacctattaagaagtcaatatccagaaaaattgtccttaaaaattaaggcaaaataaagtcactcscaaatgatcaaaggctaagagaattcatcactagcaatcgtgtcttacaagaaatattaaagaatccttcaggctgaaagggaataacactagacaataactaaaatccacaaacacaaaaaaaaagcatggggaaaggtaaatatattggaggtgtgacaggcaataaatatttttctcttttctcttgtgtaatttaaaatgtgtaagattgtataaaactataattataaaaccatattgtcgagcttatagaaaaatgtcatttgtatgacaataccacaaagaaattatattggagcaaagtttattttatgaatggatatgactctggagtagattgtaattagttaagatacatgttgcaaaattgagaacatcctcaaagaaaataatttaacaaaaaagaaaaataaatgatacactagaaaatatcaatctaacaaaaaagaagacagtaaaagaggaagcaaaaaagagaaatgacctgagccatatagaaaacaaatggaaaaaattgaagacataattttaattacactaaaaattac

SEQ ID NO: 444103 - DNA, 619 bp, Homo sapiens
cccacctattaagaagtcaatatccagaaaaattgtccttaaaaattaaggcaaaataaagtcactcccaaatgatcaaaggctaagagaattcatcactagcaatcgtgtcttacaagaaatattaaagaatccttcaggctgaaagggaataacactagacaataactaaaatccacaaacacaaaaaaaaagcatggggaaaggtaaatatattggaggtgtgacaggcaataaatatttttctcttttctcttgtgtaatttaaaatgtgtaagattgtataaaactataattataaaacyatattgtcgagcttatagaaaaatgtcatttgtatgacaataccacaaagaaattatattggagcaaagtttattttatgaatggatatgactctggagtagattgtaattagttaagatacatgttgcaaaattgagaacatcctcaaagaaaataatttaacaaaaaagaaaaataaatgatacactagaaaatatcaatctaacaaaaaagaagacagtaaaagaggaagcaaaaaagagaaatgacctgagccatatagaaaacaaatggaaaaaattgaagacataattttaattacactaaaaattac

SEQ ID NO: 444104 - DNA, 619 bp, Homo sapiens
cccacctattaagaagtcaatatccagaaaaattgtccttaaaaattaaggcaaaataaagtcactcccaaatgatcaaaggctaagagaattcatcactagcaatcgtgtcttacaagaaatattaaagaatccttcaggctgaaagggaataacactagacaataactaaaatccacaaacacaaaaaaaaagcatggggaaaggtaaatatattggaggtgtgacaggcaataaatatttttctcttttctcttgtgtaatttaaaatgtgtaagattgtataaaactataattataaaaccatattgtcgagcttatagaaaaatgtcatttrtatgacaataccacaaagaaattatattggagcaaagtttattttatgaatggatatgactctggagtagattgtaattagttaagatacatgttgcaaaattgagaacatcctcaaagaaaataatttaacaaaaaagaaaaataaatgatacactagaaaatatcaatctaacaaaaaagaagacagtaaaagaggaagcaaaaaagagaaatgacctgagccatatagaaaacaaatggaaaaaattgaagacataattttaattacactaaaaattac

SEQ ID NO: 444105 - DNA, 619 bp, Homo sapiens
cccacctattaagaagtcaatatccagaaaaattgtccttaaaaattaaggcaaaataaagtcactcccaaatgatcaaaggctaagagaattcatcactagcaatcgtgtcttacaagaaatattaaagaatccttcaggctgaaagggaataacactagacaataactaaaatccacaaacacaaaaaaaaagcatggggaaaggtaaatatattggaggtgtgacaggcaataaatatttttctcttttctcttgtgtaatttaaaatgtgtaagattgtataaaactataattataaaaccatattgtcgagcttatagaaaaatgtcatttgtatgacaataccacaaagaaattatattggagcaaagtttattttatgaatggatatgactctggagtagattgtaattagttaagatacatgttgcaaaattgagaacatcctcaaagaaaataatttaacaaaaaagaaaaataartgatacactagaaaatatcaatctaacaaaaaagaagacagtaaaagaggaagcaaaaaagagaaatgacctgagccatatagaaaacaaatggaaaaaattgaagacataattttaattacactaaaaattac

SEQ ID NO: 444106 - DNA, 593 bp, Homo sapiens
cctttagctcagagaagtttattactgaccttctgaagcctacttttgtcagctcatcaaagtcattctccgtccagctttgttccattgctgatgaggagctatgatcctttggaggagaagaggtgctctggtttttagaattttcagcttttctgctctggtttctccccagctttgtggttttatctacctttggtctttgatgatggtgacgtacagatgggattttggtgtgaatgtcctttatgttgatgttgatgctattcctttctatttgctagttttctttctaacagtcaggaccctcagctgcaggtctgttggagttcgctggaggtccactccagaccctgtttgcctgtgtatcaccagcagaggctgcagaacagtaaatattgccacctgatccttcccatggaagctgcatctcagagagkcacccagctatatgaggtgtcagtcagcccctactggcaggcgtctcccagttaggctacacgggggtcaggctacttgaggaggcagtctgtctgttctcagagctcaaactctgtgctgggagaacactgatctcttcagagatgtcagac

SEQ ID NO: 444107 - DNA, 539 bp, Homo sapiens
gatattaagttatactctaaattatagtagttaaacccgtgtgtgagcttacagaacgaatcaaagagagtaatgaaacccaagagagcataaacatgaaacatagaatattctactagtagcattcaagtgcagggaaagtttgaactggtcaactaagggtattgaaacaactgattctctatttagaaaaaaatgttaaattcctacctcacaacatgcagaataatatattctagatgaattacggagctaaatataaaaamcaacaacaacaaagaccttagaaaacactaaaaaaaaggagaatagattgtattttaaaatttggcgatggactacgggttttgaagcaataaaagatacagcaaggaaatttcaggaggtctgactacacaaaaattgaaatctatggaccaagaagacctcataaattaagtcaaaatgcaggcaacaaaatggcttgagctcctaaaaaattacttctcaattaattgtcctgtgacattagccttcttgaaaaggtagagatttgtaaa

SEQ ID NO: 444108 - DNA, 539 bp, Homo sapiens
gatattaagttatactctaaattatagtagttaaacccgtgtgtgagcttacagaacgaatcaaagagagtaatgaaacccaagagagcataaacatgaaacatagaatattctactagtagcattcaagtgcagggaaagtttgaactggtcaactaagggtattgaaacaactgattctctatttagaaaaaaatgttaaattcctacctcacaacatgcagaataatatattctagatgaattacggagctaaatataaaaaacaacaacaacaaagmccttagaaaacactaaaaaaaaggagaatagattgtattttaaaatttggcgatggactacgggttttgaagcaataaaagatacagcaaggaaatttcaggaggtctgactacacaaaaattgaaatctatggaccaagaagacctcataaattaagtcaaaatgcaggcaacaaaatggcttgagctcctaaaaaattacttctcaattaattgtcctgtgacattagccttcttgaaaaggtagagatttgtaaa

SEQ ID NO: 444109 - DNA, 539 bp, Homo sapiens
gatattaagttatactctaaattatagtagttaaacccgtgtgtgagcttacagaacgaatcaaagagagtaatgaaacccaagagagcataaacatgaaacatagaatattctactagtagcattcaagtgcagggaaagtttgaactggtcaactaagggtattgaaacaactgattctctatttagaaaaaaatgttaaattcctacctcacaacatgcagaataatatattctagatgaattacggagctaaatataaaaaacaacaacaacaaagacyttagaaaacactaaaaaaaaggagaatagattgtattttaaaatttggcgatggactacgggttttgaagcaataaaagatacagcaaggaaatttcaggaggtctgactacacaaaaattgaaatctatggaccaagaagacctcataaattaagtcaaaatgcaggcaacaaaatggcttgagctcctaaaaaattacttctcaattaattgtcctgtgacattagccttcttgaaaaggtagagatttgtaaa

SEQ ID NO: 444110 - DNA, 457 bp, Homo sapiens
actgccttaaaattatcatgatagtaagttggtgtactaataggcatagtaacatgaacgacaaaagtcagcccatcctccctcctgtcagccgcaggcttctgtcttcacagcggcaagggccacatcctcacacacacacttttcccttcttctgtccccccaacccccaagacagtctggtggccaggatggcttcaggcccacacctggcttcacaagaagcgggaaaagcagccatctggaatttccagctcctgtgggaaggggcgccctgtcagcgaagcagtgggcatagggacggaccgtagcagggtggacaccaacagtctctcaccaccatcccccactctgtcctccccaggccccagcaacaagggggaggtgcctccatygtgcacaaacggaaaagcaggttttactacattgaatgcaataaggaaaatcagcaagtaaa

SEQ ID NO: 444111 - DNA, 509 bp, Homo sapiens
agctaggactacagacatgtgccaccattcctgacttgtttgtctttttgttgttgcattgtaggagttctttatatattctgcatatcaattccttatcagataaatgatttgcaaatatttttccccattctgtcggttgtctttacactttgttgatgtgttctttgatgcacaaaagtttttaattttgatgaaatgcaattaatctgttttttattgctttgctttgatgtcatatccaagaaattatttccaaatscaatgtcatgcaggttttttcccagtaagttttctagtttagttttatgtttaggtctctattccattttgggttaatttctgtagatggcgtaaggtaagggttcaacttaattccttgcatgtgaatatccagtttcccaggaccatttgttgaaaatcctatcttttccctattgcatggtcttagcatccttgccaaagtatacacatgagggtttatttctggaccctctatttgattccat

SEQ ID NO: 444112 - DNA, 509 bp, Homo sapiens
agctaggactacagacatgtgccaccattcctgacttgtttgtctttttgttgttgcattgtaggagttctttatatattctgcatatcaattccttatcagataaatgatttgcaaatatttttccccattctgtcggttgtctttacactttgttgatgtgttctttgatgcacaaaagtttttaattttgatgaaatgcaattaatctgttttttattgctttgctttgatgtcatatccaagaaattatttccaaatgcaatgtcatgcaggttttttcccagtragttttctagtttagttttatgtttaggtctctattccattttgggttaatttctgtagatggcgtaaggtaagggttcaacttaattccttgcatgtgaatatccagtttcccaggaccatttgttgaaaatcctatcttttccctattgcatggtcttagcatccttgccaaagtatacacatgagggtttatttctggaccctctatttgattccat

SEQ ID NO: 444113 - DNA, 509 bp, Homo sapiens
agctaggactacagacatgtgccaccattcctgacttgtttgtctttttgttgttgcattgtaggagttctttatatattctgcatatcaattccttatcagataaatgatttgcaaatatttttccccattctgtcggttgtctttacactttgttgatgtgttctttgatgcacaaaagtttttaattttgatgaaatgcaattaatctgttttttattgctttgctttgatgtcatatccaagaaattatttccaaatgcaatgtcatgcaggttttttcccagtaagttttctagtttagttttatgtttaggtctctattccattttgggttaatttctgtagatggcgtaaggtaagggttcaacttaattccttgcatgtgaatatccagtttcccaggaccatttgttgaaaatcctatcttttccctattgcatggtcttagcatccttgycaaagtatacacatgagggtttatttctggaccctctatttgattccat

SEQ ID NO: 444114 - DNA, 553 bp, Homo sapiens
atcacagagcaattacaaaccacaacagaacgttgtcagaaatggacatgacttttatcagcaggcagtcttctgacagaacttactyaaccctctcctttaaagggtctcttgaaatctctgggttcctccctcccgaaagtgagaaaagcctgtcagataaggaaattttcaggaatgccttatttaaacaacagcgccactgacagaagtgttacacaacaactaacaatagatggtatttgaaaagaaaaagtgctccagagaagatcaggcaaactagtaaacatctgcaggaagtgaattctcctccccagttgtagagactcatcttgctgtcagagaagagagaggtaagatttagcagtgttagataagggaaggtataggaagtccaaaattgtaaccttcaaactattttggattctgagaacaagatagtactcaacataattaaaattttcggaaacttaaagtgggccaaggaaaagcaattgattgcttacagtgcacaccatgaatccacaaaactgaaatttacccccagaaatag

SEQ ID NO: 444115 - DNA, 553 bp, Homo sapiens
atcacagagcaattacaaaccacaacagaacgttgtcagaaatggacatgacttttatcagcaggcagtcttctgacagaacttacttaaccctmtcctttaaagggtctcttgaaatctctgggttcctccctcccgaaagtgagaaaagcctgtcagataaggaaattttcaggaatgccttatttaaacaacagcgccactgacagaagtgttacacaacaactaacaatagatggtatttgaaaagaaaaagtgctccagagaagatcaggcaaactagtaaacatctgcaggaagtgaattctcctccccagttgtagagactcatcttgctgtcagagaagagagaggtaagatttagcagtgttagataagggaaggtataggaagtccaaaattgtaaccttcaaactattttggattctgagaacaagatagtactcaacataattaaaattttcggaaacttaaagtgggccaaggaaaagcaattgattgcttacagtgcacaccatgaatccacaaaactgaaatttacccccagaaatag

SEQ ID NO: 444116 - DNA, 488 bp, Homo sapiens
tttgaacatcagaagagtaattctagtaaatttccaggtcatggtaactctatatttgtagaagttcaccattcttcagattaaaactaatattttgtgttgtgtgattctggacwttttagacaaatagataatctatatatttacatggattctatggtgaaacataatccaaaaatgttatatagtatttttaagactaacatacagtttacttgactctttttggtgtgaagttctataaatttaacatatatatatattcatttaaccgccaccatagtgagtatacagaataatgtcatcaccataaaataatccttcatgctatccacttgtagtcaaacctccctccacatttcctgacaccactgataagtcatatttttgtttttgtgaaaattccatagaaatggaatcatacaatgtgtaaccttttgagtctggcttcattcacttaacatgatgcttctgtgattcataaaagc

SEQ ID NO: 444117 - DNA, 601 bp, Homo sapiens
atacaggctaaataaagaattctataatattgttatatatatagtatatatttgtgtctttataaatcattatataaggttawtgatctatatgttcagctaaaacatagctaaattataaatgtaaaggttgagagtaaatgtctctttaaaattgctatagttttgcccatattcgtgagtgctccattatgcactttataagcaagaaagtgttaccatccttcctttaagtttgaagatcactttctgaattaaattatgagtctggaaattgtgtttagatgtttgaacacctaattgattatgctacatttatttgatcatggttgaaatgtaattttactgcttggttggtgacacttttttgtaaagtattaaattgatttgctgcttaggagagaatcactttttaaaaacaggttttcaggaatcttccaggaagaaaagcacatattttgattcttattatttttaacaaagagtgaaaatagacagtgagaaacctaggaagtaatgagaaagcaagtcttgaactgaatttaaaacataaaatcttatttgatattgtaatttttgcaaagatgttttagctactgca

SEQ ID NO: 444118 - DNA, 578 bp, Homo sapiens
tttttattcatttctccttattctttctctgtgaatgactttgaaatcatcatccgttatggttgctaccaccatcacctgcatttcagctgctaggaacgagacaataggtagacaaggaaaagaataaatattacacatagttcttccgcttatattcccataataaacccttttgcctataaggtatgatatagctggaagagatacttagaagtatctattcttgttaacaaggtaatcagctgaaatataatgtggtacagaaattatatccaaatttatcatattcttgttgtctactgaaaaacagattattgaatacgtggtaagcaccagagagaaaactraaagagatttaaaatgctcaaaattaaccaaacctgaaaatataccaagtcatgaaaattgctccacttgtcacctacattttgatattaacaggtcaattcagttttcatcttacttggcccctatctctcagtttgtttatctttctctttatctcccaatctctttatttgggagtgtttcagggattagtctttgattctcttctctttcacctacatttacta

SEQ ID NO: 444119 - DNA, 551 bp, Homo sapiens
taaagtggtttttttctaattctttgaagaatgtcaatggtagtttaatggaatagcattgaatctataaattactttgggcagtatggctatttcacagtattaattcttcctatccctgtgttgggaatgagcccccaaaatctggccataaactggccccaaaactggccataaacaaaatctctgcagcactgtgacatgttcatgatggccatgacacccacactggaaggttgtgcatttaccrgaaagagggcaaggaacacctctctcacccagatcggaaaacagcttaaagtcgttcctaaaccgcaaacagtagcatgagctatctgtgccttaaggagatgctcctgctgcagataactagccaaatccatccctttattttggcccatccctttgtttcctgtaaggaatacttttagttagtctataatctatagaaacaatggttatcactggcttgctgtcaataaatacgtgggtaaatctctgttcaaggctctcagctctgaaggctgtgagacccctgatttcccactcca

SEQ ID NO: 444120 - DNA, 551 bp, Homo sapiens
taaagtggtttttttctaattctttgaagaatgtcaatggtagtttaatggaatagcattgaatctataaattactttgggcagtatggctatttcacagtattaattcttcctatccctgtgttgggaatgagcccccaaaatctggccataaactggccccaaaactggccataaacaaaatctctgcagcactgtgacatgttcatgatggccatgacacccacactggaaggttgtgcatttaccagaaagagggcaaggaacacctctctcacccagmtcggaaaacagcttaaagtcgttcctaaaccgcaaacagtagcatgagctatctgtgccttaaggagatgctcctgctgcagataactagccaaatccatccctttattttggcccatccctttgtttcctgtaaggaatacttttagttagtctataatctatagaaacaatggttatcactggcttgctgtcaataaatacgtgggtaaatctctgttcaaggctctcagctctgaaggctgtgagacccctgatttcccactcca

SEQ ID NO: 444121 - DNA, 560 bp, Homo sapiens
cgtgggtaaatctctgttcaaggctctcagctctgaaggctgtgagacccctgatttcccactccacacctctaaatttccrtgtgtgcatctttaattcctctagcgctgctgggttagggtctccctgaccgagttggtctcagcactctgaacatggattgtttttccatttgtttgtgtcctctctgatttccttgagcatggtttgtagttctccttgaagatgtcctttaccacccttgttcactgtattcctaggtattttattctctttgtagcaattgtgaatgggagttcattcatgatttggctctctgcttgtccactgttggtgtatgggaatgcttgtaatttttgcactctgattttgtatcctgagacatgtctaatatttttaccttctacaaatgtcttatttactctctctctctctctttgtgttgaaacaggctggagtgcaggacaggatcatggcacattgcagcctcctcaaactcctgggctctgcccacctcagcctcttgagcagctaaaatcaaagtcatgtgccaccatgc

SEQ ID NO: 444122 - DNA, 560 bp, Homo sapiens
cgtgggtaaatctctgttcaaggctctcagctctgaaggctgtgagacccctgatttcccactccacacctctaaatttccatgtgtgcatctttaattcctctagcgctgctgggttagggtctcccygaccgagttggtctcagcactctgaacatggattgtttttccatttgtttgtgtcctctctgatttccttgagcatggtttgtagttctccttgaagatgtcctttaccacccttgttcactgtattcctaggtattttattctctttgtagcaattgtgaatgggagttcattcatgatttggctctctgcttgtccactgttggtgtatgggaatgcttgtaatttttgcactctgattttgtatcctgagacatgtctaatatttttaccttctacaaatgtcttatttactctctctctctctctttgtgttgaaacaggctggagtgcaggacaggatcatggcacattgcagcctcctcaaactcctgggctctgcccacctcagcctcttgagcagctaaaatcaaagtcatgtgccaccatgc

SEQ ID NO: 444123 - DNA, 592 bp, Homo sapiens
gttttactattatcttgttatgcaaagcaaaaccaaagactaaggaaatgagaagaggaaaggagatttattcagagcttcctctctagtaagggaatcagcaactttcacttgagttttggcagagactcaaaggcaggcagagaaatgggaaaatattacagtgraaaaacagataaggcttcaggtatataagattggaggccattggcatgcggaagttgtagatatcaactaaaagatggacatactatgttattggtgaggagtgcatattttgctttctctggttggtccagagaattggaagtgggatcaaaaattaggaaggcaaacagttcttaatgacattctaaccattttgtgccaatagttacaaaagtcattatttagtttgcttgattgttactagaaacagtagtctgacttcctgcaattctgacttttagcaggctggcttcttggttattttagataagagtttggttttatgaacacttgacacagggtacaggtcaaaattctacttttatatatggtctgaccatttttcatttgtatgcttagtctctcagcatgctcatgaccaagg

SEQ ID NO: 444124 - DNA, 592 bp, Homo sapiens
gttttactattatcttgttatgcaaagcaaaaccaaagactaaggaaatgagaagaggaaaggagatttattcagagcttcctctctagtaagggaatcagcaactttcacttgagttttggcagagactcaaaggcaggcagagaaatgggaaaatattacagtgaaaaaacagataaggcttcaggtatataagattggaggccattggcatgcggaagttgtagatatcaactaaaagatggacatactatgttattggtgaggagtgcatattttgctttctctggtyggtccagagaattggaagtgggatcaaaaattaggaaggcaaacagttcttaatgacattctaaccattttgtgccaatagttacaaaagtcattatttagtttgcttgattgttactagaaacagtagtctgacttcctgcaattctgacttttagcaggctggcttcttggttattttagataagagtttggttttatgaacacttgacacagggtacaggtcaaaattctacttttatatatggtctgaccatttttcatttgtatgcttagtctctcagcatgctcatgaccaagg

SEQ ID NO: 444125 - DNA, 592 bp, Homo sapiens
gttttactattatcttgttatgcaaagcaaaaccaaagactaaggaaatgagaagaggaaaggagatttattcagagcttcctctctagtaagggaatcagcaactttcacttgagttttggcagagactcaaaggcaggcagagaaatgggaaaatattacagtgaaaaaacagataaggcttcaggtatataagattggaggccattggcatgcggaagttgtagatatcaactaaaagatggacatactatgttattggtgaggagtgcatattttgctttctctggttggtccagagaattggaagtgggatcaaaaattaggaaggcaaacagttcttaatgacattctaaccattttgtgccaatagttacaaaagtcattatttagtttgcttgattgttactagaaacagtagtctgacttcctgcaaktctgacttttagcaggctggcttcttggttattttagataagagtttggttttatgaacacttgacacagggtacaggtcaaaattctacttttatatatggtctgaccatttttcatttgtatgcttagtctctcagcatgctcatgaccaagg

SEQ ID NO: 444126 - DNA, 542 bp, Homo sapiens
ccaattgcactgtgataagtattcataaaaaccacattccaataactggtttcatgtgaacaattctyatttaaactttcagcaagtctgcttttatgtaagaattatatgcccagaagaacaagcacattgataactagctaggtcaaaaaccaaccaaactaggggacataatatcatgaaagtaaggtaaaacaaacaactcaaaggtaattccccatgcgaagaaacacagtgtaagttaaatcctattaaaaaactagactatttttatttttgttatattttttcacaaaattaactgttccaatttaaaattttagtaagttaacgtgcaagtttaattaattcgattagtctatactcatatttgcatacaaaatataatttcagaactgcaaattgtttttagaatttgaaagtctattagaaattgctgtataaccctcagcattacaaatggggaaacggaaagccaataaagtaagtggtgtatctcacaaacttacaaccagtgaaatgacagttaagccacagatttt

SEQ ID NO: 444127 - DNA, 542 bp, Homo sapiens
ccaattgcactgtgataagtattcataaaaaccacattccaataactggtttcatgtgaacaattcttatttaaactttcagcaagtctgcttttatgtaagaattatatgcccagaagaacaagcacattgataactagctaggtcaaaaaccaaccaaactaggggacataatatcatgaaagtaaggtaaaacaaacaactcaaaggtaattccccatgcgaagaaacacagtgtaagttaaatcctattaaaaaactagactatttttatttttgttatattttttcacaaaattaactgttccaatttaaaattttagtaagttaacgtgcaagtttaattaattcgattagtctatactcatatttgcatacaaaatataatttcaraactgcaaattgtttttagaatttgaaagtctattagaaattgctgtataaccctcagcattacaaatggggaaacggaaagccaataaagtaagtggtgtatctcacaaacttacaaccagtgaaatgacagttaagccacagatttt

SEQ ID NO: 444128 - DNA, 453 bp, Homo sapiens
tgaatcttaaaataataattacttaatctttgtcaccaactggggatgacacaatcagagtagtccaagttttaaatattgggcatttctttttacagagatgagattcgaaaagatcaaactccgatttaaacatttgatgccggtcatacacacatttatcttacgttacaatctctttgccacatccagtaattttcccagtacattattcatcatttttctccagttttcaagatgttcgtgtattccaatattctgtttaattcaagtactgtaataaatactaagttttactcctttaactgcctctccaaattatgtaaatgrtattaactcacagcatggctttttcaacacaatttgttaaatcttttcttatacccaatcaactactcttatcttaaatgtcttcctagcttgtcttcttcgcccactacatatttggtgttg

SEQ ID NO: 444129 - DNA, 453 bp, Homo sapiens
tgaatcttaaaataataattacttaatctttgtcaccaactggggatgacacaatcagagtagtccaagttttaaatattgggcatttctttttacagagatgagattcgaaaagatcaaactccgatttaaacatttgatgccggtcatacacacatttatcttacgttacaatctctttgccacatccagtaattttcccagtacattattcatcatttttctccagttttcaagatgttcgtgtattccaatattctgtttaattcaagtactgtaataaatactaagttttactcctttaactgcctctccaaattatgtaaatggtattaactcacagcatggctttttcaacacaatttgttaaatcttttcttatacccaaycaactactcttatcttaaatgtcttcctagcttgtcttcttcgcccactacatatttggtgttg

SEQ ID NO: 444130 - DNA, 546 bp, Homo sapiens
aatctgttcataagtaatgaatggtcaaaaaacttgccactcckcaaaatctaaactgaacctcatagaaataatctctctttttaagcaaaataaactgtaaacaatttattcttattatttaatctgggaacaatatcccagtaatagatgaatataatcttatgaaaaatcggttgctgtctgagaactgtcatactgattatttatttctggaaaactgaatctcagttttggctctgaaatcttaaatagagttctctaagaggtatggtttcattgtaagctgaggtaatgtcaccttaatcatcatgacccttccttgaacaaagaggataaaaatgtttctctgttatgtaaaaaggacaagtgaccacagatagataacctatgattaatggctgctaatttttttcaggggatgttgcaactaaattccaggagaacaacaataatgatagatatttcaggtcaggaattggggaaaacaaattaaaaattcatagtaatgccaaattcataaaattttaaatctcttgaacactt

SEQ ID NO: 444131 - DNA, 622 bp, Homo sapiens
ttacatatctacagccaactgatctttgacaaagtcaacaaaaacatatactggggaaaagacatcctttcaataaatggttttgggcaaagtggattgccatatgtagaagaacgaaactcaaccctaatctctcactatatgcaaaaatcaactcaaggtaagttagagatttatgtaagacctgaaactatgaaaattctagaagaaatcctagaaaacgctctcctggatattggtcttggcaaagaatttgtgactaagacccgtaaagcaaatacaacaaaaccaaaaatagacaaatgggatttaattaaactaaaaaaagcttctccacaacaaattaaataatcaacagagtgaamaaacaactgacattattagagaaactatttgaaaactacggatttaacaagggactaatatcttgaatttataaggagatcgaataacaaccccaaaataagtgggcaaaggatatgaagagacatttttcaaaagaagacatataagttgccaacaaacacttgaaaaaatgttcagcatcactaaccatcagaaaaatgcaaaccacaatgagatatcatcttatacgagttagaatggctattgttaaatagcc

SEQ ID NO: 444132 - DNA, 622 bp, Homo sapiens
ttacatatctacagccaactgatctttgacaaagtcaacaaaaacatatactggggaaaagacatcctttcaataaatggttttgggcaaagtggattgccatatgtagaagaacgaaactcaaccctaatctctcactatatgcaaaaatcaactcaaggtaagttagagatttatgtaagacctgaaactatgaaaattctagaagaaatcctagaaaacgctctcctggatattggtcttggcaaagaatttgtgactaagacccgtaaagcaaatacaacaaaaccaaaaatagacaaatgggatttaattaaactaaaaaaagcttctccacaacaaattaaataatcaacagagtgaacaaacaactgacattattagagaaactatttgaaaactayggatttaacaagggactaatatcttgaatttataaggagatcgaataacaaccccaaaataagtgggcaaaggatatgaagagacatttttcaaaagaagacatataagttgccaacaaacacttgaaaaaatgttcagcatcactaaccatcagaaaaatgcaaaccacaatgagatatcatcttatacgagttagaatggctattgttaaatagcc

SEQ ID NO: 444133 - DNA, 512 bp, Homo sapiens
tattttagacaaatgatagtacttataacaaactacatcgttgtgaatataatttaataacaataataacataatttattaatttattcaaaattatgacatgactctattgggaaaatgaggtaagagaaaatgtatatgtttaattaggtcagaaagagtacaggaagggttaaataattgttattctgagtcagaaagcattaaaaatagttaagctaagcaatgagtaaaatagaaacaatattttaaaatatggaagaaaagagaatamatagtaaaatattgataggagctgcccatgaaaaacaaaaaatataaaatgtagaaataggccgaggacttgaatacacgcttttcaaagatgacatacaaatgctcaacaggtatattaaaaaatgctcagcattacaaagttcaactttgttcagttctactgattttagttacttcttttcttctgctagttcctctgcaatgttaaattgttaatttgagatctatccattttc

SEQ ID NO: 444134 - DNA, 512 bp, Homo sapiens
tattttagacaaatgatagtacttataacaaactacatcgttgtgaatataatttaataacaataataacataatttattaatttattcaaaattatgacatgactctattgggaaaatgaggtaagagaaaatgtatatgtttaattaggtcagaaagagtacaggaagggttaaataattgttattctgagtcagaaagcattaaaaatagttaagctaagcaatgagtaaaatagaaacaatattttaaaatatggaagaaaagagaatacatagtaaaatattgataggagctgcccatgaaaaacaaaaaatataaaatgtagaaataggccgaggacttgaatacacgcttttcaaagatgacatacaaatgctcaacaggtatattaaaaaatgctcagcattacaaagttcaactttgttcagttctactgattttagttacttctwttcttctgctagttcctctgcaatgttaaattgttaatttgagatctatccattttc

SEQ ID NO: 444135 - DNA, 627 bp, Homo sapiens
attcggggagtgagagtgactaagacaaccatatatttattgagcaaagcctcaggatgcctatggtttatcaggaactgtggctcaagggaagatggtcctgctttttgtctataatttactgaagagacatattattaataataatggcacaatagtcacaaatggctctttgtaccaagttgaaagggktcatagaagaaggtgagtttttgtctgcctgagtgcaaagggaacgcttcacataagattaaaaagatatcggggagaaattttatgataatttagttcactttcttgaaaaacacaagcattgtattcctcagattcactgaggaatacagtgcttaaatatgttgataatatttacccagtttattagtgatagttcagaagtatgacttggaccagaaatcatcttaaaacctcagaagttgatagacaccgggcaggatgagggataattaaaatatgcagcgttacatttattctttaagtggagatactggatgagctggagagcaagcagaatctaggaatctagattattgtgggaaatgttagctcggatttttttttcatttactttgttatttgggaaagttatcccaaacaactgtttctcca

SEQ ID NO: 444136 - DNA, 627 bp, Homo sapiens
attcggggagtgagagtgactaagacaaccatatatttattgagcaaagcctcaggatgcctatggtttatcaggaactgtggctcaagggaagatggtcctgctttttgtctataatttactgaagagacatattattaataataatggcacaatagtcacaaatggctctttgtaccaagttgaaagggttcatagaagaaggtgagtttttgtctgcctgagtgcaaagggaacgcttcacataagattaaaaagatatcggggagaaattttatgataatttagttcactttcttgaaaaacacaagcattgtattcctcagattcactgaggaatacagtgcttaaatatgttgataatatttacccagtttattagtgatagttcagaagtatgacttggaccagaaatcatcttaaaacctcagaagttgatagacaccgggcaggatgagggataattaaaatatgcagcgttacatttattctttaagtggagatactggatgagctggagagcaagcagaatctaggaatctagattattgtgggaaatgttagctcggatttttttttcatttactttkttatttgggaaagttatcccaaacaactgtttctcca

SEQ ID NO: 444137 - DNA, 520 bp, Homo sapiens
gtgctttttttcttttcctatttataggtggcatttgtagtcttgttacatcattttaaaaagtaggttagtgtcaaggtagcataatcacaaattaagggctgcgagttttgaattatgcgaagaaatcaagaaagttaatgaagcaagwgggtgctcatatatgtgatcttttcattatgaacaacaaactttgtagtttatttttcatgttttatgtaaaataaactgcatataaaattcatccaactgttaatcacacagctaagaatgagataatctgcaataatttgtatgacattatatcaccaatactaattccatttgttttctgccataattacatttttatttaagttaaattttttgactacagggtttttttgtttgtttgttttaatgcacaagagattatataacccttgatgtggaatcttccagagtctgtaaaaaagccatattttaatctaatagtccagtgactgttgattctgcttcttcctcctattttatgattcac

SEQ ID NO: 444138 - DNA, 540 bp, Homo sapiens
ctgggactctcccttcaggatagcagtttcccttctgacccagggcgggtctacaaatgccatccaggaactaaggcctgaaattgaggacttttaaggctatgcttggtgctttattttattgtgtctgagctagttctcaggttgcaagacaaagttcttttaactcttgtctctcctttcctcaagcaaacatctgtccctgtggccactacagctgggaatgtgttgggtcacacctgaagcaagcacagtactgggcctcacccaaggcccrtgacaattacagcctgtctactgctgatctttatttaaggcccaagggctccttagtcagctggtgatgaatcctgccaggactgggtctcccttcagtgaagagagttctcttctggtctaaagaaggtctaaaaatgtcatacgggagctagggcctgtatgaatggggacttcattcttgaatggagacttcaagcctctgcttggcactttaatgcactgtggctgagctggtacacaggttatgagagaaaagttctt

SEQ ID NO: 444139 - DNA, 540 bp, Homo sapiens
ctgggactctcccttcaggatagcagtttcccttctgacccagggcgggtctacaaatgccatccaggaactaaggcctgaaattgaggacttttaaggctatgcttggtgctttattttattgtgtctgagctagttctcaggttgcaagacaaagttcttttaactcttgtctctcctttcctcaagcaaacatctgtccctgtggccactacagctgggaatgtgttgggtcacacctgaagcaagcacagtactgggcctcacccaaggcccatgacaattacagcctgtctactgctgatctttatttaaggcccaagggctccttagtcagctggtgatgaatcctgccaggactgggtctcccttcagtgaagagagttctcttctggtctaaagaaggtctaaaaatgtcatacgggagctaggrcctgtatgaatggggacttcattcttgaatggagacttcaagcctctgcttggcactttaatgcactgtggctgagctggtacacaggttatgagagaaaagttctt

SEQ ID NO: 444140 - DNA, 585 bp, Homo sapiens
aagcccaagttttatattctgagaaagttcaaatgacttgcccaagtaaaacagaacatttgtgagataagagggagttcaaaacttcattgaataattttgataattataaattatagcctaaaatttgttctagacatatgaaaatttagagatgagatggagcaactggaataaagtctttgaaaaaaatatctgagttgaactagagagttcgatgggaacatataaaaaggaaaagtggtaagttgtaattatttaatgaagctttatggtttacttaatttaaatacttagtaaaagtcagtagttgcattattgagcctcattacattatgttatctgtaatctctctatagcatttgctaaatgtatagttttttggtcttcagaatattgataattcaccaaaatacctaaaaattaatgagatataattgttatatcactcacagagaaggtaaargaaatgagcaaattttgtatggaggactaactttaatatttgtccactttctcaatcacatgagaacattaaaagagctaacatttatttagagctatgtaccagacagagggtttagt

SEQ ID NO: 444141 - DNA, 627 bp, Homo sapiens
cacatggtacaaattccaatctatgcccctggaccttggttaaaaccccaagattctcttctttcttcaaaactgttttatctcactgtttgatgacaatattctttggttgcrttaggtcctccaacccattaatttataatcgccttatccacgagtccctttttttttttaatttatcttctacctaacctagattttatggttcatcttttaagccactgatagcctatttctgcacatttcaaaagttgaataagaatctgagtcactcctaatttttgaggttgtagtaatatacaagatgtaaatgccaaatagtgagtgaaaaaattggtttattgtttgtatttaatgtaaacaaagtttgtgcttaacaaattaatgaagtgaactataaatgcaacaaaaacataattttccattgaaaaagttattgcagagtttgcaaaaagtatgtcctctgcagatattatagtctaacagtgagatttaaagtttaaactattgagatgaatgttttctttgaaaattttctagagtttgacatgggcataccttttcattcagaataaacatcagatatctctccttgaggtccacttgtgtattacataacaatgatgc

SEQ ID NO: 444142 - DNA, 627 bp, Homo sapiens
cacatggtacaaattccaatctatgcccctggaccttggttaaaaccccaagattctcttctttcttcaaaactgttttatctcactgtttgatgacaatattctttggttgcattaggtcctccaacccattaatttataatcgcyttatccacgagtccctttttttttttaatttatcttctacctaacctagattttatggttcatcttttaagccactgatagcctatttctgcacatttcaaaagttgaataagaatctgagtcactcctaatttttgaggttgtagtaatatacaagatgtaaatgccaaatagtgagtgaaaaaattggtttattgtttgtatttaatgtaaacaaagtttgtgcttaacaaattaatgaagtgaactataaatgcaacaaaaacataattttccattgaaaaagttattgcagagtttgcaaaaagtatgtcctctgcagatattatagtctaacagtgagatttaaagtttaaactattgagatgaatgttttctttgaaaattttctagagtttgacatgggcataccttttcattcagaataaacatcagatatctctccttgaggtccacttgtgtattacataacaatgatgc

SEQ ID NO: 444143 - DNA, 627 bp, Homo sapiens
cacatggtacaaattccaatctatgcccctggaccttggttaaaaccccaagattctcttctttcttcaaaactgttttatctcactgtttgatgacaatattctttggttgcattaggtcctccaacccattaatttataatcgccttatccacgagtccctttttttttttaatttatcttctacctaacctagattttatggttcatcttttwagccactgatagcctatttctgcacatttcaaaagttgaataagaatctgagtcactcctaatttttgaggttgtagtaatatacaagatgtaaatgccaaatagtgagtgaaaaaattggtttattgtttgtatttaatgtaaacaaagtttgtgcttaacaaattaatgaagtgaactataaatgcaacaaaaacataattttccattgaaaaagttattgcagagtttgcaaaaagtatgtcctctgcagatattatagtctaacagtgagatttaaagtttaaactattgagatgaatgttttctttgaaaattttctagagtttgacatgggcataccttttcattcagaataaacatcagatatctctccttgaggtccacttgtgtattacataacaatgatgc

SEQ ID NO: 444144 - DNA, 610 bp, Homo sapiens
cacaagaaagcttatttctctttgtaattttatttctctttctttctttaatttcatgcctcaactgaatcacagtctaactgctccctctttccatttcctcataggtgttatttctaagagaacgccccccacaaaaactctacatacagatagcagactctcagtgcctgttttcaggaagcctgacttgatatatttgttttcttataactttccaatttkgtgtgatttctcagagattatatataagcagtggttctgataatgatttaacactatccatcttggcatttttttccctttccataatgccaacgtattctgggattccttcctcctgactgttacttcctctttgtctatcttatggactcttccgtatttgacttattgctgattttgacatattgtggggttcaatctttacctctcttctctcttctatgttctctttctttatagacaatgcatgtattgaggatttctaagtactgcatatactaacatcctttctcagcttagacctctatatccaactgttattgacaatcttatttgtatgtctgataggtattctgaactcagcatgcccaacacatactatgtg

SEQ ID NO: 444145 - DNA, 581 bp, Homo sapiens
aaataatgccttcagcaagaacataaacaaagatgaagatttctccaatagtacttttgtaaaagtaattcttgaaaatggatcattctttttcatattctatgttataaagaaaacatsagaaatcaaagggagaagaatatacacacgaaaatacagaaactaagggttataattaccttagtgaagagaatgctgagttgtctcagttgtactttacaatccttgtgcctctttccttctctctctctctctcgtgtgtgtgtgtatgtgtgtgtgtttgtgtgtgtatgtgtgtgtgtatacacacagacataacccaaatatacatttggatacatatccaaactgctatatacaaaatatgttatgaatattctgttgaaacatatacaagtaaatttgtatagacttatttacatatacatataattatgtatacatgctgtaggaagtttgagggagctggggcctgagtaggggaaaagaggtaaccactaggtggcagtatcacaagcaagcctcattgggtgctactttgacattgcttgcaggagaagttactcacgcagaagttggta

SEQ ID NO: 444146 - DNA, 522 bp, Homo sapiens
ctgtgaaaaagacagtgtatacctattaaagcaagtggctgcttaaggtcataatgcctgtaaagaaaaactgcagtgagtaaaaactcaggtgaaataataaagccatttaatttcagagaatgaattacatttagaaccagaacagattcaaggcattttacaatttcctcagcccaaaagaaatgccaactttgtgagtgggtttcttggactcactggctacttttgaaactgaattcccaacttttcttttctggcccaactcctrtgtgctttacataaatttaccaaacctgaccccattacttggacaaaatcataagggtaagtttttaaaaagctaaaggagaaattgataaattctccagttctaggtaattctaatcataaactcttttttttttctctttgtctgtgaaaaggaagaaaatacttcagggatcttaacccaaaagcatggaggtccacaccatcctccaggatactacagttgacaactggatcccatctcctgtggat

SEQ ID NO: 444147 - DNA, 584 bp, Homo sapiens
ctcctaaaccataatttctaatcttttttttttttttttattttgacagagcctcactctgtcgcccatgctagagtrcaatcatgcaatcttggctcactgcaacctctgcctcctgggttgaagcgattctcctgcctcagcctcttgagtagctgggattacaggtactcaccaccatgcctggctaattttgtatttttagtagagatggggttttgccatggctggtcttgaactcctgacctcatgtgatccacccaccttggcctcccaaagtgctggggttacaggcatgagccactgtgcccagcccataatttctaatcttgtggctaatttgttagccctaaaaaggcagtttagtccccacacaaggagggaatttgcctttggaaaagcctgttctcattctttgttttaaactataaacaaagttcctcccaaagttagttgtgcctatccccaggaatgaacaaggacagcttggaagttaaaaacaagatggagttggttaggtcacatctctttcactgtctcagttacaattttgcaatggtggtttcaatctctccttttgggtt

SEQ ID NO: 444148 - DNA, 615 bp, Homo sapiens
agccaccctgcattatataatctggagaatgccctcagaagaaaagccaattaaatgtgaatctaacctggtgatttccttcttgcaaggttaattccttccgttttgtacctgcttttggttatgctccaaagccttcaaacaaaaatttttccccagagtttccctcccaataatttaaaattattaaaatgggaggctcagactgagacaagatgctttgccattactgcaatagaaattctattaccttgctgtatattttctgtttatcctgcctgttttttgttcctttttctctgttttcttgtcttcttttaaattattgttcaaattttgcacttctattggcttgttagttatacattttattctcttagttcttactttagacattataatgtatatcctttacttattaaagcccaatatatttttatatttttaccatttcatagtaaatgcaaracgtgtagaacactttaactccatttgctccactcctgccttttgagttagagttttgatgcattttaatacaacacacattttaaacctcacaagacatccttactattgcttttagtaagcaatattcttttagattattcacat

SEQ ID NO: 444149 - DNA, 646 bp, Homo sapiens
tatgctacattttactggtatgcctacatatgttttcatttttgttgttttattttattattattgtttattgtttttatttttttgtgaagacaaggtatcctatcttgcctaggctggtcttgaactcctaagctcaagggacccccctgccttggcctccccaagtgctgggattacagatatgagctactgtgcctggccagttttattattttttaacttcaacttttattttagatacaggggtacatgtgcatgttcattacatgggcattacacccaggtagtgagcattacatatggtttcctttgtatttatcctccttgggtttcaatgagytctttggatctctgggaaaagtcttaaccatcatcttttcaaatatttcttctgccacattttctttcctttctcattcttgactttcaattttagatgttataccattttctattgtactccatttaccaaatgcattatttcccccatcttgtgtttcagtctgtgtaatttctgttgacatggctacaaattcattggttctttcttctgctgtgttcgatctgctgaggagcccattgaaaaatttttttttctgtttcaaaattagttattctcttttttgatatatatttaaggcat

SEQ ID NO: 444150 - DNA, 646 bp, Homo sapiens
tatgctacattttactggtatgcctacatatgttttcatttttgttgttttattttattattattgtttattgtttttatttttttgtgaagacaaggtatcctatcttgcctaggctggtcttgaactcctaagctcaagggacccccctgccttggcctccccaagtgctgggattacagatatgagctactgtgcctggccagttttattattttttaacttcaacttttattttagatacaggggtacatgtgcatgttcattacatgggcattacacccaggtagtgagcattacatatggtttcctttgtatttatcctccttgggtttcaatgagctctttggatctctgggaaaagtcttaaccatcatcttttcaaatatttcttctgccacattttctttcctttctcattcttgactttcaattttagatgttataccattttctattgtmctccatttaccaaatgcattatttcccccatcttgtgtttcagtctgtgtaatttctgttgacatggctacaaattcattggttctttcttctgctgtgttcgatctgctgaggagcccattgaaaaatttttttttctgtttcaaaattagttattctcttttttgatatatatttaaggcat

SEQ ID NO: 444151 - DNA, 491 bp, Homo sapiens
gtccagctaatttttgtaattttagtagagacagggtttcaccatgttggccaggctggtcttaaactcctgacctcaggtgatccacccaccttggcctcccaaagtgctagggttacaggcgtgagccaccacacctggcccaaaacagtagagtttttaacaaatatttaaaggctaagtgtgggctggtatgatggtctrcaattggagcctcagccacagagaacttctgtagccaccaaccttctctttcccaagaatcttcaccaaggactcatgggaaagatggggcagagatggggcagaaccagagatctgagagagagcccctgaggtgtgctggcttgatgaaatctgaagacagggcatgaaacctgagagtcatgtatctgaggtttttattattttttcctcttgggaaacaggtgagattaacagaccatgaaagataatggctccagttctcactttgtcttatccatgtgctt

SEQ ID NO: 444152 - DNA, 642 bp, Homo sapiens
ctccttaatcttgactagactttttattttttgtctttcattttagaaactctggtaggtgtttagtggtatctttaacccctcttaatatttactggtcattcgaatattctcttttatataaaattccttgtccaaatttcccatccatttttctgttgatttgtaggagttctttatatattctgaagatgactcttttgttggttacatgtgctgtaaatatgttgtctcaccctgtggcttcccttttcactctttataatcatgtactttgaatacaagtttttaattttaatgtagacaaatttattagtctattattttatgatgggtgtgtttctgttccaattaagaaatatctacttacctctaggtcatgaagatagtcatatattttgttctagaagccttgtcattttgtccgtcacatttagatgtataatyacttggaatattttttcctaaatgttgcaaggtagattcatattcaatttttaaaattaaattaaatatggatagtcaatggatgcagaatgatttcttgaaacaaaatccccttgtgaatttgctactctgacatatctgaccaggccaagggctttagctttcaccttcatggctggccagaaggaaggaagt

SEQ ID NO: 444153 - DNA, 628 bp, Homo sapiens
atctcctttggcagcaccctcacagacacacccaggatcaatgctttgcatccttcaatccaatcaagttgacgctcattattatccatcagagatggggtctcactatgttgcccagttggtctcaaactcctggactcaagagatctacccaccctcagcctctcaaagtgctgagattgcaggtgtgagccactgcactagcctgggtgcagtacaagcagcattcttgtcaggctggctgcgaatctgtctccacatggacaaagacgcttcatccccgaacttgagacagaggcctttccatgcctcagcgtctgagtcaaacaggctcccaagactcccagaaggaggacttccccttaactgccctcatacctcatagccccattgtgctcagccatctataatcatgtttttacagttctgtgggaaggattagtggctaagtatagggaagtctctgagggaatttttaaggcacggctttatataaaggtgaatgctagttccacaataaaatctaaataaaatktaaatggttaactaaagttgtatactcaaaattacatttaaaatttaaaaattaaaaatttaaatgagatcaaaataaaattaaaataaaatt

SEQ ID NO: 444154 - DNA, 502 bp, Homo sapiens
ctcacagttccacatagctggggaggcttcacaatcgtggtggaaggcaaaggagaagccaaggcacgttgtacgtggcagcaggcaagagagcatgtgcaggggaattgccctttataaaaccatcgtatctcgtgagacttattcactatcaygagaacagcatgggaaagactccccaccccaattctgttacctcccactgggtcccacccatgacatgtaggaattatgggagctacaattcaaaatgagatttgggtgggtacacagccaaaccatatcatggggggtgttgcttttgtcagtttttggaaaactgtcagccattgtctcatgaaatattactcctaaactgcttttttttttcttttctctttctgaacttcaattacatatattttttgtcttttgaatatgttccaacatttcatatgctctttttctcatttttcattcttatttctcaccatgctttaatttatctgtctcttttcatcct

SEQ ID NO: 444155 - DNA, 580 bp, Homo sapiens
gtttttggtcccactctattaaaaccagaaaaagagactggtaatatagcagttcatactgtgtaccagaatcagattgtagaattaattcttctggaactgagttccatcttcggacgttgattcttactgaagacaacctgtggaatagaagctggattccatcagatttcaaatgtttatacacaatgtattttattttttggaccaagcagtgactctttgattttgcactttttttttgagggatcacaagggaaggggagagtcgagatgtgtgttargccctcatatttgctgctttgttgcaagttgatataactgcgtgtaattatgaattcattttatcctgaatgtttgcctttcatactctgaatttcagtaaaaatcaaaacttaaaattctaaccagtcctatacactggataatttggtaagaaaactgttttgtttttccctgaaattggataatgtactttcttctcaagattcatgacttgatagaacaatactttcagttatgttgcaaaggctcttgggccttttaaacaaaatgaagtatatcattttgaaacctgtgt

SEQ ID NO: 444156 - DNA, 553 bp, Homo sapiens
tgcttggctaatttttttatttttagtagagacggggtttcaccatgttgaattacataaattacacacccaacctttgtgtagataaatgatttttttgcttattccttatgtccttaaaaatatgataaatattctgccatatattaaaagttttgttttctaaactgaaccacctcactgatagtatagagctatcacttccagcttcaaattttctgctatgggccaggtgcagtggctcacacctgtaatcccagcactttggagatggaggcgggtggatcacctgaggtcaggggttcaagaccagyctggccaatatggtgaaacccttctctactaaaaatacaaaaaattagccaggcatggtggcgggtgcctgtaatcctagctactcgggacgctgacgcaagaggatcgcttgaacctgggaggcggaggttgcagtgagccaagatcgtgccatcacactccagcctgggtgacaaagtgacactccatctcaaaaacaaaacaaaacaaaacaaaacaaaaaaccaacaaaacaaac

SEQ ID NO: 444157 - DNA, 640 bp, Homo sapiens
taaaataattcaatcacatagtgtgtactatttagtgtctggttcattcacattgccattcatttctactttcttttcttatacttagccttttcataagcaggcctagaaggatctaggggtctgagaaccaaggtgtttcaactccagacccatctgttttgactatggctaagtagcacagtacctatgacatgccagatctctgaattagaattttacttgaaccatttactggttatgttgttcctttcaccctttgaaatcaactacctccatcctaggtcaattcatattcttatatcagggtaaccttagaagagtgtgtgtgtgtgtgtgtgtgtrtgtgtgtgtgtgtgtcactgctttagccccatgggaaattatttctgctattatgagggaaatgattgttgagagttgtggttatgttagggaagtctttatttcaggtgttcaattcagcatttaattcctagttgtcgttgctgccaatacgttataggagtggcaggtctcagaggcaggggaattatgtgtgtgcaatgcctcagagcagtgtttcctgaccttttccgtaagtgccacggtaaaacatgatcatatttatatggcaaactggcataagtggaagagatat

SEQ ID NO: 444158 - DNA, 527 bp, Homo sapiens
agactccgtctcaaaaaaaaaaaaaagaacaagggcaataagaaaataggaaagcacaattatataaaatacagtagacacttttgaatctttttaatatatgcctacaaatacattttattaatagtgtaaatttaatttcctctgagaatttattcaaagaagttctatctgagtttgtgctcagaaaatgccaggatgattccttgtcacaatgtatttggtgtttaaagttccctctaatttacacagcaagacaacattcaattttctacacttctgcttaagcatatgtaaaagaaacacactcctcatgagatatgtttacaaatataaatggaatagtcacagtggagcatgaataaaccattacatggttatttctctacagtggatgctaaagagagaatcaagtccaccataataagaaataaactaagagttgtagttaaaacataataaaaatcttcttaaacgyttctttactttgccaattttctcatccaaatagggataattaaataatc

SEQ ID NO: 444159 - DNA, 539 bp, Homo sapiens
aaaacacaaagcctattattaaagagttcaacagatggttactgtgttatcacagatgtacagaaaacctctttgttctaaaaaaagaaaaaagaaaaaaaaaaagattcctgtcctttctcagactgtctcgattaggtcaaattcactaactccacagcaggcttctctctggttccacatattgagtcagyagggagcacagcctcgggaatcgaatcacaaacagggaagggggtgcccataccttcttcaggccacgtctggatgttcatctggatacggcgctattccattcttcccatttcatcacctgtcttttcagttcttaatgtaccttaacattatcttaatgagaggttaaataatgcttttatttagaaggtaccaaaagttcatcttgttatgaatctgaattgatctgtgcattgctatctagagggaatgctttggaaaaagtacattttactcacagtgaacataagcagtgatggtcaatgtaaaaatctacttttttccatataaaaacttctgtttta

SEQ ID NO: 444160 - DNA, 539 bp, Homo sapiens
aaaacacaaagcctattattaaagagttcaacagatggttactgtgttatcacagatgtacagaaaacctctttgttctaaaaaaagaaaaaagaaaaaaaaaaagattcctgtcctttctcagactgtctcgattaggtcaaattcactaactccacagcaggcttctctctggttccacatattgagtcagcagggagcacagcctcgggaatcgaatcacaaacagggaagggggtgcccataccttcttcaggccacgtctggatgttcatctggatacggcgctattccattcttcccatttcatcacctgtcttttcagttcttaatgtaccttaacattatcttaatgagaggttaaataawgcttttatttagaaggtaccaaaagttcatcttgttatgaatctgaattgatctgtgcattgctatctagagggaatgctttggaaaaagtacattttactcacagtgaacataagcagtgatggtcaatgtaaaaatctacttttttccatataaaaacttctgtttta

SEQ ID NO: 444161 - DNA, 539 bp, Homo sapiens
aaaacacaaagcctattattaaagagttcaacagatggttactgtgttatcacagatgtacagaaaacctctttgttctaaaaaaagaaaaaagaaaaaaaaaaagattcctgtcctttctcagactgtctcgattaggtcaaattcactaactccacagcaggcttctctctggttccacatattgagtcagcagggagcacagcctcgggaatcgaatcacaaacagggaagggggtgcccataccttcttcaggccacgtctggatgttcatctggatacggcgctattccattcttcccatttcatcacctgtcttttcagttcttaatgtaccttaacattatcttaatgagaggttaaataatgcttttatttagaaggtaccaaaagttcatcttgttatgaatctgaattgatctgtgcattgctatctagagggaatgctttggaaaaagtacattttactcacagtgaacataagcagtratggtcaatgtaaaaatctacttttttccatataaaaacttctgtttta

SEQ ID NO: 444162 - DNA, 540 bp, Homo sapiens
ttagggcaggttattaatttagtttcgcctacaggcrctctgtccctatactgcgtggaagttaattagcattttaactctgaagctgccaaggtcggcaaaactgtaagctgctaacatctaagttgatgcagtatgatgtaatgtctgccagttttttccctgttagacttaattcctacaaaatattacaatcctaaaaaggaataaatgacagcatttgcaggctaatctcttattaagatgctcttttcaggttttacagaaacggccactttctcaatgaatattcaagaacatcgattaaaaagtcaaaacatgcatggtatatcttagactcccccacaagaggaaagtctattgtaaacaaaatcgtctttttcgggttgcaattccaaatatttttttaaggttcttcatgttcaggagcatgttctgcaattccacttccaaatattaccgataataaaaaaatacaaagttttccagacagcctagcgcaagttttaaaccatttgctgtacttacgtggatttcctg

SEQ ID NO: 444163 - DNA, 461 bp, Homo sapiens
ttctcccaaaaacagcatactcctttcaccttcctgcctctgcccacgacttcctcttggtctggaatgcccccaacagttcagctcttaaagctcatataccctcaggccatagttgaaaatatgtatatccttgtttattctcaacagttccaataaaaatccacctcccctttgaagtcttcacgactgctatactttaacctccaaagcaaagttagataccccatgatctgtgctcccatgacacccatccacttcgattatggcatgytccacattctaattatttgcttactgtctcctctagttgactttgagcagacaccttgtcttattcatgtctgcatctgaagagttttcacacagggctcacaccacaatgggtgaatgagcactcagagaggaatctgtacccacgtgaaggcatggacccttcagcactaagcttctgtgatctc

SEQ ID NO: 444164 - DNA, 545 bp, Homo sapiens
atgccgcatgttctcacttatgagtgggagcaaaacactgagtacatatggacacaaagaagggaacaacaggcactggggcctacttgagggtaaagggagggaagacggtgacaactgagaaactacctatctagtactgtgcttattacctgggtggcaaaataatgtgtacaccaaacccctatgatgtgtaatytacctaacaaatcagcacatgtacccctgaacctaaaataaaagttaaaaaataataacaataatcaccctttaaacctatctttcaacatttgaagtttgcaaaggcaaagttttattcacctatggaacatggtttactaactgagcaactctgggcaagtactctcttggcctcttaagtggggataataacagggcatgcctccaaatcttcctgtgaacattaagtgaatggatacgtactggacactcagaaaaatgcttgggttgtagtgatatttaagtgccattataatggcagcattgtatgaacagaaattaaaaacttcaaagtacatgtgaaa

SEQ ID NO: 444165 - DNA, 545 bp, Homo sapiens
atgccgcatgttctcacttatgagtgggagcaaaacactgagtacatatggacacaaagaagggaacaacaggcactggggcctacttgagggtaaagggagggaagacggtgacaactgagaaactacctatctagtactgtgcttattacctgggtggcaaaataatgtgtacaccaaacccctatgatgtgtaatttacctaacaaatcagcacatgtacccctgaacctaaaataaaagttaaaaaataataacaataatcaccctttaaacctatctttcaacatttraagtttgcaaaggcaaagttttattcacctatggaacatggtttactaactgagcaactctgggcaagtactctcttggcctcttaagtggggataataacagggcatgcctccaaatcttcctgtgaacattaagtgaatggatacgtactggacactcagaaaaatgcttgggttgtagtgatatttaagtgccattataatggcagcattgtatgaacagaaattaaaaacttcaaagtacatgtgaaa

SEQ ID NO: 444166 - DNA, 584 bp, Homo sapiens
tcaaataccaactgtcagatacacattttttttaaatgtacacagaatatttacctagaaaaaaacatatgctggggcataaaattaatctcagtgatgtcagaaaaatggcagactagaaaactttagaactttgtcccccatggaaacattaaagaaaaaactacaaattggttaaactgacatttaggaactatggaaaacagctcaaggtttacagaaaacacatgaacatccaaacaaaacggagccacatccaaagcagtagaaaattgtgtggcatttttacttggctttgccacatcccatccctrgaactgcacagaatggtcttaggaaagtgatagctgagcttccaattccttccctggaactggaagggtaaaccagactttatttgaaatgttctaacctgtctgggagctccatgttggattagtctccgttgtttctaactcataggtcagacagcaaagatcagaacagctcatatctcaggctatgaaaaccaatgagagacaacagacatagctcgtgaatgctgctgtgagatgcatgatagacctgcaaatgcctggagcatg

SEQ ID NO: 444167 - DNA, 518 bp, Homo sapiens
gtgtggcatttttacttggctttgccacatcccatccctggaactgcacagaatggtcttaggaaagtgatagctgagcttccaattccttccctggaactggaagggtaaaccagactttatttgaaatgttctaacctgtctgggagctccatgttggattagtctcygttgtttctaactcataggtcagacagcaaagatcagaacagctcatatctcaggctatgaaaaccaatgagagacaacagacatagctcgtgaatgctgctgtgagatgcatgatagacctgcaaatgcctggagcatgagattacagatagaggaataaaatagaatattcttgactctgagaagaagcagggctatgacccctagggaaattaagacattttctaaaaggctgtatacacaaggaaaaaataaataaaagcacacacaggcccagagaaaatgaagtctgataaaagaccacagaagatgaaagccttcagaccaggctgatctaagtcaaagaa

SEQ ID NO: 444168 - DNA, 584 bp, Homo sapiens
tcaaataccaactgtcagatacacattttttttaaatgtacacagaatatttacctagaaaaaaacatatgctggggcataaaattaatctcagtgatgtcagaaaaatggcagactagaaaactttagaactttgtcccccatggaaacattaaagaaaaaactacaaattggttaaactgacatttaggaactatggaaaacagctcaaggtttacagaaaacacatgaacatccaaacaaaacggagccacatccaaagcagtagaaaattgtgtggcatttttacttggctttgccacatcccatccctggaactgcacagaatggtcttaggaaagtgatagctgagcttccaattccttccctggaactggaagggtaaaccagactttatttgaaatgttctaacctgtctgggagctccatgttggattagtctccgttgtttctaactcatmggtcagacagcaaagatcagaacagctcatatctcaggctatgaaaaccaatgagagacaacagacatagctcgtgaatgctgctgtgagatgcatgatagacctgcaaatgcctggagcatg

SEQ ID NO: 444169 - DNA, 505 bp, Homo sapiens
agctaaagaaaaacatagacaaataactaaaaagtgaagaaaataatatatgaacaaaaggagaatatcaacaaagagacagaaattattttaaaagaaccaacaagaaattctggagatgaaaaatayggtaagtgaattgaaaaatttatgagacagctttaacagaagactagcaggcagtggaaagaagcagcaaacaaaaagaaagattatttaaaagtagtgagtctaaggaccaaaaaggaaaaaaaaaaaaaggaagtgaatagagtctaaggtatttaagagtcaccattgagtagtccaattattcattacagaagttccagaaacagaagagagaaaggaggcagtgatttatatgacaacataagtgtcagaggcgttcaaaccagagcgactccattttgagtgagggctaggaaaatgaggcagagacttgctggactgcattctcagaaaattaggcattttcctagcttctagatgtttatgaatcagt

SEQ ID NO: 444170 - DNA, 505 bp, Homo sapiens
agctaaagaaaaacatagacaaataactaaaaagtgaagaaaataatatatgaacaaaaggagaatatcaacaaagagacagaaattattttaaaagaaccaacaagaaattctggagatgaaaaatacggtaagtgaattgaaaaatttatgagacagctttaacagaagactagcaggcagtggaaagaagcagcaaacaaaaaraaagattatttaaaagtagtgagtctaaggaccaaaaaggaaaaaaaaaaaaaggaagtgaatagagtctaaggtatttaagagtcaccattgagtagtccaattattcattacagaagttccagaaacagaagagagaaaggaggcagtgatttatatgacaacataagtgtcagaggcgttcaaaccagagcgactccattttgagtgagggctaggaaaatgaggcagagacttgctggactgcattctcagaaaattaggcattttcctagcttctagatgtttatgaatcagt

SEQ ID NO: 444171 - DNA, 505 bp, Homo sapiens
agctaaagaaaaacatagacaaataactaaaaagtgaagaaaataatatatgaacaaaaggagaatatcaacaaagagacagaaattattttaaaagaaccaacaagaaattctggagatgaaaaatacggtaagtgaattgaaaaatttatgagacagctttaacagaagactagcaggcagtggaaagaagcagcaaacaaaaagaaagattatttaaaagtagtgagtctaaggaccaaaaaggaaaaaaaaaaaaaggaagtgaatagagtctaaggtatttaagagtcaycattgagtagtccaattattcattacagaagttccagaaacagaagagagaaaggaggcagtgatttatatgacaacataagtgtcagaggcgttcaaaccagagcgactccattttgagtgagggctaggaaaatgaggcagagacttgctggactgcattctcagaaaattaggcattttcctagcttctagatgtttatgaatcagt

SEQ ID NO: 444172 - DNA, 527 bp, Homo sapiens
tacatatattgggaattttaaaaggacaggaaagagagaaaaaaatggaagcaatatttgaaacaataatgactgaaaattccttccaaactagcgtcagacaccaaaccagagatcaagaaagctcagagtacaccaaacaggatacatgaaaagaaaaattacacctaggcatttcatattcaacttcagaaaatcaaaaataagaaaaaaaaagtcttgaaagaagccagagaggaaaaataccttacatataaaggagcaaaaataagaattacttcttaaattttcttagaaaccatgcaagcaagaagagtgaggttgagagaaaaaccaccagcctagatttctgcacmctgtaaaattatccttcaaaagtaataagaactaaagttcttctcagacaaacaaaacctgaaggcattgttactggtagacctaccttgcaagaaatgttaacggaagttcagaaagaaaatgatgtaggtcagacactccaatctacataaataaaagaagagagtcaa

SEQ ID NO: 444173 - DNA, 587 bp, Homo sapiens
ccatgcaagcaagaagagtgaggttgagagaaaaaccaccagcctagatttctgcacactgtaaaattatccttcaaaagtaataagaactaaagttcttctcagacaaacaaaacctgaaggcattgttactggtagacctaccttgcaagaaatgttaacrgaagttcagaaagaaaatgatgtaggtcagacactccaatctacataaataaaagaagagagtcaaagaattaataagtaaaagtaaagtaaaacattcatttttttgttcttaattgatcaaagacataatagtttgctcaaaataataatagcaacaatatatggttatgtacgcatatatatatgcttttgcatacttttgtgtacatgaagtgagagatagcaatgataaaagggaaaggaaggaagaattaggaatattgtgttattaatatatcttctacctgtgaagtggtatagtgtcatttgaaagtgtacttggattagttgtaaaaatatattgcgaactctaggactaatgttttaaaactttaaaaaagtataattgatatgctaagggaggagagaaaatgaaattatat

SEQ ID NO: 444174 - DNA, 587 bp, Homo sapiens
ccatgcaagcaagaagagtgaggttgagagaaaaaccaccagcctagatttctgcacactgtaaaattatccttcaaaagtaataagaactaaagttcttctcagacaaacaaaacctgaaggcattgttactggtagacctaccttgcaagaaatgttaacggaagttcagaaagaaaatgatgtaggtcagacactccaatctacataaataaaagaagagagtcaaagaattaataagtaaaagtaaagtaaaacattcatttttttgttcttaattgatcaaagacataatagtttgctcaaaataataatagcaacaatatatggttatgtaygcatatatatatgcttttgcatacttttgtgtacatgaagtgagagatagcaatgataaaagggaaaggaaggaagaattaggaatattgtgttattaatatatcttctacctgtgaagtggtatagtgtcatttgaaagtgtacttggattagttgtaaaaatatattgcgaactctaggactaatgttttaaaactttaaaaaagtataattgatatgctaagggaggagagaaaatgaaattatat

SEQ ID NO: 444175 - DNA, 656 bp, Homo sapiens
actccaatctacataaataaaagaagagagtcaaagaattaataagtaaaagtaaagtaaaacattcatttttttgttcttaattgatcaaagacataatagtttgctcaaaataataatagcaacaatatatggttatgtacgcatatatatatgcttttgcatacttttgtgtacatgaagtgagagatagcaatgataaaagggaaaggaaggaagaattaggaatattgtgttattaatatatcttctacctgtgaagtggtatagtgtcatttgaaagtgtacttggattagttgtaaaaatatattgcgaactctaggactaatgttttaaaactttaaaaaagtataattgatatgctaagggaggagagaaaatgaaattatataaagtgctcaattaaaacacaaaaagtagaaaactatgcgcgacaaaaataactaagagcaaggacggcaaagaaaaatsattaacacagatggtacatattaattgctatatcaataatcatcttaactgtcaatggtctaaaacacaccaattaaaatacagagactgtcatagtaaatcaaaaaacaagacccagctgtctacaagaagctcattttaaatttgaagactcatagagataaaaattaaggggatggaaaag

SEQ ID NO: 444176 - DNA, 465 bp, Homo sapiens
tacatcttacgaaagtgtgaaatgcagtaaaacaatgcttagaccaaaattatagcattgaatgtacatgttgcatcccaaggagggtctaaaattaataatctaacttttcaccttaggaagctagtaaaggaagaacaaattagactcaaaataaggagaagaaaaatataaaaatcaataaaattgaagacagaaaaatcaatagaaaaaaatcaacaaataaaaatctgactctttgaaaagataaataaaattggtaaatctctatccagagtaagagagaaaaagaatacaaattattaatatcaacatttaaagaagaaccacctctatagatactatggacattaaaacatttaaaaaaataaagaaatattattaacaacttcataagtttgataaccracataaaatgcagcacttctttgaaatatacaatctactaaaattcacaccaggaga

SEQ ID NO: 444177 - DNA, 579 bp, Homo sapiens
catttaaagaagaaccacctctatagatactatggacattaaaacatttaaaaaaataaagaaatattattaacaacttcataagtttgataaccgacataaaatgcagcacttctttgaaatatacaatctactaaaattcacaccaggagaaaaagacaatctgagttgtcctatayctatcaaaggaactgaatcaataattaataagctgataaaatagaaagtaccaagccccagagagttctctggtaaattctaacacttaaaagaaaaattataacaattctccagaatcttttccaaaaaatagaagcatacagaatgcttccctagttattctatgaggtcattattaccatacaccaaaaccaaagacattacaagaaagaaaaaacaaagagcactatctttcattaagcaaaaatcctgaacaaagtattagcaaattggatccaataatgtgtaaaaagatgatgaagtggaccttatcctaattatgaaaggctagttcaacaattgaaaataaactgatatatttcatcacattaacaagaaaaagaaaaaaaacaagatcac

SEQ ID NO: 444178 - DNA, 505 bp, Homo sapiens
cctagttattctatgaggtcattattaccatacaccaaaaccaaagacattacaagaaagaaaaaacaaagagcactatctttcattaagcaaaaatcctgaacaaagtattagcaaattggatccaataatgtgtaaaaagatgatgaagtggaccttatcctaattatgaaaggctagttcaacaattgaaaataaactgatatatttcatcacattaacaagaaaaagaaaaaaaacaagatcacatcagcagatgcagaaaaacatttgacaaaatccaacatccattaaygataactctcggcaaattaggaatagagggaaacttcctcaaagtgacaatgtctataggaaacctacagctaacatcatattccctggtaagaagttagatgctttcctggtaagatgaaaaacaaggcaagaatgcctgctctcaccttactcaacatcatactgagggtcctagctaatgcaataaaacgtgaaacacacataaaag

SEQ ID NO: 444179 - DNA, 505 bp, Homo sapiens
cctagttattctatgaggtcattattaccatacaccaaaaccaaagacattacaagaaagaaaaaacaaagagcactatctttcattaagcaaaaatcctgaacaaagtattagcaaattggatccaataatgtgtaaaaagatgatgaagtggaccttatcctaattatgaaaggctagttcaacaattgaaaataaactgatatatttcatcacattaacaagaaaaagaaaaaaaacaagatcacatcagcagatgcagaaaaacatttgacaaaatccaacatccattaacgataactctcggcaaattaggaatagagggaaacttcctcaaagtgacaatgtctataggaaacctacagctaacatcatattccctggtaagaagttagatgctttcctggtaagatgaaaaacaaggcaagaatgcctgctctcaccttactcaacatcatactgagggtcctagctaatgcaataaaacrtgaaacacacataaaag

SEQ ID NO: 444180 - DNA, 509 bp, Homo sapiens
aaaaatgtttgatccaaatggaagaaaagaagaaaaaagaacaaaaaatcaaaattatcgactcaaacctaactatataaataatcatattaaatgtaaatggtttaaacacctcaattaaaagtcaggaattgtcatataaattttttaggaagacccgattctatgctgcttacaagaaatacactttatatataaagaaacaaataggttaaaaaatacataccatgttaacagaaatcaacagaaagctgataaatctagccagattaatcaggcattagaagaaaaaaatgccagtagcaggaatgagaaaggtgacatgattttaggttttagatgttaaaagaatcataayaaaatattatatataacttcatgtcaatgatttccacaattgtcataaaatagatgaactccttgaaatacacaaactaccatatctcactcaagaagaaatacataatctgaatagccctacatctgttagagaaatacaatttgtagtt

SEQ ID NO: 444181 - DNA, 516 bp, Homo sapiens
aagttggtttctggtgaagcgtctcttcctggcttgaagacagccactttcttgctgtgtgttcatgtggtctttcctctgtgcacatgcagtgggagagagagaatactctggtgtttcttccgcttcttataaagatatcagtactactggattagggtccttccctgtgacctcatttttaccctttttgcctccttgaaggccttgtctgcaaatacagttacactgggggttagggcttcaagataagaatttgggaaggacacaaataagtctataacaatttccctggtcacyaatgatatcaggcatctttttatatgcctattaggctttgtacgaataaatgattccagaaatcttagaaagttatagttttcaatgtcatttttagaataaaaaagtaaaatcatcttattagaagtgaagcacaattaaggtttttgtttgaagccataccaacaaatagcatcacataaagagtgacataatttagatcaagtatgttgctga

SEQ ID NO: 444182 - DNA, 516 bp, Homo sapiens
aagttggtttctggtgaagcgtctcttcctggcttgaagacagccactttcttgctgtgtgttcatgtggtctttcctctgtgcacatgcagtgggagagagagaatactctggtgtttcttccgcttcttataaagatatcagtactactggattagggtccttccctgtgacctcatttttaccctttttgcctccttgaaggccttgtctgcaaatacagttacactgggggttagggcttcaagataagaatttgggaaggacacaaataagtctataacaatttccctggtcaccaatgatatcaggcatctttttatatgcctattaggctttgtacraataaatgattccagaaatcttagaaagttatagttttcaatgtcatttttagaataaaaaagtaaaatcatcttattagaagtgaagcacaattaaggtttttgtttgaagccataccaacaaatagcatcacataaagagtgacataatttagatcaagtatgttgctga

SEQ ID NO: 444183 - DNA, 445 bp, Homo sapiens
tcaataaagataaaataatgtagrtttcatgttctatatcattcagatttgaattcaggcaagaaattcattaaagtaggaaaagctctcattcaagagcacagggaaatgaaaacctttaaggatttgaatgactgcaccaaataatataatatcaatgtttctaaaacataaaataatggagttctaagaacttaaaactcattagaattaggacatcataatgtctcatctgattaaacagtaggtacagtggacattaaataaatatgcctagagaggctataaattacatttgtattaaagtgaaccatacatttgtgtatatgtatgctaatgcaaaaaacaaaactttcatgttttaattgaataatgataaaatagagtatactattagtctaaagagaaaacctcaataaatctaacaaattagaataaacacaaa

SEQ ID NO: 444184 - DNA, 445 bp, Homo sapiens
tcaataaagataaaataatgtagatttcatgttctatatcattcagatttgaattcaggcaagaaattcattaaagtaggaaaagctctcattcaagagcacagggaaatgaaaacctttaaggatttgaatgastgcaccaaataatataatatcaatgtttctaaaacataaaataatggagttctaagaacttaaaactcattagaattaggacatcataatgtctcatctgattaaacagtaggtacagtggacattaaataaatatgcctagagaggctataaattacatttgtattaaagtgaaccatacatttgtgtatatgtatgctaatgcaaaaaacaaaactttcatgttttaattgaataatgataaaatagagtatactattagtctaaagagaaaacctcaataaatctaacaaattagaataaacacaaa

SEQ ID NO: 444185 - DNA, 582 bp, Homo sapiens
tcccacattcattacattcatagggtttctcccytgtgtgaattctttgatgtgccttgagaacagaaatatgggcaaaagaccttccacattcattacattcataaggtttctcccccgtgtgaattctatgatgtgctctgagggctgaattatgggcaaaagttttctcacagtcactgcattcatagggcttctcacctgtgtgaattctttgatgtgctctcagggctgagttataggtaaaagatttcccacagtcattacattcatagggtttctcccctgtgtgaactctctgatgtacactgaggtgtgtcttgtgagagaaagttttctcacattcaacacattcatagggtttttcacctgtgtgaattctctgatgtgctctgagatgtgatgtcttggagaaagttttcccacattcaatacattcatagggtttctcccccatgagaattctctgatgtcctttgagatgtgatgtcttcccatattcactgccaccacagagttccatctctgcatctgttttctggtgtcctatgaggggtgacttgtaagatctcccacagccat

SEQ ID NO: 444186 - DNA, 562 bp, Homo sapiens
ttttatagtattgcagtgtagtaactgtttggcatttttgaggtaaatttcactgatacattatctatgtttatatatttcrgtgtactttttgggacatttttgcatttatgttatgggagatattggtctgaaagcttcttttcttgaatagtatttgcctaatcttgctatgaggatgaggcaggccttataaaatgatttgggaaatattccatcttttattttctagaagacattgtgtaagattggtattatttcttccttggatgtttggtaaaatttactagttaaaactatttggtccagaagttgttctttggaattgcacacacacacacacacacacacacacacacacacatacacatatatagaggaagatttcattacattcttaagccttatttacatatgcaaacatagttaaaatttgagtaaattagacattcagttaacatatcctccatcataatgaagtaagttaatatgttgtcgtaaatatccttttcactgacagctcctttagaaaaaaagtcttttagattattctgccattatg

SEQ ID NO: 444187 - DNA, 562 bp, Homo sapiens
ttttatagtattgcagtgtagtaactgtttggcatttttgaggtaaatttcactgatacattatctatgtttatatatttcagtgtactttttgggacatttttgcatttatgttatgggagatattggtctgaaagcttcttttcttgaatagtatttgcctaatcttgctatgaggatgaggcaggccttataaaatgatttgggaaatattccatcttttattttctagaagacattgtgtaagattggtattatttcttccttggatgtttggtaaaatttactagttaaaactatttggtccagaagttgttctttggaattgcacacacacacacacacacacacacacacacacacatacacatatatagaggaagatttcattacattcttaagccttatttacatatgcaaacatagttaaaatttgagtaaattagacattcagttaacatatcctccatcataatgaagtaagttaatatgttgtcgtaaatatccttttcacygacagctcctttagaaaaaaagtcttttagattattctgccattatg

SEQ ID NO: 444188 - DNA, 576 bp, Homo sapiens
gtttattatatcctttcttctgcttatttttcatcatgatctcatctctgactcattggttatttagaagtatgtagctaatttttataagttctgcttttcccaaagttctttctgtttttaatttctaatttaattccactttgatcaaagaacaatcattttctactttttttgaggtttggtttttggcctagcatgtgatctattttaggaactgttccatgtgcacttgagagtaatgttctgcttttgggtgtactgtactgtcatctagctagtttatactgttactcaaatcctccatattcttgctagcatctatttagcttttctgattatcgaaagtgagatactgatgtctgctacgattaccatctccaactattattgttgaattctacctttaattcacctttaattctacctttaatttttgctttgtagattttggaaaaatttcgttcagtgcacataggtttataatttttataccttcttgayatattgtctctttaacattacagcatgtccttctttatctctgatgtatcagtctgttctcacagtgctaat

SEQ ID NO: 444189 - DNA, 614 bp, Homo sapiens
gtggttagtgtttgtgtatcatggcctacctaataattttatgtctttgttgctgaaaataaaacaaataaaagctttcatttacatgcttttttagcacaccttttctggaaaaaattctctactttagtgctggtttgtgtggctcataataygtctatggccattaaaatccaatagaactccagagcgaggaagcacattgctgtctttctctatggtgttttccaggcagggtcagattgccaggatatcatcagacattttttggtagacagtgaggggagggggtggagagggtgcagtttattatacgtaaattatacctcaataaagctggtacttcttttaaaatttgccataattctttatattataaagatataaagaaatttttgcactgtctctcaagtttgtccagaggataaaatcagaggcatataacaatataaaatagtattcaaagatcaaatatttatccaaactttaatactagagaaagatgggcaggtataagcatgagcaatgggaaaatgagaaagagcaggagaaggaaatgttactgaagcaaagtcagagattgcctgcttaaaaaagttttaaaagctaattta

SEQ ID NO: 444190 - DNA, 614 bp, Homo sapiens
gtggttagtgtttgtgtatcatggcctacctaataattttatgtctttgttgctgaaaataaaacaaataaaagctttcatttacatgcttttttagcacaccttttctggaaaaaattctctactttagtgctggtttgtgtggctcataatatrtctatggccattaaaatccaatagaactccagagcgaggaagcacattgctgtctttctctatggtgttttccaggcagggtcagattgccaggatatcatcagacattttttggtagacagtgaggggagggggtggagagggtgcagtttattatacgtaaattatacctcaataaagctggtacttcttttaaaatttgccataattctttatattataaagatataaagaaatttttgcactgtctctcaagtttgtccagaggataaaatcagaggcatataacaatataaaatagtattcaaagatcaaatatttatccaaactttaatactagagaaagatgggcaggtataagcatgagcaatgggaaaatgagaaagagcaggagaaggaaatgttactgaagcaaagtcagagattgcctgcttaaaaaagttttaaaagctaattta

SEQ ID NO: 444191 - DNA, 577 bp, Homo sapiens
cagtggttagtgtttgtgtatcatggcctacctaataattttatgtctttgttgctgaaaataaaacaaataaaagctttcatttacatgcttttttagcacaccttttctggaaaaaattctctactttagtgctggtttgtgtggctcataatatgtctatggccattaaaatccaatagaactccagagcgaggaagcacattgctgtctttctctatggtgttttccaggcagggtcagawtgccaggatatcatcagacattttttggtagacagtgaggggagggggtggagagggtgcagtttattatacgtaaattatacctcaataaagctggtacttcttttaaaatttgccataattctttatattataaagatataaagaaatttttgcactgtctctcaagtttgtccagaggataaaatcagaggcatataacaatataaaatagtattcaaagatcaaatatttatccaaactttaatactagagaaagatgggcaggtataagcatgagcaatgggaaaatgagaaagagcaggagaaggaaatgttactgaagcaaagtc

SEQ ID NO: 444192 - DNA, 550 bp, Homo sapiens
aatatttatccaaactttaatactagagaaagatgggcaggtataagcatgagcaatgggaaaatgagaaagagcaggagaaggaaatgttactgaagcaaagtcagagattgcctgcttaaaaaagttttaaaagctaatttacggagatggcttctttccttaaacctcacgaaccaacctctactaccttccaacttttcttcttcagcttcctcacctctctcagccttcatagaactgaagagagttagggccttcctctggattaggctttggtttaagggaatgttgtggctggtttgattttctgtccagagcactcaaactttctccatatcagcaataaggcygtttcactttctcatcacttgtgtgtttactggagtagcacttttaatttcctccaggaacattctctttgcatgcacagcttggccaactgtttggtgaaagaggcctagctccccatctatcttggtttccaggatgccttcctcactcagctcaatcatttctagcttttgacttaaagtgagaaatacgtgat

SEQ ID NO: 444193 - DNA, 550 bp, Homo sapiens
aatatttatccaaactttaatactagagaaagatgggcaggtataagcatgagcaatgggaaaatgagaaagagcaggagaaggaaatgttactgaagcaaagtcagagattgcctgcttaaaaaagttttaaaagctaatttacggagatggcttctttccttaaacctcacgaaccaacctctactaccttccaacttttcttcttcagcttcctcacctctctcagccttcatagaactgaagagagttagggccttcctctggattaggctttggtttaagggaatgttgtggctggtttgattttctgtccagagcactcaaactttctccatatcagcaataaggccgtttcactttctcatcacttgtgtgtttactggagtagcacttttaatttcctccaggaacattctctttgcatgcacagcttggccaactgtttggtgaaagaggcctagctycccatctatcttggtttccaggatgccttcctcactcagctcaatcatttctagcttttgacttaaagtgagaaatacgtgat

SEQ ID NO: 444194 - DNA, 550 bp, Homo sapiens
aatatttatccaaactttaatactagagaaagatgggcaggtataagcatgagcaatgggaaaatgagaaagagcaggagaaggaaatgttactgaagcaaagtcagagattgcctgcttaaaaaagttttaaaagctaatttacggagatggcttctttccttaaacctcacgaaccaacctctactaccttccaacttttcttcttcagcttcctcacctctctcagccttcatagaactgaagagagttagggccttcctctggattaggctttggtttaagggaatgttgtggctggtttgattttctgtccagagcactcaaactttctccatatcagcaataaggccgtttcactttctcatcacttgtgtgtttactggagtagcacttttaatttcctccaggaacattctctttgcatgcacagcttggccaactgtttggtgaaagaggcctagctccccrtctatcttggtttccaggatgccttcctcactcagctcaatcatttctagcttttgacttaaagtgagaaatacgtgat

SEQ ID NO: 444195 - DNA, 554 bp, Homo sapiens
gtccagagcactcaaactttctccatatcagcaataaggccgtttcactttctcatcacttgtgtgtttactggagtagcacttttaatttcctccaggaacattctctttgcatgcacagcttggccaactgtttggtgaaagaggcctagctccccatctatcttggtttccaggatgccttcctcactcagctcaatcatttctagcttttgacttaaagtgagaaatacgtgattcgtcctttcatttgaacacttagaggcrattgtaggattattaattggcctaatttcaatactgttctgtttcagggaatacagaggcctgaagagaggaaaaaagagatgggggatggtcggtggagcagtcagaatacacacatttactggcaagtttgtcatcttatgttggcacagttgtggcaccccaaaacaattacaatagtaacatcaaagattactgatcacagatcacataacagacataataatacaaatttaaaatattgcaagagttaccagatgtgatacagtgacacaaagtgagcacat

SEQ ID NO: 444196 - DNA, 554 bp, Homo sapiens
gtccagagcactcaaactttctccatatcagcaataaggccgtttcactttctcatcacttgtgtgtttactggagtagcacttttaatttcctccaggaacattctctttgcatgcacagcttggccaactgtttggtgaaagaggcctagctccccatctatcttggtttccaggatgccttcctcactcagctcaatcatttctagcttttgacttaaagtgagaaatacgtgattcgtcctttcatttgaacacttagaggcgattgtaggattrttaattggcctaatttcaatactgttctgtttcagggaatacagaggcctgaagagaggaaaaaagagatgggggatggtcggtggagcagtcagaatacacacatttactggcaagtttgtcatcttatgttggcacagttgtggcaccccaaaacaattacaatagtaacatcaaagattactgatcacagatcacataacagacataataatacaaatttaaaatattgcaagagttaccagatgtgatacagtgacacaaagtgagcacat

SEQ ID NO: 444197 - DNA, 554 bp, Homo sapiens
gtccagagcactcaaactttctccatatcagcaataaggccgtttcactttctcatcacttgtgtgtttactggagtagcacttttaatttcctccaggaacattctctttgcatgcacagcttggccaactgtttggtgaaagaggcctagctccccatctatcttggtttccaggatgccttcctcactcagctcaatcatttctagcttttgacttaaagtgagaaatacgtgattcgtcctttcatttgaacacttagaggcgattgtaggattattaattggcctaatttcaatactgttctgtttcagggaatacagaggcctgaagagaggaaaaaagagatgggggatggtyggtggagcagtcagaatacacacatttactggcaagtttgtcatcttatgttggcacagttgtggcaccccaaaacaattacaatagtaacatcaaagattactgatcacagatcacataacagacataataatacaaatttaaaatattgcaagagttaccagatgtgatacagtgacacaaagtgagcacat

SEQ ID NO: 444198 - DNA, 554 bp, Homo sapiens
gtccagagcactcaaactttctccatatcagcaataaggccgtttcactttctcatcacttgtgtgtttactggagtagcacttttaatttcctccaggaacattctctttgcatgcacagcttggccaactgtttggtgaaagaggcctagctccccatctatcttggtttccaggatgccttcctcactcagctcaatcatttctagcttttgacttaaagtgagaaatacgtgattcgtcctttcatttgaacacttagaggcgattgtaggattattaattggcctaatttcaatactgttctgtttcagggaatacagaggcctgaagagaggaaaaaagagatgggggatggtcggtggagcagtcagaatacacayatttactggcaagtttgtcatcttatgttggcacagttgtggcaccccaaaacaattacaatagtaacatcaaagattactgatcacagatcacataacagacataataatacaaatttaaaatattgcaagagttaccagatgtgatacagtgacacaaagtgagcacat

SEQ ID NO: 444199 - DNA, 597 bp, Homo sapiens
tcacggccctcagcaacctccataaaggctgcccccctgaccccctagcccccacctacacatgcacagagctggaaggtctgtccccactgccactccagagtgcragaaagggagaggcagtgggatggggactctctgctttgcatgttggctgagctaagagagcccatctccatcccagcctttgtcagggagagaaggggcttcccaggggcagacgttatctattctccaccaggatacccagggtcaagacttctcccacttctaaactcagggcccagcactctcccacccaaacttccactattttgtgacacatgaaggtactcggctgtggcacttcctggagcctgcatggagatgttcagtcccgtgacatctctgcaaaccttctccctacagttgcatgaagtttgaggtagagtaagtagtggaaagatgggttgaaccttatttcagagtgggaccttcataggtttttctcatcttgtttttagaattttttgttgtttgtgtaaagacggtattacggaaacataaggttcagtgaaggaactcaggatgaaggtgggcttacagcaccactgtcaa

SEQ ID NO: 444200 - DNA, 597 bp, Homo sapiens
tcacggccctcagcaacctccataaaggctgcccccctgaccccctagcccccacctacacatgcacagagctggaaggtctgtccccactgccactccagagtgcgagaaagggagaggcagtgggatggggactctctgctttgcatgttggctgagctaagagagcccatctccatcccagcctttgtcagggagagaaggggcttcccaggggcagacgttatctattctccaccaggatacccagggtcaagacttctcccacttctaaactcagggcccagcactctcccacccaaacttccactattttgtgacacatgaaggtactcggctgtggcacttcctggagcctgcatggagatgttcagtcccgtgacatctctgcaaaccttctccctacagytgcatgaagtttgaggtagagtaagtagtggaaagatgggttgaaccttatttcagagtgggaccttcataggtttttctcatcttgtttttagaattttttgttgtttgtgtaaagacggtattacggaaacataaggttcagtgaaggaactcaggatgaaggtgggcttacagcaccactgtcaa

SEQ ID NO: 444201 - DNA, 590 bp, Homo sapiens
cagctttcttggggtgcaagatttggggatgtcgcaggccccattgctcattgttgcaccgcacacttttcaagggctgttgatttctgatttgtctgtctctgttgggacaaccctggctcttgagagtggcttgttgactgctggctgcatagctcagtattctgccrtgttctgagtagaagaggtgcctgtggttgcagggaaacccacagactggggcttgaaacttctgtttgtgctgatttaccttcgaggcatggcgcgcatggcaaagtgacattttctcgtccagcatttgtccaactgccgtcatgagaccctgagcttcagcactgctgctgtacacacatgatctgttttttactgttttttggctctcagcagtgactggtgctggcttgctttttttctttgaaaaaatccactgaaaaatttgcttgatgttttctccaaaggggcttactgaaggaggctgtttctttgatggcagtagctggacgccttcatcctgatgggtgtcttctgttttcctgactggggtaagttgaggagtcctcaatccttcaagcctttcttcatgtttttct

SEQ ID NO: 444202 - DNA, 520 bp, Homo sapiens
atcaaatcacgccacctgcgactgtggtttgaaaaaaaaagaaaacataataatgatgctgtcaattcacttgagattccatgatcaaaattaacctacgaacaaagcacagactttattataattacaaaataggatgtaatttacataaaatgtgaaaatataagcatagaacgaaatttgatacaagtcgaaagctatgacagggactgttggaggggagggaagttgtacactaatctccacatcctactgagccaatcagtggtgttcaaattggatggaccatatattatctaaacagtatattatttaagcaaagaattaagcactgtaagtatattatttagagaaagcaaatttttaaaaaatcccataaaattatatattaaagactaaattggaaatatagttttagaagaagaaagtagggtaaatgagctatattctctaccgttcataaaaagtcaagrgatattacttaaaattgttaaaacaaaattaggtgattgtataatat

SEQ ID NO: 444203 - DNA, 518 bp, Homo sapiens
ggtaggatcaggtgaacataattgaatcatggggtagttgcccccatgctgttctcatgatggtgggtgagttctcatgagatctgatcattttataaggggcttcccctttgctcaaaactcattatttctgctgccaccatrtgaagaggtgccttctgccatgattgtaagtttcctgaggcttccctagccatgtggaactgtgaatcaattaaacctcttttctttataattacccagtcttggatatttcttcatagcagcatgagaatggactaatacaagatgtgagtgcatttccagttaataaataggtaatattttctgtgttttctgctatggtaatgaattgcattacaacttcactaaagagagaaatcactcacaatctgagacctaaaccaagagctgaagaaagtgcaaagagacctacagtaattcctataagttatttccaatggaaggcctctgtgtatgtagtactgtaatagaaaaacctatggaataaaaagaat

SEQ ID NO: 444204 - DNA, 518 bp, Homo sapiens
ggtaggatcaggtgaacataattgaatcatggggtagttgcccccatgctgttctcatgatggtgggtgagttctcatgagatctgatcattttataaggggcttcccctttgctcaaaactcattatttctgctgccaccatatgaagaggtgccttctgccatgattgtaagtttcctgaggcttccctagccatgtggaactgtgaatcaattaaacctcttttctttataattacccagtcttggatatttcttcatagcagcatgagaatggactaatacaagatgtgagtgcatttccagttaataaataggtaatattttctgtgttttctgctatggtaatgaattgcattacaacttcactaaagagagaaatcactcacaatytgagacctaaaccaagagctgaagaaagtgcaaagagacctacagtaattcctataagttatttccaatggaaggcctctgtgtatgtagtactgtaatagaaaaacctatggaataaaaagaat

SEQ ID NO: 444205 - DNA, 518 bp, Homo sapiens
ggtaggatcaggtgaacataattgaatcatggggtagttgcccccatgctgttctcatgatggtgggtgagttctcatgagatctgatcattttataaggggcttcccctttgctcaaaactcattatttctgctgccaccatatgaagaggtgccttctgccatgattgtaagtttcctgaggcttccctagccatgtggaactgtgaatcaattaaacctcttttctttataattacccagtcttggatatttcttcatagcagcatgagaatggactaatacaagatgtgagtgcatttccagttaataaataggtaatattttctgtgttttctgctatggtaatgaattgcattacaacttcactaaagagagaaatcactcacaatctgagacctaaaccaagagctgaagaaagtgcaaagagrcctacagtaattcctataagttatttccaatggaaggcctctgtgtatgtagtactgtaatagaaaaacctatggaataaaaagaat

SEQ ID NO: 444206 - DNA, 518 bp, Homo sapiens
ggtaggatcaggtgaacataattgaatcatggggtagttgcccccatgctgttctcatgatggtgggtgagttctcatgagatctgatcattttataaggggcttcccctttgctcaaaactcattatttctgctgccaccatatgaagaggtgccttctgccatgattgtaagtttcctgaggcttccctagccatgtggaactgtgaatcaattaaacctcttttctttataattacccagtcttggatatttcttcatagcagcatgagaatggactaatacaagatgtgagtgcatttccagttaataaataggtaatattttctgtgttttctgctatggtaatgaattgcattacaacttcactaaagagagaaatcactcacaatctgagacctaaaccaagagctgaagaaagtgcaaagagacctacartaattcctataagttatttccaatggaaggcctctgtgtatgtagtactgtaatagaaaaacctatggaataaaaagaat

SEQ ID NO: 444207 - DNA, 588 bp, Homo sapiens
cattattctgttctggatctcaaacatgctttcttyactattcctttgcacccttcatcccagcctctcttcgctttcacttggactgaccctgacacccattaggctcagcaaattacctgagctgtactgccgcaagacttcacagacagcccccattacttcagtcaatacttcagtcaagcccaaatttcttcctcatctgttacctatctcagcataattctcataaaaacacacgtgctctccctgctgatcgtgttcaactgatctctcaaaccccagcacctctacaaaacaacaactcctttccatcctaggcatggttagatacttttgactttagatacctggttttgccatcctaacaaagccattatataaactcacaaaaggaaacctagctgaccccatagatcctaaatcctttccccactcctctttccgttcattgaagacagctttagagactgtccccaccctagctctccctgacttatcccaacccttttcgttacccacagctgaagtgcagggctgtgcagtcagaattcttacacaagaaccaggaccacaccctgtagcctt

SEQ ID NO: 444208 - DNA, 588 bp, Homo sapiens
cattattctgttctggatctcaaacatgctttctttactattcctttgcacccttcatcccagcctctcttcgctttcacttggactgaccctgacacccattaggctcagcaaattacctgagctgtactgccgcaagacttcacagacagcccccattacttcagtcaatacttcagtcaagcccaaatttcttcctcatctgttacctatctcagcataattctcataaaaacacacgtgctctccctgctgatcgtgttcaactgatctctcaaaccccagcacctctacaaaacaacaactcctttccatcctaggcatggttagatacttttgactttagatacctggttttgccatcctaacaaagccattatataaactcacaaaaggaaacctagctgaccccatagatyctaaatcctttccccactcctctttccgttcattgaagacagctttagagactgtccccaccctagctctccctgacttatcccaacccttttcgttacccacagctgaagtgcagggctgtgcagtcagaattcttacacaagaaccaggaccacaccctgtagcctt

SEQ ID NO: 444209 - DNA, 589 bp, Homo sapiens
tttcaattgaaccactgattataaattgaaaactaattcagtgacatgcaaataacaatttattcatcctagtaacccatgttagcatttcgttactcatgaatattatttatttgggttgaatgatttgtgttcgaaagtaaaattgagttagcaaaaaatgctatatgcatattttaatattaatttttcttgrattcagggtatattaacctaaattgtgtgctagagaaattgtagtttaaatcgcaggtgagaaaaaaacaagacccccaaagtcctatggttttgtacaaacctataaccagaaccctggtaccaggatttctagtcaccagaagactatgtctaggaattgatggttacagctgttctgttattaatacactggtggggtcatagaaattcttttttctattgccttcatatcagaattacaaactatggatccagctacaaactttctgtggtagttctggtcctaatattatgtaattgcatccatgccaattaaagtaaagagcacttctagcccaaaaggactacttctgcaattcgagtaagctactgtacttctaagaaagaaaga

SEQ ID NO: 444210 - DNA, 589 bp, Homo sapiens
tttcaattgaaccactgattataaattgaaaactaattcagtgacatgcaaataacaatttattcatcctagtaacccatgttagcatttcgttactcatgaatattatttatttgggttgaatgatttgtgttcgaaagtaaaattgagttagcaaaaaatgctatatgcatattttaatattaatttttcttggattcrgggtatattaacctaaattgtgtgctagagaaattgtagtttaaatcgcaggtgagaaaaaaacaagacccccaaagtcctatggttttgtacaaacctataaccagaaccctggtaccaggatttctagtcaccagaagactatgtctaggaattgatggttacagctgttctgttattaatacactggtggggtcatagaaattcttttttctattgccttcatatcagaattacaaactatggatccagctacaaactttctgtggtagttctggtcctaatattatgtaattgcatccatgccaattaaagtaaagagcacttctagcccaaaaggactacttctgcaattcgagtaagctactgtacttctaagaaagaaaga

SEQ ID NO: 444211 - DNA, 589 bp, Homo sapiens
tttcaattgaaccactgattataaattgaaaactaattcagtgacatgcaaataacaatttattcatcctagtaacccatgttagcatttcgttactcatgaatattatttatttgggttgaatgatttgtgttcgaaagtaaaattgagttagcaaaaaatgctatatgcatattttaatattaatttttcttggattcagggtatattaacctaaattgtgtgctagagaaattgtagtttaaatcgcaggtgagaaaaaaacaagacccccaaagtcctatggttttgtacaaacctataaccagaaccctggtaccaggatttctagtcaccagaagamtatgtctaggaattgatggttacagctgttctgttattaatacactggtggggtcatagaaattcttttttctattgccttcatatcagaattacaaactatggatccagctacaaactttctgtggtagttctggtcctaatattatgtaattgcatccatgccaattaaagtaaagagcacttctagcccaaaaggactacttctgcaattcgagtaagctactgtacttctaagaaagaaaga

SEQ ID NO: 444212 - DNA, 556 bp, Homo sapiens
ctaaacctaatcagaaattattgaaacaggaattcaaactcaagtaggctgatgttaaagcctgaattatacgtcatttgattacaattatccacacagagtgttggtgtttatcatacaattggatattactgttacttttatagacacatatagrtttaatctgcctactttcagatacaggaatgaaatcagttgagaagaaaatattaaataaattattttcttaaaaacaaattgactcctacccattgtaaacatcttagcacaatactttacttctgtggtgagactgatgtaagcaaaacctactatgctgccagacacataaaaatacagcacttacaattatgagtagtacataatagtttatttgataatgatcgtaaccaatatgttattgatttatgttaaaaaaaaaaattgaggtttgagaccatataattatggcagcaaaggataaacatttgtcttgttggtttaaggtgttaaagacatgtacttgatctctatctattgaataattgaaagactagttgaggactcccaaaacttt

SEQ ID NO: 444213 - DNA, 539 bp, Homo sapiens
agtgagctgagattgcaccactgcactccagtctgggccacagagcgagactccatctcaaaaaaaaaaaaaagtgattaagtaataatactactaaaattaatagtagtcaatatttattgaatgtttattgtaagccaataaacattctaatttaatttatatcacagtattacttctgataagtttcataacatttgatgaggctggtgtaattaatagcccaagtttaaagaggaagacacgtggacagagagaggttactaaacctaatcagaaattattgaaacaggaattcaaactcaagtaggctgatgttaaagcctgaattatacgtcatttgattacaattatccacacagagtgttggtgtttatcatacaattggatattactgttacttttatagacacatataggtttaatctgcctactttcagatacaggaatgaaatcagttgagaagaaaatattaaataaattattttyttaaaaacaaattgactcctacccattgtaaacatcttagcacaatactt

SEQ ID NO: 444214 - DNA, 628 bp, Homo sapiens
attgctattactcttctcacgtacacaaagaaataaacgtgaaataacaatatacactccagatttctatgccactaaagttctatatgtttgaataaatactttttaggcgcagtacagatatgcaaagattttcaagcatatttttgtgtgaactctgatctatggatttctgagttaggaatgagagtgagaagtttgcccagtctttctggtgtcccaaatattgctcttttgacatgttttcaatattcaaaggttatattcaaagagaaaraagaagagtggtggtgattacagaagctgcaagtaagaaaataaataaatataccttaacctagtatttttactcgaggaatttatcctaccaaggcagtcagagatatgaacaaaggagtctttgggagatattccagctttacttacacttgcaaataattagaacaatgtataatgtgtgtaaatagccatgaggaatttaaaaaattataacatctatgttagaatactaaaaataatcgtgtgtaagtgtatagttaggcatttataactgaaaaaaaagcagagacaaagtggtttgggtaatggatgctaagagacatggagagaaacccagagacacagagaa

SEQ ID NO: 444215 - DNA, 585 bp, Homo sapiens
ctacccattgtaaacatcttagcacaatactttacttctgtggtgagactgatgtaagcaaaacctactatgctgccagacacataaaaatacagcacttacaattatgagtagtacataatagtttatttgataatgatcgtaaccaatatgttattgatttatgttaaaaaaaaaaattgaggtttgagaccatataattatggcagcaaaggataaacatttgtcttgttggtttaaggtgttaaagacatgtacttgatctctatctattgaataattgaaagactagttgaggactcccaaaactttatttcagaagttgcaattaaaaatattttatattcttctaaatgatattgccaaaatatgacaagagaatactttttttgtctggatctttctatgtttccattattagatctgtactaaaccctcmcccactaattagtttggcacagtgcttaaacatgcttaagatttatctctttatatgtttttgtaaggtagatagtctgggaattgtgtaatctaatggcaattcccagaaatgatgtcctccaaatataaattataagaaattaa

SEQ ID NO: 444216 - DNA, 537 bp, Homo sapiens
ttctctttcacttgagaaggataattgaatatagaactattggttgacttttcttttcccrtacaatattttgaatatgtcatttctctcttgtttctggcctccttgattatgatgagagccagatgttaatcttattgtgacttctttgaacataatttgtccttttttcttttgagaatttcacattttttatttgtctttcaactctttgtttcagatatatgtatcagtagatatcattgtattgattataacttttctacaccttcttggatgtgtacatgaatattttgtatcagatttaagaagagttcatcccttatttcttcaattttttttttctgctccttttcctctctcctctacgtcttggctccagttgcatacatgttggtatacataatggtgtcaaacaaatttctgagtctctgctcattttaaataattttccaaatctattatacatatcagattacataatttctaatgatccattgacagtgccaccatttgtatcacccactgcctgaaatt

SEQ ID NO: 444217 - DNA, 628 bp, Homo sapiens
aatttctcattattttactgcttcttttgatttctgctaatttttgtttatatatcagacttaatgaattttacctatttgagagatgggtatcttttcattttattaatatagttgagccttgtatttgaagtacatatagtacttatttgaagtacttatwtgaaaagagtttgatccttccgggtcttcgtttcagtatttgttataatatgcttctgagtaatatacctgatccatatgaatccggttagtttccagtctgacaggtgagaatatgtaggcattatttctagcccaatgcaagtgcctggcactattacttcatcatttcaaattttgggttttgttttttgttttgttttttccaggtctcaggtaatttcctcatataggtttgctgatgatcaccactctgctgaatacttgaggctatcctctgcagatatctagatgtatttctttgtactctctcttttccaggactccttcctgtgatctctaccctctttgttttctcaggctctcaggtttgtctccttaacttagaaaatctgctgaactccctctaagcttctcctccttgtaccttggcctggaaactctatctaggcagtaagttgggggc

SEQ ID NO: 444218 - DNA, 581 bp, Homo sapiens
gaaggaaactttgtgggttattgaactgtttatattattttgtgtacataaaatttttaaaactaacccaactagactcttaatatctctacattttgttgaatgtaaaatatatcttaattttaaaaagaggtggaaacatagggtaagaaatagaagataaataactaacagtttgttctaattaacattttttcttgtattaatgattggaaagctttagaggaaaaaatgtatttattacattaytttattaacagtcatttgaaaacatcaaaagccaaattataaaacacctctcatatatatgtattttaaaatttagtttgattgcactgtggtctgagaaacagtttgttataatttctgttcttttacatttgctgaggagtgctttacttccaactatgtggtcaattttggaataagtgtggtgtggtgctgagaagaatgtatattctgttgatttggggtggagagttctgtaaatgtctattaggtctgcttggtgcagagctgagttcaattcctggatatccttgttaactttctgtctcgttgatctgtctaatattgacagt

SEQ ID NO: 444219 - DNA, 583 bp, Homo sapiens
aaaataaataatttactggggtctaatgggattaaatacaataacgtttgtaaagtatttagcataattcaaagcatgtggtaagcccataacgacatttactaagaatctgcttttgtgtgtgttttattcactttaaatatttgaagctaatttgatatatatatatgtgtgtgtatacatatctccaagtacttcatttcccatggaaatacactcactttattcaaactgtaagttctttttccatagaccaagtaaagaaccttacttaggaatgtagcacttttaagactttgctccaaattatgcagacacaagccattttaatttgaaaggcattcactaaagarggtagatgggattaaagaatagaaatgtataagacgtggttaagacttttttggctttactgctgttgattcaaagaataaacagattgcacaaaggtgctaaaatgatttcaggccaaactttgaggcaagtactccatgtgaatattattgcctttcaccaatgtaactatcacttccacgcagggttaggcaacttataaaagttggtctgccttaaatcagttagt

SEQ ID NO: 444220 - DNA, 589 bp, Homo sapiens
gttttatgaaatattattacaaaatatctgctccttctctgaggataagtagtgtgtttcaatgaatgtaaattttaaaaacttgataggtttcaatttaatgtgctatcaaatgtcaccaacgaatttcccatctgaaatatgtaatgtaaacatgtattcagccatgtttctctaagmtttgttcttctcattctaatatgagaaattatttaacttgtgttatctctgccttttagaaatatgtgcaaattttgtggcaatatatctgatgatataacatattatactaagtaagttagtgtttaagtaagttaagggagacaaataaatttgtatttagagtaacaaataaatttgcactcaggtaaatttgtttctaaataagttaaggtctgtttttccagatttttgacatattatttgaagtataatatttggaggaacttagaaagaatggataatcagtaaacatgcaccattccttctgttttttccttaatacatattttgatgactctatctcttttgggataacatacagattctttaggataaccctcatttgttttgtaatctgtctaagcta

SEQ ID NO: 444221 - DNA, 564 bp, Homo sapiens
gtaaatagcacaaaagctttcttgatagttttatgaaatattattacaaaatatctgctccttctctgaggataagtagtgtgtttcaatgaatgtaaattttaaaaacttgataggtttcaatttaatgtgctatcaaatgtcaccaacgaatttcccatctgaaatatgtaatgtaaacatgtattcagccatgtttctctaagctttgttcttctcattctaatatgagaaattatttaacttgtgttatctctgccttttagaaatatgtgcaaattttgtggcaatatatctgatgatataacatattatactaagtaagttagtgtttaagtaarttaagggagacaaataaatttgtatttagagtaacaaataaatttgcactcaggtaaatttgtttctaaataagttaaggtctgtttttccagatttttgacatattatttgaagtataatatttggaggaacttagaaagaatggataatcagtaaacatgcaccattccttctgttttttccttaatacatattttgatgactctatctcttttgggataa

SEQ ID NO: 444222 - DNA, 585 bp, Homo sapiens
ttctgcccttcgtgcactgaaaacactgataaattatgtgtgattaaagcatagggarttggacatatgcaaaaattatgaaagtcaaaagaagaggacccacaagatagaaaaaaatgcaacttcaatgtagttttaaaaagcatcaaatcatagactttctagttccttcactaacctgagctgtaatttggacttttgtgctctgtacgcataaagctaacaatgagaaagtcacaggcctagagacagatagttctaagctgataaatttcaattctttctcttgaaaatccatctcagaaaagaataatttgttaagaagacactatttttgcaacatattaggtttctattaacctaccaactaacaacacgttaggtttgtattagcctacaaaaattccaacatatgggcttaactatgtcatttacatgtgataaaaatactgtgtaattttttttacattttacattagatactctttattatatatttttaaataataggttgagcatgtactatgtgctaagcattgctgtaggtgtttttatacccattaactaatttatctccacaatttt

SEQ ID NO: 444223 - DNA, 585 bp, Homo sapiens
ttctgcccttcgtgcactgaaaacactgataaattatgtgtgattaaagcatagggaattggacatatgcaaaaattatgaaagtcaaaagaagaggacccacaagatagaaaaaaatgcaacttcaatgtagttttaaaaagcatcaaatcatagactttctagttccttcactaacctgagctgtaatttggacttttgtgctctgtacgcataaagctaacaatgagaaagtcacaggcctagagacagatagttctaagctgataaatttcaattctttctcttgaaaatccatctcagaaaagaataatttgttaagaagacactatttttgcaacatattaggtttctattaacctaccaactaacaacacgttaggtttgtattagcctacaaaaattccaacatatgggcttaactatgtcatttacatgtgataaaaatactgtgtaattttttttacattttacattagatactctytattatatatttttaaataataggttgagcatgtactatgtgctaagcattgctgtaggtgtttttatacccattaactaatttatctccacaatttt

SEQ ID NO: 444224 - DNA, 524 bp, Homo sapiens
ggtacgagattgaatgtagaagctgagggggtgtgggtggagcttacttcccatggtgtgatgaaacatgtaccttaacagactcctcctctctctagtgagctcacattctttccagcacaggtattcaaattcccctcctttgcaagaactaaaatgtaaaagatgattgttctctttccagagccagctatgagtgaggatgctggcaaaaatctccctcctgcacctctcaaccctgttgtgtttatcattcgagctatttgtcyttgctgagtgaacatgaccatctgttactacaacccaactatgaaaaagagatgcttttatttttctcatgtcactttgtactgcttgggtgacacctcaaggaagaaaaaagggcagaaagcaacaacaaacagcatccgtgatgaaaaggaagaggctaagcttccattcctcacacatttttgcaactagccacataaaagaacgcacaagatgtgcagtaatatcagtgcagatactcatccagctgtctg

SEQ ID NO: 444225 - DNA, 610 bp, Homo sapiens
catctaccatttccctgtcatctagcacagtattgagtacccagagtacgtgtttgaatgaaggcaattttagacagaatgtgtttcagagaggactgtggttctgtcttctatgtttagcatgccccakctctacagccatccctcattagcaaaacctgtatcttctttcacaatattacagcttgagacacgaggctttttaaatttcatctcagtagttacagacatgtgctcagaaagatctgagtaaaaaaatacataggcacaaagatattcttaagagaacaatggtgctaaaagacttggccactaacttcagcaaataatttgttatggatccattgctatagattatgattcttgaggacaataactttatctcttttttttgcattctttccaaggtaacaagcccagtgctagatcatagtaggtatgcaaaaattaaagtactcaattgaacatctattaagaaagtcctttcatttaccactttattaagccagttctatactggatgctagagatacaaaaagtgaatatgacatggtttatggcctcatggggctctagtttggcactagaaaaagatttataaatgtaaaat

SEQ ID NO: 444226 - DNA, 631 bp, Homo sapiens
ctttggctctgctccagatgtcttcttcatttcagatgtaggctaaaggtgcagccttttttcaggaatatgccattcttatgataaagggaaaagagcaaaagccatgccagacaatgtctcctaaagtgtcttgcccaaatgtgtsatgtaccatgtctctcacattccattgtccaaagcaaatcacatggacaaggccaatgtcactaaaatggaaagtcacagagcctcccacagtgcagtgctgccagtcacatggaaatgcactgtatgtatataatcctcttagaggaaacgaacaataatgtaataatgaaatctgccacaaaatacacttatttttacaccaaatctttttttaatttaattaccatatgattcagcaattttactcttaagtatatattcaaaagaactgtagacaagcattcaaatgaaaacttgtaaatgaatgttcatagcagcactattcatagtagtcaaaggtggaaacaaccctaaatgtccactgaccaataaatgaaaaactaaaatgtagtatatgtatacaatgaagtattaattctgccataaaacggaatgaagtactgatacatgctacaacatagatgaaccttgaaaatgtaaa

SEQ ID NO: 444227 - DNA, 599 bp, Homo sapiens
ctttggctctgctccagatgtcttcttcatttcagatgtaggctaaaggtgcagccttttttcaggaatatgccattcttatgataaagggaaaagagcaaaagccatgccagacaatgtctcctaaagtgtcttgcccaaatgtgtcatgtaccatgtctctcacattccattgtccaaagcaaatcacatggacaaggccaatgtcactaaaatggaaagtcacagagcctcccacagtgcagtgctgccagtcacatggaaatgcactgtatgtatataatcctcttagaggaaacgaacaataatgtaataatgaaatctgccacaaaatacacttatttttacaccaaatctttttttaatttaattaccatatgattcagcaattttactcttaagtatatattcaaaagaactgtagacaagcattcaaatgaaaacttgtaaatgaatgttcatagcagcactattcatagtagtcaaaggtggaaacaaccctaaatgtccaytgaccaataaatgaaaaactaaaatgtagtatatgtatacaatgaagtattaattctgccataaaacggaatgaagtactgatacat

SEQ ID NO: 444228 - DNA, 655 bp, Homo sapiens
gactaattcctaacaaagatgattcaccccaaagctgctgctgagaccaggtactggcaacaatcacttagtgtatcaccctgaggttacaagtccacataaagtgatgggcgtgtgggagaggagggggctttagaaaaaggagacctattcactctctgtcttttcatcctctttgagcctcaatttcttcatctgtatagtggggagcatgatccctaactcttagttggtgggatggataaatgggctagtggttataagctcaatgtctaagaaggatagcatctcaaaaaaatgttatttttaaacatttctcctacactttctttttctactatttgttgcaagatgattttgaaaatagtcatcttcgctccatctgtgacgtctagctactgagaaatgggattaccgacactactcttcatcagactgctcctcttgctctgccctgtcctctccctctacccccttcttcacttccccttccctttctctctttccacacttctttctcttcctttctttcctttccccttcctcctaatcttccttatctcwttatcttccactgtcagtctagcaccaattatattcaaaaactcaattcagcaattcagcaaatacatgtatgtacgtgtatacacacaca

SEQ ID NO: 444229 - DNA, 612 bp, Homo sapiens
ctattctacattgtatctccttagataagaaagagagtgacaatggtcataatgtagaaggtcagagaagcaaaagaagccaggaggcttctcagaagaggtggcatttggagaattcaatggtatgacccttcctggaagatgtaacatccaaagcaatagcaaaaacacatgcccttttgaagaatgctgtgcatgcaatgtagcacagagaatggcatacagtaggccctcaggaaatggtcattaggttgaactgaatccagtatcatgtgggataagaagtgtaagggttcaaagaagaaaacagagttcactatgggctgagtgattcattcatgtattcattcacacagtcgtacagcaactatcttttgagcagtgtctatatatcagtctctgtgtattgtgccagagagagagatggttcttatcaaacaagaatctaggacaattggagagtcagattaataaaaggatgatgatactaytgtgtggcaactcctagagaagaagttgtgcagaccatctaatggcctggggaggggagtttagagaagcttacctgagagagatgaaaagttcaggaattggagaaaggctgtgtaaaag

SEQ ID NO: 444230 - DNA, 604 bp, Homo sapiens
aaaaatctggagatcccatggaaatctcttatttgttggccctcccatcacctctgcttctccattcccatagccttcccttcctctttcctcttcctaaagagtgaaacaaacacatttatttgtctcataggtgacaggttaagaagcatcttttagtatttgattatccccttgtgaacttacctgacatgtcraagagtttatcaaagcattttttctcaatgaacacagtggtcttagaaaaaaattacagtgaataaaattatttgcacctccttctttatagataaagaaatttatattcagacagaaaagtgagtttctcagtgtctcccactcatctagtgagtagcagaattgggccttaatctggattcccaagtttcttagccccattaagtaacaacaataatagtaagaacaagagtagtaacatagcaacaatttgttaagtgtcagacagtgtgctaagcactttcaatagatgattttatttaatttttgcaatatgcatgaaggactactattgtaactatttaggaaagaggaaactgaggcttagaggattgagttacttgccaaggtgactgtgatggttaat

SEQ ID NO: 444231 - DNA, 539 bp, Homo sapiens
ggaaagtgcctacaattttaatatgtgtcaagtgatgctttgatctggagcttccaatcatctgcaaccaacaaatatttatagagtactattctcatcacaggaatattgaactagataaacaatatcattgtcctcaagttgtttacagagcaccagggagacaaatatcaggagttacttttattaggggttgggtagagggactgaggaaaaagaaagagtaatacaaataataatctgatgataatatggatgatgataatgtactgatgaaaattttcatggtattttatagtttccaagaatatcatgtctaagttcttatataatgatcacactagccctgtgccaggggattattatccatttctgatacctgtcacaggaccaagtcctccattgtcttctagttgtctgtccatctctcttgctagactgtaaatgacaccacaagaatagaatcttcttaggcactccctaacccagccctgtatatagctcmgtgcctgttacatggcaggattcatgataatgcc

SEQ ID NO: 444232 - DNA, 547 bp, Homo sapiens
ttccagctctaaagataccacagtaaacaaaattaatgaaagtcttgctctcaaggggcatacatgctggtgacagtggacagataacaaagaaacaaatatgtaatgtgtcaggggagataagtgttataaagacaaataaatcacggggaggaggctgcgatgtccagaagggggtaargctgtcatttcatataggtcatcagaaaaggcctttgtgatttcatgacatttgaggagacacctgaaggaaatgagggagggaccatagggccacctggtgaaataatgttcccggaaaaaaataacagcaaatgcaaaggtcctggggtggaaatgtgtttgacacatttgggaaacatcaaagggcagcctaaatgagtagaggggtgatatgggaagaaaaataatatcaaaagatgaagtggaggaacatagacctcaaaaggctttgtcagccttagtaaaacttttttaaaaattctaagtaacaagaaaagtcaaaagaaggtgttgagtctacctaatctgatttacgttataaagg

SEQ ID NO: 444233 - DNA, 505 bp, Homo sapiens
attcagagcaatgggggtaaataacctaaggggagcacactggaaggggactatgtgtgtttctcattgcacataaacttgagagggaaaaatagaaacacaacaagcacacttggaatggcccaacttttatataaatgggccatttccagaaaagcaagtgggattcttcctgaagcactgttatcgagggcagggggccataatggtggctatgagagttaatcgtgggaaaggaagcttagaatgcacttgttttattttaccccaaagggcccagtgtttcctgagatacactccatgcactggaactgctcactgccttgccatacagaatccaaaatatcaggatagagggactttaggcactcacggccatcactgtcatttcacagatgagaaaactgaggyccatagagagagagggacttgctaaggccacagcaccattggtggcaagagggactaggaaataagttcctcaccttagattccgtgttctcta

SEQ ID NO: 444234 - DNA, 601 bp, Homo sapiens
caagggtgacagaaaggctaaaaacagcaggacactccctggtggagggctacaagagtggtttattcttcttgggcrgtagttagactgtataataacagacttcaaccaaaaagctatgaaataagaggggactacccagggtctagtgggccttaaccctgaagtacaataatggtcatctagatctatgatcttggcagtgagaagcggtgatcacaggtgagagagtaagttaaataagtgctgggccctgctctacccctatttgaccttggatatttggccttgctatttgaccttaaataagtcacctgacctctttgaccttcagtattcttatctgtcaaatggggaaggtaacatctacttttcactttgtcttaagagctaggatggaatatgcaaagctctagagagatttccagtgaaaagaagtaatgactgaccattactaaccatgattgttactgagggcaaggaataactatgctttataaatgccttcagtaaaattattcctcttggttactaaaacagcccagttgatcatagcctaatatcttcaactcattggttattcagtctccacagttctaat

SEQ ID NO: 444235 - DNA, 552 bp, Homo sapiens
cagcatttaaaaatactagatattttggctgggtgcggtagctcacacctgtaatcccagcactttgggaggctgaggcaggcggatcacgaggtcaggagatggagaccatcctggctaacacggtgaaaccccatctctactaaaaatacaaaaaaaaaaaaaaatagctgggtgtggtggcgggtgcctgtagtcccagctactcgggagactgaggcaggagaatggtatgaacccaggagagggagcttgcagtgagccgagatcgcaccactgcactccagcctgggcgatagagcgagactccatcttaaaaaaaaaagaaaaaaaaactasttatttcatccatgttctcactgtctacaaccaactgcatcttttctttatatgttattgtacatccatatatctaacatgaatttcctgcacttcttgtgaaagctaattctgtaaacatgtatctgtgtcccagagagtttctgccaagatcatctactattttctttatgctggacattttattttattgccattttttttcaaattata

SEQ ID NO: 444236 - DNA, 499 bp, Homo sapiens
cataataatggcaattacctatgatttaaacttaaaataaccaagggactgtattcacgtattgctttgatagttaaacataaattaactgtcattaggaartatgatatatacttatgggccttgttttggatgtattaaatacttaagaaggtatccaattcagatgactgtgatagatatttcaggaaaatgagtcctcaagtaaagatgttttgtctggctgccatgagggataaaagcatgaaagagagggaagggggaagagaatgaagaagaaaagataacagataaggaaatgaaggagacaaggaaaaaagggaaagtgaaaagaacagagaaactggaggagtgaggaaaggatgggagaggagagaaacgaagggcagaagtgagtgggtgatcagatggggaggacagagggaggattttgctctttactgctatttgggggttctcttttaaggaatccagggttacctgacaccctttcccagtt

SEQ ID NO: 444237 - DNA, 499 bp, Homo sapiens
cataataatggcaattacctatgatttaaacttaaaataaccaagggactgtattcacgtattgctttgatagttaaacataaattaactgtcattaggaagtatgatatatacytatgggccttgttttggatgtattaaatacttaagaaggtatccaattcagatgactgtgatagatatttcaggaaaatgagtcctcaagtaaagatgttttgtctggctgccatgagggataaaagcatgaaagagagggaagggggaagagaatgaagaagaaaagataacagataaggaaatgaaggagacaaggaaaaaagggaaagtgaaaagaacagagaaactggaggagtgaggaaaggatgggagaggagagaaacgaagggcagaagtgagtgggtgatcagatggggaggacagagggaggattttgctctttactgctatttgggggttctcttttaaggaatccagggttacctgacaccctttcccagtt

SEQ ID NO: 444238 - DNA, 499 bp, Homo sapiens
cataataatggcaattacctatgatttaaacttaaaataaccaagggactgtattcacgtattgctttgatagttaaacataaattaactgtcattaggaagtatgatatatacttatgggccttgttttggatgtattaaatacttaagaaggtatccaattcagatgactgtgatagatatttcaggaaaatgagtcctcaagtaaagatgttttgtctggctgccatgagggataaaagcatgaaagagagggaagggggaagagaatgaagaagaaaagataacagataaggaaatgaaggagacaaggaaaaaagggaaagtgaaaagaacagagaaactggaggagtgaggaaaggatgggagaggagagaaacgaagggcagaagtgagtgggtgatcagatggggaggacagagggaggatttygctctttactgctatttgggggttctcttttaaggaatccagggttacctgacaccctttcccagtt

SEQ ID NO: 444239 - DNA, 547 bp, Homo sapiens
attctctgtcaccatttacactcatcgtttccccctgtactcatcttgagggtttctgaattgttcttatacctcatgtttccattcacctatgarctattccctttgcctaaaatacttccttttcttctatgctcctggcttaaccatttcatcagttatcagctcaaatcttacttcttccaggaagcttttagtgaaatacctagattaggtcagatactacaactgtgtactcccatttccctctttattttgcaaccaaaaaccttatcatattgtaatataatttatttcttataattatttatttcttatacttactctattttcctgctagactgtaagtactctgaggcagaaactgtgtccattttcccccatccatttcaacaccagtctctagttcagattctggtgaatagtgaggcatatcatatttattggatgaataaatctttttggaaagtgaatgggaatgtcaataatatttcttctttacatttttctccccaaatctagatttgtcaactcaactgcacactgg

SEQ ID NO: 444240 - DNA, 556 bp, Homo sapiens
aaccatttcatcagttatcagctcaaatcttacttcttccaggaagcttttagtgaaatacctagattaggtcagatactacaactgtgtactcccatttccctctttattttgcaaccaaaaaccttatcatattgtaatataatttatttcttataattatttatttcttatacttactctattttcctgctagactgtaagtactctgaggcagaaactgtgtccattttcccccatccatttcaacaccagtctctagttcagattctggtgaatagtgaggcatatcatatttattggatgaataaatctttttggaaagtgaatgggaatgtcaataatatttcttctttacatttttctccccaaatctagatttgtcaactcaactgcacactggacatgtccgcttggatgtcttacttctcaagtatattgtgtataaacctgtacttctgactacccctttcrttgtcagctaaatctgtcttatctactgccctccctatctcagctaatggaagattcatatttccagttgctcaagtcaaaa

SEQ ID NO: 444241 - DNA, 482 bp, Homo sapiens
tttcatctcaacaatgggtaattacattgtgcttggctaaggctcggactgctgggtcaaggccatgtgaatttgtgaagtaaaaagaaatcaaagaccaagcatcatcagaaaatgctaataattctactgtctgccctcaagttaagcttccatggatcttatttgcttcacaatactctaatctttaaaaaaacccaggtgatagccagatataagtaagaaatatcaaatcacactgaccttaaacacctacttgatgctaggaattttatctcayttcattgaattgaatagtgtctgtttttcttgttcttctttttttttttttcttcagtagggaacatttcccaaagtaatagacttaacaagaaataacttcaggatttggattcaagtcagttgaagacaatcgccatttgcagtttcaattttactaaactgtctggactgtcagtttactggcctgaattttggttacg

SEQ ID NO: 444242 - DNA, 524 bp, Homo sapiens
actggaacttgggttcaattggaaaattagaatgagaaggaagcatataaaataagtcctgaaacagcctttcaatgcagggaccatgttcttgaggaaggaatctttgagcctgagatctgaagggcaggtagaagctaccatagtgaagaacaaaagaaaaaaaaggaagcacattcaagcagaaggagcagcccatgtgaatcctttgaaatgaagggctactgggagtgggtggaattagrcatttagttaactcaaagaaaattagcagaactgtcctgtcactgagagagacaagaaatggtgtggaacccagccaaggggtaggtgggaaccagatcatggcagatctgtcagccacctgaggattttgttctttctcctaaaagcagtaagtagtaaccaaaaagttttaaacagggatgtgacaagattgaatttgaattctgactgccatggaacatagattggaaagtgactagagtagattctgggagacttagttaaaaggccattgtaat

SEQ ID NO: 444243 - DNA, 562 bp, Homo sapiens
cattactggtccccatcaacaggtgtggtccggaattatcttgttgctgtcctctcaacaagcactgggcgctggagtggaatgaatcttacttatgttcatgcttccaaagcctggcacatagtaagctttcaggaaatgtatgctgagttggactgcactgaaccaggcctcttctggttacctacagggaacatgtctttctgggtttctgcttgggcttgagagttaattcagggctccatgttcagggccatttcctgcatctcagcacactacagtatatatatttcaatgttggtctactaccctcaaccttgacgagcaaaccctgcctttggctttaccatacactaaaccagggcgtcccaaacccagtgcagtctcctatctgccactgcccactgcttagacagcatgcattcttgctgctctgcacagtgatcttgaccatcaaktccaacagtaaagtcagcaaaataaatctaatctgctccttacctgcccatgtgaccttggataaattaattacatctgccttatcagttccctaacccataaa

SEQ ID NO: 444244 - DNA, 524 bp, Homo sapiens
tgcaatcagttcatttgcaaataccagcttgctcagctagaggtggcccaaggttcccagtgttagcacctctgtccgacactgctccatgccagagaggtgccctgcggtgtgagaaatactcattaaagcctcagattcagatgtcaggaagcrgcccacagcccgtccaaggaagttcatctctcctgggaaggcttcagaggaattagccacagagcctagtgtctgtgtgctcctacccctcggtacctagcactcaaaattcctcaaattaatataattgagtgacctgctaatggtggaacgccagacatcctctccaggtgagaagaatatgatgattagggcaggttttctcctccttagtaggagagacggcaacactgtgagctctttctttgaaggtcccatgatggtagagcatttttagctatttacacctgacgacttgcagaaggagagcagagacttattcaaagatgcagacacctgcactgagcatggtgaagtgacttgcccaa

SEQ ID NO: 444245 - DNA, 524 bp, Homo sapiens
tgcaatcagttcatttgcaaataccagcttgctcagctagaggtggcccaaggttcccagtgttagcacctctgtccgacactgctccatgccagagaggtgccctgcggtgtgagaaatactcattaaagcctcagattcagatgtcaggaagcggcccacagcccgtccaaggaagttcatctctcctgggaaggcttcagaggaattagccacagagcctagtgtctgtgtgctcctacccctcggtacctagcactcaaaattcctcaaattaatataattgagtgacctgctamtggtggaacgccagacatcctctccaggtgagaagaatatgatgattagggcaggttttctcctccttagtaggagagacggcaacactgtgagctctttctttgaaggtcccatgatggtagagcatttttagctatttacacctgacgacttgcagaaggagagcagagacttattcaaagatgcagacacctgcactgagcatggtgaagtgacttgcccaa

SEQ ID NO: 444246 - DNA, 524 bp, Homo sapiens
tgcaatcagttcatttgcaaataccagcttgctcagctagaggtggcccaaggttcccagtgttagcacctctgtccgacactgctccatgccagagaggtgccctgcggtgtgagaaatactcattaaagcctcagattcagatgtcaggaagcggcccacagcccgtccaaggaagttcatctctcctgggaaggcttcagaggaattagccacagagcctagtgtctgtgtgctcctacccctcggtacctagcactcaaaattcctcaaattaatataattgagtgacctgctaatggtggaacgccagacatcctctccaggtgagaagaatatgatgattagggcaggttttctcctccttagtaggagagacggcaacactgtgagctctttctttgaaggtcccatgatggtagagcatttttagctatttacacctgacgacttgcagaaggagwgcagagacttattcaaagatgcagacacctgcactgagcatggtgaagtgacttgcccaa

SEQ ID NO: 444247 - DNA, 508 bp, Homo sapiens
tatataaatatgtgactgacacagggtatgctaggtgaatgtgaatggacttgttctttttaagagtggatctttttcttagaactaaattgaaggtagaacccccaaatatgcaacaaataagagcagagctgctctgtctgaagcagggtggagagagagccccaacctgcccttttgctgtcttgtgatgcccttttagaaaccctggaggcacctctacagtaggaactaccagctgcagatcagaaatgccccggaagaatagagtccaaaaaacctggattcaagtcctggctccttccttctgtgcccctgagagagtagtaaaccctaattctatggaggcatgggccctgtcttgtccatctctgtattctccaccatctagcagaatacccggtatatccaggacayggctggaactaggggaggcaagcaaggtagccaggcactgaaggtgacactctctcaggtgaggaccctgcactcaatgaccccgcaagtg

SEQ ID NO: 444248 - DNA, 483 bp, Homo sapiens
gaagatgatttcttaaaggtaacgtggctgataaatgacaagatccaggtctgtgtcctgagtttctgttttccaatctaataatccaatctgttgtaattctaatccctatcaccccatccctggaaaattaaaaatatcaaggggttgatcattttgtaggaaaaaaggccaatggttggatttatataaatattataaatcttcagcctaacacttttcacttcatgttataaaagctccaaggacattttaggtatactatgcatttatgctttcattttattttaaaaaatgcttacatakctcttgacaggcaccaggcacagtcctaatcacctaacatatataaccatattttatagcaaacctatgaggtaggtattttagagcccccattttaaagaaaatagggcacagagaagttgcccaaggtcaaatggccagtagataggagaattaagacttgagtctggctccaaa

SEQ ID NO: 444249 - DNA, 611 bp, Homo sapiens
tgacccccaactctacatcgtttgttcacagcaactcctccctttttacagacgtatccwtgacatttcctaatcattggcatggttacataattaatgcctggctttccaacaaaactcaaatgtccatgaaggtagagatcctacttcagacttcatccactttaggagcttggatgactgtctttccacccctgaaactcatttttctgaactatgaaaggcagaaaataactaagataccagaaaagagactttgagctttgatagtctgtagattctttggatatctatatctctatgcatatgcacatataaatatacacatagaggtatgtttatctagttatagagatggacagaagtgtgtgggtgcacacacaaacacatacacacacaaatatccacacacacatacacagcccaaggaatcaatacaactacctctgactcttccctctccagaggcttcctatgcagatttattctttctgtcttctgggtacgacagaaacaatacatcatatgaccacaaactggattatgctattcattaattttattcagttgagatttattgagtgcctgctctgtgacagctattatacttg

SEQ ID NO: 444250 - DNA, 608 bp, Homo sapiens
gaaagaagatgattcctccagcatgccttatggcaggacaccacacgctgtagtmaaaaacctgggcatggctgcactgcatgctgtagtcagaaacctgggcatggctgcactgcacggtgtggtcaaaaacctgggcagggctgcactggctcctcttcttactacctaagtcatctcaagcaaaatattcagcctgcctgttaggttccacttagtatctatgtacaaagattattgagaggactacatgaaagaatgcctacaaattatctggaaaagctcctggcacatagcaagcaaacaataaatgttgtctgttcttatttttgatgtgatgacgatgacgatattgatgatgatgccactcctctgattaaagtggttaaaggtttaacaaaaccttcaggattaatgaaagaaaaacaggtgtgggtgtataatcaaaaggcagtcttcacatatttgcagagctttgataagcaggagggtttagaattctgtgcctgttgaaccagcattggtgacagggctgttgagaaaggtgtatatgtcaatatgcatggaagggattctagcagattaagctatacagttgaacaacgggc

SEQ ID NO: 444251 - DNA, 570 bp, Homo sapiens
ttggccctcacatttctttctgactaaggttcgtcttcttttgtttgtttgcttacaagttccctagaaaagaaaagaaagagtacttgcacacaagagatcaaaattttgaagggaarggtgacacaaagcagaaatctgtgagctccttagaggaaatagcatttcttatagtacaagaaagatctttattcattataagatgggattctgagactcaggaaaaaaatggggctcactgtgttattgagtttcaaccactgggagtactcaagtaacagaagaactttaggggaccctcaagttggatctctggagaccttcaacaacattgatgatattgctagcaggcacttggatcaactgaccatgctctgtgaggctggggaaagaagaatatctggaaaagataactgggaaagaagatccaatcaacagaagctgaaggtgaacctaagacctgaagattatagcccaatcttcatcgctgactttgattctgctcttttgctgacaggaactcagcttgtttctccttttaacaagtagtacattaggaattgttggagg

SEQ ID NO: 444252 - DNA, 568 bp, Homo sapiens
gtggcattgctatggaaaccacagaaggacattaattagctatcaaataaaatcattggaaaattctggaccctggcacatctgcccccttcaaagagaagggcaagaagaggtcacactaacagcaaagctcccttcagtgattaaaatcaaagttacatgtagtccagagactacatgttgcaaagtggaagaaagatgggggagcaaaacgggtgaacacaataggaatgaggctttgggattattcaagtccaagaatataatttggaatgtggagtatcttgttgggttgtctgtattgataaaatgatccaaatgacaaatatgttatcctatactctgttatgtagaaagaaaatgataataatgatacrgatccatccactagacggtgataaatgatcaggggtagagaccatagagtccaagactaagggtgattaacccctaatataatagatgcagatcctataacttttaagttaatagagaaaaaaacaattgaaaagaaggcaaaaaagacaacaaaagaatcattaaaatagctggacacatacaaacatgt

SEQ ID NO: 444253 - DNA, 588 bp, Homo sapiens
caaagagtagtaattataaaaataataataataaatccaacaaaaacacattatcatgaggtaattcttgtttgcaaacattttacttcattcacaattcacagaaacttttgaatactttttctaaaccattaktttttcagatgaataaaataaggacctaagaaatgaagtcacatgctcctggtcattaaaatgccagaaccagaatttatttatttttttcctgcacgtctccataataccttctttggctcaaaaggcagataatgtttgttgaatgagtgaatgaagttataactcaagtgactggaacatagtaatggcttatataatgtcagccaatctcatcattaattttctactcatttctagggtctttataaaaggcctccttctcagtaagacctcccatgttaccagcatatatggatcctgcaattgttcatactcataacttattcactaaacagttcatatatttctgtcctgtcttttagagtcagtgaaaagcaccttgtgtgcagaaacagcatctaaaaggttgctatgtctgtcactgttttgactccagtgacagctaaacag

SEQ ID NO: 444254 - DNA, 524 bp, Homo sapiens
gatgaacagacactctgatagatatgytgaccttgttatactctcatctcctaacttcccaaacctttcttatggaactgatacaggtgtcaaggacttagggaggcacaagggaatgtgagtgggggcttatatctactctcaaccttgtgattttaaagaaacagagagagctgtgacattgattatccaggtttatatcctagctttattacgaattacttggcaaccttgaagagatctcttaacctctctggttcttctcttgtaagtggaataagtgttcctatctgatggcacttgcaaacctaaaaggttatacaaatctttgttgctgttacaattattattttttaaatttttagtgttattttctgatgaaggaattgctttctgactgtggaaatgtcgtatcacttccctggatgttaattttcttatatgatgagtagcaccttgattaataacataaacaataataataatgatatttaaggagctctcaatatgcgcaaaaattattc

SEQ ID NO: 444255 - DNA, 524 bp, Homo sapiens
gatgaacagacactctgatagatatgctgaccttgttatactctcatctcctaacttcccaaacctttcttatggaactgatacaggtgtcaaggacttagggaggcacaagggaatgtgagtgggggcttatatctactctcaaccttgtgattttaaagaaacagagagagctgtgacattgattatccaggtttatatcctagctttattacgaattacttggcaaccttgaagagatctcttaacctctctggttcttctcttgtaagtggaataagtgttcctatctgatggcacttgcaaacctaaaaggttatacaaatctttgttgctgttacaattattattttttaaatttttagtgttattttctgatgaaggaattgctttctgactgtggaaatgtcgtatcacttccctggatgttaattttcttatatgatragtagcaccttgattaataacataaacaataataataatgatatttaaggagctctcaatatgcgcaaaaattattc

SEQ ID NO: 444256 - DNA, 524 bp, Homo sapiens
gatgaacagacactctgatagatatgctgaccttgttatactctcatctcctaacttcccaaacctttcttatggaactgatacaggtgtcaaggacttagggaggcacaagggaatgtgagtgggggcttatatctactctcaaccttgtgattttaaagaaacagagagagctgtgacattgattatccaggtttatatcctagctttattacgaattacttggcaaccttgaagagatctcttaacctctctggttcttctcttgtaagtggaataagtgttcctatctgatggcacttgcaaacctaaaaggttatacaaatctttgttgctgttacaattattattttttaaatttttagtgttattttctgatgaaggaattgctttctgactgtggaaatgtcgtatcacttccctggatgttaattttcttatatgatgagtagcaccttgattaataacataaacaataatartaatgatatttaaggagctctcaatatgcgcaaaaattattc

SEQ ID NO: 444257 - DNA, 547 bp, Homo sapiens
tgcaaatggcaccgtttctttggaaagggcacaggtttccaaaatgcagttcttaatttgtcttgttttcatatacaccgtgatacaagataaaagctggtaagcataaaatacttaagaaaatctgtgtaagaaagcttttaaattagtattttatgaagtaaataaagtttgcttcattttctctcacacttcaacttaaccagtgatgacagtcttaatcaacaacttaataattctttatgtatcatttccttccagcaaaacgaaaagaggacatgttatgtaaaattagaattcttgtttgaaagcacttagtgaggtaataacatttttgttggctttggcttaataagaaatagatgatattgatatattcagtattttttacatatatatataatatacataggaatacattaraaaaaaatctagaagctaaggataaataaattctgtaaattccatgtaattatattaaaaaatatctacaaattatgtaagaaaataaaacatttttatgtgaaggttttatagaactaataaa

SEQ ID NO: 444258 - DNA, 622 bp, Homo sapiens
gaatgaattcaatactcatttcctattggatactttctaacatttgaagagtgtttttgtccttctgagtcttctccttcctctttactcartagggttgtggatatcctccagtgaggaaatctgcgtctagaaaccacatccacctattcatattctcataagtactgtggcatttatgtcttcaggaatgcctattacgttgggttaagttttaaaaatatgggaagagctggaatgtcagacatagagatcctcgtcattgaaggaagcctaagaatcctaagaaaaaaaatccaaacatttgtgcttggaaggaagtccctatgagagatgatggcttctaaggtaagagtttggaacaaatccaaggaaacttaccctttgtctacctacatgaatttgtctggagaaggaagttaatttttaagtctcactgcatagaagctctgaattaccttctagaactatgaatatggaacctaagcagcagaagacagagcagacagaatttgtgcatactttttacaaaatctttgtcatttagtagcttaatttttgtttcccttattgcatgacttagttctcaggcaccacttagtcttgctcatttttattctac

SEQ ID NO: 444259 - DNA, 622 bp, Homo sapiens
gaatgaattcaatactcatttcctattggatactttctaacatttgaagagtgtttttgtccttctgagtcttctccttcctctttactcaatagggttgtggatatcctccagtgaggaaatctgcgtctagaaaccacatccacctattcatattctcataagtactgtggcatttatgtcttcaggaatgcctattacgttgggttaagttttaaaaatatgggaagagctggaatgtcagacatagagatcctygtcattgaaggaagcctaagaatcctaagaaaaaaaatccaaacatttgtgcttggaaggaagtccctatgagagatgatggcttctaaggtaagagtttggaacaaatccaaggaaacttaccctttgtctacctacatgaatttgtctggagaaggaagttaatttttaagtctcactgcatagaagctctgaattaccttctagaactatgaatatggaacctaagcagcagaagacagagcagacagaatttgtgcatactttttacaaaatctttgtcatttagtagcttaatttttgtttcccttattgcatgacttagttctcaggcaccacttagtcttgctcatttttattctac

SEQ ID NO: 444260 - DNA, 606 bp, Homo sapiens
cctttaccacctgtctgactgacacctttgcatatccactgggccaggggtcttattaatacgttctcctcccattatttcattaatakcttgccttcattaaactactctcctcatttcaagataaagtggtttctcattgggaaaagaacaatattttgagtgctcatagaaaacttagttttaaaattccatgcaaattacattttttttttactcagctcatatcattatttttaccctgaaggtaatcagtgtgaaaactgtcaaaaatctttgcttttccaacttctaatcttcagaaacaatggtcttccagtgagggcattttaaagcaaaggattcaaatttagagtctttgtcatttcaaagaatgcagaggattgtatggaaaagtcagttattccttggacttctatttcttattttgtttaaagcatttccgatgtcttctcagaactgaaaggatacaaggactattcaaatgtaagaaaaaattcatgagcactcacagaaaccttgggctgaaccaaaagtgggactcaaattgaaaaatgacattgatatctttcttgaagtgactaaattaagctctaaaattttatt

SEQ ID NO: 444261 - DNA, 529 bp, Homo sapiens
agacaaacaacacattcttcaaaaagcaagagaaaagtgcctagttacttataaaggaactctcattaaacgaaaaggatttctcagcagaaaccttacaggccagggagcatgaaatgacacattcaaagagctacaagaaaaaacgtgccaggtaaggataccatacctagcagagttatcccttataaataaaagagaaataaagtttttcccagacaagtaaaagctgagggtattaatcactactagaccaaccatacaagaaacactaagagggttcctacaccataatcaagtggggtttatttcagggatgcwaggatagttcaacatatccaaatcaatgaatgtgatatatcagttcaacagaataaaggggaaaggccatctcaatatatgcagaaaaagcatttgataaaattcaacacctcttcatgaggaaaacacaacaaaatagtcatagaaggaacatgcctcaacataatataagccatatatgacaaacccacagctaacttcagactga

SEQ ID NO: 444262 - DNA, 593 bp, Homo sapiens
aagttttcaaataatttgggtaaataccaagaagcatgattgctggattttatagtaagtgcatggttacctttgtaagaaactaccaggctttcttccaaagttactgtatcctgttgcattcccaccagcaataaataaaagctcttgtgctcaacatactcactagcatttgatatcgtcagagttttggattttagccattctaatacatatgtagtagtatctcattgtcattttaatttgcaatcccctaatgacatatgatgttgaacattttttcttrtgcttatttgcaattcaatattctttttagggagatgtctgttcatatcttttcttcacttttagttggattttttaaattgttgagttttaagagtttttatgtattttgggtataattcctttattagatatgtattttatgaatatcttctctagtgtagcttctttttaaaattctctctgcaatagtcttttttagagcagaagtttttaattttgatgaagttccacttatcaattttttttctcttatgaatcgtacttttggcctcatagctaaactttcagaagggcttcaagatggc

SEQ ID NO: 444263 - DNA, 543 bp, Homo sapiens
ttctacagcccatctgccttgaccaacctacgattggtcacctgtataatgtcactttggactcatgaacaaatggcctttttgaaacttgttggtaaagagaggtgcttatttcagtatatgaagtaagttcttactggttaacattaattttgaactagatttttaaattataaacatataaattgacttacatamttttagtaattttataagctatattgcatagattttataagttgtatattaaaagtcaaataggtcagatagcataatgtaaaaagttaaagcctcatcctgccacatgttcactttccacctgtgaccatttattatcagtctcttttttatttttccagaaatgttccatgtctctaaagcatgtagatgtatgaatgtatttgtcttctttatagcaaaaaatggcatttaccagacacagtgttcaacaacttgctttttttttcattaaaactgtatcttaggcatgcccttatgtcagcacacattaattcacctcattccttttaagcactacataat

SEQ ID NO: 444264 - DNA, 564 bp, Homo sapiens
tgggtaatttataaagaaaatgaggtttaatggagtcacagttccacgtcgctgggaaggcctcccaatcatggtggaaggtgaaaggtatgtcttacatggcagcaggcaagacagaatgagaaccaaatgcgaggggcttcccaagatgagattcgggtggggacacagccaaaccatatcagagcctatatgtatatttatatacagattccaaatctaattttgaaataaagatataaacaattgttagctttttaaaaaatgaagctaaaatatgatttttatgaacaaattatctttggattatcaaataaaatgttgcatgtctttaatgagagcagtgaactaatatatgagtaaaactacacattttaaagctgtgatcatctaaggctttgctaagggaattcyagttgataacatgattcctcctcttaattaatagccacttgggatgtactaatgaaagactaacatgtattaattcattcaatacacatgagagtccagttatacatcaggtgctgtaaaggagcttgtaaaggagtttagtggagaaag

SEQ ID NO: 444265 - DNA, 624 bp, Homo sapiens
aaccaacccttgtctccatgcaacgaggtattattttaaagcaagaggtgatatagtgactactaatggacctgtcacttaattgatgcctccatttcccagtagacataatgaggtaataattcctacattatatgtggacattttgcagaaggggaaacatttagagttctgcagcacattaagatttcatggaaataatgctgaattataaagaaatttctcaatgtgtcatggtttcccatggcaccagtgatttatgtgattatatagatagtgttgcattatacttggcctcaatactcatccggaaacctggcacaatctactgaasaaaccaagagtggtataaacatctcatattcatgtacatggcctatcttatactggccatgtacttttctttcacacttgggctgtggaaagagtgggtaaaggaaattaccacctaatgtgacatgccataacagagaaaggtccatatttataggctcactgaggaggggtaacgtctggtgtctccccagcaagataatcttcctcttcctttggggccagttcagcacagagcacaggctatacagagcacaggctatggtatcccccacttgcctcctctctctc

SEQ ID NO: 444266 - DNA, 536 bp, Homo sapiens
gatcaacatcagcttgaatagcataacttycagagaaataacaactcactctgttaaacttcttgttgtttacaattttgactcagttttaatggaacccattatctttttaaaacaagtatttttaaaatataattactgcggaggaaataggtaacttgtgtttccctcttgaattttgatattttttattgataattgtgatcacaaaatatgatttcacatgaagaaaaattcaccgttcattatagttctaaaggtttgtcacctacaaatgaaggggttctggtaaattctatatgtatgattcttatagatctaactttatgtatgacattaataagtatatatactgcaccatcaagtacaactggaagagaaaatcttctggtagagatgatatctcatggaatatcttatgattctgcacatttcaaatcttatttccactacccatatacttccattgctaggtaatctctggcaacatacactcaggttattataccagctaagaaagtgaagtgggtagtaaa

SEQ ID NO: 444267 - DNA, 536 bp, Homo sapiens
gatcaacatcagcttgaatagcataacttccagagaaataacaactcactctgttaaacttcttgttgtttacaattttgactcagttttaatggaacccattatctttttaaaacaagtatttttaaaatataattactgcggaggaaataggtaacttgtgtttccctcttgaattttgatattttttattgataattgtgatcacaaaatatgatttcacatgaagaaaaattcaccgttcattatagttctaaaggtttgtcacctacaaatgaaggggttctggtaaattctatatgtatgattcttatagatctawctttatgtatgacattaataagtatatatactgcaccatcaagtacaactggaagagaaaatcttctggtagagatgatatctcatggaatatcttatgattctgcacatttcaaatcttatttccactacccatatacttccattgctaggtaatctctggcaacatacactcaggttattataccagctaagaaagtgaagtgggtagtaaa

SEQ ID NO: 444268 - DNA, 472 bp, Homo sapiens
ccatttatttctgcagctactggtttcccttactgcttgttgtaagtttaaaacaacatcaacttttaaggacttgaaagtgcttttctatttaaaatcaaacaagacaagcatcattttcattccgggactgtgctttgcttcttgaagtgtgctgaatatatagacacccactgaaaaataataataataaaaaagctaagtgatggaaatgagtaattgcttggcagcaagtytgcagggagagcactgacgccatgcagcacatatttcatgaataatgagaagagtctcagagctgtgcaatcactgcctattgggtcagaaatttcacattagtggattcatcagagcagatcagtgtcataaagacactctctcctgaggtaaacacaccttttcctttactgaactgtcatcttctggttgtacagtacatacagcaagaactttctgagaaagaggagggaca

SEQ ID NO: 444269 - DNA, 442 bp, Homo sapiens
gggatggggtttcaccatgttggccaggctggttttgtattcctgacctcaagtgatacacccaccttggcctcccaaagtgctagtttcacaagcatgagccaccatgctgagcacattcaacaatattttatcagatgccctatttgctctgtaccagacactgagattaaccatgggcacaaagtggtagccaaaaatgaaaagattatttaaaccattctgccttcaagaaatagacatggtcctacctcaaaacacatggaataccattcctaatcatttaaattattccttttgaatttcattccatrtacattaggttataaacatatagtagaaaatccatgactttttaagagtgcaagaaatggagtagcatacatatatttatattatgggtgagcatgagcccctctacatcctcggcttcaaggcacca

SEQ ID NO: 444270 - DNA, 532 bp, Homo sapiens
ttctgccttcaagaaatagacatggtcctacctcaaaacacatggaataccattcctaatcatttaaattattccttttgaatttcattccatgtacattaggttataaacatatagtagaaaatccatgactttttaagagtgcaagaaatggagtagcatacatatatttatattatgggtgagcatgagcccctctacatcctcggcttcaaggcaccaaaagtaaaacttcagaattatcccatttattytggactttggtgaagtggagcatagaatacctattcccaacaccaatacacaaaaaatttctagccatgcagctctatttttatatatccatggtaacctatttttctttctttgtttcttcttcttcttcttttttttttttttttttttttggctgctaagtggatgttgctaagcagtttacattgctgtactgggtaattatatcaaaactgttacatttcttgcagattctcattttattatatacaaattctgtctacttactcaaagaaac

SEQ ID NO: 444271 - DNA, 585 bp, Homo sapiens
ggaaaagatctcatcacctgccattatcaggctgatgaataattcagagctctccatcagagccgagaatttcaggctacgctgtgctctacacttgcagggagggggaagcatgaaggtgctcattgctgggattaaatgggggcccaggaaattcacttctgctccagactgtgtgggcatcataacgggtgggggaagcaggcatgaaagaagatttgcctctttggaaggtggccaggcagkttcaggggccaagagccagcaggaacctcctcaaagattcctgactgttatgaaattttggtggccagtgcagaccccctggcacttatgtgtccaccactgtagtcagaaaaagaggccgcagctcttgtttccttgcctgctggtgggttccagaagagcaagtaggtcagtctcctggatatgctcctcactcgttgagcacttcatcatacccccatttctgctctctccctgtgtatgagaaaatatttgcactgtgatcctcgtgtaacagatttagggtcagctggcttctatggggaatctcaagacagtgtctaactaccagctgtgtga

SEQ ID NO: 444272 - DNA, 431 bp, Homo sapiens
gagataaagtgccttttcagaaacatttggtttcaagagagaaagtgaaaattgggaggcattaggtaattggagggctgaaaggaggcaaaaaatgaaagcagagcaggtagagaaatgagcagaactggaaaggaggaggcagagctgtgttagagatagaccacgcacagcaggagaggaccctaaataggatgcaacagaaagtctgagtcatccacattttcatccatttggatcattctcattcctaattttgagtacaatcagtcctacttttgtattgcaccctaamctatgaggaatatagcatgctagagaaagactagcaacagctttcagctagccttaaagaatgggctatttagttatttgattcaggaacagcatgcaattcattcactcattactttatattttcaagatatatt

SEQ ID NO: 444273 - DNA, 613 bp, Homo sapiens
tggcaagggaaggcattccactgaggaccaatctcttttcccctcacaatgaaatagatctactatactcatcattgtgccacaggggctgactggggcctctggggtttgtgctatgtctgtggattaatgttggtcactgcttttggctgagttccaattaaycaggtcagccttggtgaaggtaagtccatgcatggcttccatccctgtcatgatggccactttgttcatggacccttgtggaagcactgggtggctattacaagaggctgactgatatttaccagcatgtcattttatccactcggttattaaaagcttcctctgcattgactgtcatttggtagacattcttatggagtacaaatacagaccacagtctgtaaaaactgtattttgtaatccattttgtaaaatcataactgtttattggagcaactcaagtcaggtttttgacaaccagagctagaatttgtcctgctaaatggattcagcaatactctagtaggctgcccatctagtttctcaattatccactgccaaatatggctaagaaagcctgattgctgatgtgttcctgctgtccctatgatagatgtgccaccttgtc

SEQ ID NO: 444274 - DNA, 542 bp, Homo sapiens
ggcttctcttactttgcaaataaattattttatcatatgctatgctgtacagaatgccatgatggtagagaaggcattgtttgaatcaataggtagtagttctgaaaaaagcattatggcaagggaaggcattccactgaggaccaatctcttttcccctcacaatgaaatagatctactatactcatcattgtgccacaggggctgactggggcctctggggtttgtgctatgtctgtggattaatgttggtcactgcttttggctgagttccaattaaccaggtcagccttggtgaaggtaagtccatgcatggcttccatccctgtcatgatggccactttgttcatggacccttgtggaagcactgggtggctattacaagaggctgactgatatttaccagcatgtcattttatccactcrgttattaaaagcttcctctgcattgactgtcatttggtagacattcttatggagtacaaatacagaccacagtctgtaaaaactgtattttgtaatccattttgtaaaatcataac

SEQ ID NO: 444275 - DNA, 596 bp, Homo sapiens
ccaaattaccacttcttgttgttgttgttgttgttggtgttgttgttgttgtttttctgagctcagccatatgtccaaattccaagattcaggatctcattattttccaatcagtattctawcgttcacatgagaaacctgacaagactgtgaattcaactgttactgtaattcagcaacctgtaaactaagtttcatgtttggtttttagcaatattagctctgaggctacagaaaattagacaaattttagggccattatggaagctctatagttctcaaactgtgagttaagctgagtgccaaggcatctaaaattatctttttccttccttaggtactcaggtacaatcaaaattagccacatcacaccacagtctttgaagttgtcattattatcatcattgtcaactggactcaagccacttgagctcccaaggcactcactacagttcacatttcatggcaatctaccactggttataatttgattgattctgatatccctgtatgccatgaattaccagcatcccattttctattggcaaagagctcagctttgtgctcaagtccaagggcaaaaccaaaccaatttc

SEQ ID NO: 444276 - DNA, 611 bp, Homo sapiens
tgcatcctgccatgtggtccaacagcttattcatttccacattcctggtaccccattgacatccctacctgcagtcaggtgccactgctggatgctgccaccagggtcgaagtatgaaccgttggcagtggcctcactacccctagtggcaaggcaaccatgcgtttacaagcacactgaaaaaagacaactgtgattgcagctgtcacttgaggctaaagggtggactccccagcttcttgtttatagctgctgctactgaaagcaactccaccctacctagcagcagggctatgtagttagtgtagctgctgacacccctacctgagcattctgctaggggcttgaggctcaccttgcctctacctaccacagccaatgccctcacgcaccactgggggggcctgaggacatgcccacctggcctggcttcacccacccccaggtgcccaagtacaccatccagggacctggtagttgccctgtcccatccaccaccattggcatctgaacactcctcttgggaagcatgaggtcaggcccacacaagctrtcactaccaccacagctggcattcacctacatgcactgcctgcaggcctggggtctgg

SEQ ID NO: 444277 - DNA, 618 bp, Homo sapiens
tctttgtacttcattcttccatttgttcacagtcccagacaatccttggtctgctctttgtcactacagatcagtttgcgtgttctagaatttcatacactctgaagtcttttatgtctagttttttttttttttaatccatgttgacagttgttagttctgcttttcccacagagaagtatttcattgttgtatggatataccacatctggtttatcaattcaattgttaatgggcatttggcttgcttatagtttggggtcattactaataaagctgcctaaacattcatgtacaagtgtttgtctgaacaagtgtttcattactctcctgtaaatatctaggaatagaatgactgggttgtatggtagatgtatgcttatcacatttaaaaaaawctctcaaatgttttctatgtttgtattctcatcaatggtatatgagcatcctaaatttttgccagagcttggaagtggtatatgagcattgtaaatttttgccagagcttggtattgtcagtctttttaattttaacaagcctaacgtgtatcagtttctttgatggttttagtcataatttcctcaattactaatgatgttaagcatcttcatgcattt

SEQ ID NO: 444278 - DNA, 643 bp, Homo sapiens
atgttaaaacttaatcaaggtgatgatattaaaaaaattggggcctttgggaggtgattaggccataaaggcggagggagaaatttgtgcttttatttaaaaaaccccagagaaccagccagtcctttcaactatttgaggacacagtgagaaggtgccatctgtgaagcagaaagagatctctcaccaacagtgaatatgctgttgctttgatcttggacttcccaacctccagaagggtaagaaatatatttccattgtctataagttacccagtctaaggtattttgttatagcagttcaaatgaactaagacaagcagctaatatraggcatctgctattttgcagggaagtgaggttatagtctggatatattagtccatttttatgttgctgatacctgagactgggcagtttattgcccagaaagaggtttattggactcacagttccatgtgcctggggagacctcacaatcacagtggaaagtgaaaggcatgtcttacatggcagcatacaagaaaagagagcttgtgcagggaaacttctctttttaaaaccatcagatcttgtgagacttattcactatcatgagaacaacatgggaaagactcacccccatgattcaattacctcccact

SEQ ID NO: 444279 - DNA, 636 bp, Homo sapiens
aaatgtataatgacacatattcaccattacagtatcatggtatagttaaatacatagaatcatttctctgccctaaaatcctctgggctttgcctattcatccctctgttcccccaatctttggtctttttactttctccatatgaatctactttttcaactgtatcttttatgaaatctaaaaacagtttaagtagttatgatgaacattagcattcagtttgctatttgttctaagtgtaatatacagattagattttgaagacagtatggagaaatgtaaaatgtctcaataatttttcacattgattatatgctraaatgataacagtttggctatattaagtgaaataaaacatgctcttaaaattaatttcatctatttatttttacttttttaacatggctacaaaaattttaaattatatatgtggtttacattatagtattggacagtgttgctttagagttatgattactaaactccagaaatatcattaacagaaagatcaatcattttccagacattatgaataaactgtcttccactctattgcattaatattagatagaatttaagaaatttgcctgagtaaatacaattaaccattgactaacattaaatcatcatggatt

SEQ ID NO: 444280 - DNA, 636 bp, Homo sapiens
aaatgtataatgacacatattcaccattacagtatcatggtatagttaaatacatagaatcatttctctgccctaaaatcctctgggctttgcctattcatccctctgttcccccaatctttggtctttttactttctccatatgaatctactttttcaactgtatcttttatgaaatctaaaaacagtttaagtagttatgatgaacattagcattcagtttgctatttgttctaagtgtaatatacagattagattttgaagacagtatggagaaatgtaaaatgtctcaataatttttcacattgattatatgctaaaatgataacagtttggctatattaagtgarataaaacatgctcttaaaattaatttcatctatttatttttacttttttaacatggctacaaaaattttaaattatatatgtggtttacattatagtattggacagtgttgctttagagttatgattactaaactccagaaatatcattaacagaaagatcaatcattttccagacattatgaataaactgtcttccactctattgcattaatattagatagaatttaagaaatttgcctgagtaaatacaattaaccattgactaacattaaatcatcatggatt

SEQ ID NO: 444281 - DNA, 446 bp, Homo sapiens
ccagataatctgactgcaaatgttcataaccagttgtacttgcctcacagggatgtgtggggattcagtgacagttaaaacaccaaaatgccagtgctggcacttgacaggtgctaagcagacattatggcagagggttgggaatcataccactcaagttcaaattccagcttttaccatttagtacctatataacyttgggcagatggtaacctttatgtgcttcagttaattaattgtaaacggcagtggaatggcacctgccttgttgggtggtagtgaggataaaatagctcacagcatgcacaggacttatattagtgcctgacacagtcggtgctcaataatggcaactggagttattaatagccactccataaatgctatgctccctttcccccaaatcctttgtgttcccataaatgttttcaacatacatttaacct

SEQ ID NO: 444282 - DNA, 446 bp, Homo sapiens
ccagataatctgactgcaaatgttcataaccagttgtacttgcctcacagggatgtgtggggattcagtgacagttaaaacaccaaaatgccagtgctggcacttgacaggtgctaagcagacattatggcagagggttgggaatcataccactcaagttcaaattccagcttttaccatttagtacctatataaccttgggcagatggtaacctttatgtgcttcagttaattaattgtaaacggcagtggaatggcacctgccttgttgggtggtagtgaggataaaatagctcacagcatgcacaggacttatattagtgcytgacacagtcggtgctcaataatggcaactggagttattaatagccactccataaatgctatgctccctttcccccaaatcctttgtgttcccataaatgttttcaacatacatttaacct

SEQ ID NO: 444283 - DNA, 647 bp, Homo sapiens
tcaccatccatgaaattattctgggggataggtgataagggctctgtaccttttccaagtcaggaatgagtttccattctaactggagtgtggaaggggcgagggcttgctttgagtgggtctgattatagagagtgggaacatctcaacaagtcattgggggtgacattttsgggagtcttgagatttctttcagtataagggctaataaaaccagaccgagttttaggatacaacagaccatttaccagcccaagaaatacggcagatgagatctcatgtgcagttctctggggaactgctgcagtgggattccagacagaaactggcagttaagcagctctgatgacagtcttggtgcatttttccatagcttccctgtctgttgcctgggctcgccattccagttttcttttccaagtccaagcctcaacaattcagtgtttgcctctataaaaatgagcccagttggcctctctgtttccctcccagtcgatgggaaaatgaggctgaagtcctgaggccttaggaaaggcatcttggggaagaaactggaaggcacctggaatctccatctaagctctgtccctaatgggccaggtcaccctgagcaagttgtttcacctttctgggcctcaatttcctta

SEQ ID NO: 444284 - DNA, 647 bp, Homo sapiens
tcaccatccatgaaattattctgggggataggtgataagggctctgtaccttttccaagtcaggaatgagtttccattctaactggagtgtggaaggggcgagggcttgctttgagtgggtctgattatagagagtgggaacatctcaacaagtcattgggggtgacattttggggagtcttgagatttctttcagtataagggctaataaaaccagaccgagttttaggatacaacagaccatttaccagcccaagaaatacggcagatgagatctcatgtgcagttctctggggaactgctgcagtgggattccagacagaaactggcagttaagcagctctgatgacagtcttggtgcatttttccatagcttccctgtctgttgcctgggctcgccattccagttttcttttccaagtccaagcctcaacwattcagtgtttgcctctataaaaatgagcccagttggcctctctgtttccctcccagtcgatgggaaaatgaggctgaagtcctgaggccttaggaaaggcatcttggggaagaaactggaaggcacctggaatctccatctaagctctgtccctaatgggccaggtcaccctgagcaagttgtttcacctttctgggcctcaatttcctta

SEQ ID NO: 444285 - DNA, 571 bp, Homo sapiens
tgggatggggcaaagaattgctgatacmtgcaggcctctcggtggccccctccctcctgcctataacaaaaacccttcccccatctctccttctgcctggagtgtataacaggcctcttctaccccctcgcgaacttcctggcaatggcttcctatttcacctattatgttcctggcagaaacttttaaggccaccgaggcagcagtctcaaacacagtcttttcaaagacttgggggcaattccgagcctgaattggctctgttttgtttccctgtacagtccccgctctgcagtggagctgacaagggctctggacagcgggacagcgggatccaataaatctgaggcctgtctaggtgcttcatttatcaagaggcctaatttacccaggccctttagactaattgcagatttgcaaaaactgctgagagtgtagaaccgtgtattgtgagtgtcccttgccatatttctgctaatgtgtttcatctggagtacataaagaggcagggatgctgattttagacacagcactttggggctaatccagctaaatgattagccctaaaatt

SEQ ID NO: 444286 - DNA, 507 bp, Homo sapiens
atgaagccgaatatctgggcacacaggacagtatttccacagatcaacagacagcaggacctgcaaggacgaggagctgcttcctctagacaggcaagctcactccaggccacagaccccagctctcagccagtgtgtgcccctacacccaccaactcactcacatccacttctggcttctgtggcccctgcagtttgagatgtccagacccttgcttctcaaagcgtggtttctgccccagcagcacctgggagtgtgttcaaaatgcagaatctggtcccggcccaggatctacattttagcaagatcctgaagtgatgagtgtgtgcatgaacctttgagaaactctgatctagaatgggggcagtgatctgtggygaaatccagccagctacttgctttagtaaattaagttttcttggaacacagccatgcccatttgtttatgagttgtatgtggctgctttcacttacaatggcagagttgagtagttgcaacaggcctc

SEQ ID NO: 444287 - DNA, 549 bp, Homo sapiens
aatgtatggacttggtccctgggttagctctcctcatggttcccaaatggtcatagtgattccaagtgtcacattcaaacaagacaacttcagcagaaggcatgactccatttttttaagacagggaaacctttcccagaagccccacagtagaaccccatcgcctttcattggccaagaccaagtcacatgccygttcctaaccaatcatcaggaaggaaatgggaccactagaattggtgtagactcatcaggattcaccccagagctgggaatactatctctttccttgtggggtggatacctgggtaaagttagggttctgtcaggaagtaagaatgaggcagtggaccctaggtaggcagtcaataataattgccaaacacacgcacatttacacatacaaccacagattacacctcttattaatttgttcattattcctcaaaattttcaccatgcaaaaaacgtgtgttgtggcttacttattaagagtggactattgtatttttcactaaatgaggtttttttcatggtggaacacacagg

SEQ ID NO: 444288 - DNA, 591 bp, Homo sapiens
agacatacgtggtggcctgtttgagcactcccacctgtgagtcctccaccccatccaatagcagtgacaccaggaagcacagagcagaaagcctgcatgaggagctcactttggctccaccacgatcagaagcatctcgttctaagagcctgcaamcatctctttctgtttcaaatgtcaaaattcccttccttgaaaaatgaaaaacaagtccaaatgtatctcagtgtatcatctatctttacaaatgaacaaagaagggagagtattggatattagcaagtttatttttcccattttcatttggttatgaatttttaattcatcaagcatttcaccatggtaacaattttaaataaaccattaaattgtcctgggcaccgccatcattggaatatttttaaggcaaatatattattgacagcacttttatcatatgttccatccattcaattgccttcctaactgaaatgtctttcaacaagtacgtgttgtcaaggttgcctgtcttctgtcctgttcctatatgtttaatggtaaaatacactggcatttgtcaaaagaaacagtaatgaggctgtccaacagcca

SEQ ID NO: 444289 - DNA, 591 bp, Homo sapiens
agacatacgtggtggcctgtttgagcactcccacctgtgagtcctccaccccatccaatagcagtgacaccaggaagcacagagcagaaagcctgcatgaggagctcactttggctccaccacgatcagaagcatctcgttctaagagcctgcaaacatctctttctgtttcaaatgtcaaaattcccttccttgaaaaatgaaaaacaagtccaaatgtatctcagtgtatcatctatctttacaaatgaacaaagaagggagagtattggatattagcaagtttatttttcccattttcatttggttatgaatttttaattcatcaagcatttcaccatggtaacaattttaaataaaccattaaattgtcctgggcaccgccatcattggaatatttttaaggcaaatatattattgacagcacttttatcatatgttccatccattcaattgccttcctaactgaaatgtctytcaacaagtacgtgttgtcaaggttgcctgtcttctgtcctgttcctatatgtttaatggtaaaatacactggcatttgtcaaaagaaacagtaatgaggctgtccaacagcca

SEQ ID NO: 444290 - DNA, 588 bp, Homo sapiens
ctaccacatgctagccatacgagcttgaacaagttattaaacttccctgaaccttaatgtcctcatctgaaaaataggacttagtgcctatctcacagggtgttgtgagcattcaatgagataataaaggcaaagcacttaacacagtacttgggcacataataaccgatatttatgtaaatggtatttatgtatacataaatggctattgttattttatctattgatgatggattgaacatgtgatattttctcatatcaagaaatcgagaatgttctcaagggctttggcccatgtaactgggagcatagtggaacgaagaagactgaagaatgctttggtatcagcttttctaatagtccaacatcagaatagacaatgcatgcatgggatgctaggagaaaggtgggctttacagattaggatctgaaacccagctaattaactagacacctatgaacatgtttcctcatctgaaaaaataaatggatttgcaggatagaatgaggtaaagcccatgggagcccccagcacacagtagggcctcagaaamtgtgtgcgttatggtctgaatgtttgtgcccccc

SEQ ID NO: 444291 - DNA, 588 bp, Homo sapiens
ctaccacatgctagccatacgagcttgaacaagttattaaacttccctgaaccttaatgtcctcatctgaaaaataggacttagtgcctatctcacagggtgttgtgagcattcaatgagataataaaggcaaagcacttaacacagtacttgggcacataataaccgatatttatgtaaatggtatttatgtatacataaatggctattgttattttatctattgatgatggattgaacatgtgatattttctcatatcaagaaatcgagaatgttctcaagggctttggcccatgtaactgggagcatagtggaacgaagaagactgaagaatgctttggtatcagcttttctaatagtccaacatcagaatagacaatgcatgcatgggatgctaggagaaaggtgggctttacagattaggatctgaaacccagctaattaactagacacctatgaacatgtttcctcatctgaaaaaataaatggatttgcaggatagaatgaggtaaagcccatgggagcccccagcacacagtagggcctcagaaaaygtgtgcgttatggtctgaatgtttgtgcccccc

SEQ ID NO: 444292 - DNA, 284 bp, Homo sapiens
tgttaagaggctactgccctaaaccaaggggtttgttctttgtctgtkgaatgctgttaggttggtgcaaaagtaattgcactttttgccattaaaagtaatgccaaaaactgttattacttttgcatcaacctaacatttaataaaagataatatttttgaactaatattttgtaccagacttgaggctaagccttcatacccattatttcacttaatcttcacaacatcccaggaaagaagtactctgattataatttattttttatggaagaggaaatgag

SEQ ID NO: 444293 - DNA, 490 bp, Homo sapiens
gattgtgatctggtcctgccacttttgaattgagcctgggctgtgatgtcctcacagttctcatcaatggaccctttgcagagtcagcgtccagacagtggctggcagtggagggggccgtgcctttgctgtgggagtggcagggaggtgtgagggcagaacaatctggtaggactcagcaaatttcccagagcccgattttataatgatgttgagtaataaaaaaaawaattttatagacacccgtcttttccatatagccagggaggacaagtcacatcttgtttcaaaatagcagatgccaaattttaggagtctgagagctggggattatgtgataatatgagggtcgatctgttttctaaaaaataagtttatcatggcatatttatttattattacagttattcatctctctttatctaatctatcctatcctctctgtctatctagccatccatccattaatcctggctagagacacttggca

SEQ ID NO: 444294 - DNA, 572 bp, Homo sapiens
gctccaaaagggccacagctcttctctccttgttgtctgcaacatggtgagcaggggggcgtgtttcagccctgtttgtgttacagctcttttagtcccaccatttggtgggtactgagttcctgttctgtgtccgggaagaataaggtacgtggacaactggagggtaagcaaggcagagaagagcttcactgagtggcagaacagtcctcaggagacgcaaagtgggtagctcctttctgcaggcaggttgtccccattagcatccagctctcagaggagatgagacctgcagtggggtagctccctcccacaggcaggtcaccccaacgtctgtgcacccctcagcagagaggagacctggagtgggtagctcctatcctcaggcaggtcatcccatcatctgcaaccctcartggagaggagacctggagtgggttcctaatcataggcaggacattctgtcctctgcctgagtctggctgagtctggggtttttatgagcttctgaggggagaatgtgtgtgttgattggtccatgggtgccataggtgggcccagaaaaagcacca

SEQ ID NO: 444295 - DNA, 613 bp, Homo sapiens
aaatgataactaatacaagtgcttcccagttgcccaaagtggtttaacatattacttttcttacagatttagctaaaaggccgtctgacctgagctcttttatggarctattcggcctcgctttcattttttctttttagaaataaatcctctcgtcctcaatcggagacagtgaagaaagcagggagtttgtattttttaaatccatatgaaggttttggccaggaatttttcaaacactagaataaatttttaatctggactttgatatccagacaagcccagctcaagttctcttgggtctcctttccaaagaacagacttcaaacagacactgctcgctgtcttagcagaaaggcaccacagcagctgcgacggccgcggtcggcagaaactgctgcacatcctgcctgtctgggcgggacctccggttgctacattgccctgggaaccaacacatcctattccgtggtcctgaagcagcagtcttcagaaaagaaggaaagagcatggagaccatcagagcaggaaatgctgggttctctgctgacagcattctccataacatgagatttaaatattgaagggaaaaagacaaacactattttcttca

SEQ ID NO: 444296 - DNA, 613 bp, Homo sapiens
aaatgataactaatacaagtgcttcccagttgcccaaagtggtttaacatattacttttcttacagatttagctaaaaggccgtctgacctgagctcttttatggaactattcggcctcgctttcattttttctttttagaaataaatcctctcgtcctcaatcggagacagtgaagaaagcagggagtttgtattttttaaatccatatgaaggttttggccaggaatttttcaaacactagaataaatttttaatctggactttgatatccagacaagcccagctcaagttctcttgggtctcctttccaaagaacagacttcaaacagacactgctcgctgtcttagcagaaaggcaccacagcagctgcgacggccgcggtcggcagaaactgctgcacatcctgcctgtctgggcgggacctccggttgctacattgccctgggaaccaacacatcctattccgtggtcctgaagcagcagtcttcagaaaagaaggaragagcatggagaccatcagagcaggaaatgctgggttctctgctgacagcattctccataacatgagatttaaatattgaagggaaaaagacaaacactattttcttca

SEQ ID NO: 444297 - DNA, 469 bp, Homo sapiens
aagatacataatgtacagccgaatctacagtctcctattttgtcagctgcttgtgttgattaaaacttcaataaagatcctgtgataaaacagagctatgttcaaaggatcctgttatgtttttaaagggctgagcttggcagaaaacatgtagagtatagctttgtaccttggtatttttccccttttccaggttaaagagggagaagtggaggagacacatacagtggtttctagtacctgtgggatcgttagacagcatgcgtttgaccaagtcccaaataatragcagggtccaacttaaatgcatgaaaattgtttatcaaactggtgttaaatgtgtgaccaagaacagacctcctcccataagtctgactgacagcctctctctgcaagaggtcccagcctaacagggaaggggaggaggcaagccaggggcaaagtgaggacacagagctccaggaattcc

SEQ ID NO: 444298 - DNA, 601 bp, Homo sapiens
caggagtttgagttttcagtgagccatgatcacaccactgtactctagcctgggtgacagagtgacaccctgtttcaaaaaatggaaaataaaataaaatagaaataatcaataaatatccacaaatactttgatattctttcctccaataggtacaccctaattccctctctgaaatgtgagctgtacttactgacttgttctaaggaatggagtgtgccggaggggcagtgtgggtctcccacgattcaaacataaatggcaccaggacttcctcctttaccttggattactcactctggggaaagctgactgccatgtcatgaagacactcaagcagccccagggggaggtccatgtggcaaggaagtgaggcttcctgccaacagccagcaaagaactgaaatctcttgccagtagccattgggtgagccatttcagaagtgggtcctccagccccagtcaaaccttagatggctgcagccttggagagwcctggagctagaactcccaagctatgccgctctgaaatttctgacccacagaaactaagataattaatgtttattattttaagctgctaaatgttgaggtaagccgt

SEQ ID NO: 444299 - DNA, 612 bp, Homo sapiens
accttctctaatcaacttagagggtctattctggcctccaaactttggtgccattttttaaatcatgggagcatttgtgctttctcttgtagtaataattagcagtgacattgctaacctctcacttctgaactctggactgttaagcatattgcttatctcatttaacctcacaagcacacatagatattgttatccacattatagaagtaaggamgctgaaatttagagaggtaaagtcttaaagggtcaaagtttacatttgaatccaggtctatctggtcacagaactggactcaataccctgtattgtaatcttttacacagaaagtttgaaatgtaaggctctggataacaataaataggtcactaaatgtctttaaattttctactacatcatcccagaagagctcagtaaatatttattgacttcagttggaaagatcataacttttgactgcatcttgaaggtaaaggtgttggtgtatgtcagggaaggaagcagaagaggagatgggaagtacaagagtaggactacatttaggctctagatctaggaagaaggcaaaggtgtggaggtgattgaagtttctttggaatgatatggacagc

SEQ ID NO: 444300 - DNA, 612 bp, Homo sapiens
accttctctaatcaacttagagggtctattctggcctccaaactttggtgccattttttaaatcatgggagcatttgtgctttctcttgtagtaataattagcagtgacattgctaacctctcacttctgaactctggactgttaagcatattgcttatctcatttaacctcacaagcacacatagatattgttatccacattatagaagtaaggaagctgaaatttagagaggtaaagtcttaaagggtcaaagtttacatttgaatccaggtctatctggtcacagaactggactcaataccctgtattgtaatcttttacacagaaagtttgaaatgtaaggctctggataacaataaataggtcactaaatgtctttaaattttctactacatcatcccagaagagctcagtaaatatttattgacttcarttggaaagatcataacttttgactgcatcttgaaggtaaaggtgttggtgtatgtcagggaaggaagcagaagaggagatgggaagtacaagagtaggactacatttaggctctagatctaggaagaaggcaaaggtgtggaggtgattgaagtttctttggaatgatatggacagc

SEQ ID NO: 444301 - DNA, 579 bp, Homo sapiens
ttgaattcctgggctcaagcgatcctcccgcctcagcctcccaaggagctggaactacaggcatgtgccaccccaccaggctaattttttttttttaactttttttgtagagacagggtcttgttttatttcccaagctggtctcaaactcctagcctcaagtgatccttctgccttggcctcccacagcactgggattacaggcrtgagccaccacactaggcttggaacaattcttaagttcactctgacctctccctttcttatcacttcatgggagtttagttagtgctgtgatctttccacagaaggagctcatgcagaagaatatcatttcaacaaacatcatttcaagactgccggacttcctaggttacaacacctactgatggctctaactattagcaggtatagcaaacgagaattaatggaaaacatttaaaaacccacataaacttaaagaactgcacaccactaccctctgaacaaaatgctggccaaaacctcccagttgatacaaaacaaaaaaatgaatcagggaagcaagcaaggtatacaccccaaaatatggcaactttt

SEQ ID NO: 444302 - DNA, 571 bp, Homo sapiens
tcagatttaatacatttacttcggaaaaacttagagatgcctgtcaaattacaaagcaattgcctaaacattccagtgacatttaactgctatcaaacagttgaaagttgatctttaacagaatacagctgttggtgccacaatacctgaaagcccaaagcaagatctgattgttctgagccctttatccaacaatggaatcctcaagggaggatttttctctttttttcttttttttttttttatgcagcaccccagcctgcacaattggattgtggctttccacacaygtacagtttcaatcacagtttcacacacactaaaaactattcagaaccactgttcgcagttcctcaatgactttaacaaatggttcagggccctactgttatctgctccctaccaggaccccgtgctctatgcttacagcaaccctaagagaaaccagaggctctgccaagtgactcgctcaagaataaagtcggcaagaggcaaaggcagtgtgactgcagggcctgatcccttccttgaccaatggatagaggaacctctcatagcacgacatggccag

SEQ ID NO: 444303 - DNA, 571 bp, Homo sapiens
tcagatttaatacatttacttcggaaaaacttagagatgcctgtcaaattacaaagcaattgcctaaacattccagtgacatttaactgctatcaaacagttgaaagttgatctttaacagaatacagctgttggtgccacaatacctgaaagcccaaagcaagatctgattgttctgagccctttatccaacaatggaatcctcaagggaggatttttctctttttttcttttttttttttttatgcagcaccccagcctgcacaattggattgtggctttccacacatgtacagtttcaatcacagtttcacacacactaaaaactattcagaaccactgttcgcagttcctcaatgactttaacaaatggttcagggccctactgttatctgctccctaccaggaccccgtgctctatgcttacagcaaccctaagagaaaccagaggctctgccaagtgaytcgctcaagaataaagtcggcaagaggcaaaggcagtgtgactgcagggcctgatcccttccttgaccaatggatagaggaacctctcatagcacgacatggccag

SEQ ID NO: 444304 - DNA, 481 bp, Homo sapiens
ggtgactggctgggtgtggtagctcacggctctaatcccagcactttgggaggctgggatgggaggatcacttgaggccaggagtttgagaccagcctgggcaacatcgtgagacccccccatctctacttaaaaaaaaaatgaaagagagattcctttccacagtgctttttaatggtgccygaatattttaccaaaaataatctcatctacactaggggaaacattgagtttaaattgctcatttcacaaacgtagaaactgaggcccagtatgggggttgaaattttccagggtagtcatttgggaatttgtcaagtctggactgtaagctttcataataggaactgcattggcatgtgcttgggacaggtctggtatacagtgtcattcaataaatgagtcctgagccaggcatggtgacacatgcctatagtcccagctactcaagaggctgaggctggagggtcccttgaaccca

SEQ ID NO: 444305 - DNA, 329 bp, Homo sapiens
ttaaaaaaattagctgggcgtggtggtgcacgcctgtaatcccagctacttgggaggttgagtcaggagaattgcttgaacccgggaggtggaggttacagtgagcagagatcaygccactgcactccagcctgcgtgacagagggagactccatctcagaaaaaaaaaaaaaagaatatatataaatacgtgtgtgtgtgtgtgtgtgtttatttgtaaatgcatctcttaaataatacctaagaaattggcaatggtggctcctctggaagaggaagtgggtggctgagggacttacatcgcatttcctttgtagaagttaaaaata

SEQ ID NO: 444306 - DNA, 579 bp, Homo sapiens
tgcattccggttctccggatcccgagggagctcccagtcgatgctgggcgaaagcggccgcacgagcccacgtcgccacgccctccgccgcggaagccagggtgggggtcgctggaaccctaggccggccgcgcaaggccccctgggaccggtagtgctgggcgtggcctcgggactacatatcccagtggcccccgtgcggcgactttagctgctgctgtctcagccgctccacagcgacggcrgcggctgcggcttagtcggtggcggccggcggcggctgcgggctgagcggcgagtttccgatttaaagctgagctgcgaggaaaatggcggcgggaggtgagtggagataaaggaggaggcggtggcgggcgagggggtggagtgcgaggcggagggaagaggggcgagttccccaggctgcgagagccagcggcttcagatctgccaaggcactgaggggcgcgccggccgggggacgcgctgaggtagtttcggggtgtcggggccgcgccgcttcccctcagcccggggggcggcccgcggcggtaggagctgagacgaagctgggtggca

SEQ ID NO: 444307 - DNA, 343 bp, Homo sapiens
tcctttttgcaatatttgagcagggcttcaaaaccaacctgtttttgttattaagcctgtasggtaaagaaacaggaaggagagtaccagctgtcttgctgcagtggttttaaatggagttgaatgagatgcgtgagagtggtagtagtattgagtaagattgctgcatctctttgatttaaatgcctggcctcggatccacctaactgatccctggctgcaaaaaagcttcagtatttgttgcagcaggttgttgagaaggtgattggaggaataaaaatcttaggtcttcagcgaatgctgcacaaacgaaaatgttaatggaaacctgtaagtttgtgaa

SEQ ID NO: 444308 - DNA, 535 bp, Homo sapiens
ttaacatgtctttgagatggcattcaaattttgctggctttattagctcagaagtcacttattaaccacctaacaaatactaagaatttttgaaagctctaggggtacaaaagtaatgaagatatactctttgtctgaaagaggtttctatacatgtccatattttagatattcctcttcatcaccttgggggaggattttaaaataaaaaaaaatgtaatggctcttgatattaagtttctgtatatgtttctattttgtcattcaggtttatcgaaatyccaccaagatgtcctgccagcagaaccaacagcagtgccagccccctcccaagtgtcctatccccaagtatcccccaaaatgtccctcaaagtgtgcatcctcatgcccacctccaatctcttcctgctgtggctccagctctgggggctgtggttgctgcagctctgagggaggtggctgctgcctgagccaccacagacaccataggtcccactgccacagacccaagagctccaattgctatggcagtggc

SEQ ID NO: 444309 - DNA, 545 bp, Homo sapiens
agctcacagatggcatgagatgcacagattggctaaagacagaacagcactgaccacatggaggaaggaggtcagtctgggctgtgctgtcaatgtaaagcacccccattcattcattcactcatkcatttgtttagtcaatgtttcccaggtcctatgatgatatatggtgaatatgtccacagttaacaattcttgaaaatcatagtctcgtgggaataactccatggaaggctaggttgtggaagtatacatttcccttgtagaacaggctcctacaaccacagaatatcatagccagaaggggtctcatctagcctctttgctttagattggaagagaaaaggcctagagacaccagggcactgtggaatcacagggtggggtggtggcacaattaggataagggtccaggtctttctatttgtgccttgaaatgtctgtctccagttttgttggcacatcttaaaatggctggtctcctagggcattttcttctctgtaaaatggggatatcccatcctacatataatgcagaaggcttc

SEQ ID NO: 444310 - DNA, 563 bp, Homo sapiens
tcttacttaaggcagaggtccctgaaagcacacttgggtgtccacctctctgtaggccagccttcaactgccccgggcaaccttaggtcccatgcttggcactccattttgtactgtttggttttttcatttgttttgctgctcacatgtaaacactaaggacaagggaaaacttcttaaccaactcaggaaaccctgaagctataaaagcgaagaaagtcatatttgagtatataaaaactaaaaatstttccatagcaaaagctattataaatggattcaattaaatctgatgcattaaatattttaataaacacagatcaaggttaatatccatgatatatcaagagctcttgaaaattgaaaagaaaatttaaaatcatattacaaattttgtagaaatggccaatgtacatatttttagaagctcaaaattactactggtcagggacttgaaaattcagttaataatgagactggaaaaaataatgaagagcatcaagtcaaataaactgactcagtgcagtgggtgatttaaaatgcggagagtacagaatctcaga

SEQ ID NO: 444311 - DNA, 569 bp, Homo sapiens
gtgtcccttttcccttcacactgagaggaagagacgccaggtgtctgagagagcaagtcaagaagtgaatcttaaccagactcaccctcctgggaagggagttcactgaccatgggctgtactttgcaggaggaggggtctcaacattcgtttcaagcattttattcaactattgattcgaacagcagggaagttttgcttcatagagatgtgttcttctccctagagaagaacaagtctacagagcttcccaaccttcccaatgtctggaatacacagaaaattagaacatatgtctggcttagtggggacaaagtcaaagctgccgttgccagaggtgatcatcttggagctccatctaccctgcagttggggtaatcagttcctcggagcagcctttcatgtatcacttgctcatgtcctgtccttgcctcatgaagagaatttctctggggccctgaccgttagaagacattagaaatctcagaagagaagagwatgaccaagacatttaaagagtcagaaatcagagctttattacaatatgaggtaaaggagaaaaagaaggc

SEQ ID NO: 444312 - DNA, 535 bp, Homo sapiens
tcttataaatcttaggcaaggttgttagttactaggaagaagtgaaaatttaaaagactgatccgaaatyactttttggcttaattttaagttctggacaattttatcccctaatttttaacaagagatgatttcacaggaaagtggggcttgagaacccaggtccagaatggctctttgctgaagtcacatttggtgatagacattagagggccatgaactccaggcagagaactgttggagaattcatgtgtcgtggtcctgccagaactgggactcatttcaggtcttgatattagcataacttttaagagatttcctaacactgtcctgcatctgttttgcctcatctgggacctgccattttccttagctggttgccagagtgagtttaccactgggggccattgaactggctctcgacagaaccatgtgggagtctaaagagcaacaccaggagtatggaatacgagaggagaagaggtccctgctatagggagcaggacagcagaggggtgttctgggcaaagcaaga

SEQ ID NO: 444313 - DNA, 552 bp, Homo sapiens
agatttcctaacactgtcctgcatctgttttgcctcatctgggacctgccattttccttagctggttgccagagtgagtttaccactgggggccattgaactggctctcgacagaaccatgtgggagtctaaagagcaacaccaggagtatggaatacgagaggagaagaggtccctgctatagggagcaggacagcagaggggtgttctgggcaaagcaagaatggcccatctagtaactacatmcatatttatatgacctaaagaagatgggttttatacttatcttaattcatcaattccatgatacactcttcttacatttgttaacagcccttaaatcagcatatagcatatgattggtggcatgtaatagttgaatttgcaacatttttctctttccttatgatgcatgaaataagggtgccccttacaactgataccctcttaaagctcatgaaatacagtaggtaggaattgggtctgtagatatgaaatgaaatgatgagagaccgaaattgacattgatttagcattagttctgttttcagg

SEQ ID NO: 444314 - DNA, 564 bp, Homo sapiens
tgtactgcctcatgaattgttatatataaagtattcaaataaactttagattctattattattgttgttgttgttatcacacagtgctcatctggctggaattttccctgctcagcgttctttggaattgaagcctggtagtgaggtcctgaaaggtaagaatgggggagcctaaggggcatgagaaggctgaggggaggcagtctagactccagcctggggcctaggatcattaagcacccacccagtttccaaatgaacctagaayaacctgatgttccatgaaacaaaccattttttggaggtcttgtgtcatattgggccagagaccactgggccaaactgtgctcagcaacctagaccagcagaagttaccttggaagcccacagaacactcatttaggctgagtgaagtgaggtgaatctatagttaaattctcaatttttcatacactgtgccaaaagctacacttagctttagattagattctcaattttagtttgattctctgagctacacttagcttttggcacagtgtatgaaaaattgagaatctaactata

SEQ ID NO: 444315 - DNA, 619 bp, Homo sapiens
agagttgggtagaaacacaggcagcaccatttcaagcctccatttcccaatatagagactgaggcccagaggtaagcgatgacttgtaccaagccacatagccaggtacaggcacagaagctgagctgagagtccctggctctgaatccacctcctgccaagtatacagcctctggatgtctgcaaccttctcaagaaagccttgcttgcaaatcactgtattcaaaggggatgttgaaggtttcccctagaaaccttcctrgttttacagttctaatgaaacctttcttttcagattttgcaaagccacagaacaatgtgtgaccagcagaagcagccacagttccctccatcttgtgtgaaaggttcgggactaggggctgggcagggtagcaatggtgcctctgtgaaatgcccagttccatgccagacccaaactgtctgtgtgacaggccctgctccatgccctactcaaacttatgtgaagtaccaagttccatgccagactcaaacctacgtgaagtgcccagctccctgccagaggacctatgtgaaatacccaacaccctgccaaacctatgtgaagtgcccagctccctgccagacaacctatgtaaaa

SEQ ID NO: 444316 - DNA, 619 bp, Homo sapiens
agagttgggtagaaacacaggcagcaccatttcaagcctccatttcccaatatagagactgaggcccagaggtaagcgatgacttgtaccaagccacatagccaggtacaggcacagaagctgagctgagagtccctggctctgaatccacctcctgccaagtatacagcctctggatgtctgcaaccttctcaagaaagccttgcttgcaaatcactgtattcaaaggggatgttgaaggtttcccctagaaaccttcctggttttacagttctaatgaaacctttcttttcagattttgcaaagccacagaacaatgtgtgaccagcagaagcagccacagttccctccatcttgtgtgaaaggttcgggactaggggctgggcagggtascaatggtgcctctgtgaaatgcccagttccatgccagacccaaactgtctgtgtgacaggccctgctccatgccctactcaaacttatgtgaagtaccaagttccatgccagactcaaacctacgtgaagtgcccagctccctgccagaggacctatgtgaaatacccaacaccctgccaaacctatgtgaagtgcccagctccctgccagacaacctatgtaaaa

SEQ ID NO: 444317 - DNA, 463 bp, Homo sapiens
gagcaagactaggtccctgtcagcgtctgagtctttcaccacctgccccgtgtcttctcttttccctctttctcctgggcaatctcttctactccctggcaacagttaacatcaccatsatgatggccaaggagccccttctcagagaggcctcagtgaccattgaaattaaaatagccctgtgtcactctcagtcacttcactcggctttatcactgacaaacagtcttttatttatttacttttcctttgttcagctctctccactttaacataaacttcatgaaatgagggaccttgctctcctcttgccagctgctgttttttccagtacctagaatgggcttactgtggattctcaagaactattttttgcctgagtgacttccaagtcaacgtatgaagtccatgtgtgtttcctgagatcctgattgatatatttagctgtctattagatttcatc

SEQ ID NO: 444318 - DNA, 591 bp, Homo sapiens
ggctgtctcctagtccctgcttcactgccccttggattttmttccctaatcagtgacctgagcttcactccctttcttgacctgcttgtacatcctcatgtcccatctgaatggtatccctgtaggactgttaatggaatattaacagttaatggaggcattgacagataatcacatccaagggtcatgtctcatttaacctagtgtgtgctgttcttcagagcacttctgaagcccaaagaatgttatcctaagacacatcctctgcccatgtgtctataaagcagccaatcatttgttcttttattcagtcagtcaatctttaactcatttattcttcaaggctaccctctgtgtttatggttattcctagagacatgaagatgaataaagtctagtatagattctgccttcaacatgctatccatgtggaagagcagaaagacatacaaatggacatgacattgtcctggtgtaaaagtttttaggagcccatctctgggtcatgttgccctcttacagcacataatagaatgtttcacagtgcattgtttacatttatgtcctcaaggcaacttggctcatatttat

SEQ ID NO: 444319 - DNA, 583 bp, Homo sapiens
ctctctggtcataatttgcaagacgattttactttggaaggtcagcattgtgcaggatcttggagactactaggtcagtaaactcacttcaatagagacagataaacttagcartttctgcagactagtacttgaaccctgaccccctgatctcaggttggagctcagacttcctcactcaccacctgctcaggctgatgggatgacacggtgggtctcaggcttggtgtgtcctaaccaagctgggaagtttgtgaacaaatctcagacccatgaaaatgtggggttcataaaccccaaagagtctttagtcccatgtccacagctccagttcttcccttgcaggcagagacagggttgtatcttcagaggtgggcttccctcctgtgggctgccagagtggagcaggtctctgtgcttcaaagttcccactctggaacacccacctcatcccagagcagtttgtttcctctagagttcaaaggcacatggcacagcccgccagctcttttcctcttttccttcctgctcccagttagtgccagaccccttttggcccccgccccttcagtcttttctaaac

SEQ ID NO: 444320 - DNA, 583 bp, Homo sapiens
ctctctggtcataatttgcaagacgattttactttggaaggtcagcattgtgcaggatcttggagactactaggtcagtaaactcacttcaatagagacagataaacttagcagtttctgcagactagtacttgaaccctgaccccctgatctcaggttggagctcagacttcctcactcaccacctgctcaggctgatgggatgacacggtgggtctcaggcttggtgtgtcctaaccaagctgggaagtttgtgaacaaatctcagacccatgaaaatgtggggttcataaaccccaaagagtctttaktcccatgtccacagctccagttcttcccttgcaggcagagacagggttgtatcttcagaggtgggcttccctcctgtgggctgccagagtggagcaggtctctgtgcttcaaagttcccactctggaacacccacctcatcccagagcagtttgtttcctctagagttcaaaggcacatggcacagcccgccagctcttttcctcttttccttcctgctcccagttagtgccagaccccttttggcccccgccccttcagtcttttctaaac

SEQ ID NO: 444321 - DNA, 583 bp, Homo sapiens
ctctctggtcataatttgcaagacgattttactttggaaggtcagcattgtgcaggatcttggagactactaggtcagtaaactcacttcaatagagacagataaacttagcagtttctgcagactagtacttgaaccctgaccccctgatctcaggttggagctcagacttcctcactcaccacctgctcaggctgatgggatgacacggtgggtctcaggcttggtgtgtcctaaccaagctgggaagtttgtgaacaaatctcagacccatgaaaatgtggggttcataaaccccaaagagtctttagtcccatgtccacagctcyagttcttcccttgcaggcagagacagggttgtatcttcagaggtgggcttccctcctgtgggctgccagagtggagcaggtctctgtgcttcaaagttcccactctggaacacccacctcatcccagagcagtttgtttcctctagagttcaaaggcacatggcacagcccgccagctcttttcctcttttccttcctgctcccagttagtgccagaccccttttggcccccgccccttcagtcttttctaaac

SEQ ID NO: 444322 - DNA, 572 bp, Homo sapiens
tgaaatgatacaagggaaaagattcttcttgaatctgttgaaaacacttatctttggagcagagggcaagtatggatgtcctagctctcaggatcaagatatcattaaattccttcamatgaaaatccagggtctcaaaggttcataattcctggaaataatctcatagtttaataaaacattgagtgcatctctgttctctaactcaaggtaacttcaccttactgtatgtctactttcagaggcctctctcaccagatcatttggctataagtcctggttctgctgtttccaagcttgttatctacaacaaattacttcatctttgagcctttgttctctcattttttataaataatgataatgataggtaccctgcagagttgtttgaaaaattaagagttaacataattcagctccctagctaaatgacagtaatagagcaagtcctcagtgaattatctccagatttatgtgtgctttccaagttgcctccacttttttgttgattaacgtatcctgctattcctgtgcctcatgatctctttcatgtgatctgcccattcctaatt

SEQ ID NO: 444323 - DNA, 572 bp, Homo sapiens
tgaaatgatacaagggaaaagattcttcttgaatctgttgaaaacacttatctttggagcagagggcaagtatggatgtcctagctctcaggatcaagatatcattaaattccttcacatgaaaatccagggtctcaaaggttcataattcctggaaataatctcatagtttaataaaacattgagtgcatctctgttctctaactcaaggtaacttcaccttactgtatgtctactttcagaggcctctctcaccagrtcatttggctataagtcctggttctgctgtttccaagcttgttatctacaacaaattacttcatctttgagcctttgttctctcattttttataaataatgataatgataggtaccctgcagagttgtttgaaaaattaagagttaacataattcagctccctagctaaatgacagtaatagagcaagtcctcagtgaattatctccagatttatgtgtgctttccaagttgcctccacttttttgttgattaacgtatcctgctattcctgtgcctcatgatctctttcatgtgatctgcccattcctaatt

SEQ ID NO: 444324 - DNA, 572 bp, Homo sapiens
tgaaatgatacaagggaaaagattcttcttgaatctgttgaaaacacttatctttggagcagagggcaagtatggatgtcctagctctcaggatcaagatatcattaaattccttcacatgaaaatccagggtctcaaaggttcataattcctggaaataatctcatagtttaataaaacattgagtgcatctctgttctctaactcaaggtaacttcaccttactgtatgtctactttcagaggcctctctcaccagatcatttggctataagtcctggttctgctgtttccaagcttgttatctacaacaaattacttcatctttgagcctttgttctctcattttttataaataatgataatgataggtaccctgcagagttgtttgaaaaattaagagttaacataattcagctccctagctaaatgacagtaatagagcaagtcctcagtgaattatctccagatttatgtgtgctttccaagttgcctccacytttttgttgattaacgtatcctgctattcctgtgcctcatgatctctttcatgtgatctgcccattcctaatt

SEQ ID NO: 444325 - DNA, 569 bp, Homo sapiens
tgagtgatggagatatttattagaaaaaacatggaggtcccactttgaaaatacaacgaatwtatggtacacgacactgtagggaagattagacgtttcctccttcaatactaaccttctttgtccagccaccctcagatgtgaggggggagaagtgccaggatggttgggggatctttagtattaatgggagaaggggagagaagcagggaaacagcaggggaaataaggactagtgcttcttaggttcaggctgacaggtgtcaacatgaagataatggattcagcgaagagagaatctgacagagatggagactgttattaagatgttcagctgcctcctcatccttgcagctgctaagaaaaacacctagctctttaaccagtctgagattctgtactctctgtgttttaaattagcctttgcactgagtcattttatttgatgtaatgctctttattatttttgccagtctcattttattttattttttttacttaagttctgggatacatgagctgaatgtgcaggtttgttacataggtatatatgtgccatggtagtttgc

SEQ ID NO: 444326 - DNA, 569 bp, Homo sapiens
tgagtgatggagatatttattagaaaaaacatggaggtcccactttgaaaatacaacgaatttatggtacamgacactgtagggaagattagacgtttcctccttcaatactaaccttctttgtccagccaccctcagatgtgaggggggagaagtgccaggatggttgggggatctttagtattaatgggagaaggggagagaagcagggaaacagcaggggaaataaggactagtgcttcttaggttcaggctgacaggtgtcaacatgaagataatggattcagcgaagagagaatctgacagagatggagactgttattaagatgttcagctgcctcctcatccttgcagctgctaagaaaaacacctagctctttaaccagtctgagattctgtactctctgtgttttaaattagcctttgcactgagtcattttatttgatgtaatgctctttattatttttgccagtctcattttattttattttttttacttaagttctgggatacatgagctgaatgtgcaggtttgttacataggtatatatgtgccatggtagtttgc

SEQ ID NO: 444327 - DNA, 569 bp, Homo sapiens
tgagtgatggagatatttattagaaaaaacatggaggtcccactttgaaaatacaacgaatttatggtacacgacactgtagggaagattagacgtttcctccttcaatactaaccttctttgtccagccaccctcagatgtgaggggggagaagtgccaggatggttgggggatctttagtattaatgggagaaggggagagaagcagggaaacagcaggggaaataaggactagtgcttcttaggttcaggctgacaggtgtcaacatgaagataatggattcagcgaagagagaatctgacagagatggagwctgttattaagatgttcagctgcctcctcatccttgcagctgctaagaaaaacacctagctctttaaccagtctgagattctgtactctctgtgttttaaattagcctttgcactgagtcattttatttgatgtaatgctctttattatttttgccagtctcattttattttattttttttacttaagttctgggatacatgagctgaatgtgcaggtttgttacataggtatatatgtgccatggtagtttgc

SEQ ID NO: 444328 - DNA, 520 bp, Homo sapiens
tgctgcatatctacaaccatctgacccagcatgcctagatattcttgatattcttttctcctcttttatctctttggaaaatcatgggagattccaggataccccaccagtttcttctgctcaaaagttataaatggcttcagcaggaatctagccactgggcaatagtttcagggacccagttcactatggagtcaactcttgttacgaaacttggttctcacctcacctccaggtctgctctatgagctggtggcttaggactgggattgtctgttttcagagggaaggagaggttgaaatgagctaagagatgygttttacaacaagaaactataaaataacctactgcttgcagaagctgaaggagagggatgagtgacattggtaaggtcccatgcctggtgaataagagaggaaataccacaaagagagagcgtgttttggagatcaggaggttttgtgatagagttagtttgaggtcacagcaaaaatatttgcctcttagaagacatttggc

SEQ ID NO: 444329 - DNA, 520 bp, Homo sapiens
tgctgcatatctacaaccatctgacccagcatgcctagatattcttgatattcttttctcctcttttatctctttggaaaatcatgggagattccaggataccccaccagtttcttctgctcaaaagttataaatggcttcagcaggaatctagccactgggcaatagtttcagggacccagttcactatggagtcaactcttgttacgaaacttggttctcacctcacctccaggtctgctctatgagctggtggcttaggactgggattgtctgttttcagagggaaggagaggttgaaatgagctaagagatgtgttttacaacaagaaactataaaataacctactgcttgcagaagctgaaggagagggatgagtgacattggtaaggtcccatgcctggtgaataagagaggaaataccacaaagagagagcrtgttttggagatcaggaggttttgtgatagagttagtttgaggtcacagcaaaaatatttgcctcttagaagacatttggc

SEQ ID NO: 444330 - DNA, 608 bp, Homo sapiens
tgccacttaactactctccagggaggaagagtctgtccagttcttgctttctttcatgttccagcctctccacgaaacaactgttaaataaatacgtaagcagtgtaaggctgaaggaacacctcagtatgggcctgctcagttcctgtgactcaatccatggctaagtgaagcagagtatggaacaggggtccgggccatgtcccacttttattgctacgcctgcctcactgcaaaggatcaggcctggagggtgtgaaggagaattatgagaaataccactctcaaacaatatatatgaaacaaaacataaaccaaaataaacaaaaaagaaaaaccactcttatgtagctgtaaaataagytgcatgtagcccagcctgggtctagccctccttaggttcaggtctcctcagctcagcactcatattaaaagaattttaggacggagaagcagcttgtctggatgactggggctctgtgccttggggaggaagtgtgaagaagagtgagggcaccactaggggaattaaaaatagttagtctatcagcagactgtgaggtgcttgcggtgagatgatgagctcagtttagagcaaggccctgctg

SEQ ID NO: 444331 - DNA, 631 bp, Homo sapiens
gtttaactcaccatgctgaatgtaacttattttcattttctcttcataccatgatgacaaagctagaaaaatctttggtactccaagcaaaaaggtatatttaacagaattcttttcatctgatttaaaatgcttggtatgagaatcagaacccttaggggcaagtttaaatgacaactcattgccacttaactactctccagggaggaagagtctgtccagttcttgctttctttcatgttccagcctctccacgaaacaactgttaaataaatacgtaagcagtgtaaggctgaaggaacacctcagtatgggcctgctcagttcctgtgactcaatccatggctaagtgaagcagagtatggaacaggggtccgggccatgtcccacttttattgctacgcctgcctcactgcaaaggatcaggcctggagggtgtgaaggagaattatgagaaataccactctcaaacaatatatatgaaacaaaacataaaccaaaataaacaaaaaagaaaaaccactcttatgtagctgtaaaataagctgcatgtagcycagcctgggtctagccctccttaggttcaggtctcctcagctcagcactcatattaaaagaattttaggacgga

SEQ ID NO: 444332 - DNA, 530 bp, Homo sapiens
gaagctgaaagaatggatttgtgaaacaaaactttaggtgttcattataatttttcacatgtcactacgtcatggacagtcatttacggcagsacatacagatctaaccttctaaaaagtgcagtaatttcttggcatgtgtgtcaaaacctttcttttattttttagtttgagtgttaatggacaaataataattgtatatatttatggggtacaatgtgatgttttgaaacatatatgtatcaaccgtaaaaggatcatgtcaggctaattagcatactcatcgcttctaatatttatcatttctttgtgataaaaatatttaaaattatcccttttagctagtttgaaacatacaatacattattattaactatggctatctttgctgttcaataaaacaccagaacttgttcctcttgtctaactgaaactttgtacccattgaccaatatctcccttctcccccaccccatctctcctccatctgccttctccttagcctctggtagccaccattctactccctc

SEQ ID NO: 444333 - DNA, 622 bp, Homo sapiens
gagtgttaatggacaaataataattgtatatatttatggggtacaatgtgatgttttgaaacatatatgtatcaaccgtaaaaggatcatgtcaggctaattagcatactcatcgcttctaatatttatcatttctttgtgataaaaatatttaaaattatcccttttagctagtttgaaacatacaatacattattattaactatggctatctttgctgttcaataaaacaccagaacttgttcctcttgtctaactgaaactttgtacccattgaccaatatctcccttctcccccaccccatctctcctccatctgccttctccttagcctctggtagccaccattctactccctccttttatgagttcaacttttttagattccacatataagtgagatcatatggcatttgtctctctgtgcttggcttatttcacttaacataatgccctccaagttcattcacgttgttgccaatgacagaatttcctgtttttctaaaggctgaatagtattccaytgggtatacatacgccacatttaaaaaataatttattgacagacacttaggctgtttccctatcttggctattgtgagtaatgctgcagtgaatgtgg

SEQ ID NO: 444334 - DNA, 586 bp, Homo sapiens
tgattcagatgcaggatcctaaaactgtacttcaataaatattggtttatgtaatagtgttaataatgtgattaatgaaatagcagatacaaagtacctttataacaaattaatggcctaagattcatttttcatctttataatgtatgattattagatgtactatattcatgaatatttagaaaggagcagaagtctcagtaccatgtggttatagctatcagggaggagtgtatggaacttagaacatagtttgaatgggtatgaagaaccaatcagagttgggatggttagagagctgtggcccacctcacmttaaaggcagagaagggggactccaatgactgtgtgtgtgtgtgtgtgtgtgtgtgtgtgtatcttttttaatctctttcacatttgcactcaatgttgacatagtaaaatgacaactcactcactatcacaagaatagcaccgaagagatggtgccaacccattcatgagaactccacccccgtgatccaatcacttcccactagaccccacctccaacactggggattacaatttgacatgagatttggtggggacacagacccagacc

SEQ ID NO: 444335 - DNA, 496 bp, Homo sapiens
ccacttccttgaaaatacctcagcttacttctcactcccttcctgtgcactgtgtttgtagagcaaaaccaaaccgtggtcaaacccaactgttcactttttccatgcctatcctggagaagcagaacatttgggctgggagttgtgacgggagtgtggttggaatcacaatatagccgactaacttcatttgaaatccatgactagaaacccgaaaaggccattgtctggcaatcctgctacagtgccttcctgagtatggcaggtttactgaatgggcttctctccttagggaagaagcagggaatatcttcacttttctccagccactgctttcccatccagtgactgggagttttctctctcacttgctgatggcatcacaagcttagtccctgttttctgaccwctttcagccataaacagacatatctctggtaaaaggaaaaaagtgtagtccagtgtaaattacaacttgattttatcatttcattca

SEQ ID NO: 444336 - DNA, 574 bp, Homo sapiens
tattggatgaaattacatatagccttatttgatttatttttataaacattaacacaggcatatgtttattggtatcaaaaagtccagaaggacttttatctgttgttatgctttgagagcaaataacagaagttcccaacgcaactagttggtacaaaaaggaaaatttattatctcacattcaagacatgttaagttgagaatttaatgtatttaattgctaattcaatgacatcatcgaaatctcaggttctttttttgttctgccattctgtgaatattgctcttttcctcagtctagcttcttctttgtcacaagagagttatatctgtccagatatcaaattcagacatatcaattttgagagaaagaagagtgaagctgcctctcartaatccctccttcacatctcattggtcatcctctaatccagtcactggttagaagtataggattaccttgatttaataggctaatcaggatttgctctttggttggagatgggatcactttctctcaggagtagaaatctggattctgttagcaaggaaagagggaaaaatggaactgctg

SEQ ID NO: 444337 - DNA, 427 bp, Homo sapiens
actcatcaccagagaaatgcatgtcaaaacaacaaagataccatctcacacttgttggaatggtaattatcaaaaagacaaaagataactgctggcaaggatgtggagaaaaggaaattcttgtaccttgtgggtgaatgtaaaatagtgcagctgagctgctatgttaacagtatggaggttccttagaaaactaagagtagaattatagaattaaccataagatccagcaatccaacttctggggatacatccaaaagaattgaaagcaggatctgaaacagatatttgcacacccatgttcatagcagcactattcacattagccaagagggtgaagcaacccaaatgttcattgagggataaatgaataaataaactrtggtctatacatacaatggaatagcattcaccctttaaaaagaag

SEQ ID NO: 444338 - DNA, 589 bp, Homo sapiens
actgtagaaagttctatcaaagagcactgctctagagatttccagaggaagatctagttagcagctcttgagagacagcagactgtgtattagcaatagcacgacaatagaatttattgatcaaacagaaatagttytgagagagaaagggggtattaataatgattcaataattttaataactagttaatacttaatgataatcatcctgaaatacagagagtaaaaggggcacagtgaataattatgctgggattacaggcaaacctggaagtctggtcacctgatcatcacattcttcctggaggggttatttgatagattacaatcccctggagttgtgtaagcatagctgttactttcacagataacaactagacttcacaaatacaactagaatgtcttccctaaagcactatcacctaaaaaaaaaaaaaaaaagggattttcttccagaaacaggcctatatctagatggtgccaaagccaatctctcctttttggtgctaccctatttccagtctggagaatcccagaccatgttcagatctgtgttttccctgggtcaagcctggagagggctaccctc

SEQ ID NO: 444339 - DNA, 567 bp, Homo sapiens
tctgttgtatcaaatagtgccgctggaagagaaggagtaggagcagaaaccctgctgacctctgagggcccctgtgtggcagtatcacttttttgtttcatgttgttttgggggaacccaagaacactgaaaaacctttttcaaagtgctgccaaataatgaatcgagcaggtacaccaaaatctgttgaaagttaaagaaaaatcaaagaaccctaaatacatttgaatttttacatttccctcacctggagtgaggtgctgaagctccagcctgggtcccgtttggtgacasacgtgaacacaaacatggaccctctctttgcccgggagcaagatagtcaggccaataggatgggatcttccattcagggtcatcaaagaaggctgagtgctgtcactaacctttcagcacacccctcctaaaagtcatatggactcaaagatgtgtcatggccatagaatcaaccctaggaaaatagtaaagaatatcatcctgttgctcccagccttcccgccttgggttggtagattttcttatggggtggaaactcagcaccagcattgc

SEQ ID NO: 444340 - DNA, 567 bp, Homo sapiens
tctgttgtatcaaatagtgccgctggaagagaaggagtaggagcagaaaccctgctgacctctgagggcccctgtgtggcagtatcacttttttgtttcatgttgttttgggggaacccaagaacactgaaaaacctttttcaaagtgctgccaaataatgaatcgagcaggtacaccaaaatctgttgaaagttaaagaaaaatcaaagaaccctaaatacatttgaatttttacatttccctcacctggagtgaggtgctgaagctccagcctgggtcccgtttggtgacacacgtgaacacaaacatggaccctctctttgcccgggagcaagatagtcaggccaataggatgggatcttccattcagggtcatcaaagaaggctgagtgctgtcactaacctttcagcacacccctcctaaaagtcatatggactcaaagatgtgtcatggccatagaatcaaccctaggaaaatagtaaagaatatcatmctgttgctcccagccttcccgccttgggttggtagattttcttatggggtggaaactcagcaccagcattgc

SEQ ID NO: 444341 - DNA, 575 bp, Homo sapiens
gagaaaggaagcatcaatggtaaaataaaaagctggaaaggaacagaaatcctgtaggtcatctgtgttctggactgctgttaccttagggagttcacaaagggtgtcccatggggtaggatggtttgaagggaatcgctttggatcctctgccttcacatattttctttcctaaaattggttagactgagaacatcttacagtcaagccatttctttcacagttgccctcctcctcttcacagaagaatagctcaagtcccaytgtatcttaatatggtgcactgcttcagggtgtaaaaacctacaaggcacaaaatgaatttaaaatgctggtgtgtgagtgtcaggaaagtgaatgaccttaaagactgagtaacaaattcatgtgcatatcaggtagtttcctaatcatacttttaaaaaatggaaaaagagcaaatttgtgctgattctagatcattaaaaataatttttcaaaatatatcatgtgatttttggcaaatagttcaaaaggagttctaaaatataaatggcattattgtaataaaactattctcatttacataacaggta

SEQ ID NO: 444342 - DNA, 603 bp, Homo sapiens
gggtgatagaacattctcatctattttaaatgagttgtatcagattaaaagatcctggggctgaaaaacccackcaagtaacaaaaaggaaaaaaaaatcattcaaggctgcttttacaaaatgattttttgctttgtaaaggctacccacccttatcagggaagagagagacacaaaggaatgttctggcatcttgctgggttgataaaacaaaggctgtttgaataggatgttgtcgaccattttcaaataattttcctttattgagtaaatttatgtgttttaaatgaataaattactgctattattattgatcaatctttttttctccttcaaggttgttcttcaagtgtttctataataaaataagacaaaatctaagacaacatcagcacagttttctccttctaacccatttcttccacttaagtacgtatttcagttttgttgagaaggaaggttttcttttcctgacataaaagcggctcagtaaagagcatcccacatcctgtgaccctaccttttgcctgtgtggacactttctggggaaacagtgtccacggtaaacgaaaataagcaataagttgtgaattaggattgac

SEQ ID NO: 444343 - DNA, 603 bp, Homo sapiens
gggtgatagaacattctcatctattttaaatgagttgtatcagattaaaagatcctggggctgaaaaacccacgcaagtaacaaaaaggaaaaaaaaatcattcaaggctgcttttacaaaatgattttttgctttgtaaaggctacccacccttatcagggaagagagagacacaaaggaatgttctggcatcttgctgggttgataaaacaaaggctgtttgaataggatgttgtcgaccattttcaaataattttcctttattgagtaaatttatgtgttttaaatgaataaattactgctattattattgatcaatcyttttttctccttcaaggttgttcttcaagtgtttctataataaaataagacaaaatctaagacaacatcagcacagttttctccttctaacccatttcttccacttaagtacgtatttcagttttgttgagaaggaaggttttcttttcctgacataaaagcggctcagtaaagagcatcccacatcctgtgaccctaccttttgcctgtgtggacactttctggggaaacagtgtccacggtaaacgaaaataagcaataagttgtgaattaggattgac

SEQ ID NO: 444344 - DNA, 530 bp, Homo sapiens
attacttctggaaatgtacatgttatttatttaccatggattcatcatgatagtgcattgtgtggctacagaatgcttcttaatgaaaatcctcatgagtagatggatgccctcttttataatttaatacatggctcttctgtgaatacagatttagtaaatgatgtcaggaacagaacaagaagattttatttatagctatacgtccatatccaggtacttggaatatgatttttctttttctttcctctccctccttcccrtcttccctccttctcttctctgctgctactgaaaacagcccagcattagataactcccttgattcttttttagggatgaagcagtcattttcagtcaacaattcagcttatcaggagaaaatgacacagagtggggagtaaacaagaaaataaccaggggcctactttgaagttccttattgaaaagcaggcaagtcttcctccttcctcttacaaagagaactccctcacaggcatcttccctctctgcctgggagatatcccttc

SEQ ID NO: 444345 - DNA, 530 bp, Homo sapiens
attacttctggaaatgtacatgttatttatttaccatggattcatcatgatagtgcattgtgtggctacagaatgcttcttaatgaaaatcctcatgagtagatggatgccctcttttataatttaatacatggctcttctgtgaatacagatttagtaaatgatgtcaggaacagaacaagaagattttatttatagctatacgtccatatccaggtacttggaatatgatttttctttttctttcctctccctccttcccgtcytccctccttctcttctctgctgctactgaaaacagcccagcattagataactcccttgattcttttttagggatgaagcagtcattttcagtcaacaattcagcttatcaggagaaaatgacacagagtggggagtaaacaagaaaataaccaggggcctactttgaagttccttattgaaaagcaggcaagtcttcctccttcctcttacaaagagaactccctcacaggcatcttccctctctgcctgggagatatcccttc

SEQ ID NO: 444346 - DNA, 562 bp, Homo sapiens
aatttcagtcagagtgatagactgcacttcacccactgccctacagaagggtattccaaagccctaatctatgatggagaaaggaggatgagtgttgaagtggggcatgggtctgtagtaccagggccggatatgggggtggtaactggcagggctccagcccagagctgtggcatggctgtggrgtgggaaagtctctgtgaaggggagtgagtgagcagagaccacttaccttctttagtacagagggggcatgagctatccccacctggttaagccagagaggaccctagtggagaagagctaccagagatggggacaatcaccctgagtctcactgtgcaggcagaggacaccctgaagagctggttccactcctgtggtgcagggtgttccatggttgtgggatgcggaggcagccaaagcctgcgctgctgctgtcgttgcctttgttgctcccgcaggtttggatacctgtggtgtctgcttgtcaacaagtgactctcaggtattcttagtcttcatttggtagcctgacctcaggattttggaaatgagcccg

SEQ ID NO: 444347 - DNA, 621 bp, Homo sapiens
acaggacacagtaggattgcagttgagtcccaggagtcagagtaaagtctgtccaagaaggagcagagagggtggtaggtgcagatcacgtccaatgaatcagtgagattcatgtggtragtcaaagtaggtgggagattgatgtcctaacagagaaagtgtcaggtggggagcttgggtcagggaccaagagaagtttggttaggtaataaaatccagtgtctgagtgtgttgtgaagcttgaaagggaaggttagttatttcctggtttatatcatgcaccaatcacagtgcaagacatacaacagacaataaggacttgctgaaaaaaagcagggaatgaaggaatccttaaactcataaaaatgagccaggaatagtggcatagataatttttcttttctttttctttttttttttttttttttttgagacagagtctcactttgttgcccaggctgaagtgcagtggtgcaatcttggctgactgcaacatttacctcacaagagaaagcaattgtcatgcctcgtcctcccaagtagctgggactacaggcgcccgttaccacaccaggctaatttttgtattttagtagagatggggttttgccatgttggcca

SEQ ID NO: 444348 - DNA, 621 bp, Homo sapiens
acaggacacagtaggattgcagttgagtcccaggagtcagagtaaagtctgtccaagaaggagcagagagggtggtaggtgcagatcacgtccaatgaatcagtgagattcatgtggtgagtcaaagtaggtgggagattgwtgtcctaacagagaaagtgtcaggtggggagcttgggtcagggaccaagagaagtttggttaggtaataaaatccagtgtctgagtgtgttgtgaagcttgaaagggaaggttagttatttcctggtttatatcatgcaccaatcacagtgcaagacatacaacagacaataaggacttgctgaaaaaaagcagggaatgaaggaatccttaaactcataaaaatgagccaggaatagtggcatagataatttttcttttctttttctttttttttttttttttttttgagacagagtctcactttgttgcccaggctgaagtgcagtggtgcaatcttggctgactgcaacatttacctcacaagagaaagcaattgtcatgcctcgtcctcccaagtagctgggactacaggcgcccgttaccacaccaggctaatttttgtattttagtagagatggggttttgccatgttggcca

SEQ ID NO: 444349 - DNA, 569 bp, Homo sapiens
gaagtatacagtctttgtgggtgtggggagaaccagtagaaaaacagagggagctgccatgccaggaaaaggggtttttgagggacccaggcagtagagaaggggcttggattagggcacatgagggaaaaagyatacatagatgtggaaatgaccagcagatacatgggaagatggaaagatagaggaagtagagatttgggaatcatctgcaataaagagacagtgctgcattaatgagttctattgggtaatatcctaaatcatatttagcatcttatcaggttgttctaaatagattaatttacctttgaaaaaaggaataacgtacatttcagttcaagatagactgaacacaatcaactccttccctctagaggatatattaaaatgataatacaagctttttcaagagtggaaagagaataagaagggaaactgcagtagatgagagactgcaagagatttccagaagatgaaatgtggttggaggcatggagacaaatgaaatagagcggaaaagcacaggatgtgctgtgagggtctggaatggggaaaggcatccacct

SEQ ID NO: 444350 - DNA, 569 bp, Homo sapiens
gaagtatacagtctttgtgggtgtggggagaaccagtagaaaaacagagggagctgccatgccaggaaaaggggtttttgagggacccaggcagtagagaaggggcttggattagggcacatgagggaaaaagtrtacatagatgtggaaatgaccagcagatacatgggaagatggaaagatagaggaagtagagatttgggaatcatctgcaataaagagacagtgctgcattaatgagttctattgggtaatatcctaaatcatatttagcatcttatcaggttgttctaaatagattaatttacctttgaaaaaaggaataacgtacatttcagttcaagatagactgaacacaatcaactccttccctctagaggatatattaaaatgataatacaagctttttcaagagtggaaagagaataagaagggaaactgcagtagatgagagactgcaagagatttccagaagatgaaatgtggttggaggcatggagacaaatgaaatagagcggaaaagcacaggatgtgctgtgagggtctggaatggggaaaggcatccacct

SEQ ID NO: 444351 - DNA, 569 bp, Homo sapiens
gaagtatacagtctttgtgggtgtggggagaaccagtagaaaaacagagggagctgccatgccaggaaaaggggtttttgagggacccaggcagtagagaaggggcttggattagggcacatgagggaaaaagtatacatagatgtggaaatgaccagcagrtacatgggaagatggaaagatagaggaagtagagatttgggaatcatctgcaataaagagacagtgctgcattaatgagttctattgggtaatatcctaaatcatatttagcatcttatcaggttgttctaaatagattaatttacctttgaaaaaaggaataacgtacatttcagttcaagatagactgaacacaatcaactccttccctctagaggatatattaaaatgataatacaagctttttcaagagtggaaagagaataagaagggaaactgcagtagatgagagactgcaagagatttccagaagatgaaatgtggttggaggcatggagacaaatgaaatagagcggaaaagcacaggatgtgctgtgagggtctggaatggggaaaggcatccacct

SEQ ID NO: 444352 - DNA, 539 bp, Homo sapiens
gcagttacgaagtatcatgctcttaacttgtaaaaaattatcaatcctcacagtgttttatgagatagtcattgttatctccatttgaagatgagaaactgaggttaaattactatgccaattatttcttacctagacatatacagcctggttttgaatgcagataagtcttgttccaaaaaccggaaagttaaaaagtgaaagagatagtatatttcttcaggtcaagtaagtgcttgatttcattcaagtttcatttagctgactcagatctcttcccctcacccaaaacattttgataattttaaaggcactcatttaatcctaccaccataaaacactttttatgacttttccatgtcctctttcagtctttgaacacacaaatattttatgttgctgtaattatagcatcatrgtaacattttatattctgctttttcaattaatagtatatcataaatgttttccatgctattacatagtattcataattattttaatgactttataatattctatgcagttaacctaccaca

SEQ ID NO: 444353 - DNA, 539 bp, Homo sapiens
gcagttacgaagtatcatgctcttaacttgtaaaaaattatcaatcctcacagtgttttatgagatagtcattgttatctccatttgaagatgagaaactgaggttaaattactatgccaattatttcttacctagacatatacagcctggttttgaatgcagataagtcttgttccaaaaaccggaaagttaaaaagtgaaagagatagtatatttcttcaggtcaagtaagtgcttgatttcattcaagtttcatttagctgactcagatctcttcccctcacccaaaacattttgataattttaaaggcactcatttaatcctaccaccataaaacactttttatgacttttccatgtcctctttcagtctttgaacacacaaatattttatgttgctgtaattatagcatcatagtaacattttatattctgctttttcaattaatagtatatcataaatgttttccatgctattacatagtattcataattattttaatkactttataatattctatgcagttaacctaccaca

SEQ ID NO: 444354 - DNA, 588 bp, Homo sapiens
aaagttcagttcagtgcactgagagtaccatggataacatattcacatccataaaaaattttgaaccctacaactgcctagttagggtagataatattaatttcttttgtagaagaagagggtatccctcagcaatgcaacagggtcagccagatagtaaatagcagaagaatttaagattcatagttccttgcccttcttgctatagcaccatggcttcactgggaataatgagccctctgaaattacagaccaagtttaggatagagggttggggccrgtccctctccacatttcacatcactctgccttgaagcaggtgtggatccagagtcaagtcttgcaaacttcaatctattcctttgcagacaaccctcagtccttctaaatcattctagtatgtctttccacttacatttggatagcaggacacagataaaggctacaaactaagttcgtgggcaagttttaaacactgtttttgcatagctgaaggcagatggcccaatagcaaacactatagtcagtgaaaataggtcattcctaggaaacgttctgaagacaaaagggccaggaaagatttgaatt

SEQ ID NO: 444355 - DNA, 542 bp, Homo sapiens
agatattgtcaaattctcttcatagaaattgtgtaattttctatttctatcaacaattaatgtattaaagttcatgtttatccatggcctctccaatagaatacattgccaatatgtttaatctttgccaatctcttaggtgagaaatgttatctgagtacagtttgaawttgaatttctctgagtgaaattgagtatcttttcatatgtttaaaagtcattttatatgtatatgtctgtatatgtcttttgtctacgtttacataattttaaaatctatttcctcttaatttttatatattaggggtattatttctttatatgtttcaattatttcctctaaatttgttattttattttttattttgcttgtagtgagtttttttgccataaatgaaaaaattatgtagttaaatttgttatctttcattgcatctgcatttagaatcatagaaagtgttttcctataccaaacccatggaggaatccatttttgttttcttctattacttatatagtttttttgttttttaaacattcag

SEQ ID NO: 444356 - DNA, 546 bp, Homo sapiens
aacatgatttgttaagtttatttctaaggtttttttgtggtttattttttaagttcattttgctgctattggtaaattgtgcttccgttagtcctatttagatattatttgtgtatgtgtatactattggttttttatattaattttatattttgcttttattgtttgaattagttttacattaattatctagggttttccaggtgtattatcatgtcatctrcaaatatagataatatatttcctttcatggctcaagttattttttgtctagttgcattaattaataattctaatatgatgttaaataaccatgcagttagcatggatctttgccttgtccctgaccttggtgggaatgtttctagtgtttctctattaagtaatattcttgcttcatggcatatatgcatgtatgtatgtaaatggataggtagacataggtatgtgtatgtagatatttatgtgtgtgtgtgtgtatatatatatatatatgtatatttgtaattattctgagcttgattttagtactttaggacctgagtt

SEQ ID NO: 444357 - DNA, 288 bp, Homo sapiens
agtgctttgccctcataatgacatccggccagataaatgggaggacactggaataatttgatttctaccagatatttctactcttgctacctgtcctttttcttctccttctaaaataaatgtcgactcctcttagccacatttcttcctacttgtcctataaagaaaagactagggttggaagacccaagtgtgatttgttttctttctctgatcttttttwctagttagccctctctaaactagaacgtatgtgattcaatcattcatttattaattcaataaaat

SEQ ID NO: 444358 - DNA, 556 bp, Homo sapiens
ccccaccccttctctcttccccrcctccagactgctgtggtgtcacctgactgattcctccttcaagtatcagtctagatgtcagctcctctaggaagctttccctgaactcctgagtcagaaggacaggcccttcctgaatatactcttaagtctctatatatgatacttgaattgtatcgcagttgcctgcttatctctgtcttccttcaggctgtgagcaacctgacagtactgccacatctagctccccttttgatccccagagctgataaatgcccaggtacacagaaggcattcaacacagacttgcagaatgaatgaatgaaacatcttccagaactagcatagtgcttgcctgtcctgcttggacagtggccaatccagtcctcaggcaggtttcctctccttctccctgcaagcttggactcacatgccaagtgatggatctgtgttagaaaaggccccagcaacacccagcagaatgcacatgctcatctgcttctgtttgcttctaaccatgaggaaagatgatctattttctgactttgatgct

SEQ ID NO: 444359 - DNA, 459 bp, Homo sapiens
gggaggatcacctgagcctgggaggttgatgctgcagtgaaccgtgatcatgtcactgcactccagcctgggcagcagagcaaaaccttgtctcaaaaaacaaacaaatgaaaaataaataaacaagatctccaggagttccatatgtcccctgcttttgagaaacacttctctagaacactgttcctcaaactttagtgcacttcagaattatatgaaaggcccattaaaacacagatcgcccttaacaaactagacatcaaaggtacatacctaaaagtaataagagccatctatgacaaacccacagcctacatcacasccgaacaggcaaaagctggaaacattccccttgagctcattcttaccactcttattcgacatagtattggaagtcctggccagagcaatcaggcaagaggaagaaataaaaggcacccaaataggaaaagaggaagt

SEQ ID NO: 444360 - DNA, 438 bp, Homo sapiens
tattcccaataataggattgctggattgaatggtaattctgttttaagttctgagaaatctccagactgctttccacagtggctgaactagcagcgtgtaagcggtcccttttctctgcaaacttgccagcatctattgttatacttttttactttttagttatagccattctgactggtgttagatggtatctcattgtggttttgatccatgtttctctaatgatttgttatgttgaggattttcttcacatgcttgttggctgtgtgtatgtcttctttggaaaartgtctgttcttgttctttgccctctttttaatgggactgtttgttttttgcttactaatttgttcaggttccttatagattctggatattagacctttgctgtatgcatagcttgcaaatattttctcccattctgtagattttctgtt

SEQ ID NO: 444361 - DNA, 438 bp, Homo sapiens
tattcccaataataggattgctggattgaatggtaattctgttttaagttctgagaaatctccagactgctttccacagtggctgaactagcagcgtgtaagcggtcccttttctctgcaaacttgccagcatctattgttatacttttttactttttagttatagccattctgactggtgttagatggtatctcattgtggttttgatccatgtttctctaatgatttgttatgttgaggattttcttcacatgcttgttggctgtgtgtatgtcttctttggaaaaatgtctgttcttgttctttgccctctttttaatgggactgtttgttttttgcttaytaatttgttcaggttccttatagattctggatattagacctttgctgtatgcatagcttgcaaatattttctcccattctgtagattttctgtt

SEQ ID NO: 444362 - DNA, 530 bp, Homo sapiens
agaaagttggaagatgagtagagtgaatctggtgtggtgggaagggagacaaggagagaaagggaagaagaggtttccaagcagcctatcagcagcgttttggaatcatggtgtgagtttccccagtctttccttgagataagaatgaccttaggctcttgttaagtataccagttttgagggccctactatgaaagtatatccagtgggcttggaaatgttatcaaacaacttgagtgatttgaatctttaattyatccaataacttgagtgattgttatcaacataacaggtttcagatgggacattagcggaattagaaaaagcccattgtgatggaagcacaaaggttgtgggttgtggggtgagaggcaggctgtggtcagtgcatttgtttttatcctgagaacatagtaggtttgtagaattggtaactaaaaattgagggaattctttcttaccacttccattttccctgtgaatgaagaaacaaaaatggttatccgtatatagtaggagaggctgagcag

SEQ ID NO: 444363 - DNA, 639 bp, Homo sapiens
aaaatattttaccccaaaatatgttcctttgccatattttaaaatggttctgcaaacctgggttttgtgggggaaatttgcaactataaagagtccatattaacatacagatctctccccttccaggacctcccagtcctgaagaggtctagcaccttttaaagatatgaataggaaacatttcctatctattgtctctaaaggcagccacctatgagacttcataagaacattggtcttggcaaccccttatcttgacccagacactcttttctactgattccaagtcttcagataatagcttcaaccaactgccaatcagaaaacctttgaattcaccaatgatctgatagtcccctcacccccacttccagttctcccacctttccagacygaaccaatgtatatctcacatgagtggattgatgtcttatgtcttgctaaaatgtataaaggcaagctgtaacccaaccacctcagacacacattctcagtacctcttgagactatgcctcaggccatagtcactcatatttggctcagaataaacctctttaaatatttcacagtttgtaaactttacaaactctgtaaagtatttcttttcgtcaatgaggctatggctctgcctaaaagatt

SEQ ID NO: 444364 - DNA, 582 bp, Homo sapiens
gtgcttcctgtacagcctgcagaatcatgagccaattaaacttcttaccttataaattacccagtcttgggtatttctaatagcaatgcaagaacagtctaacacactaggtctagatataacaaattcctttagcgtttgcttgtcaggaaagactttatttcttctttgtttgtgaagcttagtatttggtgattacatagtcataaataacatggttaagcatttgtaaccttcatatctctgtgaataactgctaagagttgctttcttatgcccttaggcttggccagtttgtcatatcttgttggcattctttttttttttttttttttttggkaactacacaaatctcactatattgtttgtattatttaaatagtaatccatttagaatttctataaattaaatgtgttagttaatatctagaggcacatgtgaaataaataatttttaaaatgtgttagtaactctttatataggaaaataaatggatttttatttacatatcataacattttaacaagaaaaatgttccatttattactctaacaagaccaaaaaaccaattttctattttg

SEQ ID NO: 444365 - DNA, 533 bp, Homo sapiens
atacctagtccaagcccccattttataaataactgaggcccagggacgtacagtgacatgctgaagattacctagttagttagtaggaaacaaagattacaaacaagactaacsgtttttcagtctggtgctgtactataccaccatttagaaggcttgccttacaaaagaatgtctaaaacgtgattacagtaagagcatgacaaaagataatttttctttagatgttttaatattttatgctctgaaataactaaaagcacctcctaatgaaatctaagaaatttattctcaattattttagctgtgtctaaaattatttatggtttcctattaatttacagtacatgaaagctgactgccctggttatttggtgattacatttattttaaaaattcaaaataacagtatttgacattatcatatattatttcctaaaaatgaagctaattaaattgtgcaagttgtaaaaatataaacctttttacatttggcatgaaccccaatttttaaaataattcaataaacaaat

SEQ ID NO: 444366 - DNA, 364 bp, Homo sapiens
agggtgggatatgctgagcaagaccacttgcctccctggcttcagccccttttccagaggagtgaacggttctgtctcgctggcattccaggcaccactgcggtacaaaaacaaaacaaaacaaacaaacaaaaaaaactcctgcagctagctcagtgtctgcccaaayggccacccagttttgtgcttgaaacccagggccctggtggtataggcacccaagggaatctcctggtctgtgggttgtgaagaccatgggaaaagcgttgtatctgggcttgatagcactgtccctcacagcagagtccctcatggcttcccttggtcaggggaggaagttctccaacctcttgtgctccctgga

SEQ ID NO: 444367 - DNA, 621 bp, Homo sapiens
agcccaggtggtgggactggcctttggggactctgtatactagatgaccactgagttcattagtctatttgggaaagatcgcatatggattgaggaacttcatgagggcatggatcgttctggagacagccatgtcaattcttacgatgtttattttgtgctggcatcatatttcctggcatttggkgagttgatggaatggcccaattcacttttattctgagtcatttgtgggaagagaaatttaattctctgggaacccttgttcgtattagtgttaaatcatttgtctgctgtttaatgatttatattcacagagcaaagaggtcccagaattgcattcctgattgtgctaccccccaaagcctccctctaccactctaagttagagaaataatttagtcttgtgccttagggaatccactcaagacactactcttcagtttactcattgcatgtatatatatcttagtgtactgatattaggcttttagttgagtactagacttcttgagtttacttaaattggcactatattgtattttgtgctattaacatgctgaactgcttttgctttgttaactcagcaattaggttcctcccaaactttatgcacccttt

SEQ ID NO: 444368 - DNA, 508 bp, Homo sapiens
atttcccaggagccaggtaagtgccaaagccttctttggaaggggcagggtttggaccactcatacttgcttagttgatcctttactgcatggtggtgtacttgttatacagcaaggcctaatctaccctgactaaaatataatgtactrtatgtaataataatatatagtgtaaatataaatgtatataatgtataaggtatagttgtctaatatacatgaaaataaatacacaataaaagaaatatttattcacatagttcctgaaattatcttgtataattgaaacatcagtataatactagcagtagtacacatatcatacttcagggaatattgatctggtccaactcctcaagttaaaatgtgagaaagttaaagagcccaactccacactgagttttgtccagggggaaagacagtggcctggaaggaaggattactggacaacatggggtctgaggcaacaacttcacagatgagttctcagcagcttctccagtcaggg

SEQ ID NO: 444369 - DNA, 508 bp, Homo sapiens
atttcccaggagccaggtaagtgccaaagccttctttggaaggggcagggtttggaccactcatacttgcttagttgatcctttactgcatggtggtgtacttgttatacagcaaggcctaatctaccctgactaaaatataatgtactatatgtaataataatatatagtgtaaatataaatgtatataatgtataaggtatagttgtctaatatacatgaaaataaatacacaataaaagaaatayttattcacatagttcctgaaattatcttgtataattgaaacatcagtataatactagcagtagtacacatatcatacttcagggaatattgatctggtccaactcctcaagttaaaatgtgagaaagttaaagagcccaactccacactgagttttgtccagggggaaagacagtggcctggaaggaaggattactggacaacatggggtctgaggcaacaacttcacagatgagttctcagcagcttctccagtcaggg

SEQ ID NO: 444370 - DNA, 544 bp, Homo sapiens
cctgttgttctcaacaatgagcaatatggacattgtcataatgaagtgatgactgcttagcctctaaatctggtaactactttgggacaatatgggaggaaaagtgaagacagtgatggtgtaagagctaaatcctcatctgtcatatcaagaaatcactatataatgtataaaacaatcaagaaatgcctaagtagttatgtgagaaaaaaatagaggacattgctaaaagagttaaaagtcattgctctggagaattaggagggatagggyaggggactggtaggatgcattataaactgaagaggcttttaaaaatttcatgtattaatatatgcattcacttgaaaaactaaaaaaataataattggaaaaacccatgaaggtaactaccagaaggaaaaactgagagaatgagaagtgcttgcctctggaaagaacaactggcaggactgttgctttcattgtaaggcttttggagccatttgattgtacttaatcatttttatctatttctttaataaaaacaattttatcttaataa

SEQ ID NO: 444371 - DNA, 503 bp, Homo sapiens
ctaactgactgactataggagaggaagattttcaatttctcaatttgcaacgtttaagacaagtgtgcatttttaatgagattctgtaagttagccagtcaactgttcttgcttgtgtgaaggttagctattttgcagtcctcattcattcactcattcattggttaaacaaatatttactgaatgtctacygaatgccaggtactaggtactgaagatacataagaactagtattctagaggttagacatatggacaaataatcatggaatgagataggcaccctgcagttgaaaggatttcatttagaccagggaatactgccccaactctgctcttggccatagtgatctgtgggtttgccagttctgcatgaccagaaggtgaaaggagagatgaagcatttctgaatgacctaaggttttcctatcctcttattttatgaatattattggaagcatggccagtacttggaagaggtaggctctaattctttgtgttca

SEQ ID NO: 444372 - DNA, 536 bp, Homo sapiens
gagacactgcagagtgagcagtgaaccaaagcctttggagcccacagtctagccaaggaggcaagacaaatagacagatataataatgtcaggaaatagtaattaccatgagaaaaaagaaagcaaggaaagagggtggagagtgagtagggtagtccaagaagttctctctgagaagtgatacttaagtagagaccaccacaaagtgatgagtgaattgggtgatatctgggagaagaggtaacatggcaagatcaaaggagtgtgtgcctggcatgtacaagtaacagtaaggacagcagtgtggctggagcagagggaaccagggccaggtggaggagatgaggcaagaggcataactaacagccaagccrcgcagggccaggccacagctagggctcggaatttgtactgtgtcagaacatccctagagcatgtggaccaggagaggtctgagttgcaccaacatgaatccatgttcataaagagacattttcagaagtgaactctattaatttaattccttgcttaaacga

SEQ ID NO: 444373 - DNA, 560 bp, Homo sapiens
gctagatggctctgtgactctgctgctcacagactctgctgttagatctgcccagctgctctgccttcctactgcagattatcaaccatctgaaacattccacatggctagatgccagggtccaagagagctttaaagctcatccaagatgatggtcaaggctgcaggtcccatacatcccaaactgcctgggatagtctcaggttaggtttgtggcccagcataattatcaacagggtcctctttcactttcaaaagggtcatggtttggacaataaattatgtggtcatcctagtcaaggttatacttgctacttaagttatwtgttttcaaaggggagaaaaaaaatcctaagtgaaggtcttactagggcgttttcaacagtagtttctcttttttggcacaagctatccccttttttgtggctccacatggcacatggaagcagatcattagggaaattaagagtggtactaggagcctgtcccacagcccccgggttcatttacatcaggaactagtctacatcggcatcgggtcctgtaacagcataagcagg

SEQ ID NO: 444374 - DNA, 595 bp, Homo sapiens
taccttaaccaagtgattaaagcaaacatccacaaaaaatgggacaacctgacatcatgtgccttctgctgtggtgcactgagaagggcaaagcatcacttctgttattcctgcccacaatgcagcatctgaatatgatcataaggaaacatcacacaaagccaagctgatggtcattctacaatgtaactgatttgttctcttcaaaaatggcaatgtgatgaaagataaagaaaggctgggrtaaagatgaagaaagagataggaaaactaaatgcaatgcatgaccctaacttggagcctagattagaaaatgaaaatgctgcaaagaacttaatctgaataattggtgaaattagaatttgggatatgcattaggtaatagtatttgattgatggtaaaggtcccaaatttgatcattttcttgttactatgtaagaaaaatctttatttttagtagacatatgctgaggtacttagcccttgaagggtcattaacaactggttacatggtttaggaaaaacacagtatatgtatatatttataaagacgtgaagcaaatgtggaaaactgttacaaaattattttttcaa

SEQ ID NO: 444375 - DNA, 562 bp, Homo sapiens
acctcccctaatccctgaggctgataggtgagagaaaggcggacactttcatttcctacattcatcaacaaggattttcttctgagcagtctcagatctgtggagacttcattgtcacttggagttatgtttctcttcccaaacgggagcctcttctaacacatttcaactgcgttgtcgccaattgtgttgtcaaagagctggggctttccaaattatttgctgctggttagaatgggacatggtcctaaaggcagaagtaataggaggcttaccccatctgctctggtcagtttcttttccccagctggcatcaggggtgtcatttctattctccacactcttggtgtttctgacagctaaagctgccagataaatgatcattctagatacaatttgtgatgcatgatatgccatagaaaacaaccaacattagagtgacccttagtcatcattttagaaattagaaaatgagagctcatgtgcgtatcttttatatcttttcttttaggatcctgatggtctctccatcarcttgaggtttttttgtggttgtttatgc

SEQ ID NO: 444376 - DNA, 571 bp, Homo sapiens
aaatagaatagtgaatcccaaaatagactcacgtatatatgatcatttgatctttgacaaggttgtcaaggcaatttaatccagaaaggacagtcttttcagaaatggcaacataaacataaatgaaagaactccagtagttttatacataaactactagaagaaaacataggagaaaaatcctagtgaccttggcctaagcaattatttattaaataagacacaaaaagcaagaattgataaattagagttcaacaaaatttaaaacttctgttcttccaaaaacagtgctaaaaaaattaaaaagcaagacataggctggsagaaattatttccaaaacatgtatctgacaaaggacttgtatccacaatatatgaagaatacacacaactaaataaaaagaagacaaaagctccaacttaaaaaaatgggcaaaatatttaaacatatactttactaacaaagatatatgtataacaaatgaatacatgaaaagatgctcgccatcattaatgttagatactgctgcacacctactagaatagctaagattaaagatactgtagcaag

SEQ ID NO: 444377 - DNA, 571 bp, Homo sapiens
aaatagaatagtgaatcccaaaatagactcacgtatatatgatcatttgatctttgacaaggttgtcaaggcaatttaatccagaaaggacagtcttttcagaaatggcaacataaacataaatgaaagaactccagtagttttatacataaactactagaagaaaacataggagaaaaatcctagtgaccttggcctaagcaattatttattaaataagacacaaaaagcaagaattgataaattagagttcaacaaaatttaaaacttctgttcttccaaaaacagtgctaaaaaaattaaaaagcaagacataggctggcagaaattatttccaaaacatgtatctgacaaaggacttgtatccacaatatatgaagaatacacacaactaaataaaaagaagacaaaagctccaacttaaaaaaatgggcaaaatatttaaacatatactttactaacaaagatatatgtatarcaaatgaatacatgaaaagatgctcgccatcattaatgttagatactgctgcacacctactagaatagctaagattaaagatactgtagcaag

SEQ ID NO: 444378 - DNA, 620 bp, Homo sapiens
tgctgcccacccccagctgagatgcacccttgctgaggtttcctctgcttggtctttctcctgagaacatgacctcaatcaatcatgggcatccaaatcctcatctcaggctctgcttctaggaagcctgagctggagcagagggcttggaggagacatgtccatgcatcattatcagagtgcaccaccacccactgtttccatgtcagctgctgagtgatccggcctgtcctcacactagacagcacatccaccccagaggccaccagccagctcctcgtcttgagttggcccactggtctccatcccatggacagcagctgcggtcggccaccctgctttcctgtgrctcctgctgcttcctgctgtgctctctccaatgtgttctcttcaagtccccagggaaagcacttgggaccacgtcacttcctggctcaaactgcccagtgacctccacccgatttagaatgtagtcctgcatgactcacggacgcgacccggcatgccgggcccctgccgacctcacccctctcacctccctgctatccttcccctgcatccctcctggcaaccccataccctcacccctctgtgggcatccagaaccatcccaggagtat

SEQ ID NO: 444379 - DNA, 564 bp, Homo sapiens
ccggtacacagcaggtactcaataactgtgtgttgaatgaatgcatacaatggaagcagtgacatctagctgaggacatacggtcagagtcatgcaaattttcaggctagattcaggaagcatgcagcccagaagcagaagcagggaagctgtgttgggcaggtggcctgatgatggagagaccttcgtgaaaacagaaccacccagtcctggtctgctccatttgtcttctctctcagtgaaaatgactctaaaatcagaagtggagcaagacctcagtaatggtatgaactagttctgacacgctcatgggggaaaacaagccacattcttcggtttttcacaatcccatcaagcccccttttgccctttctttgagggttagcaggaaagccaatctccatgatttgggaaaggcctcttccccacagccatcattctagagtccctggagggtygtgaatagcagtgccctgcaggccacttgcagtgtctccttgtcttgacccaggccagccatgaggcagcctggggctccccaggcaaacctctcaccctcttcca

SEQ ID NO: 444380 - DNA, 555 bp, Homo sapiens
caatgcagacaggttagagaaaaggagaagcaagggtgtagttctgcaattcaagacttacattcttattcatttttgtccatgaaagatttgtttttgctttggggttttgcatggattctttttataataacagtgacaagattactaatgaccttaaagaggtcaaaaccagattgtaaatgtctcaggggagattgcaaggttaggaagtataagcaatgattgtagattgctcttaaagaagttgcacaacaaagaagggaaagataactcaagcaagtgctaagtaaagagaaggtttcagtcagtgatgtgctagaagcttcctacytttgggaaaactgattatgaaatttccaggaattctgtgagctacttgttaaactggcttgaaatagtcccatgattggagtgtttgcactgcagaaattggcaaatgctacaaagcagccacccgcccccctccccgccccaacccatgcccagccagttgttacacacttaccagtacaccactgtttctaggctgggtggatgaataccatggacaga

SEQ ID NO: 444381 - DNA, 491 bp, Homo sapiens
tgctagctatatataccattgtgtatattccattgtgtatatgtgtctttcatatgtgacttttattgtgttgaggtatgttccttttatgcttagtttttcaagagtttttttttatcatgaagggatgttgaattttatcaaatgctttttcagtatcaattgaaatgatcttatggtttttgtccttcattctgttaatataatgtctcacattaattgatatgcatatgtygaaccatctatgtatccctgggataaatcccatttggtcatgatgaatgatctttttaatgagttgttgaatttggtttgctaatattttgttgagggtttttgcataactgttcatcaggaataatggcctgtggttttctttttttgatatgtcttgtctggttttggtatcagggtaatactggcctcatagaatgagtttggaagtattccctcctcctctatttctcagaatagtttgggtaggattggta

SEQ ID NO: 444382 - DNA, 521 bp, Homo sapiens
tcttctaaaaaagaaaaaaaaaagtgggcttccgggatatagaaaggagaaacccaaaggagctggggctaagggtgttacagggccaggtgtgttctctactagggcctgcctgccttcttccctataataactaacactgcttgagcacttactgtgtaccaggcaccacttaagtgcttgttacatgatatgatccatttagtcctcagaatattcctatgagattatccataaaatagtcttatctcattttcagttcagaaaaacaagacatagagaggctaagcaacttacccaaggttgcacagctattaagtggcaggctggaatgcaaacccaggcaagctgttttcagtgcagtcttaagttccscctttccctgccctcgagatttggcgcccaacacgttgggactcagctgcagcctctagctgctaaatctgactcctctctcgggccagtgccctcagttggatctctgccttgtttctgagaaccaggatcccaagagctatgtt

SEQ ID NO: 444383 - DNA, 521 bp, Homo sapiens
tcttctaaaaaagaaaaaaaaaagtgggcttccgggatatagaaaggagaaacccaaaggagctggggctaagggtgttacagggccaggtgtgttctctactagggcctgcctgccttcttccctataataactaacactgcttgagcacttactgtgtaccaggcaccacttaagtgcttgttacatgatatgatccatttagtcctcagaatattcctatgagattatccataaaatagtcttatctcattttcagttcagaaaaacaagacatagagaggctaagcaacttacccaaggttgcacagctattaagtggcaggctggaatgcaaacccaggcaagctgttttcagtgcagtcttaagttccgcctttcmctgccctcgagatttggcgcccaacacgttgggactcagctgcagcctctagctgctaaatctgactcctctctcgggccagtgccctcagttggatctctgccttgtttctgagaaccaggatcccaagagctatgtt

SEQ ID NO: 444384 - DNA, 606 bp, Homo sapiens
agcaaacttttttaggttaaacttaattttaaaagtcccatggatgttctgcaaaaaaaaatggattctgtggtcaggtaaatagatgaaattgctgagtcaaaggtcaggctttaagctgtctattagcatatgagggttaaaagtagagaccaggggccagattatcagggctcttctttcttagctgtaagaccttgggctatgaatttaacctctccattttcttaccagtaagataaggataataatatattctatttcatagaattagtatattaacatacagtgcctggaacataatgactaaataagtacttgttaaacaaataaggtctctgagaaattcttgagaaaaaatttgacgtagagttttcctaacctactgctctcctttcttcctcccttgcccccaacaataactttcactgcgatacctatgctttaaaacactcattagaaaattcactgaagaaagtttcttgaaattacttttctttatttttttacyttattttattttcttttagagacagggtctcactatgttggccaggctggtttcacactcttggcctcaagcattctcccattgtagcctcctga

SEQ ID NO: 444385 - DNA, 602 bp, Homo sapiens
gaatgtcccctccaaaattcatgctgaaatttagttaccattgtaatagtgttgagaggtgggatctttaagagatgactggaccacgagggctctgcccccatgagtgggattactaccatagaaaaagagcaagtttggtcccttttttctcttgcccttctgctttctgccataggatgacacagcaagaaggtccttgacatatgctgattttttgatcttgaacttcacagtctccagaactataagccaatacatttctgtgcattataaattacctagtctgtgatattttgctgtaaccrcaaaaaacaaacaaaaacaaaaaattgggaccagagaagtggggcatcgctataaaaatatctaaaactgtggaggcagctttggaagtgggtaataggtacaggttgcaacagtattgaactgaaggctggaaaaagcatcagttgccctgaatggaacattaagatgattctggtgcaggttcagaagagaatatctgcagggaaagtctgaaacttcctagagattacttaagtggacatgaataaaatttggtggaaatagggatagaaaaggcaattctaatgaggtct

SEQ ID NO: 444386 - DNA, 606 bp, Homo sapiens
attgctcaagtgggcccaggtgctgctcaggtcaccacttcagaaggcacaagtagtgaatcttggtggcatccatgtggtgctaactctgcagaagtacagagtgcacaagctgcggggccatgacggtcttcagctagatttcaaaggatgtatttgcctagaggcccaggcagaaacctgccacagggtcagarctgccacagagagtccccactagagctgtgtccggtggagccacaggagtggagccacccccaagatctcagaactgtaacactgccagtgtgcaatgccagcctgggaaagcttcaggcatgtgactctaatctgcaaaatcagatgtgtgggctgagccccacaaagccataggggtggggctgcctgaggccttgggagacccagccctactccagtatgcccaaaggtgagacattgagtccaggaagatttttctggagccttaagatttaatgttgttcgccttgtcaggttttgcacttatttgggccaagttacttcgttttttaattttctttactccttttttggtaatgggaatgtctatcctatgcctgtcccacagttgtattttggaagtacatt

SEQ ID NO: 444387 - DNA, 606 bp, Homo sapiens
attgctcaagtgggcccaggtgctgctcaggtcaccacttcagaaggcacaagtagtgaatcttggtggcatccatgtggtgctaactctgcagaagtacagagtgcacaagctgcggggccatgacggtcttcagctagatttcaaaggatgtatttgcctagaggcccaggcagaaacctgccacagggtcagaactgccacagagagtccccactagagctgtgtccggtggagccacaggagyggagccacccccaagatctcagaactgtaacactgccagtgtgcaatgccagcctgggaaagcttcaggcatgtgactctaatctgcaaaatcagatgtgtgggctgagccccacaaagccataggggtggggctgcctgaggccttgggagacccagccctactccagtatgcccaaaggtgagacattgagtccaggaagatttttctggagccttaagatttaatgttgttcgccttgtcaggttttgcacttatttgggccaagttacttcgttttttaattttctttactccttttttggtaatgggaatgtctatcctatgcctgtcccacagttgtattttggaagtacatt

SEQ ID NO: 444388 - DNA, 592 bp, Homo sapiens
ctcataagagtatgtccagtctatagaggatacacagcacgagtttttgtatcttctgcttccaccttttaaggtcagggggctgaaaagcccacctttggattatgccagcactgccattttttttcgtacatgggacccacaaagaggcatgaaactcaattgcacatgtacatgtttctcctttcataaatatttatgctcctcctacagcatattgaatatgtatatagctagctaacaaattcaacttaaattcctgtcttattctttcctcccttgaagtgcttgctctcaacttttgctggaggtcacgcttctcagtcttyaggatggctagcttacaggctgcaaccctctatgagaactaaaggtctccttttcaaactgatgaaccttatcattcttcagttgacccttgcatcatagggataacaatatacagtagctattgtcatccccaataatagacaaagttctgaaacattaggtaattaacatgaatatataatcctactcaccatcttttcccctctaagatttgacatttttacaaaagtaataaatagaggagataagaaccaaacctaaa

SEQ ID NO: 444389 - DNA, 518 bp, Homo sapiens
tggttagggctaacaattacccatgatctcgtctatttatttcctagtcgtcttatctgcctttactctcagagacacacacagatgctatatattttccctctayaaaattaattttaattctgcaaaaatctgggaaggagaatggattgcagagtcagactttagtttgagttcaatttttgccattttatgttctataaactcaaaaaatacctaaatatttcagaatttcactttctcccatctctaaagttagaatatgactacttttgtcttgctttaagtattatttgaaataaagtatggtataaaaatttaagtattaattaacaatcatgtcactgtttatctaaggatttagcaagctgtgtgaaagctgtctagcctgcaaaaggcagtcaaaaggtgtttgtccttttcccctttctcttggaaaacaaaaagacataaaattatcatctgcaaaagttgtagtagttatgctactatggtatatgccattgctttatggagta

SEQ ID NO: 444390 - DNA, 614 bp, Homo sapiens
taatacctgggtgatgaaataactctgtataacaaacccccatggcataagtttacctgtgtaacaaacctgcactcgtacccctgaacttaaaataaaagttaaaaaaaattacagttgataccagtgcttcacatagctctttaaatttatttgctctgagaggaatactgaatagcaccttcatcagaataacctgtggtggtttttaaaaaatgctaattaatggctcaccataagctccctgggaatgtggcctagtggtatgtatttgaaaacaattgcccatttttgtttttttttctggcaagcagtggcatttgaaaaaatgctccttcaatgtttaggtgaatatggtcaacaacaacagggttattacagatgtctccctgtgctgctctgggaataytactactattctatcgtagacattaaagattaaaggttcctggggtaagtcctttataaaatattgccatgtattctctcgggaaaaaaatgtgcctggcataagagaacactcaggcgcatgaatacttaataaattaccaagaaatgccttaacccttcatataccaaaataaacttatgctcagaaagtcttgtgttagcat

SEQ ID NO: 444391 - DNA, 542 bp, Homo sapiens
tgtgagttagtgctgcctccctacaacagactggctgtgttccttaagaaattgttcttgtcaagttacttgtgtctggagtgccagtgtatttctaagtgaagctcaagaaatctggcaagttaaggtctaatcagcagtsaccctaggaatggttaatggtgagttattttctatcctaaagtaattgtgtgctttactccatatttaatcacatgattaagaaacaacacaagagaatgatttatgtcatcaaatccaagagtggacactattcatttgaagctacagagtgatcttatcagtcaaactagggcaaaaccacacttacatatatgaccagtttcatcatatgtttttaatctgtatatgttgaaataaaattaaaagttttaaagaaactttaaaaggcagataacaaactttttacctatttaaggtcctacattgaaaaatgagtatccaaaatggtgtatgtttttaaatctgaggaacttgatttacttattttgcaattttgggcacatactgtcacgtgtcaa

SEQ ID NO: 444392 - DNA, 510 bp, Homo sapiens
atgtgtggccttatttctgggctctttattctgttccattggtctgcgtgcctatttttgtatcagtaccatactgttttgctcactgtagccttgtagtatagtttgaagttaggtaatgtgattactccagctttgttctttttgctcaggattgctttttggaggtgtgaataaggtacttagggtctttgctccttcattagtccaagggtggcaagggcagttccactgcaaaggcagtagcagagagctttcagatgtccctggaggctctgtccagggagttgctgagttggtaatggctcartatatctggcaagaggtggctggaggcccaggcctggaggacctgcctggtgaggagatatgggaatgggccccacctaacagtctggccacttttctgtaaggctgctgtggtatgcttggggcccatgccagtccctagccacctcagatttttcagaacctgtaggtgtcaccagtgaaaactatgaaacagtaaag

SEQ ID NO: 444393 - DNA, 470 bp, Homo sapiens
tgtcacaacactgatgggaaataccttcagaaggatttattccaaccagcagaatccatactcactgaacactgctgggcttcacttctcataggtgaagggcaggtttgggaactcttcgttaagctttttttatttttcttacagacaaggttgctctgtcacccatgctatatagtccagtggtatggttgtagctcactgcagcctctgtctcttatgctcaagccatcctcccacctcatctccccaagtagctggaaccatatgtgtgcaccaccaggcctggctgatttattttattttttgtagagactgggtctcactmtgttgccaggctggtctcaaactcctggcctcaagatgtcctcccctctcggcctcccaaagtgctgagattacagccatgagccactatgccagtcttttgttaagatttctatatgctttgtactaaagcaatatgtgta

SEQ ID NO: 444394 - DNA, 470 bp, Homo sapiens
tgtcacaacactgatgggaaataccttcagaaggatttattccaaccagcagaatccatactcactgaacactgctgggcttcacttctcataggtgaagggcaggtttgggaactcttcgttaagctttttttatttttcttacagacaaggttgctctgtcacccatgctatatagtccagtggtatggttgtagctcactgcagcctctgtctcttatgctcaagccatcctcccacctcatctccccaagtagctggaaccatatgtgtgcaccaccaggcctggctgatttattttattttttgtagagactgggtctcactctgttgccaggctggtctcaaactcctggcctcaagatgtcctcccctctcggcctcccaaagtgctgagattacagccatgagccactrtgccagtcttttgttaagatttctatatgctttgtactaaagcaatatgtgta

SEQ ID NO: 444395 - DNA, 632 bp, Homo sapiens
tggtgttcttagtaagtacacggggcatacaggttcttaataagttcacaggtgtacatgtatgacattgtgttggaaacgaactaacaaacacgtcatgatgttatagattagctgaagtctgttggaaacaaaaaaatgtagactatggagtcaacaaatattacagtataaagctattgtccaagtatcagaaaacttatagttatgcatgtttgaaaaacaaaattaaggaaatgcatctatgtaaataccaaatgcttctcgtctgttttcarttttggcaattcacctggatttttttttttgttacaatttcatataaggtggatagctgtcagcaaatgacattactaattgtccttccattcctttcttctgtttatgtccactcttcccattgcagtctcaaagcttatgatcacctaacagaaaggtgggctgtggacacttcatctggcatacttgcaagtctttgcttgaaccatatgcctgccttggagacagagcaattaagaaatagatgaaactgatatccctgcttagaagcaaaataagtagagaaagctaattgcacaaacaacaacgaagactgaaaattaagacaaactttcttttctccttttacagct

SEQ ID NO: 444396 - DNA, 632 bp, Homo sapiens
tggtgttcttagtaagtacacggggcatacaggttcttaataagttcacaggtgtacatgtatgacattgtgttggaaacgaactaacaaacacgtcatgatgttatagattagctgaagtctgttggaaacaaaaaaatgtagactatggagtcaacaaatattacagtataaagctattgtccaagtatcagaaaacttatagttatgcatgtttgaaaaacaaaattaaggaaatgcatctatgtaaataccaaatgcttctcgtctgttttcaattttggcaattcacctggatttttttttttgttacaatttcatataaggtggatagctgtcagcaaatgacattactaattgtccttccattcctttcttctgtttatgtccactcttcccattgcagtctcaaagcttatgatcacctaacagaaaggtgggctgtggacacttcayctggcatacttgcaagtctttgcttgaaccatatgcctgccttggagacagagcaattaagaaatagatgaaactgatatccctgcttagaagcaaaataagtagagaaagctaattgcacaaacaacaacgaagactgaaaattaagacaaactttcttttctccttttacagct

SEQ ID NO: 444397 - DNA, 489 bp, Homo sapiens
acttttccccttttcttggttgctatctgtttttgtctgtttgcgttgttataaaggaatgcctgaggctggataacttatcaggaaaagaggtttatttggctcacagttctgcaggcaagtacaagaagcacggtgctggcatctgcttctgatgaggacctcaggaagattttacgcatggcagaaggcaaagggaagtgaccatgggcagatcacatggagggagaagcaacaatagagagggagtagaggaagtgccaggctctttccaacagccagtactcttggaaactaatagtgagaattcactcacttctgtgagaagggcatcaagctattcatgaggaatccatccctgtgacccaaacagctcccaytggacctcacctctaacattaggaatcacatttcaacatgagatttcaaggaacaaatagccaagcatatcaacacccaaataaattactcttaaatctctctagaatt

SEQ ID NO: 444398 - DNA, 489 bp, Homo sapiens
acttttccccttttcttggttgctatctgtttttgtctgtttgcgttgttataaaggaatgcctgaggctggataacttatcaggaaaagaggtttatttggctcacagttctgcaggcaagtacaagaagcacggtgctggcatctgcttctgatgaggacctcaggaagattttacgcatggcagaaggcaaagggaagtgaccatgggcagatcacatggagggagaagcaacaatagagagggagtagaggaagtgccaggctctttccaacagccagtactcttggaaactaatagtgagaattcactcacttctgtgagaagggcatcaagctattcatgaggaatccatccctgtgacccaaacagctcccattggacctcacctctaacattaggaatcacatttcaacatgagatttcaaggaacaaatagccaagcatatcaacacycaaataaattactcttaaatctctctagaatt

SEQ ID NO: 444399 - DNA, 545 bp, Homo sapiens
gcaatagggtaaataagaaaggaacagccttgttagagagaaaagttaaaatgaggttgttgagatcacaggagacttctcagtcacatatgaggcaataaactccagcagaaggggtgtgttcctggaaaggggaaggaatccatgtggattttaattataattttaattttattttaagttcagggtgtgcaggtctgttacataggtaaacgtgtgccatggtggtttgctgaacctatcaacccatcaccttggtattaagcccagcaygcattagctatttttcctgatgctctccctcccccatcctccttcaacaggccccagtgtgtgtcgttcccctctctgtgtctatgtgttctcattgttcatctcccacttataagtgagaacatggtgtttggtttcctgttcctgcattagtttgctgaggataatggcttccagctccatccatgtccctgcaaaggacatgatctcctttctttttatggctgcatagtattccatgatgtatatgtaccatgcggattttctattgt

SEQ ID NO: 444400 - DNA, 596 bp, Homo sapiens
cggaagccaccaaggcttgaggcttgcatcctctgaagcaatggcccaagctgtacattggccccttttagccacagctagagctggaatggctgggacacagtgccactcagcctaggcttcattgttcacatctctacckgcattttggtcaaggccattcaacaagtttctaggaagtcccaaactttatcacatcttcctgtcttcttctgagccctccaaactgttccaacctctgcctgttactcagttccaaagttgcttctacattttaaggttatctttataacagtgctccactaccttggtattaattttctgtattaattcatttttacacttttataaagaaatgcctatgactgggtaatttataaaggaaaaagttttaattgactcacagttccataggcttaacaggaagcgtggctcggaggcctcaggaaacttacactcatggcagaaggtgaaggggaagcaaaggacatcttacatgacatatgacataaggagagagagaggagagagagaacaagaaagcgccacactttaaagtcatcacctctcaagagaactcactcactaacatgaga

SEQ ID NO: 444401 - DNA, 596 bp, Homo sapiens
cggaagccaccaaggcttgaggcttgcatcctctgaagcaatggcccaagctgtacattggccccttttagccacagctagagctggaatggctgggacacagtgccactcagcctaggcttcattgttcacatctctaccggcattttggtcaaggccattcaacaagtttctaggaagtcccaaactttatcacatcttcctgtcttcttctgagccctccaaactgttccaacctctgcctgttactcagttccaaagttgcttctacattttaaggttatctttataacagtgctccactaccttggtattaattttctgtattaattcatttttacacttttataaagaaatgcctatgactgggtaatttataaaggaaaaagttttaattgactcacagttccataggcttaacaggaagcrtggctcggaggcctcaggaaacttacactcatggcagaaggtgaaggggaagcaaaggacatcttacatgacatatgacataaggagagagagaggagagagagaacaagaaagcgccacactttaaagtcatcacctctcaagagaactcactcactaacatgaga

SEQ ID NO: 444402 - DNA, 604 bp, Homo sapiens
accagacttattacttacagataggcagcaaggggcaacagaagatgaggtttcatgacaagctggtctgtaaggctcaggaaagctacctgcagtggatggagtctcatctgtgcatgtcccacttgcactgcagtggagggaccccagaaatcagcgtgccctggatttttatgcttcaggggttacatgatatgctgggttaaggcactgaaggtcatcctgtttctagaagagattgggtgagggcctggacttttctagccagctcctccctatctcaggatattgcattcccagcatattggaaaggtattcttgagaattacaagtaaaaagaggggagaattgggctgatccaaagctatccaaaaaactgtcctrcaggacgtcatggagatttttctttccttcttttttttttttcttttaagacagggtctcactctgtcacccaggctggaatgcagtggcaccatcacagttcactcccacttccacctgccaggttcaagcagtcctcccatcacagtctcccaagtagctgggactacaggcacacaccaccacgcatgtctaatttttgtatctttagtagagacgg

SEQ ID NO: 444403 - DNA, 604 bp, Homo sapiens
accagacttattacttacagataggcagcaaggggcaacagaagatgaggtttcatgacaagctggtctgtaaggctcaggaaagctacctgcagtggatggagtctcatctgtgcatgtcccacttgcactgcagtggagggaccccagaaatcagcgtgccctggatttttatgcttcaggggttacatgatatgctgggttaaggcactgaaggtcatcctgtttctagaagagattgggtgagggcctggacttttctagccagctcctccctatctcaggatattgcattcccagcatattggaaaggtattcttgagaattacaagtaaaaagaggggagaattgggctgatccaaagctatccaaaaaactgtcctacaggacgtcatkgagatttttctttccttcttttttttttttcttttaagacagggtctcactctgtcacccaggctggaatgcagtggcaccatcacagttcactcccacttccacctgccaggttcaagcagtcctcccatcacagtctcccaagtagctgggactacaggcacacaccaccacgcatgtctaatttttgtatctttagtagagacgg

SEQ ID NO: 444404 - DNA, 604 bp, Homo sapiens
accagacttattacttacagataggcagcaaggggcaacagaagatgaggtttcatgacaagctggtctgtaaggctcaggaaagctacctgcagtggatggagtctcatctgtgcatgtcccacttgcactgcagtggagggaccccagaaatcagcgtgccctggatttttatgcttcaggggttacatgatatgctgggttaaggcactgaaggtcatcctgtttctagaagagattgggtgagggcctggacttttctagccagctcctccctatctcaggatattgcattcccagcatattggaaaggtattcttgagaattacaagtaaaaagaggggagaattgggctgatccaaagctatccaaaaaactgtcctacaggacgtcatggagatttttctttccttcttttttttttttcttttaagacagggtctcactctgtcacccaggctggaatgcagtggcaccatcacagttcactcccacttccacctgccaggttcaagcrgtcctcccatcacagtctcccaagtagctgggactacaggcacacaccaccacgcatgtctaatttttgtatctttagtagagacgg

SEQ ID NO: 444405 - DNA, 523 bp, Homo sapiens
tcagctacctcataaccctgggcacccagtgatgttcctcccaaggtcttttcccttgacatacttgggtctagttaggtgttgccagatggcctgtagtccccagactggcatgcttggggaggccagctttttcctgggtgtagcatatggccattgactctgatcttcctgactctggcaagctctgaatcttccattctcctacccaccacccagccaaaggaatctctttatagattggagaaaactctcctagtgtttccggccatgattctttggctatctagaatcaggagttctgtcctttttatctcactgtgaaaaccatcgaaatgctcttawgtgcttaggcttctggaagataatagttggaaaggtaagtattttacttccaaacttcagttttcttctctgtcacatgcatgaaatgagctgatgagcacagagcaaactctttgatgaactggggggaaggaaaggagagaagcaaagaggcagtacagtgagaagaaaagaaaga

SEQ ID NO: 444406 - DNA, 495 bp, Homo sapiens
gcttttgaccatacaagttaagatttccataaaccttttataacctcttacaacatttttttctatttgtccttttttgaactatttttatctatttagttttatttatatcatctcttcatttggaaacatctttaaataacctctcaactaaaccaaataacttttygtataacaaaaactacatcttttatatttttagatgaaaatcgttacataatttttaagaaagaaatatttcctcaatttctaaagtaacagatttagtaaatatttgtttattaataaatatttaacatataaatatatttacaataaatagtatgtattataaataatacataattcatgcatttagcaaagtttttttataccatataaaaataatatgctgaagtatataaacttaaaattacatctatgtttaataattaatattttgatattttaacttagagtattttatgattatgtactacttaatttaaaatagca

SEQ ID NO: 444407 - DNA, 638 bp, Homo sapiens
gacttacacctgccttgcatggccttagggtttgttcataatttgttatcttatggccacacggggtctgttctgtcagtcttaggatctctattttaacaccgctgctggttacttgttgagtccaaactccaaaacagaggaggtatgatgaggtgtgtctgacctccctttctttcagggccagaaacagcttttcagttttctctggggtcctcttggccaagaagtttctgttcagttggttggggggcttagaattttatacttagtttacaacctagcgttggtctatattatatgctcaggaaagtttctgaaatagccctggactggttgggtgatctgggatatggaaaatgggcctgtgtcctgaatgatgcacttgaaaatggaatataagactccgtaaaactcaaagcatcyatgaacacaaaattcaattgagttgatttgccgcaggctttctccactgctaacagttacaattcaatctcagttatacatggtgtccaaaagaagcacattgtggtgaccagcagaaaccaagttttgcttgaagaataaaggttgcaattttgcaaaggtcatgtgttatataaattttcagtaagatgagatagttttaaatatttatg

SEQ ID NO: 444408 - DNA, 638 bp, Homo sapiens
gacttacacctgccttgcatggccttagggtttgttcataatttgttatcttatggccacacggggtctgttctgtcagtcttaggatctctattttaacaccgctgctggttacttgttgagtccaaactccaaaacagaggaggtatgatgaggtgtgtctgacctccctttctttcagggccagaaacagcttttcagttttctctggggtcctcttggccaagaagtttctgttcagttggttggggggcttagaattttatacttagtttacaacctagcgttggtctatattatatgctcaggaaagtttctgaaatagccctggactggttgggtgatctgggatatggaaaatgggcctgtgtcctgaatgatgcacttgaaaatggaatataagactccgtaaaactcaaagcatccrtgaacacaaaattcaattgagttgatttgccgcaggctttctccactgctaacagttacaattcaatctcagttatacatggtgtccaaaagaagcacattgtggtgaccagcagaaaccaagttttgcttgaagaataaaggttgcaattttgcaaaggtcatgtgttatataaattttcagtaagatgagatagttttaaatatttatg

SEQ ID NO: 444409 - DNA, 562 bp, Homo sapiens
cttgcccatcagactaggctggtctgagctgagaaccccatggttctgctagccttccctggggcccatcctggccatgcctgcttgcagtgcaggccccaggtacctcctgggggattgaaccataggtcctgtgctggtggactacaattaactggcagagtgctctagcagagtgatccctgtgaatacacaccatctgcaaactccctcaactgtagcctctcytgtgttgctttgcctgcaggcagtagcccatggccaacccaaacattgctttgcccgtttgtgtgtgtgtgggcaaaccttgtcttcccttccccaccactgcacctgtgcacataaacctggccatgccactgctgttggcattaatgcactctgcccactcccacctccccactgcaacattgctattgtcactggagattggtgggcatggagcctatgagccttccctccaccagcaccctgcccctgtgccaacactgctgccagtgcaaaattggacatggagaacagcaaactcacccctgccctgagtggcactgccacctgtgtg

SEQ ID NO: 444410 - DNA, 562 bp, Homo sapiens
cttgcccatcagactaggctggtctgagctgagaaccccatggttctgctagccttccctggggcccatcctggccatgcctgcttgcagtgcaggccccaggtacctcctgggggattgaaccataggtcctgtgctggtggactacaattaactggcagagtgctctagcagagtgatccctgtgaatacacaccatctgcaaactccctcaactgtagcctctcctgtgttgctttgcctgcaggcagtagcccatggccaacccaaacattgctttgcccgtttgtgtgtgtgtgggcaaaccttgtcttcccttccccaccactgcacctgtgcacataaacctggccatgccactgctgttggcattaatgcactctgcccactcccacctccccactgcaacattgcyattgtcactggagattggtgggcatggagcctatgagccttccctccaccagcaccctgcccctgtgccaacactgctgccagtgcaaaattggacatggagaacagcaaactcacccctgccctgagtggcactgccacctgtgtg

SEQ ID NO: 444411 - DNA, 584 bp, Homo sapiens
ggcaatacagtcctgtgtccaccagtgccctactgccatgctaacaccaccaccagtgtggatacacacacaattattggcaggggccttctatccccaagccatggtgccaccactgctccacatggaggccaacatcccagcaactgctagcactctgccacagctgatgaacacaaactccaccacactgccactgccactgctgctggcacatgcaaatgaggctggatcccactgtcaccaccctatgaagtgctttggctggtatcacttattggagtgttgtgacctgtggtctgggagcacctcagaccctcaaaaacagcagtttccccttgaggagccaaagagcaaagccaggsctaatcccagcccccagagttagaatatgcagtccaggagtcctgagctgagccttggccctctaaaatattccagaaatgaagccagttgactgaactcaccttaaaccacaatcaaaccccaaggtcatcaaataggataaatgaaagaaaacccatccaaggtcagcaacctcaaagactgaaggaacaacagtccacaaagatgagaaagaacca

SEQ ID NO: 444412 - DNA, 584 bp, Homo sapiens
ggcaatacagtcctgtgtccaccagtgccctactgccatgctaacaccaccaccagtgtggatacacacacaattattggcaggggccttctatccccaagccatggtgccaccactgctccacatggaggccaacatcccagcaactgctagcactctgccacagctgatgaacacaaactccaccacactgccactgccactgctgctggcacatgcaaatgaggctggatcccactgtcaccaccctatgaagtgctttggctggtatcacttattggagtgttgtgacctgtggtctgggagcacctcagaccctcaaaaacagcagtttccccttgaggagccaaagagcaaagccagggctaatcccagcccccagagttagaatatgcagtccaggagtcctgagctgagccttggccctctaaaatattccagaaatgaagccagttgactgaactcaccttaaaccacaatcaaacmccaaggtcatcaaataggataaatgaaagaaaacccatccaaggtcagcaacctcaaagactgaaggaacaacagtccacaaagatgagaaagaacca

SEQ ID NO: 444413 - DNA, 584 bp, Homo sapiens
ggcaatacagtcctgtgtccaccagtgccctactgccatgctaacaccaccaccagtgtggatacacacacaattattggcaggggccttctatccccaagccatggtgccaccactgctccacatggaggccaacatcccagcaactgctagcactctgccacagctgatgaacacaaactccaccacactgccactgccactgctgctggcacatgcaaatgaggctggatcccactgtcaccaccctatgaagtgctttggctggtatcacttattggagtgttgtgacctgtggtctgggagcacctcagaccctcaaaaacagcagtttccccttgaggagccaaagagcaaagccagggctaatcccagcccccagagttagaatatgcagtccaggagtcctgagctgagccttggccctctaaaatattccagaaatgaagccagttgactgaactcaccttaaaccacaatcaaaccccaaggtcatcaaataggataaawgaaagaaaacccatccaaggtcagcaacctcaaagactgaaggaacaacagtccacaaagatgagaaagaacca

SEQ ID NO: 444414 - DNA, 584 bp, Homo sapiens
ggcaatacagtcctgtgtccaccagtgccctactgccatgctaacaccaccaccagtgtggatacacacacaattattggcaggggccttctatccccaagccatggtgccaccactgctccacatggaggccaacatcccagcaactgctagcactctgccacagctgatgaacacaaactccaccacactgccactgccactgctgctggcacatgcaaatgaggctggatcccactgtcaccaccctatgaagtgctttggctggtatcacttattggagtgttgtgacctgtggtctgggagcacctcagaccctcaaaaacagcagtttccccttgaggagccaaagagcaaagccagggctaatcccagcccccagagttagaatatgcagtccaggagtcctgagctgagccttggccctctaaaatattccagaaatgaagccagttgactgaactcaccttaaaccacaatcaaaccccaaggtcatcaaataggataaatgaaagaaaacccatccaaggtcagcaacctcaaagactgaaggaacawcagtccacaaagatgagaaagaacca

SEQ ID NO: 444415 - DNA, 584 bp, Homo sapiens
gtgctcctgctctagttcttttatgtaccttgttttaagtcttccttgttccccgctccctctcaccataaggacgtggctctgctgacttttctctttaaaactctatcctaccctgctccattcacctcttttatactaattaaagcctcctcttccttctgatctcagcttaagagacactgtcttgaggcayctttcgttagccttccaaatctggctctttcgtaaaaccatcctacagatcattgttctttttcatcagcatggttgtctcaatttgatgactgatgtgatgatgtgaccggtgcatgtcttcagtgaactgtcggaaagcggagctcgtgtgcactgcagagtgtattcctgttcccttccaggtgtgtgtggatgacccagcagccaggtccagcactggcctaaggctccaaacttctacagttagaaaattggcaaagatactgatttaactttggcgcgtttgttaggcttcttcttctcttttttttttttttttggataacactttaaataacatatgatagaaaatgagaagagtttatggaaaataattttattagtgt

SEQ ID NO: 444416 - DNA, 584 bp, Homo sapiens
gtgctcctgctctagttcttttatgtaccttgttttaagtcttccttgttccccgctccctctcaccataaggacgtggctctgctgacttttctctttaaaactctatcctaccctgctccattcacctcttttatactaattaaagcctcctcttccttctgatctcagcttaagagacactgtcttgaggcatctttcgttagccttccaaatctggctctttcgtaaaaccatcctacagatcattgttctttttcatcagcatggttgtctcaatttgatgactgatgtgatgatgtgacsggtgcatgtcttcagtgaactgtcggaaagcggagctcgtgtgcactgcagagtgtattcctgttcccttccaggtgtgtgtggatgacccagcagccaggtccagcactggcctaaggctccaaacttctacagttagaaaattggcaaagatactgatttaactttggcgcgtttgttaggcttcttcttctcttttttttttttttttggataacactttaaataacatatgatagaaaatgagaagagtttatggaaaataattttattagtgt

SEQ ID NO: 444417 - DNA, 545 bp, Homo sapiens
ttgaggcatctttcgttagccttccaaatctggctctttcgtaaaaccatcctacagatcattgttctttttcatcagcatggttgtctcaatttgatgactgatgtgatgatgtgaccggtgcatgtcttcagtgaactgtcggaaagcggagctcgtgtgcactgcagagtgtattcctgttcccttccaggtgygtgtggatgacccagcagccaggtccagcactggcctaaggctccaaacttctacagttagaaaattggcaaagatactgatttaactttggcgcgtttgttaggcttcttcttctcttttttttttttttttggataacactttaaataacatatgatagaaaatgagaagagtttatggaaaataattttattagtgtttgtggcccttaatgacttaagccttaagtagggacttcataatttcaaactttcaaaaatgtcttgtaacatgcagtaaaatgtgtcttattcgtgagagtcatgtctattctaggcaactgttctcagtttccatggacagaggaa

SEQ ID NO: 444418 - DNA, 545 bp, Homo sapiens
ttgaggcatctttcgttagccttccaaatctggctctttcgtaaaaccatcctacagatcattgttctttttcatcagcatggttgtctcaatttgatgactgatgtgatgatgtgaccggtgcatgtcttcagtgaactgtcggaaagcggagctcgtgtgcactgcagagtgtattcctgttcccttccaggtgtgtgtggatgacccagcagccaggtccagcactggcctaaggctccaaacttctacagttagaaaattggcaaagatactgatttaactttggcgcgtttgttaggcttcttcttctcttttttttttttttttggataacactttaaataacatatgatagaaaatgagaagagtttatggaaaataattttattagtgtttgtggcccttaatgacttaagccytaagtagggacttcataatttcaaactttcaaaaatgtcttgtaacatgcagtaaaatgtgtcttattcgtgagagtcatgtctattctaggcaactgttctcagtttccatggacagaggaa

SEQ ID NO: 444419 - DNA, 616 bp, Homo sapiens
ttgtggaataatactctatagattcccttggctgtcattatcccaataaccaaaaataatatctctatcacaggcaatagtgcatattggctaagagattgggcgctggagtcagacaagagccagactgcctgagttcaaattccagctcagtcatttattaagtgaatgtgtaaccacacaaaaccagtctggttcttcaacttttatgtaaaaaagttatgaatagtttttcagttgccatggactcccaggctgaagktcccataacctgaacatgcccaaatgaaccaaacttgcaatgatgggcgggacttaagtgctcagcccaagaagtgggactggattaaaaaggggacactgcatggcaagatccaggatccaatcaaatggagcccttgtggtaccccatggcaggattcagtcagatcatgcctcccagcatcatctcatcacaagacccaatcagataacacttcattaccctattcctataaaacccaactcagcccccagctcagggagacagatttgagcattttctcctgtctcttgacagtcaaccagcaatacagcttctcttttctcaagcccgtgccatggtattggcttctat

SEQ ID NO: 444420 - DNA, 616 bp, Homo sapiens
ttgtggaataatactctatagattcccttggctgtcattatcccaataaccaaaaataatatctctatcacaggcaatagtgcatattggctaagagattgggcgctggagtcagacaagagccagactgcctgagttcaaattccagctcagtcatttattaagtgaatgtgtaaccacacaaaaccagtctggttcttcaacttttatgtaaaaaagttatgaatagtttttcagttgccatggactcccaggctgaaggtcccataacctgaacatgcccaaatgaaccaaacttgcaatgatgggcgggacttaagtgctcagcccaagaagtgggactgrattaaaaaggggacactgcatggcaagatccaggatccaatcaaatggagcccttgtggtaccccatggcaggattcagtcagatcatgcctcccagcatcatctcatcacaagacccaatcagataacacttcattaccctattcctataaaacccaactcagcccccagctcagggagacagatttgagcattttctcctgtctcttgacagtcaaccagcaatacagcttctcttttctcaagcccgtgccatggtattggcttctat

SEQ ID NO: 444421 - DNA, 694 bp, Homo sapiens
gccatggactcccaggctgaaggtcccataacctgaacatgcccaaatgaaccaaacttgcaatgatgggcgggacttaagtgctcagcccaagaagtgggactggattaaaaaggggacactgcatggcaagatccaggatccaatcaaatggagcccttgtggtaccccatggcaggattcagtcagatcatgcctcccagcatcatctcatcacaagacccaatcagataacacttcattaccctattcctataaaacccaactcagcccccagctcagggagacagatttgagcattttctcctgtctcttgacagtcaaccagcaatacagyttctcttttctcaagcccgtgccatggtattggcttctatgcacatcgggtagcaagcccattgattgtttgattacaaatgaccctagggaagttatttaaactaattctgcttcagtctgttcatttataaaatgggaatattaggaactcacttcacaaagttgctgtgaggatttactgacttaatctatgcaaatcatttaagacaattcctgagattttatgattaccatataaatatatccaaagactattatttccaattatatttgttccaaagggtagatttcttcctcttatcttccacatttctattagatatttgccaaaaacggagacatattaatgttttat

SEQ ID NO: 444422 - DNA, 616 bp, Homo sapiens
ttgtggaataatactctatagattcccttggctgtcattatcccaataaccaaaaataatatctctatcacaggcaatagtgcatattggctaagagattgggcgctggagtcagacaagagccagactgcctgagttcaaattccagctcagtcatttattaagtgaatgtgtaaccacacaaaaccagtctggttcttcaacttttatgtaaaaaagttatgaatagtttttcagttgccatggactcccaggctgaaggtcccataacctgaacatgcccaaatgaaccaaacttgcaatgatgggcgggacttaagtgctcagcccaagaagtgggactggattaaaaaggggacactgcatggcaagatccaggatccaatcaaatggagcccttgtggtaccccatggcaggattcagtcagatcatgcctcccagcatcatctcatcacaagacccaatcagataacacttcattaccctattcctataaaacccaactcagcccccagctcagggagacagatttgagcattttctcctgtctcttgacagtcaaccagcaatacagcttctcttttctcaagccygtgccatggtattggcttctat

SEQ ID NO: 444423 - DNA, 578 bp, Homo sapiens
aacagtacaagtaaagttattaccagaaatatacagaaagcatcaaggtraaatataagaattattccgtttgaaaggggtatgatatgcacaaagatgaaaattgagctcctataaaataacataaggatttgaaataaagacacaaaacttactgtttagagttagtatcattgactataaaaaccaagacaatcttaattataacaatgaggaagataacagaaattcagaatatcaaaaatatttttatgtagaaataaaaacaaaacatttaattttagaaatatattatttaatgcatttttgttacatgtgtagtgataaaataataaaataaatttagaaagatatattatttaataagatataaaaatctgaggaccaatacagtattgtggttaaaaccatggattttgacaggaactcctttggttaaaattgtgactcatcactaagagtataatggtgaataagttacttaacgttcctttgcaccccttttcttatctaaaacaaatatgaaagggatctgactcatagcagcgttctgagtaatataacagacatacataaaa

SEQ ID NO: 444424 - DNA, 621 bp, Homo sapiens
acctaacagtacaagtaaagttattaccagaaatatacagaaagcatcaaggtaaaatataagaattattccrtttgaaaggggtatgatatgcacaaagatgaaaattgagctcctataaaataacataaggatttgaaataaagacacaaaacttactgtttagagttagtatcattgactataaaaaccaagacaatcttaattataacaatgaggaagataacagaaattcagaatatcaaaaatatttttatgtagaaataaaaacaaaacatttaattttagaaatatattatttaatgcatttttgttacatgtgtagtgataaaataataaaataaatttagaaagatatattatttaataagatataaaaatctgaggaccaatacagtattgtggttaaaaccatggattttgacaggaactcctttggttaaaattgtgactcatcactaagagtataatggtgaataagttacttaacgttcctttgcaccccttttcttatctaaaacaaatatgaaagggatctgactcatagcagcgttctgagtaatataacagacatacataaaaccactaaaacaatgcttggcacatagttaatgattattc

SEQ ID NO: 444425 - DNA, 621 bp, Homo sapiens
acctaacagtacaagtaaagttattaccagaaatatacagaaagcatcaaggtaaaatataagaattattccgtttgaaaggggtatgatatgcacaaagatgaaaattgagctcctataaaataacataaggatttgaaataaagacacaaaacttactgtttagagttagtatcattgactataaaaaccaagacaatcttaattataacaatgaggaagataayagaaattcagaatatcaaaaatatttttatgtagaaataaaaacaaaacatttaattttagaaatatattatttaatgcatttttgttacatgtgtagtgataaaataataaaataaatttagaaagatatattatttaataagatataaaaatctgaggaccaatacagtattgtggttaaaaccatggattttgacaggaactcctttggttaaaattgtgactcatcactaagagtataatggtgaataagttacttaacgttcctttgcaccccttttcttatctaaaacaaatatgaaagggatctgactcatagcagcgttctgagtaatataacagacatacataaaaccactaaaacaatgcttggcacatagttaatgattattc

SEQ ID NO: 444426 - DNA, 621 bp, Homo sapiens
acctaacagtacaagtaaagttattaccagaaatatacagaaagcatcaaggtaaaatataagaattattccgtttgaaaggggtatgatatgcacaaagatgaaaattgagctcctataaaataacataaggatttgaaataaagacacaaaacttactgtttagagttagtatcattgactataaaaaccaagacaatcttaattataacaatgaggaagataacagaaattcagaatatcaaaaatatttttatgtagaaataaaaacaaaacatttaattttagaaatatattatttaatgcatttttgttacatgtgtagtgataaaataataaaataaatttagaaagatatattatttaataagatataaaaatctgaggaccaatacagtattgtggttaaaaccatggattttgacaggaactcctttggttaaaattgtgactcatcactaagagtataatggtgaataagttacttaacgttcctttgcaccccttttcttatctaaaacaaatatgaaagggatctgactcatagcagygttctgagtaatataacagacatacataaaaccactaaaacaatgcttggcacatagttaatgattattc

SEQ ID NO: 444427 - DNA, 533 bp, Homo sapiens
gagctggcctggctgtgccagccagggatgcctcactgctgcccatctcattctgcctccttaccctaaataaacactggcagtgcaaggactttctgtcacctttgggggcatcaaagactgttctgagccaccttttgttgacatgccttgtaataacagcaaaggacattcaatgtcatctctgacccaccccatcctgtctcacctgtggtagtttgtagatttccatcaacatctccaactgaaaaacaaatgctgatatagttccttcaatcgctgctatggatttgctctgcctctcacatgtataattgggaaggttctcggcccctcctgacagccaaaacagagggccctccaaagtcctctgatyagtgttgcaggcattgtagacgtgataccccaaagacatgttgagtaagagcagcgggcccctgttgatctcctcgatggcaaaaacgaacacgaaaagagtcaaaatgcatgtttagaggacaaactctcacacctgccactcaaggcctcacaaa

SEQ ID NO: 444428 - DNA, 533 bp, Homo sapiens
gagctggcctggctgtgccagccagggatgcctcactgctgcccatctcattctgcctccttaccctaaataaacactggcagtgcaaggactttctgtcacctttgggggcatcaaagactgttctgagccaccttttgttgacatgccttgtaataacagcaaaggacattcaatgtcatctctgacccaccccatcctgtctcacctgtggtagtttgtagatttccatcaacatctccaactgaaaaacaaatgctgatatagttccttcaatcgctgctatggatttgctctgcctctcacatgtataattgggaaggttctcggcccctcctgacagccaaaacagagggccctccaaagtcctctgatcagtgttgcaggcattgtagacgtgataccccaaagacatgtwgagtaagagcagcgggcccctgttgatctcctcgatggcaaaaacgaacacgaaaagagtcaaaatgcatgtttagaggacaaactctcacacctgccactcaaggcctcacaaa

SEQ ID NO: 444429 - DNA, 533 bp, Homo sapiens
gagctggcctggctgtgccagccagggatgcctcactgctgcccatctcattctgcctccttaccctaaataaacactggcagtgcaaggactttctgtcacctttgggggcatcaaagactgttctgagccaccttttgttgacatgccttgtaataacagcaaaggacattcaatgtcatctctgacccaccccatcctgtctcacctgtggtagtttgtagatttccatcaacatctccaactgaaaaacaaatgctgatatagttccttcaatcgctgctatggatttgctctgcctctcacatgtataattgggaaggttctcggcccctcctgacagccaaaacagagggccctccaaagtcctctgatcagtgttgcaggcattgtagacgtgataccccaaagacatgttgagtaagagcagcgggcccctgttgatstcctcgatggcaaaaacgaacacgaaaagagtcaaaatgcatgtttagaggacaaactctcacacctgccactcaaggcctcacaaa

SEQ ID NO: 444430 - DNA, 533 bp, Homo sapiens
gagctggcctggctgtgccagccagggatgcctcactgctgcccatctcattctgcctccttaccctaaataaacactggcagtgcaaggactttctgtcacctttgggggcatcaaagactgttctgagccaccttttgttgacatgccttgtaataacagcaaaggacattcaatgtcatctctgacccaccccatcctgtctcacctgtggtagtttgtagatttccatcaacatctccaactgaaaaacaaatgctgatatagttccttcaatcgctgctatggatttgctctgcctctcacatgtataattgggaaggttctcggcccctcctgacagccaaaacagagggccctccaaagtcctctgatcagtgttgcaggcattgtagacgtgataccccaaagacatgttgagtaagagcagcgggcccctgttgatctcctcgatggcaaaaacgaacacgaaaagrgtcaaaatgcatgtttagaggacaaactctcacacctgccactcaaggcctcacaaa

SEQ ID NO: 444431 - DNA, 555 bp, Homo sapiens
aggaatttatttaaatgatgcgagaagtgaacgacaaaatcaccattctgagaatgaaacccatctgatagagctgaaaaactcactacaagaatttcataatacaatcagaaatgttaacagcagaatagaccaagctgaggaaagaatctcagaacttgaagaccagatctttgaatcaactcaatcagacaaaaatgaataaaaaagcataaacacaacttcagagaaatatgggattatgtaaagagaccaattctgtggctcactggcatccctgaaagagaggaagagagagcaagcaagttggaaaacatatttgatgataactgtccatgaaaatttccccaactttgctaaagagctcgacattcaaattcgggaaatgcaaagaaycccttgagatactacacaagatgtccattcccaagacacgtatttattagattctccaaggtcaacctgaaagaaaaaataataaagacaactagggagaaggggtaggtcacttaaaaaggaaccccatcaggctaacagcagacctttcagcaggaa

SEQ ID NO: 444432 - DNA, 555 bp, Homo sapiens
aggaatttatttaaatgatgcgagaagtgaacgacaaaatcaccattctgagaatgaaacccatctgatagagctgaaaaactcactacaagaatttcataatacaatcagaaatgttaacagcagaatagaccaagctgaggaaagaatctcagaacttgaagaccagatctttgaatcaactcaatcagacaaaaatgaataaaaaagcataaacacaacttcagagaaatatgggattatgtaaagagaccaattctgtggctcactggcatccctgaaagagaggaagagagagcaagcaagttggaaaacatatttgatgataactgtccatgaaaatttccccaactttgctaaagagctcgacattcaaattcgggaaatgcaaagaaccccttgagatactacacaagatgtccattcccaagacacrtatttattagattctccaaggtcaacctgaaagaaaaaataataaagacaactagggagaaggggtaggtcacttaaaaaggaaccccatcaggctaacagcagacctttcagcaggaa

SEQ ID NO: 444433 - DNA, 555 bp, Homo sapiens
aggaatttatttaaatgatgcgagaagtgaacgacaaaatcaccattctgagaatgaaacccatctgatagagctgaaaaactcactacaagaatttcataatacaatcagaaatgttaacagcagaatagaccaagctgaggaaagaatctcagaacttgaagaccagatctttgaatcaactcaatcagacaaaaatgaataaaaaagcataaacacaacttcagagaaatatgggattatgtaaagagaccaattctgtggctcactggcatccctgaaagagaggaagagagagcaagcaagttggaaaacatatttgatgataactgtccatgaaaatttccccaactttgctaaagagctcgacattcaaattcgggaaatgcaaagaaccccttgagatactacacaagatgtccattcccaagacacgtatttattagattctccaaggtcaacctgaaagaaaaaataataaagacaactagrgagaaggggtaggtcacttaaaaaggaaccccatcaggctaacagcagacctttcagcaggaa

SEQ ID NO: 444434 - DNA, 500 bp, Homo sapiens
tttctatgcctggcctatttcacttaacatagtgacctccagttccatccatgctgtcgcaagtgacaggatctcattctcttttatggctgaagagtactccattttgtatgtgaaccacattttcttcattcatctgttgatgaacacttagggtgtttccaaatcttagctgttataaacagtattgcaacaaataaaagagtgcagatggaaaattgattttgatggcttttttctttaataagacattaatttcttcatgtataactggaaggcaaacaaatgatccatttgcttagtttattcttgaatccataatrtaagtgacagaaatggattattaaaatatacttgaatttggggaagaatgatatggacacattttaaatcaaaacatgatgaattggctgtttaacctactacctcattggccaatctggggcaagatgaaagtatttgtaaacactgttttggcaattatgtgtaaagagagaacc

SEQ ID NO: 444435 - DNA, 500 bp, Homo sapiens
tttctatgcctggcctatttcacttaacatagtgacctccagttccatccatgctgtcgcaagtgacaggatctcattctcttttatggctgaagagtactccattttgtatgtgaaccacattttcttcattcatctgttgatgaacacttagggtgtttccaaatcttagctgttataaacagtattgcaacaaataaaagagtgcagatggaaaattgattttgatggcttttttctttaataagacattaatttcttcatgtataactggaaggcaaacaaatgatccatttgcttagtttattcttgaatccataatataagtgacagaaatggattattaaaatatacttgaatttggggaagaatgatatggacacattttaaatcaaaacatgatgaattggctrtttaacctactacctcattggccaatctggggcaagatgaaagtatttgtaaacactgttttggcaattatgtgtaaagagagaacc

SEQ ID NO: 444436 - DNA, 492 bp, Homo sapiens
ccttaaaattaacaactctccttttaaaatacattgttaagagaataagagtcaagctacagactgggagaaaatatttgcaacactttatttgaatgctgtaawtttttttcagaatatagttcataaagaactcttaacaactcaataattagcaaaaataaaatgaaaataatgaatataagaaaaaatgatgaaaagtgctacgccagtggacaaaaagcacacaaaaatgttcaatatcgttttgtcattaaggaaatgcaaattaaaaccacagtgagttattcttcccactaaaatggttatgattaaaaatattgtcagtaccacgtgttgttgagaatatggagcaattataattctcatacattattgttggaatgtaaaatgctacaaccacttaggaaaaattgtttaacattgttttatataattaagcatacatgaaacctatgacccaacaattccaatcctaggttgaaaagaaat

SEQ ID NO: 444437 - DNA, 492 bp, Homo sapiens
ccttaaaattaacaactctccttttaaaatacattgttaagagaataagagtcaagctacagactgggagaaaatatttgcaacactttatttgaatgctgtaattttttttcagaatatagttcataaagaactcttaacaactcaataattagcaaaaataaaatgaaaataatgaatataagaaaaaatgaygaaaagtgctacgccagtggacaaaaagcacacaaaaatgttcaatatcgttttgtcattaaggaaatgcaaattaaaaccacagtgagttattcttcccactaaaatggttatgattaaaaatattgtcagtaccacgtgttgttgagaatatggagcaattataattctcatacattattgttggaatgtaaaatgctacaaccacttaggaaaaattgtttaacattgttttatataattaagcatacatgaaacctatgacccaacaattccaatcctaggttgaaaagaaat

SEQ ID NO: 444438 - DNA, 492 bp, Homo sapiens
ccttaaaattaacaactctccttttaaaatacattgttaagagaataagagtcaagctacagactgggagaaaatatttgcaacactttatttgaatgctgtaattttttttcagaatatagttcataaagaactcttaacaactcaataattagcaaaaataaaatgaaaataatgaatataagaaaaaatgatgaaaagtgctasgccagtggacaaaaagcacacaaaaatgttcaatatcgttttgtcattaaggaaatgcaaattaaaaccacagtgagttattcttcccactaaaatggttatgattaaaaatattgtcagtaccacgtgttgttgagaatatggagcaattataattctcatacattattgttggaatgtaaaatgctacaaccacttaggaaaaattgtttaacattgttttatataattaagcatacatgaaacctatgacccaacaattccaatcctaggttgaaaagaaat

SEQ ID NO: 444439 - DNA, 549 bp, Homo sapiens
attcttcccactaaaatggttatgattaaaaatattgtcagtaccacgtgttgttgagaatatggagcaattataattctcatacattattgttggaatgtaaaatgctacaaccacttaggaaaaattgtttaacattgttttatataattaagcatacatgaaacctatgacccaacaattccaatcctaggttgaaaagaaatgaaaacttatgcccattataagacttacacaagaacgtttatagcatctttacttataatatccccaaactgtaaactgcctaaaagaccttcaacaagaaaatggacaaacattttgtgtggtattaataatgaaatactcttcagctataaaatggacaaaactactggtaactgcaacaaacatggctgaatctaaaaaaccttgtgttgaatgaataaatctagacactatagggtacattctgaagtcctrgaacaagcgaaactaagatatagcagtagaaattgtatcagtagtaacctgggttgaggtgggatgggagttgactgcagagaaaca

SEQ ID NO: 444440 - DNA, 571 bp, Homo sapiens
tattttttatacaaatacatayaaatctttcacagtacaatacaaatgtcaaaatgtggtattttcattgctctataaattcttatatgttctatgtatgtaataaatgttaaaaacagtgtttatatgttgtatatgtttatttgttctatgtgtttatatgttcactgttctataaattctcatatattgtatactatacaatcagatgatgagctgctcagtaaataagtgctgaacactctgcatccctcatcacgtcaagcatttcacatcccttttcctgtaggcttccacagtagacatttgacttgccaattacattttcatccatcattctggagaagcctggagaaacagctagacacaggggacatactctataccttgctcattgtgccttggaattatacatattgaaatattgtaaagatttgcttcatttgtatcaacatggctgtgaaattagatgtcaactctacctcacttccaacttttaggaggaatccagatagtttattagaaaatagaagtgcaaaaatgtttgctgtttgattctcagaccatagcc

SEQ ID NO: 444441 - DNA, 571 bp, Homo sapiens
tattttttatacaaatacatacaaatctttcacagtacaatacaaatgtcaaaatgtggtattttcattgctctataaattcttatatgttctatrtatgtaataaatgttaaaaacagtgtttatatgttgtatatgtttatttgttctatgtgtttatatgttcactgttctataaattctcatatattgtatactatacaatcagatgatgagctgctcagtaaataagtgctgaacactctgcatccctcatcacgtcaagcatttcacatcccttttcctgtaggcttccacagtagacatttgacttgccaattacattttcatccatcattctggagaagcctggagaaacagctagacacaggggacatactctataccttgctcattgtgccttggaattatacatattgaaatattgtaaagatttgcttcatttgtatcaacatggctgtgaaattagatgtcaactctacctcacttccaacttttaggaggaatccagatagtttattagaaaatagaagtgcaaaaatgtttgctgtttgattctcagaccatagcc

SEQ ID NO: 444442 - DNA, 571 bp, Homo sapiens
tattttttatacaaatacatacaaatctttcacagtacaatacaaatgtcaaaatgtggtattttcattgctctataaattcttatatgttctatgtatgtaataaatgttaaaaacagtgtttatatgttgtatatgtttatttgttctatgtgtttataygttcactgttctataaattctcatatattgtatactatacaatcagatgatgagctgctcagtaaataagtgctgaacactctgcatccctcatcacgtcaagcatttcacatcccttttcctgtaggcttccacagtagacatttgacttgccaattacattttcatccatcattctggagaagcctggagaaacagctagacacaggggacatactctataccttgctcattgtgccttggaattatacatattgaaatattgtaaagatttgcttcatttgtatcaacatggctgtgaaattagatgtcaactctacctcacttccaacttttaggaggaatccagatagtttattagaaaatagaagtgcaaaaatgtttgctgtttgattctcagaccatagcc

SEQ ID NO: 444443 - DNA, 571 bp, Homo sapiens
tattttttatacaaatacatacaaatctttcacagtacaatacaaatgtcaaaatgtggtattttcattgctctataaattcttatatgttctatgtatgtaataaatgttaaaaacagtgtttatatgttgtatatgtttatttgttctatgtgtttatatgttcactgttctataaattctcatatattgtatactatacaatcagrtgatgagctgctcagtaaataagtgctgaacactctgcatccctcatcacgtcaagcatttcacatcccttttcctgtaggcttccacagtagacatttgacttgccaattacattttcatccatcattctggagaagcctggagaaacagctagacacaggggacatactctataccttgctcattgtgccttggaattatacatattgaaatattgtaaagatttgcttcatttgtatcaacatggctgtgaaattagatgtcaactctacctcacttccaacttttaggaggaatccagatagtttattagaaaatagaagtgcaaaaatgtttgctgtttgattctcagaccatagcc

SEQ ID NO: 444444 - DNA, 441 bp, Homo sapiens
cttgccaattacattttcatccatcattctggagaagcctggagaaacagctagacacaggggacatactctataccttgctcattgtgccttggaattatacatattgaaatattgtaaagatttgcttcatttgtatcaacatggctgtgaaattagatgtcaactctacctcacttccaacttttaggaggaatccagatagtttattagaaaatagaagtgcaaaaatgtttgctgtttgattctcagaccatagcctgagattagcagtattaaaaaaaaaaaatagcagacagaagaggcccaagtctctcccagctcctgggatgcatggaagcaatrggctgtgatgtcctactgagataaaagaagtagtgtttgttatagtcccacgagcagaagcagtaagaacttgaggtagggtgcacctaaaactga

SEQ ID NO: 444445 - DNA, 639 bp, Homo sapiens
gaatatttcagtccaaaaggatgcaagaccttagttatatatgccacaatcagatcagtgattttaatttgcccaccctaaagaaatatgagtatataccactctaaagaaatctttctaacatgtctatcactttcttcaatgattccatagcaaacagttaatgaaaaacaacaataatagcacatgtattaatcttcaccacttgtaattttccaaggaatttagacagatctattgcaaaaaaattcatcaattcttatgttctttccaaatagtttttgcactaaatgatattattcaacatttctccatgtctacctgtaccytcagaccctcactaaatccaattaaccaaaacccaaattggttagtgatgttaagcattttatgtcttatatgtcttctttttattttatgcttatatgtcttcttttgagaaacatctgttcatgtcctttgcccagtttttaatgggatttttttcttactgagttgtttgagttctttattaaaaaaatgctcagtatcacgaatcatcggagaaatgcaaatcaaaaccacaatgagatatcatattacactagtcaagatggctattactaaaaagtcataaacagcagatgttggcaaggatgt

SEQ ID NO: 444446 - DNA, 639 bp, Homo sapiens
gaatatttcagtccaaaaggatgcaagaccttagttatatatgccacaatcagatcagtgattttaatttgcccaccctaaagaaatatgagtatataccactctaaagaaatctttctaacatgtctatcactttcttcaatgattccatagcaaacagttaatgaaaaacaacaataatagcacatgtattaatcttcaccacttgtaattttccaaggaatttagacagatctattgcaaaaaaattcatcaattcttatgttctttccaaatagtttttgcactaaatgatattattcaacatttctccatgtctacctgtaccctcagaccctcactaaatccaattaaccaaaacccaaattggttagtgatgttaagcattttatgtcttatatgtcttctttttattttatgcttatatgtcttcttttgagaaacatctgttcatgtcctttgcccagtttttaatgggatttttttcttactgagttgtttgagttctttattaaaaaaatgctcagtatcacgaatcatcggagaaatgcaaatcaaaaccacaatgagatatcatattacactagtcaagatggctattactaaraagtcataaacagcagatgttggcaaggatgt

SEQ ID NO: 444447 - DNA, 527 bp, Homo sapiens
tgagacaagggtccaatttcattcttctgcatgtaggtatccagtttttcctacaccttttgctaaagagactatgttttccattctgggttcttagcacctttgttaaagatcaatttactgtaattgtatggatttatttctgagctctctgttctgttaaatggtctatacctctgatgaatgccaataccatcrtgtttgattgctataactctgtaatatattataaaattaggtaatataattcattcagttttgttcttcttgcttaaaattgctttggttatttgggatcttttgtggttccgtataggtttttggtttttttttttgagatggagtttcgctcttgttgcccaggctggagtgcaatggcgcaacctctgctcaccacaacctcagcctcctgggttcaagcaattctcctgcctcagtctcctgagtagctgggattacaggcatgcgccactatgcccggctgatttggtatttttttgttagtagagacagggtttcttcatgtt

SEQ ID NO: 444448 - DNA, 527 bp, Homo sapiens
tgagacaagggtccaatttcattcttctgcatgtaggtatccagtttttcctacaccttttgctaaagagactatgttttccattctgggttcttagcacctttgttaaagatcaatttactgtaattgtatggatttatttctgagctctctgttctgttaaatggtctatacctctgatgaatgccaataccatcgtgtttgattgctataactctgtaatatattataaaattaggtaatataattcattcagttttgttcttcttgcttaaaattgctttggttatttgggatcttttgtggttccgtataggtttttggtttttttttttgagatggagtttcgctcttgttgcccaggctggagtgcaatggcgcaacctctgctcaccacaacctcagcctcctgggttcaagcaattctcctgcctcagtctcctgagtagctgggattacaggcatgcgccactatgcccggctgatttkgtatttttttgttagtagagacagggtttcttcatgtt

SEQ ID NO: 444449 - DNA, 568 bp, Homo sapiens
tgaggctgggttcagcatagaatctatggcagcagcctggccctagggtcaactgagacaggsctcatatctgattccattgggaaaagcctagtacctaagaccatgaaaacaggcctggaattgggtccataggggttggccttatgttggagcctggagctgcaggggccatcctggagcttgaaggtgtgggtgccagcatggctctggatgggcctgttgcctgaggtcatgtgagctggcctggggcctggaggccacaagggctggtctagatcttggggccacagaggctaacctggtgcaggtattggcctgcagcttggggatgcaaaggttgacctggtgctggggcgaacctggaagctgaattggtgctggggtgagcctggaagctaagtctatgaaaatgagccacatattgagaccacagggatcagtctggcattaggcacactggtattagggcacactggtacctgattccatgggaacaggtctggtgcctgagaccatgaaggtggatctgtagcctggaacaatgggaccggctttgtgccaagat

SEQ ID NO: 444450 - DNA, 568 bp, Homo sapiens
tgaggctgggttcagcatagaatctatggcagcagcctggccctagggtcaactgagacaggcctcatatctgattccattgggaaaagcctagtacctaagaccatgaaaacargcctggaattgggtccataggggttggccttatgttggagcctggagctgcaggggccatcctggagcttgaaggtgtgggtgccagcatggctctggatgggcctgttgcctgaggtcatgtgagctggcctggggcctggaggccacaagggctggtctagatcttggggccacagaggctaacctggtgcaggtattggcctgcagcttggggatgcaaaggttgacctggtgctggggcgaacctggaagctgaattggtgctggggtgagcctggaagctaagtctatgaaaatgagccacatattgagaccacagggatcagtctggcattaggcacactggtattagggcacactggtacctgattccatgggaacaggtctggtgcctgagaccatgaaggtggatctgtagcctggaacaatgggaccggctttgtgccaagat

SEQ ID NO: 444451 - DNA, 568 bp, Homo sapiens
tgaggctgggttcagcatagaatctatggcagcagcctggccctagggtcaactgagacaggcctcatatctgattccattgggaaaagcctagtacctaagaccatgaaaacaggcctggaattgggtccataggggttggccttatgttggagcctggagctgcaggggccatcctggagcttgaaggtgtgggtgccagcatggctctggatgggcctgttgcctgaggtcatgtgagctggcctggggcctggaggccacaarggctggtctagatcttggggccacagaggctaacctggtgcaggtattggcctgcagcttggggatgcaaaggttgacctggtgctggggcgaacctggaagctgaattggtgctggggtgagcctggaagctaagtctatgaaaatgagccacatattgagaccacagggatcagtctggcattaggcacactggtattagggcacactggtacctgattccatgggaacaggtctggtgcctgagaccatgaaggtggatctgtagcctggaacaatgggaccggctttgtgccaagat

SEQ ID NO: 444452 - DNA, 568 bp, Homo sapiens
tgaggctgggttcagcatagaatctatggcagcagcctggccctagggtcaactgagacaggcctcatatctgattccattgggaaaagcctagtacctaagaccatgaaaacaggcctggaattgggtccataggggttggccttatgttggagcctggagctgcaggggccatcctggagcttgaaggtgtgggtgccagcatggctctggatgggcctgttgcctgaggtcatgtgagctggcctggggcctggaggccacaagggctggtctagatcttggggccacagaggctaacctggtgcaggtattggcctgcagcttggggatgcaaaggttgacctggtgctggggcgaayctggaagctgaattggtgctggggtgagcctggaagctaagtctatgaaaatgagccacatattgagaccacagggatcagtctggcattaggcacactggtattagggcacactggtacctgattccatgggaacaggtctggtgcctgagaccatgaaggtggatctgtagcctggaacaatgggaccggctttgtgccaagat

SEQ ID NO: 444453 - DNA, 477 bp, Homo sapiens
tgtctcacatctcccctagacagatattagtggagaatcttagttttacacttggctgccctcacacggagctacagtgtgatgactgtcataagcagtggattcacaggctactgacccattaggaagtgctccatttaatctgaaagcaaagctgaawacgtgagcacacattacacaggaatttatgccctgcagcatgaacaacaacaaccaaaaacaaacctaacttcaaatgtttaagtcattggcaatttagctgactgtatgttctgaggaatcaggccatgagtgagtaaaatataatcataaaatatttgataaaatatccaatctctatcttaaaagcaatgaaattctgatattttaggagagttttgtttgttttttcaaataaccaactatagattgtttggatacagacctttcgtaatacaaaatagttcattcatttttgaatatttctgcttatttatt

SEQ ID NO: 444454 - DNA, 612 bp, Homo sapiens
atctcagctcacttcaacctctgcctcccaagttcccaccattctcccacctcagcctcccaagtagctgggactacaggcacctacstccatgcctggctaattttgtttttgtatttttagtagagacggggtttcactgtgttagccaggatggtctcgatctcctgaccttatgatccgcctgcctcggcctctcaaagtgctaggattacaggcgtgagccaccgtgcccagcctaaaatggctaagtctttaggagaggaagagtgaatagtcattcctcctttcatctcatattttaaacaatactttccttccttaagttaaaaacaaatcttttcccccttaagttaaagatttagcagctgtcgtggttaggacacagggtgattgatgtgtgagaggagatgagtgggaagactcagggtggggccgactcttttccagactgtgtgcaggtagaaatgccatcagtcatcgcttcctctggacagactaatttttgtctgtctcttcatagatgcccatgaggttactcaaagccccatatcggatttccctgcccaggacctctgtttccaggactcttcagcccacatctctgaccca

SEQ ID NO: 444455 - DNA, 612 bp, Homo sapiens
atctcagctcacttcaacctctgcctcccaagttcccaccattctcccacctcagcctcccaagtagctgggactacaggcacctacgwccatgcctggctaattttgtttttgtatttttagtagagacggggtttcactgtgttagccaggatggtctcgatctcctgaccttatgatccgcctgcctcggcctctcaaagtgctaggattacaggcgtgagccaccgtgcccagcctaaaatggctaagtctttaggagaggaagagtgaatagtcattcctcctttcatctcatattttaaacaatactttccttccttaagttaaaaacaaatcttttcccccttaagttaaagatttagcagctgtcgtggttaggacacagggtgattgatgtgtgagaggagatgagtgggaagactcagggtggggccgactcttttccagactgtgtgcaggtagaaatgccatcagtcatcgcttcctctggacagactaatttttgtctgtctcttcatagatgcccatgaggttactcaaagccccatatcggatttccctgcccaggacctctgtttccaggactcttcagcccacatctctgaccca

SEQ ID NO: 444456 - DNA, 495 bp, Homo sapiens
ggggctggggggagtaaggaattgataattagtgttaatgggtacagagtttcagttctgcaagatgaaaaacattctggagatggatagtggtgatgatggcacaacaatgtgagtgtgcttgmcactgaattgtacacttaaagtcattaaaatggtaacatttcatgttatgtttatttatcacagtagaaaatttgagatatgtagatgtagacaaataagaataaatacctgtgtcaaaagggaaaaaaatttaaatgcaaggctctgaatgctctttttccataccatttctctaggttgtatttctagcagcaagcttgagaggtgaaaaaatgtttccctttggaacgttaagcagacttgtctactgcttaatgtaaaagcagtacatcccccaagctcagtgtttctttgctgcaatacaaatttattatagcatgttcaccattgacttgggttcctctgctttatccttgtgagatttggggg

SEQ ID NO: 444457 - DNA, 495 bp, Homo sapiens
ggggctggggggagtaaggaattgataattagtgttaatgggtacagagtttcagttctgcaagatgaaaaacattctggagatggatagtggtgatgatggcacaacaatgtgagtgtgcttgccactgaattgtacacttaaagtyattaaaatggtaacatttcatgttatgtttatttatcacagtagaaaatttgagatatgtagatgtagacaaataagaataaatacctgtgtcaaaagggaaaaaaatttaaatgcaaggctctgaatgctctttttccataccatttctctaggttgtatttctagcagcaagcttgagaggtgaaaaaatgtttccctttggaacgttaagcagacttgtctactgcttaatgtaaaagcagtacatcccccaagctcagtgtttctttgctgcaatacaaatttattatagcatgttcaccattgacttgggttcctctgctttatccttgtgagatttggggg

SEQ ID NO: 444458 - DNA, 495 bp, Homo sapiens
ggggctggggggagtaaggaattgataattagtgttaatgggtacagagtttcagttctgcaagatgaaaaacattctggagatggatagtggtgatgatggcacaacaatgtgagtgtgcttgccactgaattgtacacttaaagtcattaaaatrgtaacatttcatgttatgtttatttatcacagtagaaaatttgagatatgtagatgtagacaaataagaataaatacctgtgtcaaaagggaaaaaaatttaaatgcaaggctctgaatgctctttttccataccatttctctaggttgtatttctagcagcaagcttgagaggtgaaaaaatgtttccctttggaacgttaagcagacttgtctactgcttaatgtaaaagcagtacatcccccaagctcagtgtttctttgctgcaatacaaatttattatagcatgttcaccattgacttgggttcctctgctttatccttgtgagatttggggg

SEQ ID NO: 444459 - DNA, 540 bp, Homo sapiens
tttaaaagtcatttaccaaagaagaaacttttcattttaattaaagctttcgtttgagctaaagttctactcctagataaaatgttaatgtgatcttgtcccaaatttctcataaactctcattttstaaatgttacaagaaggtacgtgactcttggcttgaatactgctctgacagattccatatcattgaatttgtatcctgtcaagtatttacaaaattaatatatgtgcagtcatgtgcacaattaatacaaaatgtatttccaagagggatatgattggatgtatccctccaagataatgagtttattgaaagaaacacacttagcataagaactatgctataaaaagccattttgattatttttttaatcgcaaagaatctgtttaagctctatgaaaaacactagagaagacatggttctaaggataaaagtgtttagggtcctataatctggacatccagacccatgttaaatctgacctagaggcctattaaaaagcctccagaagcagacaacttccagtagacatatt

SEQ ID NO: 444460 - DNA, 604 bp, Homo sapiens
aatctcaaagaaaatttcttggaaataatttatttgtacttagcataaccaaggatcagttaccaaagtgtaaagttttaaaagtcatttaccaaagaagaaacttttcattttaattaaagctttcgtttgagctaaagttctactcctagataaaatgttaatgtgatcttgtcccaaatttctcataaactctcattttgtaaatgttacaagaaggtacgtgactcttggcttgaatmctgctctgacagattccatatcattgaatttgtatcctgtcaagtatttacaaaattaatatatgtgcagtcatgtgcacaattaatacaaaatgtatttccaagagggatatgattggatgtatccctccaagataatgagtttattgaaagaaacacacttagcataagaactatgctataaaaagccattttgattatttttttaatcgcaaagaatctgtttaagctctatgaaaaacactagagaagacatggttctaaggataaaagtgtttagggtcctataatctggacatccagacccatgttaaatctgacctagaggcctattaaaaagcctccagaagcagacaacttcc

SEQ ID NO: 444461 - DNA, 540 bp, Homo sapiens
tttaaaagtcatttaccaaagaagaaacttttcattttaattaaagctttcgtttgagctaaagttctactcctagataaaatgttaatgtgatcttgtcccaaatttctcataaactctcattttgtaaatgttacaagaaggtacgtgactcttggcttgaatactgctctgacagattccatatcattgaatttgtatcctgtcaagtatttacaaaattaatatatgtgcagtcatgtgcacaattaatacaaaatgtatttccaagagggatatgattggatgtatccctccaagakaatgagtttattgaaagaaacacacttagcataagaactatgctataaaaagccattttgattatttttttaatcgcaaagaatctgtttaagctctatgaaaaacactagagaagacatggttctaaggataaaagtgtttagggtcctataatctggacatccagacccatgttaaatctgacctagaggcctattaaaaagcctccagaagcagacaacttccagtagacatatt

SEQ ID NO: 444462 - DNA, 540 bp, Homo sapiens
tttaaaagtcatttaccaaagaagaaacttttcattttaattaaagctttcgtttgagctaaagttctactcctagataaaatgttaatgtgatcttgtcccaaatttctcataaactctcattttgtaaatgttacaagaaggtacgtgactcttggcttgaatactgctctgacagattccatatcattgaatttgtatcctgtcaagtatttacaaaattaatatatgtgcagtcatgtgcacaattaatacaaaatgtatttccaagagggatatgattggatgtatccctccaagataatgagtttattgaaagaaacacacttagcataagaactatgctataaaaagccattttgattawttttttaatcgcaaagaatctgtttaagctctatgaaaaacactagagaagacatggttctaaggataaaagtgtttagggtcctataatctggacatccagacccatgttaaatctgacctagaggcctattaaaaagcctccagaagcagacaacttccagtagacatatt

SEQ ID NO: 444463 - DNA, 540 bp, Homo sapiens
tttaaaagtcatttaccaaagaagaaacttttcattttaattaaagctttcgtttgagctaaagttctactcctagataaaatgttaatgtgatcttgtcccaaatttctcataaactctcattttgtaaatgttacaagaaggtacgtgactcttggcttgaatactgctctgacagattccatatcattgaatttgtatcctgtcaagtatttacaaaattaatatatgtgcagtcatgtgcacaattaatacaaaatgtatttccaagagggatatgattggatgtatccctccaagataatgagtttattgaaagaaacacacttagcataagaactatgctataaaaagccattttgattatttttttaatcrcaaagaatctgtttaagctctatgaaaaacactagagaagacatggttctaaggataaaagtgtttagggtcctataatctggacatccagacccatgttaaatctgacctagaggcctattaaaaagcctccagaagcagacaacttccagtagacatatt

SEQ ID NO: 444464 - DNA, 577 bp, Homo sapiens
agcacccgggccagcagctgcagagggtgtactgggtcccccagcagtgccggcccaccggtgctgcgctcgatttctcgccgggccttagctgccttcccacggggcagggctggggacctgcaacccgccatgcctgagcctcccacccactccatgggctcctgtgcagcccgagcctccccgacgagcaccaccccctgctccacggcgcccggtcccatcgaccaccctagggctgaggagtgcgagcgcacggygcgggactggcaggcagctccacctgcagcccctgtgcaggatccactaggtgaagccagctgggctcctgagtctggtggggaggtggagagtctttatgtctagctcagggattgtaaatacaccaatcagcaccctgtgtttagctcaaggtttgtgaatgcaccaatcgacactgtgtatctagctgctctggtggggccttggagaacctgtgtgtggaaactctgtatctaactaatctgatggggaggtggagaacctttgtatctagctcagggattgtaaacgcaccaatcagcgccctgttaaaaca

SEQ ID NO: 444465 - DNA, 577 bp, Homo sapiens
agcacccgggccagcagctgcagagggtgtactgggtcccccagcagtgccggcccaccggtgctgcgctcgatttctcgccgggccttagctgccttcccacggggcagggctggggacctgcaacccgccatgcctgagcctcccacccactccatgggctcctgtgcagcccgagcctccccgacgagcaccaccccctgctccacggcgcccggtcccatcgaccaccctagggctgaggagtgcgagcgcacggcgcgggactggcaggcagctccacctgcagcccctgtgcrggatccactaggtgaagccagctgggctcctgagtctggtggggaggtggagagtctttatgtctagctcagggattgtaaatacaccaatcagcaccctgtgtttagctcaaggtttgtgaatgcaccaatcgacactgtgtatctagctgctctggtggggccttggagaacctgtgtgtggaaactctgtatctaactaatctgatggggaggtggagaacctttgtatctagctcagggattgtaaacgcaccaatcagcgccctgttaaaaca

SEQ ID NO: 444466 - DNA, 562 bp, Homo sapiens
gctttaaagtatgtaagatatatagagagacgatgaagagggaggtacggagcgagagagagagtgtgtggctggaacttgaagttttttttttatttgaagttatatactttgggaataaacttaggttttcatactctgccgagcttaagcaagatggcaaatgcatacattgagctctctaatcataacctcaatatatggattcttgttcattaaaatacttgcaccagcaaatatgatttccaaaatttgtgttttggaggtaattaagtaactrtataaaaataaatgctttcccctcctttccccagtgactttccatacttttaaaataataaaaataatgtatatatattttttaatttttaaaagcaacttaactctttgtttttaggaaactatagattaaggaaaacctttgatcccgtgtgtactagggatccacaggaatgttcctcagccctgtggcatgaggtctttctcaaagtccaggcagctacacagcatagccatgttacttttaattagtgtaattaccatggagacaataggcatcatc

SEQ ID NO: 444467 - DNA, 562 bp, Homo sapiens
gctttaaagtatgtaagatatatagagagacgatgaagagggaggtacggagcgagagagagagtgtgtggctggaacttgaagttttttttttatttgaagttatatactttgggaataaacttaggttttcatactctgccgagcttaagcaagatggcaaatgcatacattgagctctctaatcataacctcaatatatggattcttgttcattaaaatacttgcaccagcaaatatgatttccaaaatttgtgttttggaggtaattaagtaactgtrtaaaaataaatgctttcccctcctttccccagtgactttccatacttttaaaataataaaaataatgtatatatattttttaatttttaaaagcaacttaactctttgtttttaggaaactatagattaaggaaaacctttgatcccgtgtgtactagggatccacaggaatgttcctcagccctgtggcatgaggtctttctcaaagtccaggcagctacacagcatagccatgttacttttaattagtgtaattaccatggagacaataggcatcatc

SEQ ID NO: 444468 - DNA, 509 bp, Homo sapiens
ttgtgcacctatatttggaaagaacaacttttagtcatatccctcatatatctgttttgacgttttatgtcagccttatgtttaaatgtgatacctcattataacgtcctaaaggcaagaaacaatatacccaaataaaaatatgtctatgcttctgtgttataatttataagactggcttcggtaattgaataaacatgttaaggtattttatttcaattatttatactccattgagttgttcaaatgagtatgaatccttctagcaaaaacccaaccctcctttggatctattcgcaaggtgcacttcaaaagtttatcatatagtcgatgtttgtaattctgtctgtattatttcttcaakaatacctatgcaccttgagggaaagttctgccttattcttgcataagctcaataggcacacatttataattcaatgcttgtaatattttctcccatttctgagatacttaaaaaatttaacctcattatcaccatcattacctca

SEQ ID NO: 444469 - DNA, 497 bp, Homo sapiens
ttaacctcattatcaccatcattacctcactatcaccatgaaaatctcagtgacaaatagagcaacagtgatcagcttgtgagtaaaagccaaataccaggcactaacaagakttctcttttcataagaaaccttcaaggtcactgcatgaggacgaggccaggccagtattcaacatcggatttatagatcctaaagttggccactttcctctttgccatgctgaatctttaaaataaatcctaattcaatcttttaacctaatggcatgtccaagtcaaattttttactacacacttttcccagattcacctcttttattatatattggaaaatataatttcacaaagattatttcgaataaagaggtaatttttccaatcgtgtaaatgaaatccacaggaaaggagagctcttctgtataaatagcacaaattcagaggaatgcctttgcaaactctatgcttcaccaacacagatcttccctaggaagagaa

SEQ ID NO: 444470 - DNA, 497 bp, Homo sapiens
ttaacctcattatcaccatcattacctcactatcaccatgaaaatctcagtgacaaatagagcaacagtgatcagcttgtgagtaaaagccaaataccaggcactaacaagagttctcttttcataagaaaccttcaaggtcactgcatgaggacgaggccaggccagtattcaacatcrgatttatagatcctaaagttggccactttcctctttgccatgctgaatctttaaaataaatcctaattcaatcttttaacctaatggcatgtccaagtcaaattttttactacacacttttcccagattcacctcttttattatatattggaaaatataatttcacaaagattatttcgaataaagaggtaatttttccaatcgtgtaaatgaaatccacaggaaaggagagctcttctgtataaatagcacaaattcagaggaatgcctttgcaaactctatgcttcaccaacacagatcttccctaggaagagaa

SEQ ID NO: 444471 - DNA, 401 bp, Homo sapiens
ttgctcaggcaggtctcaaactcctgagctcaagtgattttcccatcttggtctcccgaagtgctgggattacaggcrtaagccaccatgcttgggccacatcttattttcattgtgttcagaatacaatatagggttgcatataacagcattaaatgaactgttgtcatgcttcccttgctgatgtgtgtgcatatctgtaatccactttatggggggataaagttttgtttgggctcatgtcggaactgacggagttgtctcttcattagaaactggagggtctagtttaaaactacactgtaaagacgtgatgtggccttagttatggcatttaaatagtgggtttaactcatcaaatttccctaataatataacactaatatatttagctagtccac

SEQ ID NO: 444472 - DNA, 366 bp, Homo sapiens
gattttcccatcttggtctcccgaagtgctgggattacaggcgtaagccaccatgcttgggccacatcttattttcattgtgttcagaatacaatatagggttgcatataacagcattaaatgaactgttgtcatgcttcccttgctgatgtgtgtgcatatctgtaatccactttatggggggataaagttttgtttgggctcatgtcggaactgacggagttgtctcttcattagaaactggakggtctagtttaaaactacactgtaaagacgtgatgtggccttagttatggcatttaaatagtgggtttaactcatcaaatttccctaataatataacactaatatatttagctagtccac

SEQ ID NO: 444473 - DNA, 366 bp, Homo sapiens
gattttcccatcttggtctcccgaagtgctgggattacaggcgtaagccaccatgcttgggccacatcttattttcattgtgttcagaatacaatatagggttgcatataacagcattaaatgaactgttgtcatgcttcccttgctgatgtgtgtgcatatctgtaatccactttatggggggataaagttttgtttgggctcatgtcggaactgacggagttgtctcttcattagaaactggagggtctagtttaaaactacactgtaaagacgtgatgtggccttagttayggcatttaaatagtgggtttaactcatcaaatttccctaataatataacactaatatatttagctagtccac

SEQ ID NO: 444474 - DNA, 556 bp, Homo sapiens
cgtgatgtggccttagttatggcatttaaatagtgggtttaactcatcaaatttccctaataatataacactaatatatttagctagtccacagaaacacatatttttgtagattttctttttttttttttttttcggagatggggtctcattctgtgtcccagtctgtaatctgtagtgcaaaggtgcaatcacacccattgcagcctcaacttcccaggctccggtgatcytcccacctcagactcctgagtggctggaaccacaggtgcatgccaccatgcctggctaatttttttttctttgtagaggtggagtctcactatgttgcccaggctggtcttgaacccttgggctcaagtgatcctcccaccttgacctctcaaactgctgggattacaggtgtgagccaccacacctggacatgtagatgttcaataacaagaaatgtaaacagtaaagatatagtattagagacaattatctattttttaagacctccagacagcgattattccttcagctgcgagaaaacgtaaatgcaaaatacctgcaa

SEQ ID NO: 444475 - DNA, 592 bp, Homo sapiens
aaaggtgcaatcacacccattgcagcctcaacttcccaggctccggtgatcctcccacctcagactcctgagtggctggaaccacaggtgcatgccaccatgcctggctaatttttttttctttgtagaggtggagtctcactatgttgcccaggctggtcttgaacycttgggctcaagtgatcctcccaccttgacctctcaaactgctgggattacaggtgtgagccaccacacctggacatgtagatgttcaataacaagaaatgtaaacagtaaagatatagtattagagacaattatctattttttaagacctccagacagcgattattccttcagctgcgagaaaacgtaaatgcaaaatacctgcaaaatgcgatgacttcctgtaatgtggcatcacaggcaagctgtggcttttcagaagatacattcaccctgttaccttacagctctaccaagtgggacaccccagagatccttatatattatgtctttttaatagttattcccagacattgtttctctgcatttattttcaaagtattaatccaatttaacactcatcttcctggcaagaacagtaaag

SEQ ID NO: 444476 - DNA, 504 bp, Homo sapiens
ttgaacccttgggctcaagtgatcctcccaccttgacctctcaaactgytgggattacaggtgtgagccaccacacctggacatgtagatgttcaataacaagaaatgtaaacagtaaagatatagtattagagacaattatctattttttaagacctccagacagcgattattccttcagctgcgagaaaacgtaaatgcaaaatacctgcaaaatgcgatgacttcctgtaatgtggcatcacaggcaagctgtggcttttcagaagatacattcaccctgttaccttacagctctaccaagtgggacaccccagagatccttatatattatgtctttttaatagttattcccagacattgtttctctgcatttattttcaaagtattaatccaatttaacactcatcttcctggcaagaacagtaaagggtctgaaattttatactacttacaatctaacaagttggcctgccactctcatggatgctgccaaaagaaata

SEQ ID NO: 444477 - DNA, 553 bp, Homo sapiens
tattatgtctttttaatagttattcccagacattgtttctctgcatttattttcaaagtattaatccaatttaacactcatcttcctggcaagaacagtaaagggtctgaaattttatactacttacaatctaacaagttggcctgccactctcatggatgctgccaaaagaaataagactcccaggtcagagacaaagaacgttattattattgttattattttattattttattttatttatttacttttttgagatggagtctcgctctgtcgcccaggctagagtgcagtggcatgatctcggctcactgcaagctctgcctcccasgttcacgccattctcctgcctcagcctgccgtgtagctgggactacaggcgcccaccaccatgcccagctaattttttgtatttttagtacagacaaggtttcaccgtgttagtcaggatggtctcgatctcctgaccttgtgatctgccttcctgaacctcccaaagtgctgggattacaggcgtgagccaccacactcagtcaataacattattatttat

SEQ ID NO: 444478 - DNA, 553 bp, Homo sapiens
tattatgtctttttaatagttattcccagacattgtttctctgcatttattttcaaagtattaatccaatttaacactcatcttcctggcaagaacagtaaagggtctgaaattttatactacttacaatctaacaagttggcctgccactctcatggatgctgccaaaagaaataagactcccaggtcagagacaaagaacgttattattattgttattattttattattttattttatttatttacttttttgagatggagtctcgctctgtcgcccaggctagagtgcagtggcatgatctcggctcactgcaagctctgcctcccacgttcacgccattctcctgcctcagcctgccgtgtagctgggactacaggcgcccaccaccaygcccagctaattttttgtatttttagtacagacaaggtttcaccgtgttagtcaggatggtctcgatctcctgaccttgtgatctgccttcctgaacctcccaaagtgctgggattacaggcgtgagccaccacactcagtcaataacattattatttat

SEQ ID NO: 444479 - DNA, 553 bp, Homo sapiens
tattatgtctttttaatagttattcccagacattgtttctctgcatttattttcaaagtattaatccaatttaacactcatcttcctggcaagaacagtaaagggtctgaaattttatactacttacaatctaacaagttggcctgccactctcatggatgctgccaaaagaaataagactcccaggtcagagacaaagaacgttattattattgttattattttattattttattttatttatttacttttttgagatggagtctcgctctgtcgcccaggctagagtgcagtggcatgatctcggctcactgcaagctctgcctcccacgttcacgccattctcctgcctcagcctgccgtgtagctgggactacaggcgcccaccaccatgcccagctaattttttgtatttttagtacagacaaggtttcaccgtgttagtcaggatggtctcgatctcctgaccttgtgatctgccttcctgaacctcccaaagtgctgggattacaggcrtgagccaccacactcagtcaataacattattatttat

SEQ ID NO: 444480 - DNA, 571 bp, Homo sapiens
tgggattacaggcgtgagccaccacactcagtcaataacattattatttatggaccaacaaacagcataagcaacagggtatcagttgtccttgccctggattcccacgggaaggacatggatggactcagatggatgaatgcacatgcattacgggataggagccctgagctcagggaatgcaaatcccttgtaaagatccctaactatgcctagtctttgttccagaaggagataccaacatgcttgaaaagatggtcaaaacaaagggcagtctgtgyctgctcgtaaagtgtgcagaaatgtgagggactcatgaaaacatgtcacacaatactttcctcttatagtagacaagtgagtctgtatgcacatggggtactggatgaaatactttatcaaaactggtcagaaattcagacaaaaatttaattcaatcaaacaactgcatgtaataaataatattttcgtgtggctaccagtgactcacaagtccagctgcttcaaaaaacatcctaattctctagccccatcacagttcaattcaatataatctgtggggaggggcctg

SEQ ID NO: 444481 - DNA, 551 bp, Homo sapiens
attggggaattaagtccatttccattcaagattaatactgatacgtgtgaaagtaatcttgtcatcataatgttagctggttattttaaagactggcttatgtggttgccttatagtgtcactgggctgtgtatttcagtgtatttttttttttagtggctggtaacaggcttttctttccatatttagtacttcctttaggagccttataaggcatgtctggtggtaaaaaaaaaaatcttctcagcacttctttgtctgaaaaggatcttatttctccttcacttatgaagctcaggttggttagatttgaaatcttggtgggaattccatttatytaagaatgttgaatattggctcccaacctcttctggcttgtgaggtttctgctaataggtctgctgttagtctaatggacttccctttgtacctttgtaggttatctctcattactttttctctgcctttaagatttttttgcttcatttcaagcttggagaatctgatagtcatgtctcttggggatgattttcttgtgaaggattttgcag

SEQ ID NO: 444482 - DNA, 551 bp, Homo sapiens
attggggaattaagtccatttccattcaagattaatactgatacgtgtgaaagtaatcttgtcatcataatgttagctggttattttaaagactggcttatgtggttgccttatagtgtcactgggctgtgtatttcagtgtatttttttttttagtggctggtaacaggcttttctttccatatttagtacttcctttaggagccttataaggcatgtctggtggtaaaaaaaaaaatcttctcagcacttctttgtctgaaaaggatcttatttctccttcacttatgaagctcaggttggttagatttgaaatcttggtgggaattccatttatctaagaatgttgaatattggctcccaacctcttctggcttgtgaggtttctgctaataggtctgctgttagtctaatggacttccctttgtacctttgtaggttatctctcattwctttttctctgcctttaagatttttttgcttcatttcaagcttggagaatctgatagtcatgtctcttggggatgattttcttgtgaaggattttgcag

SEQ ID NO: 444483 - DNA, 407 bp, Homo sapiens
cactggtgagcacaggactgtgtgagttctccttgcacattcacgtgggtggtagtagccgctcagaacaggggtgggtcctctgttctcggtgcctattgtcacactggtggtagtgtyggtgcaggggcagggcgttggcaggggcggggctggcgggcttcatgcccactcatcaatgctccaacagtaatggcagtatggtggggggtcgagagggtgaagtgcactcaggatggcagcagtagcatggcacacacactgtggcaggaaaggggaggcaaggtccacccacacacacatgcactggcaaaacgatgtgggggatggccgtgggctagtgcatgcaggcaaagtggcacggggagactgcagtgggggcagggcacagttaggctgatgtgtgt

SEQ ID NO: 444484 - DNA, 407 bp, Homo sapiens
cactggtgagcacaggactgtgtgagttctccttgcacattcacgtgggtggtagtagccgctcagaacaggggtgggtcctctgttctcggtgcctattgtcacactggtggtagtgtcggtgcaggggcagggygttggcaggggcggggctggcgggcttcatgcccactcatcaatgctccaacagtaatggcagtatggtggggggtcgagagggtgaagtgcactcaggatggcagcagtagcatggcacacacactgtggcaggaaaggggaggcaaggtccacccacacacacatgcactggcaaaacgatgtgggggatggccgtgggctagtgcatgcaggcaaagtggcacggggagactgcagtgggggcagggcacagttaggctgatgtgtgt

SEQ ID NO: 444485 - DNA, 408 bp, Homo sapiens
cactggtgagcacaggactgtgtgagttctccttgcacattcacgtgggtggtagtagccgctcagaacaggggtgggtcctctgttctcggtgcctattgtcacactggtggtagtgtcggtgcaggggcagggcgttggcaggggcggggctggcgggcttcatgcccactcatcaatgctccaacagtaatggcagtatggtggggggtcgagagggtgaagtgcactcaggatggcagcagtagcatggcacacacactgtggcaggaaaggggaggcaaggtccacccacacacacatgcactggcaaaacgatgygggggatggccgtgggctagtgcatgcaggcaaagtggcacggggagactgcagtgggggcagggcacagttaggctgatgtgtgta

SEQ ID NO: 444486 - DNA, 479 bp, Homo sapiens
cactggtgagcacaggactgtgtgagttctccttgcacattcacgtgggtggtagtagccgctcagaacaggggtgggtcctctgttctcggtgcctattgtcacactggtggtagtgtcggtgcaggggcagggcgttggcaggggcggggctggcgggcttcatgcccactcatcaatgctccaacagtaatggcagtatggtggggggtcgagagggtgaagtgcactcaggatggcagcagtagcatggcacacacactgtggcaggaaaggggaggcaaggtccacccacacacacatgcactggcaaaacgatgtgggggatggccgtgggctagtgcatgcaggcaaagtggmacggggagactgcagtgggggcagggcacagttaggctgatgtgtgtacatgggggccactctgcagcagatctctgctggtcaggcacagtcagccagcacaggaactatgatgcagg

SEQ ID NO: 444487 - DNA, 541 bp, Homo sapiens
cccttgcctgttcaactcacctctcctccaggagattttggggacctggaatgagtcctggtgcacggttgccccttgcagggttcccggcttcctcccccttcagcccaacatctgtgtcttccctctgtctgctctcaaagccttccctctgaagatctgccaggagcacaccagtcttcycaatgtcctggtcccttggtgggagctgttcctcctggctgtgtctagtcagccatcttccctcatattttcttcacacaagttaacaatggttattttcacattgtaatttcatctattaattgacatttaagagaaaacaaatcagagtgtgtgataatttgctaatatttctcccaatgagcacatatgttttgttgtttccttcaacaaagacagtgatagctccacatcattgttctgattttatcagatctataggaggaaaactcaaactgtgatgaaggcattcagtgaagatctaaataaatggagagttgttctaagtatatggatagaaagactcaatattgtgaag

SEQ ID NO: 444488 - DNA, 541 bp, Homo sapiens
cccttgcctgttcaactcacctctcctccaggagattttggggacctggaatgagtcctggtgcacggttgccccttgcagggttcccggcttcctcccccttcagcccaacatctgtgtcttccctctgtctgctctcaaagccttccctctgaagatctgccaggagcacaccagtcttcccaatgtcctggtcccttggtgggagctgttcctcctggctgtgtctagtcagccatcttccctcatattttcttcacacaagttaacaatggttattttcacattgyaatttcatctattaattgacatttaagagaaaacaaatcagagtgtgtgataatttgctaatatttctcccaatgagcacatatgttttgttgtttccttcaacaaagacagtgatagctccacatcattgttctgattttatcagatctataggaggaaaactcaaactgtgatgaaggcattcagtgaagatctaaataaatggagagttgttctaagtatatggatagaaagactcaatattgtgaag

SEQ ID NO: 444489 - DNA, 588 bp, Homo sapiens
gccatcttccctcatattttcttcacacaagttaacaatggttattttcacattgtaatttcatctattaattgacatttaagagaaaacaaatcagagtgtgtgataatttgctaatatttctcccaatgagcacatatgttttgttgtttccttcaacaaagacagtgatagctccacatcattgttctgattttatcagatctataggaggaaaactcaaactgtgatgaaggcattcagtgaagatctaaataaatggagagttgttctaagtatatggatagaaagactcaatattgtgaagatgtcagttctttcaaatttcatctatagattaaaagcaatcccaatagaaatcccagcaagttatctagtgggtattgacaaactgattccaaagtttatataaaaaggcaaaagatccagattagccaacaaatgttaaagaagaacaagtttgaaagtcttacactgtatagcttcaaaatctatgataaagttayagtgatcaagacagtgtggtattggtgaaagaataaaaaaatagatcaatggaacataccagcgggccaaaaaatagaccca

SEQ ID NO: 444490 - DNA, 509 bp, Homo sapiens
ttttttgggtggtgaaagtattctgtatgatactgtaatgatggatatgtgtcattgtgtgtttctcataacctatagaatgtaaaatacaaagagtgttccctaatgtaaactacggtcttaataatagtgtattagtattggctcatcaattgtaacaaatgtaccaggagatgttaatagtaggggaaattcctgcaagaattgcccactcccaccctctcatttcacagatgaagtcccktgacccagaagtgcaaagccatctgttgccgctcccatcctattggaaacatagccctgactcttcctctgagttggggtccagggctctttctcttcctctaaatagccacctcagcagagcctcctggcaagtaggatttagtctacaccaggcttcctgcatgccactatttactttcctaatgaagacagaaaacgaggtgtgaaggcagcagcatgttagatttttcagttctaatgggaagaataaaaaactcactatg

SEQ ID NO: 444491 - DNA, 509 bp, Homo sapiens
ttttttgggtggtgaaagtattctgtatgatactgtaatgatggatatgtgtcattgtgtgtttctcataacctatagaatgtaaaatacaaagagtgttccctaatgtaaactacggtcttaataatagtgtattagtattggctcatcaattgtaacaaatgtaccaggagatgttaatagtaggggaaattcctgcaagaattgcccactcccaccctctcatttcacagatgaagtcccgtgacccagaagtgcaaagccatctgttgccgctcccatcctattggaaacatagccctgactcttcctctgagttggggtccagggctctttctcttcctctaaatagccacstcagcagagcctcctggcaagtaggatttagtctacaccaggcttcctgcatgccactatttactttcctaatgaagacagaaaacgaggtgtgaaggcagcagcatgttagatttttcagttctaatgggaagaataaaaaactcactatg

SEQ ID NO: 444492 - DNA, 576 bp, Homo sapiens
cagctaacacaatcctaaatttctagtgtggctttcagggattaccaaagacagaatgttgaatgcattgtatggtttctgtcttcagtcataggaaccattctttgctctaggagtagcaatgagatccaaatccaggaaatatggcaatatcttcgatttacatcattagccctcagtatttttttttttttttgagactagaagcagaaggctgcttcatgcctggctgcctatcaaaagaagcaattttcataaatctatagctctgaacaatgaaaacggttcctttcacctctgctgaatcagtgtctggagcatcagggacaggggaaaagttctaacattagcttttttcttctacctgctgctaatcagagygcaagcgagaagttgtattcttctcagggccagtaaagcagggaaagaaatcactagtgctcctctccggtctgaggatcaaataaacagcctttttttatcatccagctgctaggggtatggcttgagctacagacagctcattagaaagaaccacaaagttagaaatttggcctttggggggaaaatgtcatt

SEQ ID NO: 444493 - DNA, 576 bp, Homo sapiens
cagctaacacaatcctaaatttctagtgtggctttcagggattaccaaagacagaatgttgaatgcattgtatggtttctgtcttcagtcataggaaccattctttgctctaggagtagcaatgagatccaaatccaggaaatatggcaatatcttcgatttacatcattagccctcagtatttttttttttttttgagactagaagcagaaggctgcttcatgcctggctgcctatcaaaagaagcaattttcataaatctatagctctgaacaatgaaaacggttcctttcacctctgctgaatcagtgtctggagcatcagggacaggggaaaagttctaacattagcttttttcttctacctgctgctaatcagagtgcaagcgagaagttgtattcttctcagggccagtaaagcagggaaagaaatcactagtgctcctctccrgtctgaggatcaaataaacagcctttttttatcatccagctgctaggggtatggcttgagctacagacagctcattagaaagaaccacaaagttagaaatttggcctttggggggaaaatgtcatt

SEQ ID NO: 444494 - DNA, 506 bp, Homo sapiens
actttcctcatgccaaatgcctgccatgtaggtattacaccattgtaatagacagagctgcatgcagacatcctagagaaacaggtcatgctgaagctggcctacttcaagaggttctactgtgactgtcacagtagataygggcatgggacctggacagggaaaaagagcagctgaataatgttaacagtggtggtaactagggtaggatgcaatagtccacactagttatttgtataaattttatattacaattttaaatcaatacctttcctcctctgcacctacaacttgacaatgactgattttttaatgtttctagaatttggccttttccagaatcccttatcattaaaatcatacagtatatcatctttcagactggcttccttcactgagcagtgtgcatttaaggttttgccatgtattttcatggcttgatgattaacttttttattgctgactaatatttcagtgtgtacataccaagtttgtttacccttaca

SEQ ID NO: 444495 - DNA, 598 bp, Homo sapiens
atatgcagcttttgtgtggacatgtattttcaacccatttaggtaaatacctaggagtgaaatcgttgaatcatttggcaagactcaaactgtgttccaaagtggttgcatcattttgcattcccaccaggaatgaatgacagcttctggtgctccatatccttgtcagaaattggtattgtcaggttttttttttattatacccattctaataggtgtatagcttctygatactgttttaatttgtaattaactaatgacatatgatgttgagcaacttataaatgtttatttgccacatgtataacatctttggtgagatatctattcagatcttctgtttcctttttttaattttaagagtttttgtatattttggacatcaattatttatcatttatgtgttttgcaaaaatgtttcctaattttttgcctctccattctctgaatagtctcaaaaatttttaattttaatgaaattcacctttttaaaaaatgttatggatcgaggattcactgttggatgtaaaaagtcgctgccaaataaaaagtcacctatgctataatctcagctactccacagggtaaggcaagagga

SEQ ID NO: 444496 - DNA, 518 bp, Homo sapiens
ggtaaatacctaggagtgaaatcgttgaatcatttggcaagactcaaactgtgttccaaagtggttgcatcattttgcattcccaccaggaatgaatgacagcttctggtgctccatatccttgtcagaaattggtattgtcaggttttttttttattatacccattctaataggtgtatagcttcttratactgttttaatttgtaattaactaatgacatatgatgttgagcaacttataaatgtttatttgccacatgtataacatctttggtgagatatctattcagatcttctgtttcctttttttaattttaagagtttttgtatattttggacatcaattatttatcatttatgtgttttgcaaaaatgtttcctaattttttgcctctccattctctgaatagtctcaaaaatttttaattttaatgaaattcacctttttaaaaaatgttatggatcgaggattcactgttggatgtaaaaagtcgctgccaaataaaaagtcacctat

SEQ ID NO: 444497 - DNA, 598 bp, Homo sapiens
atatgcagcttttgtgtggacatgtattttcaacccatttaggtaaatacctaggagtgaaatcgttgaatcatttggcaagactcaaactgtgttccaaagtggttgcatcattttgcattcccaccaggaatgaatgacagcttctggtgctccatatccttgtcagaaattggtattgtcaggttttttttttattatacccattctaataggtgtatagcttcttgatactgttttaatttgtaattaactaatgacatatgatgttgagcaacttrtaaatgtttatttgccacatgtataacatctttggtgagatatctattcagatcttctgtttcctttttttaattttaagagtttttgtatattttggacatcaattatttatcatttatgtgttttgcaaaaatgtttcctaattttttgcctctccattctctgaatagtctcaaaaatttttaattttaatgaaattcacctttttaaaaaatgttatggatcgaggattcactgttggatgtaaaaagtcgctgccaaataaaaagtcacctatgctataatctcagctactccacagggtaaggcaagagga

SEQ ID NO: 444498 - DNA, 598 bp, Homo sapiens
atatgcagcttttgtgtggacatgtattttcaacccatttaggtaaatacctaggagtgaaatcgttgaatcatttggcaagactcaaactgtgttccaaagtggttgcatcattttgcattcccaccaggaatgaatgacagcttctggtgctccatatccttgtcagaaattggtattgtcaggttttttttttattatacccattctaataggtgtatagcttcttgatactgttttaatttgtaattaactaatgacatatgatgttgagcaacttataaatgtttatttgccacrtgtataacatctttggtgagatatctattcagatcttctgtttcctttttttaattttaagagtttttgtatattttggacatcaattatttatcatttatgtgttttgcaaaaatgtttcctaattttttgcctctccattctctgaatagtctcaaaaatttttaattttaatgaaattcacctttttaaaaaatgttatggatcgaggattcactgttggatgtaaaaagtcgctgccaaataaaaagtcacctatgctataatctcagctactccacagggtaaggcaagagga

SEQ ID NO: 444499 - DNA, 450 bp, Homo sapiens
caggtgataagaaacaagaaaactggaactcatactttcagagattttcctgcctcggatgtgaagtctcttggctactggagtctggaagacgacttctaaactgattctgacaggattgtaactkgaaaccctattatattcagtttccctcactggtctctttacccactccacagtaggtggtaccagtactgagaactaattcccttctaaattctaaactctaaactgtgtccactttcatctcacttatcctgccagtccctccactccctttcaagtttccccctcaaagcttcaatctgttctctttggttctgatcgtgttcatcagcactctccacatgcttcaacccataacactccaactttcaaactggatcaaaacaaccatgacttttcccgttcctgtccctgggctatagagtgttgccacaagaattcacc

SEQ ID NO: 444500 - DNA, 602 bp, Homo sapiens
aaaatagtaatatctaaacctcttcattggtttctataaaggtgaattaatattctaaagtgcayagatcaatgtctagcacatagtagccaagacaggtttgttaaatacataaaaccaagcaggaggaagcctgtccctaccatcctcctagtgctggtacatttttctcacctttcttaatcttgggggagaattgattttctcattctgtcttatttaacatttgagctcaatgtctaacctataactttatatatgatttatttccgtatacttctcattttatttttaaaaaaccctatgatttgatttcaaaagaagtaaaaacaaattaaatcttgttgacctaaaacttgcttctgcaacatccccactgggaatgataatataaatgcttgtgccttgagatgagaatgtcattgtttgttccttactgttgtatagcctgaagattaaataagtaaaataaaagtggaattaagaaatatatcttgtctactagtcaaagcagttcagaaactgtatttcactgttacatctagatagttgaattgtgtgcctttaagctatgaaatttggttaaattaactttaatgaaa

SEQ ID NO: 444501 - DNA, 552 bp, Homo sapiens
gatccacctgccttggcctcccgaagtgttgggttccaggcgtgagccatgtatttatatacttatatttctggtatttatttcagaataaaacttcaagtacagattcatctttgcttaaaaagacctagtcaaaggcccaacagaactttctgattaatctrtcagttcttcaacaaatttaaatatcttctgtatcaaattattaatgagtatatttctgaatttctttgttttcttgatctagttatccattattagcaaattattttagggtagctccatagtacttttaaaacaataaaaatgatttcttgttaattacttttcagtatcaaaatatttcaaaatattctcacatattaatttttaatctgatttttgtcaagtttttaaaatatctgttgacattttaattgaggtatagggaagtctattgtttaattctgggaaagttgtcaataataatttcatttttctatccaaaaacaggaaatggctttccattatttagaagttacttcctattcttcaacggaatattaaaactct

SEQ ID NO: 444502 - DNA, 560 bp, Homo sapiens
gccaccgcttgggataactttccaaatcactacctgcatgcaagccttgatcttactctgctttgtggggagcctaagaaaagtaagagttattagtgaatgagtggtattgaagtggcaagagtggaaaggtcacgaaaagaaagacagaaaagaggaagaggcttccaaagtgccaatatttactgattggataaagccaatcaagaaaactaagaaagggtgtccaaaggagagggagggagggagttgtcaaggaagccaagagaagagaatactgaaggagggagaagtcagttctgtcaaatgcttctgaagtaaaataaaaatgaatatcaaaaagtgtgcagtagatttggtatcatagaggtcagtgattcctgtagctgggaccascctattcttttatcaaaacacatgcttaaaagaatccatggaactgaaatcaatgacatgttcagattagaactctaggtattaataagctggataaagaaggtggttttaaatccccctggaatcacactatgttgggcgctctctatatgtgaggtcagttg

SEQ ID NO: 444503 - DNA, 487 bp, Homo sapiens
ctatatatattgctcccagcagtacataaagaacagtgttctgggagggcaagcaacaatagtaaattatggattgtaaaatgcaaatatggagagaggatttttctgctaggctttaatcttgaagggtttttaaagccttttaaaattatgtggctttctacagtcttgagcaagaatgacaaatagcctaattgtyaatatacaatgtacagaaggaagatggggcatggtagataaatagctgcaacttaataagaaacaaaataaaatgaaactttatatagaaaaagaagctgcaaagtagaatgctgttttcttagcttgaggtaaagctttatcaaacggctattaataattaattttttgtaaaatagatataggcctttcacgtgactcacattaaatgtaagatgctctttattgcagagatagctatagcactggcaaatagttacagttcataaaaataaaattttaaaaaggc

SEQ ID NO: 444504 - DNA, 614 bp, Homo sapiens
gtggatttgcaacatggttccatgaaatttctcacataggttaaactaagtagaagaggtgggaaatcactgtggtctgatagcatctgtattgccaactcatgaggttcgtcgttgtatttatgccttatgagctagaaagagatgttaatgattgtataggataccagtgaagttgctttcaaagcaattaaaagattttaaagcctctattgtgtgcaaggccctaagaggagggaaagggaggccaaaaaaatttactrtatgtctctgccctcaaggggcataaattctagttgaagagcaaaggcatgtgcacccttgtgtggcttcccccctcatttcatacaggcctcgctcaatcgtcaccttattagaaacccctgcccccagcacccttccctcaccatcgtgtagctttagcccaccttacttttcttcacagtacttatcacaatatgagataatatttatttatttgtttgctcattttctgtctcctctcactagaatgtaagctcaggagtaaaaaagagctttgtctattttgctcattgctgtgtgtccagtgccctggggactggccccttaataaacagttattgttgagtggg

SEQ ID NO: 444505 - DNA, 534 bp, Homo sapiens
gctttctttttccttttttagatctgttttttctgctagagtcaattctcattactaccactgttactgaagtgacaattgtacagatgggcctcaaaaatgtctgatggcattttgtagtatgcagaatcttatactcacagaaataatctttttatagatgttacagtcttgggaaatgaagatcacacaaattgaattgattacttgaggggaaaaaaagaaaatacataactgcttaatgtctcccagactctgaattacagaaaaaattttgttgaaacacaatgaaattatacygtgcaattcaatcacagaccaaatctttcagggttgttgttgccctgaaatccatcaataaaagcaatattgtttagttgcaaatgcaattttggagactaatgtgaactgtttcctaaaatagctatagcaacaaccaatttaattttctcataataatttctatttttttttttctgtagacatggtatcttggataacacctgacgataataacaaaggaactgtaattct

SEQ ID NO: 444506 - DNA, 623 bp, Homo sapiens
gtgtaattgataaaaattgtacacatttaagatatgcaacctgatattttgacatatgtatacattatgaaatgatcaccataatcaagctaattatcacatatccattacatcacaaagttaccattgttgtcttctttttcccttctcctcttcctcgtcctcctctcctgtctcctcctcctcatgtcaagaacagttaagagctatctatcttttaaccacatttcaagtatacaatacagcattgttaactgtagtcatgatgctctatatgaggtctctggaacttattcattttgcgtaactgaaacttcatactttttttttttaattgagatggagtttcgctcttgttgcccaggctggagtgcaatggcaccatcttggctcactgcaacctcygcctcctgggttcaagctattctcctgcctcagcctcctgagtagctgggattacaggcaacttccaccacacccagctaattttgtatttttagtagagatggggtttcaccatgttggccaggctggtctcgaactcctgacctcgatgatccgcctgccttggcctcccaaagtgctgggattacaggcatgagccaccgtgcctggccagtata

SEQ ID NO: 444507 - DNA, 524 bp, Homo sapiens
ctgtacccagacactatcttggaagggaagcaggaatggaagaccccttgagaaaaaaaaaaaaaaaaaaagagctttggaccaagattacactttgaccaggctccatttttgtccaaaagtgaagtccccctttagttagaaagtttaaatcatcctgccaaacctgcctgccatcagagaaaaaagtattcagcaacattgtgaatgtatggacaataaagaaaagaaacttttgtgttttgcactttggagaatcttgtgaattttcatcctattccaaccttctgaaaaataacagtttttcagaacagaacatttgcttcatagatacagttgtgtggctgctgcscctcccagtaacagcactaagctgaatgcttgacttcttggcagatacaaattctgtgccccacttcttacctcattactgtcaactttggagtcagaaatcctttgaaaaggctttgaaatttgacgccagtgaaaaacctgttctttacaagaaagtcatccatatgtta

SEQ ID NO: 444508 - DNA, 560 bp, Homo sapiens
aaacagaaatttaggagacctaaattccataaaaaatggtaagttttggctgggcatagtggctcacacctgtaatcccagcaatttgggaggttgaggcaggtgaattgcttgagctcaggagttcaagacaagcctgagcaacatggcaaaaccccatctctacaaagattgcaaaattagccaggtgtggtggtacatgcctatagtcccagctacttgggagggtgaggtgggaggatcacttgagctcaggaggcagaggttgcagtgagccaagttcatgccactgcactccagccagggcaacagcgtgagactctgcctcaaaaaaaaaaaaaaaaaaaaattttatcatgagctcagagttcccgagagcactgttattattcaaccaamtcatcaagaggtcatataaaatttctgggtcatataaggctcttgctttctcctgaaactaaacttgacctggagtaaaaaattggtttccttttttaaaaaagcgtaaacaaataaggatgagtgttacaggttgaatcatatccctccaaaaagatatg

SEQ ID NO: 444509 - DNA, 583 bp, Homo sapiens
catttaatttcttaatgcagcattgtgtaatagtttgtggacatctctgtcctccactatgatctgagatcctccaggacctccaaaaaggtctttcaagcaacattacctgcatatcctcaggtgcctagtagatctcttatcacatatttgatggttaagtgatggattattaagtaatacatgcatatattaatgagaggtaaatgaatggatgaatctaagaaaactgttcttgctacttttgtattattgtttgatggagttaggagttgctactaggctcggcactttgggaggccaaggtgggcggatcacttgggccagacctgattgggcaacatgatgaaaccccttctytacaaaaaacacacaaaaaattagccaggcattgtggcacgtgcctgtagtcccagctactagggaggctgaggtgagagggtcacttgagcctgggaagttgaggctgcaatgagctatgatcatgccactgcactccagcctgggcaacagactgagaccctgtcttaaaaaaaaaaaaaaaaaataggaaaaagaagttagtactaggggaattgatgag

SEQ ID NO: 444510 - DNA, 534 bp, Homo sapiens
actttacagcaatttttgcctcactccactgattctctattagataaacttcttcactacaaaatcttatatacttttgattgatgcccattctgtaatgttatctaccctccaaggtccctgggagacagagtattggaatctaacattcaagtcrtgcttgtctgcctagaggcttgcattcatcaaaggaagtaaggacataaagtacattaaaataaactctactacagcacaaatttctatatcatactattctacacatgatcttgattctaatcttcctttttctggaaattcagaacacctaagctaatgaaaaaatgaaaattataacaccaggagggaaaggggctcataggatatttgtcaaagggccatgcagcttttatgattagaaaagcatttacctctgtaacagtgaagattacatgagaccaccatttcatctgtcagtcaaactcagattggctctgtttcaaacttctgtagctaactcaaaatggaatggccactgttcccaagcaccacctg

SEQ ID NO: 444511 - DNA, 622 bp, Homo sapiens
ctaaaaaatgtctaaattagaaaaaaagtactaaaaatgttgaaggaaggaattaatgaagacaaaatgttaaaaaaaaaagctaataaattaggtaagaagaactacaatcaccatcacaacaaaaagttccattcagaaggaattaataaaggccaaatgtttaaaaaaactgatgaattaggtaagaagaactaaaatcactgccacaacagaaagttccatacaggccaggcgtggtggatcacacctataatctcagcactttgggaggccaaggcaggttgatcagttgaggtcaggagtttgagaccagcctggcttacatggcaaaaccccatctctactaaaaatagaaaaattagctgagtgtggtggcatgcgcatgtagtcccagatactcaggaggctgagatgggaggatcgcttgaaccygggaggcaccactgcactccagcttgggctacagagtgagaccctgtatcgaaaaataaattaaataaataaataaataaataaataatttttaaaaagttccatacagtgctggttctttatttttattttattattattctttgaattttaatttaggttcagtgagtacatatgcaggtttatt

SEQ ID NO: 444512 - DNA, 543 bp, Homo sapiens
tcccagatactcaggaggctgagatgggaggatcgcttgaacctgggaggcaccactgcactccagcttgggctacagagtgagaccctgtatcgaaaaataaattaaatmaataaataaataaataaataatttttaaaaagttccatacagtgctggttctttatttttattttattattattctttgaattttaatttaggttcagtgagtacatatgcaggtttattacatgtgtaaatggtatgttcctgaagcttggtgtacaaatgatcccatcactcaggtagtgagcatactactggataggcagtctttaactcaccttccctcccacttaccccctcaagcagtccagtgtctattgttcctatctttgtgtgcatgtgtattcagtttttagctcccacttataagtgaggtcattcagtatttgtttttctgtacctttgttaattcacttacaataatgacctcaagctgcatccatattgctgtaaaggacatgatttcattcttttttatggctgtgtggtattcca

SEQ ID NO: 444513 - DNA, 543 bp, Homo sapiens
tcccagatactcaggaggctgagatgggaggatcgcttgaacctgggaggcaccactgcactccagcttgggctacagagtgagaccctgtatcgaaaaataaattaaataaataaataaataaataaataatttttaaaaagttccatacagtgctggttctttatttttattttattattattctttgaattttaatttaggttcagtgagtacatatgcaggtttattacatgtgtaaatggtatgttcctgaagcttggtgtacaaatgatcccatcactcaggtagtgagcatactactggataggcagtctttaactcaccttccctcccacttaccccctcaagcagtccagtgtctawtgttcctatctttgtgtgcatgtgtattcagtttttagctcccacttataagtgaggtcattcagtatttgtttttctgtacctttgttaattcacttacaataatgacctcaagctgcatccatattgctgtaaaggacatgatttcattcttttttatggctgtgtggtattcca

SEQ ID NO: 444514 - DNA, 603 bp, Homo sapiens
caagtgctgggattacaggcgtgaggcaccgcacccggccttaagtacattttttgacatgtttttaacttattctgagtttkttggggacataattccattgtaatttgaggagcatctgtatattattatcttccatgtttctgtgtatcaagtgcaatctttgttctagcttcttgaacatttggaatatagtcataagtatcttaatatccttgtttactaattctagtatttgtatcatttctgggtcagtgtcagttgattgattttttcactaacagttgcattttctttttatttggatgcctggtaatgtctgattagatgccagacattgtgattcactcttattgtgggtgttttgttttctttctttttttaaatatttctatcaatatttgtgagatttgttctgggatatcttcaagttacttgaacacaatttgatccttttaagctgtgttatgtaggccggtactgcattcagtctagtatttattttttcccactactaaggcaagatatttcttagtatgctaactatgagccatgaattacacatttctcaagtcttgctaggaacggatgctgatcttggtc

SEQ ID NO: 444515 - DNA, 603 bp, Homo sapiens
caagtgctgggattacaggcgtgaggcaccgcacccggccttaagtacattttttgacatgtttttaacttattctgagtttgttggggacataattccattgtaatttgaggagcatctgtatattattatcttccatgtttctgtgtatcaagtgcaatctttgttctagcttcttgaacatttggaatatagtcataagtatcttaatatccttgtttactaattctagtatttgtatcatttctgggtcagtgtcagttgattgattttttcactaacagttgcattttctttttatttggatgcctggtaatgtctgattagatgccagacattgtgattcactcttattgtgggtgttttgttttctttctttttttaaatatttctatcaatatttgtgagatttgttctgggatatcttcaagttacttgaacacaatttgatccttttaagctgtgttaygtaggccggtactgcattcagtctagtatttattttttcccactactaaggcaagatatttcttagtatgctaactatgagccatgaattacacatttctcaagtcttgctaggaacggatgctgatcttggtc

SEQ ID NO: 444516 - DNA, 613 bp, Homo sapiens
caaattgtgggatatccaatactgtatataaaatgaattactactcaccaataaaatggaatgaactatttctatgtggatggactaatgtgaatgcatctcaaaataattcattgagattgagtgaatgcagccaaaccaagtaagtacatactgtgtgattctgcttacacataatcctagaaaatgyaaaataatctatagtaaaagaaagcagatagtggttaccttatgataggaatatagcaggtcaagaaggaaggataactgcagggcacaaggaaatttgggggggcatgatgggtgtgtttgttatcttgattttagtgatgacttatggatatatacatgtttgtgtgtgtgtgcgtgtgtatatatatacacatatatacaccatttatatcatacacacaattgagaaagtatataatttaaatatatattttatatgtcaattataccccaatacatctgttttatatatgtgtatgtgtgtatgaatatatataatcacacatataatagaaaagtgatataagttgtattaattatttctaagtaacaagtttccccaaatcttaatgtcttcaaacaacaaatatttattactaca

SEQ ID NO: 444517 - DNA, 611 bp, Homo sapiens
gaatgtaactctcaccttttcctcacatcagtttcatacttgtctttctaactacataaaaactaatttcagagtttaaaaaaaaatacttatctccaaattttaaaatggaaaagggtctctttrtaaaggacttttcttctttttctacttggtcacttagcacagccaaaaatatgcagatacaaaagtatgcaggtctcttatgctccaacgcaaaagaaaaaaataaaacactaaatacctccagccccaaactcagctcacattccacactgaaagggccttacactttgtgggtctcaactagagtggatcatatcctgataatctcaaactggccagggagatcagttctgaaatcaacttaaggatttcagttcattcaagggatttccctcgaatttggtttgaaaaagagtactattcagggagtgtcttttttttttgtttgtttgtttttcagacggagtctcaggctggaatgcagtggcgcaatctcagcctggatgaatctcagcctggagaatcacttgaacctctgcctcctgggttcaagtgattctcctgcctcagcctcctgagtagccaggattacaggttcacaccac

SEQ ID NO: 444518 - DNA, 592 bp, Homo sapiens
ttttttaaccttcccagttatttggcaaggtaggttatttatttatttaagacagggtctcactctgtcccccaggctggagtacagtggtgcaattatggctcactgcggcctcaacctcctgggcttaagtgatcctcctgcctcagccttccaagtagtggagaccacaggtacacaccactgtgcctggctaagttttttattttttgtagagatggggtcttgctttgtttcctaggctggtctcaaactcctgggctcaagtgattctcctaccttggcctcccraagtgttgggattacagtcatgagccatcatgcctggccattattattacctccattttactgatcagtaaactaagacttagaggaagaatttggatacaaatctggtaataactaggggtagaatttagatttgtgactattgactcataattctgtgtcctttacaatgtgccattttgctatttaattaatgtcattgatatttgacatctcctgattactttatctagatatgaaaattccagagaaaccactggattcataatatcttgatgaaattatctctaaatcctcacct

SEQ ID NO: 444519 - DNA, 467 bp, Homo sapiens
caatgcaaccaacagttgtttacttgaaataataaataagattgatagtcccatagctagaataataaagaaaaaagggaaaagattcaaataaacacagtcagaaatgacaaagagggcattaccactgactccacagaaatacaaacaactctcagagactactgcaaacacctgtatgcacataaactagaraacctaaaagaaatggataaattcctgaaatcatgcagcctcccaagattgagccaggatgaaattgaaccctgaaagaccaataacaaggtccaaaattgaatcagtgataaaaagtctgccaaccagaaaaatccctggatcagacaaattcacagccaaattcggacagatgtacaaagaagactggtaccattcctgctgaaattattcccaaaaattgagaaggaagaacttctctctaactcatttattaggccagcatcattctg

SEQ ID NO: 444520 - DNA, 636 bp, Homo sapiens
aaaaaaaacaaattagttgatcttgcctctccccagattttaggttctgtctacacaggaactgagcaatagatcttatgttatgacttattttggtaaaataaatggtcagcgtagcaagaaaatgagtttaattgaagtttttcctgccaaagattgtaggttccctcgtttatagatactgtatcatggaatttactttaggtagttttttttttyccttctctgtctctgaaaagaccttgcatagtagtaggcttattttggcttagtgattgtcagccctgacttgattactcattaaagtaacctggaaagctttaaaaatactgaggccaggcccctccccacagattatattgaattgaactgtgatggggctagagaattaggatgttttttgaagcagctggacttgtgagtcactggtagccacacgaaaatattatttattacatgcagttgtttgattgaattaaatttttgtctgaatttctgaccagttttgataaagtatttcatccagtaccccatgtgcatacagactcacttgtctactataagaggaaagtattgtgtgacatgttttcatgagtccctcacatttctgcacactttacgagcagacacagactg

SEQ ID NO: 444521 - DNA, 636 bp, Homo sapiens
aaaaaaaacaaattagttgatcttgcctctccccagattttaggttctgtctacacaggaactgagcaatagatcttatgttatgacttattttggtaaaataaatggtcagcgtagcaagaaaatgagtttaattgaagtttttcctgccaaagattgtaggttccctcgtttatagatactgtatcatggaatttactttaggtagtttttttttttccttctctgtctctgaaaagaccttgcatagtagtaggcttattttggcttagtgattgtcagccctgacttgattactcattaaagtaacctggaaagctttaaaaatactgaggccaggcccctccccacagattatattgaattgaactgtgatggggctagagaattaggatgttttttgaagcagctggacttgtgagtcactggtagccacacraaaatattatttattacatgcagttgtttgattgaattaaatttttgtctgaatttctgaccagttttgataaagtatttcatccagtaccccatgtgcatacagactcacttgtctactataagaggaaagtattgtgtgacatgttttcatgagtccctcacatttctgcacactttacgagcagacacagactg

SEQ ID NO: 444522 - DNA, 636 bp, Homo sapiens
aaaaaaaacaaattagttgatcttgcctctccccagattttaggttctgtctacacaggaactgagcaatagatcttatgttatgacttattttggtaaaataaatggtcagcgtagcaagaaaatgagtttaattgaagtttttcctgccaaagattgtaggttccctcgtttatagatactgtatcatggaatttactttaggtagtttttttttttccttctctgtctctgaaaagaccttgcatagtagtaggcttattttggcttagtgattgtcagccctgacttgattactcattaaagtaacctggaaagctttaaaaatactgaggccaggcccctccccacagattatattgaattgaactgtgatggggctagagaattaggatgttttttgaagcagctggacttgtgagtcactggtagccacacgaaawtattatttattacatgcagttgtttgattgaattaaatttttgtctgaatttctgaccagttttgataaagtatttcatccagtaccccatgtgcatacagactcacttgtctactataagaggaaagtattgtgtgacatgttttcatgagtccctcacatttctgcacactttacgagcagacacagactg

SEQ ID NO: 444523 - DNA, 508 bp, Homo sapiens
  misc_feature (1)...(508): n = A,T,C or G
gggaaaaaatagaacagagcattcaagaactagggatatctattccatattattaaacaatctagtacagatataattggaatctgagagacatatgtgaagaagtaatgtccaagaatattccagaagttaacaacagactggaaaccacaaatccaagaaaattggagaacatcaaacaaggaaaataaaacataacaacttgggtatataattgtcaagctattaaaaacaaaaggcttcttctccagatttctataygtttttaaggaattaaagganaggccttctgaagaaaccataaaagccattactttcttttgcaaggacaaaacttaagcaaagaactaactntaacatgaagaggaattgactgtcctcatataatgaaaagtaagatatattttctaatccagatatttctggattcaggaattaaatagtatcatcaggattgtgtgattctgttgctgacatctgcctttcaccctgctggggcccagaaacc

SEQ ID NO: 444524 - DNA, 619 bp, Homo sapiens
cttagcattagaactatgctataaaaagccattttgattatttttttaatcgcaaagaatctgtttaagctctatgaaaaacactagagaagacatgttctaaggataaaagtgtttagggtcctataatctggacatccagacccatgttaaatctgacctagaggcctattaaaaagcctccagaagcagacaacttccagtagacatattccttcaagagtctacatatcaggaagatttcattaaaagtatattcagtcatatgaagctttcactcaagatatttcaggtaaaacttcatgatcagaaaaacatgcccttattttgattctattttatcacttggatacccctctttktctcacttttttcgttttttcttagttcaaggtattaggctatgaaaattgaaatcccagtcatttttctcattttcttgactaatttcattctgataaaccctgtgaactcattgcaactttccagaatattactaatgctaaagcatctagacgttatggctaaaatgcaggtcctcaaaattagctgcagttgctgatatttttttagagcctcatgagaaagataatggcatatggaattaatgataaattat

SEQ ID NO: 444525 - DNA, 619 bp, Homo sapiens
cttagcattagaactatgctataaaaagccattttgattatttttttaatcgcaaagaatctgtttaagctctatgaaaaacactagagaagacatgttctaaggataaaagtgtttagggtcctataatctggacatccagacccatgttaaatctgacctagaggcctattaaaaagcctccagaagcagacaacttccagtagacatattccttcaagagtctacatatcaggaagatttcattaaaagtatattcagtcatatgaagctttcactcaagatatttcaggtaaaacttcatgatcagaaaaacatgcccttattttgattctattttatcacttggatacccctctttttctcacttttttcrttttttcttagttcaaggtattaggctatgaaaattgaaatcccagtcatttttctcattttcttgactaatttcattctgataaaccctgtgaactcattgcaactttccagaatattactaatgctaaagcatctagacgttatggctaaaatgcaggtcctcaaaattagctgcagttgctgatatttttttagagcctcatgagaaagataatggcatatggaattaatgataaattat

SEQ ID NO: 444526 - DNA, 510 bp, Homo sapiens
gggacactttcctcatgccaaatgcctgccatgtaggtattacaccattgtaatagacagagctgcatgcagacatcctagagaaacaggtcatgctgaagctggcctacttcaagaggttctactgtgactgtcacagtagataaggcatgggacctggacagggaaaaagagcagctgaataatgttaamagtggtggtaactagggtaggatgcaatagtccacactagttatttgtataaattttatattacaattttaaatcaatacctttcctcctctgcacctacaacttgacaatgactgattttttaatgtttctagaatttggccttttccagaatcccttatcattaaaatcatacagtatatcatctttcagactggcttccttcactgagcagtgtgcatttaaggttttgccatgtattttcatggcttgatgattaacttttttattgctgactaatatttcagtgtgtacataccaagtttgtttacccttaca

SEQ ID NO: 444527 - DNA, 584 bp, Homo sapiens
atcattaaaatcatacagtatatcatctttcagactggcttccttcactgagcagtgtgcatttaaggttttgccatgtattttcatggcttgatgattaacttttttattgctgactaatatttcagtgtgtacataccaartttgtttacccttacacaatttgaatgatgattggttccttccaatttttggcaattatgaatcaagctgcaataagcatttatatgcagcttttgtgtggacatgtattttcaacccatttaggtaaatacctaggagtgaaatcgttgaatcatttggcaagactcaaactgtgttccaaagtggttgcatcattttgcattcccaccaggaatgaatgacagcttctggtgctccatatccttgtcagaaattggtattgtcaggttttttttttattatacccattctaataggtgtatagcttcttgatactgttttaatttgtaattaactaatgacatatgatgttgagcaacttataaatgtttatttgccacatgtataacatctttggtgagatatctattcagatcttctgtttcctttttttaatttta

SEQ ID NO: 444528 - DNA, 557 bp, Homo sapiens
gaatttggccttttccagaatcccttatcattaaaatcatacagtatatcatctttcagactggcttccttcactgagcagtgtgcatttaaggttttgccatgtattttcatggcttgatgattaacttttttattgctgactaatatttcagtgtgtacataccaagtttgtttacccttacacaatttgaatgatgattggttccttccaatttttggcaattatgaatcaagctgcaataagcatttatatgcagcttttgtgtggacatgtattttcaacccatttaggtaaatacctaggagtgaaatcrttgaatcatttggcaagactcaaactgtgttccaaagtggttgcatcattttgcattcccaccaggaatgaatgacagcttctggtgctccatatccttgtcagaaattggtattgtcaggttttttttttattatacccattctaataggtgtatagcttcttgatactgttttaatttgtaattaactaatgacatatgatgttgagcaacttataaatgtttatttgccacatgtata

SEQ ID NO: 444529 - DNA, 584 bp, Homo sapiens
atcattaaaatcatacagtatatcatctttcagactggcttccttcactgagcagtgtgcatttaaggttttgccatgtattttcatggcttgatgattaacttttttattgctgactaatatttcagtgtgtacataccaagtttgtttacccttacacaatttgaatgatgattggttccttccaatttttggcaattatgaatcaagctgcaataagcatttatatgcagcttttgtgtggacatgtattttcaacccatttaggtaaatacctaggagtgaaatcgttgaatcatttggcaagactcaaactgtgttccaaagtggttgcatcattttgcattcccaccaggaatgaatgacagcttctggtgctccatatccttgtcagaaattggtattgtcaggttttttttttattatacccattctaataggtgtatagcttctygatactgttttaatttgtaattaactaatgacatatgatgttgagcaacttataaatgtttatttgccacatgtataacatctttggtgagatatctattcagatcttctgtttcctttttttaatttta

SEQ ID NO: 444530 - DNA, 584 bp, Homo sapiens
atcattaaaatcatacagtatatcatctttcagactggcttccttcactgagcagtgtgcatttaaggttttgccatgtattttcatggcttgatgattaacttttttattgctgactaatatttcagtgtgtacataccaagtttgtttacccttacacaatttgaatgatgattggttccttccaatttttggcaattatgaatcaagctgcaataagcatttatatgcagcttttgtgtggacatgtattttcaacccatttaggtaaatacctaggagtgaaatcgttgaatcatttggcaagactcaaactgtgttccaaagtggttgcatcattttgcattcccaccaggaatgaatgacagcttctggtgctccatatccttgtcagaaattggtattgtcaggttttttttttattatacccattctaataggtgtatagcttcttratactgttttaatttgtaattaactaatgacatatgatgttgagcaacttataaatgtttatttgccacatgtataacatctttggtgagatatctattcagatcttctgtttcctttttttaatttta

SEQ ID NO: 444531 - DNA, 584 bp, Homo sapiens
atcattaaaatcatacagtatatcatctttcagactggcttccttcactgagcagtgtgcatttaaggttttgccatgtattttcatggcttgatgattaacttttttattgctgactaatatttcagtgtgtacataccaagtttgtttacccttacacaatttgaatgatgattggttccttccaatttttggcaattatgaatcaagctgcaataagcatttatatgcagcttttgtgtggacatgtattttcaacccatttaggtaaatacctaggagtgaaatcgttgaatcatttggcaagactcaaactgtgttccaaagtggttgcatcattttgcattcccaccaggaatgaatgacagcttctggtgctccatatccttgtcagaaattggtattgtcaggttttttttttattatacccattctaataggtgtatagcttcttgatactgttttaatttgtaattaactaatgacatwtgatgttgagcaacttataaatgtttatttgccacatgtataacatctttggtgagatatctattcagatcttctgtttcctttttttaatttta

SEQ ID NO: 444532 - DNA, 528 bp, Homo sapiens
  misc_feature (1)...(528): n = A,T,C or G
tgaatgtgtacaaatcccgggatggactaatggaatatagagaccactctcagaactcctgagagggtgacaggtttagctcaggcttcttactggacacacttcccccycttctccctggtacttaccccgatgaagaggcctcaagcctagctgtgcgtcccctcttcccaactgatgcctcgtgcccctagcttgcagtctgatccatgcctgctgcactggcaaggtgactgccaccattccgtgcagctcctgagctcagcaggaccctgaggagagaagaacagacgtaagccaggatcactggagccagcggtaaggcctgtcaccaattataggctaatagtacactccaggacatccttctcccatgtgagaggctcttcangaacagaaagggtaggcttggggtccagggcacagatggcagagttgggctacctaaagagtcaaagaggcaggtcttggctcagtatataaggatgtgacaagtgagttgaggtagaataactactgtcaggggcc

SEQ ID NO: 444533 - DNA, 661 bp, Homo sapiens
ggcgtggaaagggggcacactgatacaggagttaagaagaactcacttaggcagataataagggtacagaagtccttggtaaggttttccttttaataagaagcagscccaaatcattttctaacaaagagcagcctgtaaaatcaagctgcagacatacatgctggcaggtgtgccaatcatgttcaaaatagtggctccatcttcccttctctgtcagccatgtgtatagtaaggagcagacaagatggcatcagccaaggggaaagttccatttgcattaaaaagattagggtggggtggccagccttccctgagtactatgtaaagctcacacctgattgaaccaatttgtgagccctatgtaaatcagacactgcctccttaagactataaaatccggcacatccgccgccagtccaccttttgctctcagaattcccctctcacactagagagagagctgttttcctttctttttgtttctctttctcttgcctattaaacctccattcctaaactcctcgtatgtgtccgtgtcctaaatttttctggcacgagatgacagacgctgggtatttaccccagacaacatagccaatcatgtcagggtgctcactcaggataccaaggtacaacgctcatcaaaacggtgagtaga

SEQ ID NO: 444534 - DNA, 547 bp, Homo sapiens
tggctacaggcctccatcttgtttcatgtacttggaaacatgacgtgtaaccacgtggcartactttgttttagtctctgccattttacaacggtgggtgtcttgtgctaagttagttcccggggaagggccaaaaatcagataagccagtttatcaatctaggcagagccagctgatccatcaagggcagagtttacaaaatatcttaaatactgatcttgggcagttaagggaggataaaatcttgtagcctccagctgcgtgactcctaagccatggtttctcattttgtggctagtttcttggtctggtccccaggcaagagggaagtatatcttaggaaggggctgttaccacctttgttttagactatacactgtaaaccagacacctcccaaagttggttcagcctatgcccagtgatgagcaaggacagcttaggggctaaaaacaaaatggagttggttgggtctgatctctttcactgtctcagtcacaattttgcaatgagagtttcaaaagttacttatcacccctttgaaaata

SEQ ID NO: 444535 - DNA, 547 bp, Homo sapiens
tggctacaggcctccatcttgtttcatgtacttggaaacatgacgtgtaaccacgtggcaatactttgttttagtctctgccattttacaacrgtgggtgtcttgtgctaagttagttcccggggaagggccaaaaatcagataagccagtttatcaatctaggcagagccagctgatccatcaagggcagagtttacaaaatatcttaaatactgatcttgggcagttaagggaggataaaatcttgtagcctccagctgcgtgactcctaagccatggtttctcattttgtggctagtttcttggtctggtccccaggcaagagggaagtatatcttaggaaggggctgttaccacctttgttttagactatacactgtaaaccagacacctcccaaagttggttcagcctatgcccagtgatgagcaaggacagcttaggggctaaaaacaaaatggagttggttgggtctgatctctttcactgtctcagtcacaattttgcaatgagagtttcaaaagttacttatcacccctttgaaaata

SEQ ID NO: 444536 - DNA, 554 bp, Homo sapiens
tgcacctcatggtcaaattggttaaaattagatggaatcatctataaggtttcatttcaacaaactggggctaacattaatwaactaatgcaagggtaaattttgactttgaataggattttcatgtaatagtaaaggttaatagaaggtttttgccttttgagtcattttggcaaaataagcaatttatggcgatctgaaattctatttcataacatcaagtattttaaacctctgacatttaacaggtgtcccaaaatcaaacttcaagtttcaaaattgtctttcctgatgcctggctttctggatggttcagaggcccctgaaaaatccagagaagaggtacacagtattatttggcatgttttgtcacataagattgccaaaatgatgtccgatattctttaagttatattttggtgaatactaatatatgttccaaaattgcatgtgacttctaaaattctaatgtctaagtatatgctatcaattataattaaggttaaagttattgtaaatcacagagataactaaacttatttgtcagtcttgct

SEQ ID NO: 444537 - DNA, 554 bp, Homo sapiens
tgcacctcatggtcaaattggttaaaattagatggaatcatctataaggtttcatttcaacaaactggggctaacattaattaactaatgcaagggtaaattttgactttgaataggattttcatgtaatagtaaaggttaatagaaggtttttgccttttgagtcattttggcaaaataagcaatttatggcgatctgaaattctatttcataacatcaagtattttaaacctctgacatttaacaggtgtcccaaaatcaaacttcaagtttcaaaattgtctttcctgatgcctggctttctggatggttcagaggcccctgaaaaatccagagaagaggtacacagkattatttggcatgttttgtcacataagattgccaaaatgatgtccgatattctttaagttatattttggtgaatactaatatatgttccaaaattgcatgtgacttctaaaattctaatgtctaagtatatgctatcaattataattaaggttaaagttattgtaaatcacagagataactaaacttatttgtcagtcttgct

SEQ ID NO: 444538 - DNA, 559 bp, Homo sapiens
ttgtcagtcttgcttttaactataactaccttggaaattttgtcattcgcagacaattgttgtcttgctttgttctttctcaaaagatggtttataatcaagctacaggactttaacaggtgttctcaaatgtgagtttttttaatagctttaaagattgtaacacggaataaagaaaaaaagtacaggactatgaagaactaaaatgctcatgtatatcaagcaaaataagagttaactaaatggrctgcactcacaaagctaaagcaaactttctgacttttgcttggaatattgctgatccttgttttgtttttcagagtcaatgaaacttattttgaactacttatggcctttaataattgagtaagttatactcttgtgaacaaaatttggagtatgtttgtttctctctgcctagttcctctagaatttggaaactatttaaggagtcaatctagacttgcagagccaataaaagccccatgagaagaactggcctcatacccttacctacacagtccccgtccagggtttctgacctgtagtcagtaaagaa

SEQ ID NO: 444539 - DNA, 529 bp, Homo sapiens
gccaccattttttttttttttgtattttaatagagatggggtttcatcatgttaggccagactggtctcgaactcctggcctcaagtgatccgcccacctcggcctcccaaagtgctgggattacaggcatgagccagcatgcccagcctagaattttattttcggattatagagagttcttttaacagctgcaaactagcgggatttgagaaaagctgtagcaagagcccaragtgaagctcggggttggaagaacattcttgctaaataaatcagggggattctctttggatgcaatgaggtgcagcacccagagaacaacttggcagaatttgagaactgtcctgcaagacataggacatagtagttggttgtactagtggcagaccattttctagtgtaccaaaggaagctacacagagctgacatatactctaggaggaagcaggactattctagtgcaaggcaacaatgtggccacaccagatcttaacttgacatagcatcttagccaactacaaataatat

SEQ ID NO: 444540 - DNA, 630 bp, Homo sapiens
cttgcttaaaatcatgaaacatagaaaaacaaagataaaggattttaaaattagttacatctgtgaaataagaaaaataagggtccctatcaaggcactagagaaaattttttgaatgaaaataaaagagaaaaactcaggacactaatatggaaagaaatgccattgttttgtttttgtttttttgtttgttttttgaaacagcgtctcattctgttgcccaggctggagtgcagaggtgtgatcaagcctcagtgtagccttcacttcccaggctcaagtgatcctcccatctcagtcagcctcctgagtacctgggactacaggtacctgctgaaacagatccagcattttttttttttttttaaagacagggtctcactgtgtttactaggctggtctggaactcctgggttcaagcaatcccaccttggcttcccagagtgctgggattacaggcgtaaaccactctgcctggccaaaactctgtatctttttcccctaacgctggtcacccacttaaytgatttcagaactaatgaacaaaagcaaaaacaaaaacaaacactgctacaattttaaaaaacactgttgtagagtatgtaatttacaatttacagattaaaactc

SEQ ID NO: 444541 - DNA, 549 bp, Homo sapiens
tctccctaagacctggaatgaggcaaggacatttctttactcmcctttaactggaagttctaaatggtacgatgaggcaaagaaataaaaaaaggattatctgaaaagattaaaaaagaagtaatagaactctctattcacagaaaacaactctctatatagaaaattccaaagaatctattaaaaaatatcctaaaactaataagtgagtttaccaaggatacaggatgcatgattaatatacaaaaataaattctattttctctaccctagctattagaatttaaaatttaaaaaagaacacacggacataagaaatatttaggttgaagttcagcaaagatatatgtggggtctttatggtacaaactacaaaacactgataaagaagccaaggaaaaaatataaataaatcgaaagatatacctgatttatggattggaagtctcaatattgttaaaatgtcagttctccccaagttaatctattaaaacttcagttaaaatcccaacagagcatttaggtttttgtagatattgaggttttgta

SEQ ID NO: 444542 - DNA, 549 bp, Homo sapiens
tctccctaagacctggaatgaggcaaggacatttctttactcacctttaactggaagttctaaatggtacgatgaggcaaagaaataaaaaaaggattatctgaaaagattaaaaaagaagtaatagaactctctattcacagaaaacaactctctatatagaaaattccaaagaatctattaaaaaatatcctaaaactaataagtgagtttaccaaggatacaggatgcatgattaatatacaaaaataaattctattttctctaccctagctattagaatttaaaatttaaaaaagaacacacgkacataagaaatatttaggttgaagttcagcaaagatatatgtggggtctttatggtacaaactacaaaacactgataaagaagccaaggaaaaaatataaataaatcgaaagatatacctgatttatggattggaagtctcaatattgttaaaatgtcagttctccccaagttaatctattaaaacttcagttaaaatcccaacagagcatttaggtttttgtagatattgaggttttgta

SEQ ID NO: 444543 - DNA, 600 bp, Homo sapiens
cctctctcttacctagaaattgaaattaacattyaactctcaggtctccaagtccaaagtaaagaggagcaaggagctctttggctggatatcgaaagctaggattacttcctcatctatgtagtcaacaacatctattgagtgcgtatgataaggctaagctgagcacatatgtacaatgctgagtgttggggatatagggacactgaatatacccccgaagagcttactttctgatataatagatagtacatagtatgcatacacacacatacacacacacacataccacacacagatataaatgaagttttgtaccaggtactataggagcagttgaaggaggaggggaagttgggagttccttcatggttcatcaaagactttactgaagaggtgatgtttgaactgcataggtagtggtgagattgggcactagaaaactgcttcaaaggtagcaagagaaaaatctagagctactcttggcactatccaatagaaatatgatgtgggccacaaatacaggtcacatatgctatttgaattttttagtacccacattaaaaagtaaaaagaaatgtatgaaattaatttttaaat

SEQ ID NO: 444544 - DNA, 620 bp, Homo sapiens
tatcatactgttttaactttacaactttatgttttaatatctgaaatggcttatcactcttattttcagaaactcccttgcttttttgttgttgttatttgttttttgttgttgttgtttttttgaaatggagtttttgctctgtcacccaggctggagtgcagtggctcactgcaacctttgctttatggactcaaccaattctcctgccttagcctcctgagtagctgggactacaggtgcacgccaccatgcctggctaatttttaagtttttagtagaracggagtttcaccatgttggccaggctggttgctgtctgtttagtttttaatatgaactttagaatctgccaatttccaacaaaacctggttggtatttttattgggattgtattaaattaatagatgaatttagaaagaattaacatctacgtgatgttttgtcttcctgcaaacgtgatgtaccctcccatttgtttacatttttttgtttctctcagtagtgtgtttaaagttttcttcatataaatcatgcccatttcctgttaggtttgttcttagattgtttatctttttttattgctactatagagtttttttttccattatgtttactc

SEQ ID NO: 444545 - DNA, 620 bp, Homo sapiens
tatcatactgttttaactttacaactttatgttttaatatctgaaatggcttatcactcttattttcagaaactcccttgcttttttgttgttgttatttgttttttgttgttgttgtttttttgaaatggagtttttgctctgtcacccaggctggagtgcagtggctcactgcaacctttgctttatggactcaaccaattctcctgccttagcctcctgagtagctgggactacaggtgcacgccaccatgcctggctaatttttaagtttttagtagaaacggagtttcaccatgttggccaggctggttgctgtctgtttastttttaatatgaactttagaatctgccaatttccaacaaaacctggttggtatttttattgggattgtattaaattaatagatgaatttagaaagaattaacatctacgtgatgttttgtcttcctgcaaacgtgatgtaccctcccatttgtttacatttttttgtttctctcagtagtgtgtttaaagttttcttcatataaatcatgcccatttcctgttaggtttgttcttagattgtttatctttttttattgctactatagagtttttttttccattatgtttactc

SEQ ID NO: 444546 - DNA, 523 bp, Homo sapiens
aaattatttgaactgaacaataataggaacacaatctatcaaaacctctgtgatacagcaaaagtgatgctaagaggaaagttcatagcattaaatgcctacatcaaaaagtctgaaagaccacaaatagacaatctaaggtcacacgccacagaacttgggaaagaagaacaatccaaaatcaaacccagcagaataaaagaaataacaaagatcagagcagaactaaatgaaactgaaacaaamaaacaaacaaacaaacaaatacaaaagataagtggaacaaaaagctagttctttgaaaagataaacaaaattgatagaccattagcaagattaaccaagaaaagaagagaaaatattcaaacaagctcaattcgaagaaaaatgggagatattgcaactcatactacagaaatacaaaagatttttcaaggcctctatgagcacctttacgtgcatgaactagaaaacctagaggagatggataaattcttggaaatatacaatcctcctagattaa

SEQ ID NO: 444547 - DNA, 521 bp, Homo sapiens
ctttgccctctagtgtggctcactkgttctccttttgatgtgacatggattctacttggaacagatggatccattttttctgttctgatagatttatctgtgactgcagaacatcccttacttctctgggacattcacagtggccaccgacattaagatctaggttaataaatgcttgtaaaatcatcatgacttgtaagaagccaagcttgaagatgggatagaaagaaaactgccaaagtacaacacaactgccaatgctgccagttgaatggcgaacaggagggatgccaagcaattcactgctcggccagcagccttgagtaggaaaagtgtggacaaggaaaagttgcaatccaagctcatggaaatcaagcttagtgggaccacaattacccttcatgggttgtatatgggtgctcgcaaaagttcttatgccacattgcacatgccaggatttgattgcaactacatattcaatgactaccttccttttggggaaagacacgtatgttattgct

SEQ ID NO: 444548 - DNA, 521 bp, Homo sapiens
ctttgccctctagtgtggctcacttgttctccttttgatgtgacatggattctacttggaacagatggatccattttttctgttctgatagatttatctgtgactgcagaacatcccttacttctctgggacattcacagtggccaccgacattaagatctaggttaataaatgcttgtaaaatcatcrtgacttgtaagaagccaagcttgaagatgggatagaaagaaaactgccaaagtacaacacaactgccaatgctgccagttgaatggcgaacaggagggatgccaagcaattcactgctcggccagcagccttgagtaggaaaagtgtggacaaggaaaagttgcaatccaagctcatggaaatcaagcttagtgggaccacaattacccttcatgggttgtatatgggtgctcgcaaaagttcttatgccacattgcacatgccaggatttgattgcaactacatattcaatgactaccttccttttggggaaagacacgtatgttattgct

SEQ ID NO: 444549 - DNA, 521 bp, Homo sapiens
ctttgccctctagtgtggctcacttgttctccttttgatgtgacatggattctacttggaacagatggatccattttttctgttctgatagatttatctgtgactgcagaacatcccttacttctctgggacattcacagtggccaccgacattaagatctaggttaataaatgcttgtaaaatcatcatgacttgtaagaagccaagcttgaagatgggatagaaagaaaactgccaaagtacaacacaactgccaatgctgccagttgaatggcgaacaggagggatgccaagcaattcactgctcggccagcagccttgagtaggaaaagtgtggacaaggaaaagytgcaatccaagctcatggaaatcaagcttagtgggaccacaattacccttcatgggttgtatatgggtgctcgcaaaagttcttatgccacattgcacatgccaggatttgattgcaactacatattcaatgactaccttccttttggggaaagacacgtatgttattgct

SEQ ID NO: 444550 - DNA, 580 bp, Homo sapiens
ctagtaaatcttggtctaaaattcggcaggaaaaaggaaggcaaaggggcagtgctcacatacccagtcatgaaagtttctatcagctttgcacaagctaaygtgagattaaatgtaaatactttcaaaaagagatgaaactataaaagaaatgaacttaatggtaagcatcatgggttaagagaaaagctaaggtattcagtctctgggcagcacctctgagttccacacttaaggatttcttctgaaataaaacttgatacccgaagccttatttgctcacatttcatttgggaaagggttggcagcaagatataaaaatgaggtcctgtctcctgtgaagtaggagagatggctgggagctgaagaacccattgggaaacgaagaagataccttgcaatagtacatgggaaggtgacagacaaaacctcttgccccttttcatctagagtagtggttctctaacttgagtcggcatcagagttaactggggccttgttaaaacaatctggccaggcgtggtggctcacgcctgtaatcccaacactttgggaggctgaggtgggcagatcacttgag

SEQ ID NO: 444551 - DNA, 385 bp, Homo sapiens
gtccagctgttaaagaatacatgaagatccctgcctcaatcagttattacattgagagctgcaaaattattttttaaatttgagaatcttttcaacatttattaactggacttctgtaaaagaggagtttcctttcttcttccacctttatttctctctctctctctctctctctctctctctctctccccttcactcyctttctctctctttgtggcacaagtcatctcaggctcatcttgtgctttctctgccccagatctaaagtcagccatttctcgagggatccctggttccttttagtgggaatgacacttagaagccaaaatctgggcactggttgtgctcaggccatttcagcaagcaaagctgggagatgcgttgt

SEQ ID NO: 444552 - DNA, 492 bp, Homo sapiens
cgacctccaattaccacacccactggccgctttttcatcyggtcccctcaagtgggattttgacaaccttcctcccctggcttctgcgcctgtgtgccctgccctgttttcctttgcttggcaccaactattctcctcttgttaggactatgtgtgtgtaaatgacatttttcaagattctctttttgatatttcacactctcttgctatgctcattcaccccttggtggtgtcatcctctttcatgacttgagaactgggccaaatcagttaattttttatttttatctatctatctatctatctatctatctatctatctatctatccatttatttcatcagttgctattgcttcaggatcggccaaatcagttaagagtgatctctaattcccaaatctacttagaactcatctcctgaggtgtaggcccctgttttcaactgtgcactcagatatggcatttggggtgtcaaaattaatatttcccaa

SEQ ID NO: 444553 - DNA, 492 bp, Homo sapiens
cgacctccaattaccacacccactggccgctttttcatccggtcccctcaagtgggattttgacamccttcctcccctggcttctgcgcctgtgtgccctgccctgttttcctttgcttggcaccaactattctcctcttgttaggactatgtgtgtgtaaatgacatttttcaagattctctttttgatatttcacactctcttgctatgctcattcaccccttggtggtgtcatcctctttcatgacttgagaactgggccaaatcagttaattttttatttttatctatctatctatctatctatctatctatctatctatctatccatttatttcatcagttgctattgcttcaggatcggccaaatcagttaagagtgatctctaattcccaaatctacttagaactcatctcctgaggtgtaggcccctgttttcaactgtgcactcagatatggcatttggggtgtcaaaattaatatttcccaa

SEQ ID NO: 444554 - DNA, 566 bp, Homo sapiens
atctctctaaaaatactggctgtctttattcacttaattctctttctgcaacttgtattacatgtatttagatattttcattttatccgaatatctctttcttaaaaatatattttattgatgtaaaaattcacataaaattaaccatttaaaagtgaaattcagtgaaatttagtacaatcacaatgttatgtaaccaccacctctatctagtaataactattttcatcattctgaaagaaagccttatacacattaagcaattggtctccattctctcatccccctagaacctgacaaccagcaatttgctttatgtctctatggatttacatattctgagtgtttttgcatttttttatctgtgtgccacatgttgtatgacttcttcaaatttacttcccagttcactgattctctaatcagctgtgtctaaatcaggtgatacctagctgctgagtttttcatttcaattactaaatttgtttctgtttygttttgttttagagatagagtcttactttgtcaccatggctggagtgcagtgacacaatcatagctcactg

SEQ ID NO: 444555 - DNA, 631 bp, Homo sapiens
tctgcgttagtgattcctttgcttttctttatagatttccaactcatgtttgtatcctcaaaaaatgcatcgctccgttttgactgagtagcaaacaagtaaattgctgtcctgggagaagaaattcaactgaatctctgggtttagattccccggatgtgtaagagcatcccttctggaaaggtcagggacaaggccattgttgaaacctggaaacgtgggagcacatcactgaggcatccatttgtggagcaggatctgggttcagcagtgaatggtcaggcaagtaggctacccagaacttcctgggtctaaacttaacataatctaccttcagctcccaagagtaagtcaaagaacatttctgtgagggtgaaatgaggattctcagctgatccaagtggtaggtcatggaggagaaagaagaaacctcagtaccgggacaagataagataayataaatatatatgttatacatattaaagttttaaattatacataaaactttatttaaaaattttaatgtatgttttatatatatttaaagtttttaattatatataaaagtgtttttcttcctgaatggtctctattttctccaagttgattcttttctgtttgtttcagtttt

SEQ ID NO: 444556 - DNA, 527 bp, Homo sapiens
ggtagaaccctcattttccggatccactgctctcttcagagtgggcaggcaggaatgtttaagtctgctgaagctgcgcctacagcctccccttcccccaggtgctctgtcccagggagatgggtgttttatctataagcccctgactgaggctgctgcttttctttcagagatgccctgtccagagaggaggaatctagagaggcagtctcgctttgccgcactgtgttgagttctgcccactctgaacttcctggtctccttagcactgtgagggggaaactgcctactcaagccttattaatggccgacgcccctccctgcaccaagctcgatcgtcctaggttgacttcagactgctgkgctggcagcaagaatttcaagtcagtggttcttagcttgctgggctccgtgggagtgcaacccactgagcaagaccacttggctccctggcttcagcaccttttccaggggagtgaatggttctttctcggtggcagttccaggcgccactggggtggggtggt

SEQ ID NO: 444557 - DNA, 447 bp, Homo sapiens
agttggaaatgcaggaatcacccgccttctgcgttggtctcactgggaactgcagaccggagctgttcctattcgaccatcttgccggatctcctggactcttttaaacgtgcttgaataataatttttaaaaaatttgaacacttggatcgaaaagtaggaaatcctttctcttacattatacctattgataatttggtgttcttacacaaagggttagggcattgtgttatgaaaactgtaattaaaaaccacaattacttttgcaccaacckaataaaatgttaacacatctaatctcctctgagaagaaatgtatttcattgtttttacttatgtagcccgatagtgtgaaagatgccaatttatagaataagtcatctaagtatacttagaaaataaaataacaacttgaactgacctctggattgcctccagaaagagtca

SEQ ID NO: 444558 - DNA, 588 bp, Homo sapiens
tcatctaagtatacttagaaaataaaataacaacttgaactgacctctggattgcctccagaaagagtcaactttgtgtactaaacaaatgtcatcttaagtcagaaagtggtctgaacgaggcttttgtttagcctatgtgcattgtaatattctagtgatttgtttgctttaaaaagtggggtgggaataagttcttttgtgctgattatttttcctggggttcacaatmgggaaaatctctttcctttttttttttttttggacggattatcgctctgtcacccaggctagagcgcagtggtgcgatctcggctcactgcaacatccacctaccagggtcaagtgattctcctacctcagccccctgaatagctgagattaaaggcgcatgccactatgcccagctaatttttctatttttagtagagaccatgctggtgaggctggtctcgaactcctcacctcgtgatctgcccaccttggcctcccaaggaacatttcttaatttaggagtttctttcttaacttctcatcgcatgagtttgatttcagtatgttatctgttagataaataatcattactgt

SEQ ID NO: 444559 - DNA, 559 bp, Homo sapiens
tttatatttataatctattagtattctaatctgtggatggattacaaattaactagtcccctcctcacattgaaactatagattgcttctaattcttctatatatacagcattgactattcttcyatgtaaaccttcatgtgcatctctaattaggatagatttctagtaacggaattactagatcaaaaagcatgaacaaatttaagggatggatcatagtgattagaaagtcaaacctgtgtgagaatcaccacttgagttgttttggattcccatatatatgtaaaaacacatggtatttgtctttctgtacttgacttatttcacttagcataatctccaattcatccatgttgtcacacatgacaaaatttccttctttttttctcctttgttttggaattactatagctttgtagtatagttttaaataaggtagtatgattcttccagctttgttctttttgttcatgatttccctagctatttggaatttttgtgtgtatgtgtgtgtggttccatatgaattttaggattttttttctatttctatgaaa

SEQ ID NO: 444560 - DNA, 432 bp, Homo sapiens
tattagttcttctttatatgtttggtggaattcagccatgatgccatccggtcctgagcttttctttgattggaagttttttatgactaaatttccttactcataattggtctgttcagacttcctatttctccctgattcagctttaaaaggttgcgtgtgtytagcaatgtattcatttcttctaggtgatccaattttttggcatatactagttcacaatagtctcttatgatcctttgaaatatggtgtcagttgtaatgtcataatgtctcctcttttatttctgattttacttatctgagtctgccctttttttcttaaagagtctagctaaagatttgttgtttttatttattctttctaaaaacaaaaactcttagttttgttagtcttttgtattgcttttctcatgtctatttcattttttt

SEQ ID NO: 444561 - DNA, 567 bp, Homo sapiens
taactttgttctctttgtcttgaagaaataggggtatgtgtttatacctggagttcagtatgatcatatgactgagtgcttatgaatggactatgagcagccgtgtgtgtctgtcatttccaggtctggcctacaaaaactttgcaggccaggcgtggtggatcatgcctgtaatcccagagctttgggaggccaaggcaggtggatcacgagctcaagagctctagaccatcctggccaacatggtgaagccccgtctctactaaaaatacaaaaattagcttggcataatggcaggtgcctgtagtcccagctactggggaggctgaggcaggagaattgcttgaacccagaaggtggaggttgcagtgagccgagatcgcgccactgcactccagcctggtgaaaaagcgagactccatctcaaaaaaaaaaaaaaaaaaaaaaaagcagcaaaaaaaaaaamaaacaaactttgcaggcatgctcagacatgctcgtttcctcttctggatgattgaggtggcaaccctcaggaaagctacatgttaaggaggactaccatca

SEQ ID NO: 444562 - DNA, 514 bp, Homo sapiens
gaatcttaatgagctgcccaaatttgagaattttactcaagaatgccctgacttggctaggcgtacagctccatcagtgaaggcacacagaagtaaggacgttacagttggaagtcacaatcatccgttgcatttctatatgcttaataattttattgttaagaaattgacataggaattctgaaaatcacaacctaacaattctgaaaaagaagttaagaaaatatgttcatttacaattttatcaaaaagaataaaacacttaggataaacctagtcaaagtggttaaagacttgtatactgaaaactacaaatcattgctgaaagaaatgaaagacaaaaaaaagtggaaaaatcctgtgttcatagattgaaagrcttaatttattatgctgtcaatactacccaatgcaatcttcagagtcaatgcaattcatatcaaaatccaaaatgacattcttttgtggaaatagacaaattcattctaaaatttatatggaatctcaaaggacc

SEQ ID NO: 444563 - DNA, 634 bp, Homo sapiens
gtttgtgtcatgctgtgactgtgcagcctttttcatggagaggtttgtttttgatggatattaaaggcaaaaatgtaaataatgtggctagcctctctcctctggagtatgacatcttgtcatcaagtattattttacagagagagtcatagtggatgagtattcattggtattacatttaaataaggaaataatttaaaaactgatcagtcatgaacatcgtgttcttaatttgtcatgttctattccacagtggccattctgaagtacatgartgactatgggcttaaataactaatgtgttagggaccaaattgtagccacatgcacatttgtggattctagtgcttgggtcaaatcattggcagatctgaaagatgtctgtgaagtgggcttttatttaccatttggaaatcctaaattttatgacatgttcaatgtcatttaaggacttttgttgatgttggtctaacttaaaaaaaagtcagtaattctaatacaggattttttaaactaagctaaaaaaatgaatctgggtttgttgccctgctccccacatgagttgagccccctcctttgtctgtgtacaaaggactgtattaatgtctgtttaggaaactgaactccagggaga

SEQ ID NO: 444564 - DNA, 634 bp, Homo sapiens
gtttgtgtcatgctgtgactgtgcagcctttttcatggagaggtttgtttttgatggatattaaaggcaaaaatgtaaataatgtggctagcctctctcctctggagtatgacatcttgtcatcaagtattattttacagagagagtcatagtggatgagtattcattggtattacatttaaataaggaaataatttaaaaactgatcagtcatgaacatcgtgttcttaatttgtcatgttctattccacagtggccattctgaagtacatgaatgactatgggcttaaataactaatgtgttagggaccaaattgtagccacatgcacatttgtggattctagtgcttgggtcaaatcattggcagatctgaaagatgtctgtgaagtgggcttttatttaccatttggaaatcctaaattttatgacatgttcaatgtcatttaaggacttttgttgatgttggtctaacttaaaaaaaartcagtaattctaatacaggattttttaaactaagctaaaaaaatgaatctgggtttgttgccctgctccccacatgagttgagccccctcctttgtctgtgtacaaaggactgtattaatgtctgtttaggaaactgaactccagggaga

SEQ ID NO: 444565 - DNA, 557 bp, Homo sapiens
ctccctgcctcttttgggttctcaggcacagtttacccctgtcaaattcccattagactagatgctctgcccagccctttcaatgctgacgtttcacacatcttgtaagaaagcccttgggtctggccaggcccgggtgtggacagggatgctcacattgagcctgtggacacagaagagtctttattcgggcagactcttgagcccttgttctgactgagcctattggtgcatttgaggggggttggggggagtgaggatttaaaaaaaaaaaaaaaggtcttgagggatgctggggaaggaagagaagccaagtgtctggatggtgtgaccccagactgcaacgctagaatgactctcaaaacattctcctttatcaaggaaacaaraatgtgagtcactctcttcccgcaccccaggggtttctttgctgagcagggctgcaaactgttcagctaattaggctgcatcctgaccttagcctccatccgcagcaggcctcccttgaggggagccgaggtgctgctgccacctagggtcaggagagtgcactgcag

SEQ ID NO: 444566 - DNA, 590 bp, Homo sapiens
acatattgtataagggagatcaaaatggaaattttattttagctatcctaatctaaaagttgagagacatgagctagagccccagtaattacacaggtttcactgcccaagtaatatattttcccaggaaaagaaaataaatattaactatctttagttactrggatagtaaagaatgctgaatagaagtctacgttagtgaagaattttctatcttcagggtaagactgagcaaagtatgctcagtgggttaggaaataccagaaagtaaagtataaccacatagctttgtattagttacttggaaatcttgaaaagaactacaatctcatccatttggcccttatgagcaaatcaggcatattacatagactagtgaaaggggtgattagttttgctttgttgtgattttcaataatatgagacattggctctaccaattgcttttttgcttgcaatagctgtacatatcctcagtaataattccctaattcttagattatggaaggcccttcaattcattttctatttaaagacctgttgttttacctgaagggccataagttagtcttggcctttagcatatcaac

SEQ ID NO: 444567 - DNA, 608 bp, Homo sapiens
acttggccctggcagctttgccagtgtccagtcagccactttgtactaaggggcgtgaggtcactcccacaagctccctccaaccatagccagcaggattctgcctgccgagactgaggaatgccacctggcgggaggaggagagtgtggggagccaggagtatggctcctcaatttacccaaggcggaagaggatcagtggggcgctcatgggaggctgtaaagccctttgatatccaggccaacgggtcaccgctttctgctcagtcctcccacttttggggttcgtgttcctggatgcagagcatgccaggttgaaacaacayggactcgcaccgagtccctcctctgtcccctgctctgtttgcctctggtctcaatgttcaggcagctctgctgggagcggcaggcccaccctccttggggggcggctcctggccgcttctccgaggcccacctggtcttctgtggttaccggttgggccaggcactgggctcatggctgtggtatgcttagtccagcaggagagatgtgatgtggactgagaaaagtgcattcagcgagggcagtaacccaagctggacgagggactcacccaggagctctg

SEQ ID NO: 444568 - DNA, 587 bp, Homo sapiens
ctccctccaaccatagccagcaggattctgcctgccgagactgaggaatgccacctggcgggaggaggagagtgtggggagccaggagtatggctcctcaatttacccaaggcggaagaggatcagtggggcgctcatgggaggctgtaaagccctttgatatccaggccaacgggtcaccgctttctgctcagtcctcccacttttggggttcgtgttcctggatgcagagcatgccaggttgaaacaacacggactcgcaccgagtccctcctctgtcccctgctctgtttgcctctggtctcaatgttcaggcagctctgctgggagmggcaggcccaccctccttggggggcggctcctggccgcttctccgaggcccacctggtcttctgtggttaccggttgggccaggcactgggctcatggctgtggtatgcttagtccagcaggagagatgtgatgtggactgagaaaagtgcattcagcgagggcagtaacccaagctggacgagggactcacccaggagctctggggccagacaggaggggccactcgtgggactatcagggaagatgaataacga

SEQ ID NO: 444569 - DNA, 541 bp, Homo sapiens
gtcagtcatgtctgacctccagggcttgtgaaaaacagttagtgtttgcttaacattaaatgcattccaggtattgcgctaaatgatatatgaacaaccctattcttcccattttacagatgagggagcagggtcatgtgaggttaagtggacttgcccaaggcttgaccctctgctgccactctggtttcataggtacctcaggcattagagctgcctagtgagaagagaccgtctgcacagcctcggggcagatgatttgggaggactagaggcagaggtgttgatctcactgttcctagatctgcagagctgatgatggatttggggaaggctcccatcatcttccttccaggtggtccaggygaataagctcccccagcagtcaagaccacaagtctcccagccttgactggagcttctattaatataaatagatgctttgtagacattcccagctgtaggggatggacataaattgtgcaccattgacagtagcacacaaatgccaaatgcctgggtggctctggggagcatgaga

SEQ ID NO: 444570 - DNA, 541 bp, Homo sapiens
gtcagtcatgtctgacctccagggcttgtgaaaaacagttagtgtttgcttaacattaaatgcattccaggtattgcgctaaatgatatatgaacaaccctattcttcccattttacagatgagggagcagggtcatgtgaggttaagtggacttgcccaaggcttgaccctctgctgccactctggtttcataggtacctcaggcattagagctgcctagtgagaagagaccgtctgcacagcctcggggcagatgatttgggaggactagaggcagaggtgttgatctcactgttcctagatctgcagagctgatgatggatttggggaaggctcccatcatcttccttccaggtggtccaggcgaataagctcccccagcagtcaagaccacaagtcycccagccttgactggagcttctattaatataaatagatgctttgtagacattcccagctgtaggggatggacataaattgtgcaccattgacagtagcacacaaatgccaaatgcctgggtggctctggggagcatgaga

SEQ ID NO: 444571 - DNA, 541 bp, Homo sapiens
gtcagtcatgtctgacctccagggcttgtgaaaaacagttagtgtttgcttaacattaaatgcattccaggtattgcgctaaatgatatatgaacaaccctattcttcccattttacagatgagggagcagggtcatgtgaggttaagtggacttgcccaaggcttgaccctctgctgccactctggtttcataggtacctcaggcattagagctgcctagtgagaagagaccgtctgcacagcctcggggcagatgatttgggaggactagaggcagaggtgttgatctcactgttcctagatctgcagagctgatgatggatttggggaaggctcccatcatcttccttccaggtggtccaggcgaataagctcccccagcagtcaagaccacaagtctcccagccttgactggagcttctattaatataaatagatgctttgtagacattcccagctgtaggggatggacataaattgtgcaccattgayagtagcacacaaatgccaaatgcctgggtggctctggggagcatgaga

SEQ ID NO: 444572 - DNA, 579 bp, Homo sapiens
ttctcccaaataaattatcctatatatatattcttgcttagtcactgtttttggtagcatccaagccaagccaagtatattcttcctttctaatgccaggataattcctttttactactctgtattatttgycagcaacctagatgacctggaagcaccttcttgcccagagcctcctgatgagagcccagcctaaaccttgattttggtcttgtgagatcctaagcagaaaactctgttgagcccatccagaattttgaccaacagacctatgttgttttaagctacttagttggtggtaccttgttttctcactgatcttgaatcacaggagcaggccaagagatagaacctgtactgggttagatagtgtctccccaaaattcatgtccttcctgaattttagaatgtgaccttatttggaaataggaccattgaaaatgtacttacggttaaaatgaggtcttattggaataagtgggcccttaatccattctaactggtattgttataagaagagaagaggcacagacactgagacacaccagggagaaggctttgcgaagatggaggcagaga

SEQ ID NO: 444573 - DNA, 554 bp, Homo sapiens
agtgaacatataaatgacaggaaactgaaacaaccttatggctgatatgaagaaagttttagtggtctgaatagaaggtcaaaacagccacaacattccttaagycaaagcgtaatccagagcaagggcctaactctcttcaattccatgaaggctgagagaggtgaagaagctgcagaagaaaagttggaagccagcagaagttggttcatgaagtttaaaggaatgggccatctctataacataaaagtgcaaggtgaagcagcaagtgctgatgaagaagatgcagcaagttatccagaagatctagctaagatcactgatgaaggtggccacactaaacaacagattttcaatgtagatgaaatggtcttctgttgggagaagacaccatctagctaggactttcataactagagaggagaagtcaatgcctggcttcaaacatcaaaggacaggctgactctcttgttaggggctaatgcagctggtgactttaagttaaagccagtgctcatttaccactctgaaaatcccaaggctgttatgaatta

SEQ ID NO: 444574 - DNA, 554 bp, Homo sapiens
agtgaacatataaatgacaggaaactgaaacaaccttatggctgatatgaagaaagttttagtggtctgaatagaaggtcaaaacagccacaacattccttaagccaaagcgtaatccagagcaagggcctaactctcttcaattccatgaaggctgagagaggtgaagaagctgcagaagaaaagttggaagccagcagaagttggttcatgaagtttaaaggaatgggccatctctataacataaaagtgcaaggtgaagcagcaagtgctgatgaagaagatgcagcaagttatccagaagayctagctaagatcactgatgaaggtggccacactaaacaacagattttcaatgtagatgaaatggtcttctgttgggagaagacaccatctagctaggactttcataactagagaggagaagtcaatgcctggcttcaaacatcaaaggacaggctgactctcttgttaggggctaatgcagctggtgactttaagttaaagccagtgctcatttaccactctgaaaatcccaaggctgttatgaatta

SEQ ID NO: 444575 - DNA, 557 bp, Homo sapiens
taggttgctaagggcaaaagtcggtttaactcagcaaacatttactaagcacctactgtgtggaccaggcatcacacaaggtgctgggctgaaggagtgagtctggcatgctgtgtgctctctagacaagccaaatgtgtgactgacatgaggcagacatggcactacagtaaaatcacaaacagtatgctatgagagaggaagtcaggcagagggaagtctgggaaggtagatttgagttgagcttcrgaagcagagctggaatcttatcatgcacatcattgtctatcttgggacaaaggaagcatggccaagtccatcagagtctgaagcaggtggatttattttccatatgtaacaaggcgtttgtgcagtaaaaagaatataaggcaagcaggcgtatcaacaacaatgatgataatcactgagagcactgagacctcagtggattcagtgctttgcctgctccatctcctctaatccccagagcctgtgaggccaggtcccttacagccccattctatagatgggaaaccacagtgcgtggtaatttgcac

SEQ ID NO: 444576 - DNA, 557 bp, Homo sapiens
taggttgctaagggcaaaagtcggtttaactcagcaaacatttactaagcacctactgtgtggaccaggcatcacacaaggtgctgggctgaaggagtgagtctggcatgctgtgtgctctctagacaagccaaatgtgtgactgacatgaggcagacatggcactacagtaaaatcacaaacagtatgctatgagagaggaagtcaggcagagggaagtctgggaaggtagatttgagttgagcttcggaagcagagctrgaatcttatcatgcacatcattgtctatcttgggacaaaggaagcatggccaagtccatcagagtctgaagcaggtggatttattttccatatgtaacaaggcgtttgtgcagtaaaaagaatataaggcaagcaggcgtatcaacaacaatgatgataatcactgagagcactgagacctcagtggattcagtgctttgcctgctccatctcctctaatccccagagcctgtgaggccaggtcccttacagccccattctatagatgggaaaccacagtgcgtggtaatttgcac

SEQ ID NO: 444577 - DNA, 594 bp, Homo sapiens
tctattgttttctaaagctagcagaatgagcagagatcttttctctcgtaagctcctataaattaaacaattcaagctatttaatgcacgttcacttgttayatggatggggttctaattttctacttaaagactgcaatcctctgctccttgccagctcatcagaaccagccaggattaattcccagaggagctcttggaccagataacagagcacctcctttcacagtcccactcctgaaatggtctttaataataatatgctagcccatataaaatgaaatccatctctatcctaatcctgggtgttgcagagcatattcccagttcaacacctaaagatctaacattagagactggcctctgatacttgctgagctaaaagaagcagtcttgtggtcaaggggagaaggctgaggcacaatagccatcctccttggaggcttggcctacttataaacgtcaaaacatgacatcatgtgggccccggacatgctagatgatgaaagcctgatctactttgccacatgggaaaagttgccaaggctaaggagaatctgtgctgtgctgccacagtcccactgcaagagaaga

SEQ ID NO: 444578 - DNA, 513 bp, Homo sapiens
ttaattcagtgtcatgttccaattaatacaggaagtatagagattactttttactatcctggaatgtctcagatgactagatttagtataatcagaaagcaatatccaggcctggtgagttgtgttgatgtgttcatttattcaacatttgtgtgtgtgtgtgtgtgtgtgtgtctgtgtgtgtgtgtacatgcacctaaatgatgtaccaggcactagattgtagttgkaatcattttagaacaagttgcaataaataaagtcagcctgctcaacaatccaggctgaattcaggcacataacttctgcttttgataaaacggtattttgttggcataaaatgagatcctatggatttgctgaaaggacgtttccaagaggcaggcccagagcatgctgaagacaatcatgattttaagtgacattctaaataattcaaacatattttcatcacactttcacttcttttcttgctcaggtaattttaattgcaatgaaataaacataacacaa

SEQ ID NO: 444579 - DNA, 366 bp, Homo sapiens
aagttgttttgtatcttatttatatcttatcagtgatagaatccatacctttgctttggtgtctgtgcctttgcttatattcatttccaagccaacatagttgtcttgtactacacattatcatggatttatttttaattggggtataatttatactcagtgcaatagattttatgtcttaagtctattgagttttgataattgcatacacctgtgtaacctccacacaaaacaaaaatatagactattcgttcacctccaaaagattgctggtgtccctttacagtcactctctccttcycccaagagccacctgcttcctgatttctgtcactataggttagtttcaactgttcttaaacttaa

SEQ ID NO: 444580 - DNA, 587 bp, Homo sapiens
ttttaattggggtataatttatactcagtgcaatagattttatgtcttaagtctattgagttttgataattgcatacacctgtgtaacctccacacaaaacaaaaatatagactattcgttcacctccaaaagattgctggtgtccctttacagtcactctctccttctcccaagagccacctgcttcctgatttctgtcactataggttagtttcaactgttcttaaacttaatgtaaatagaatcaaacagcatttattcttttgtgtctggtttctttcattaacataacatttttgagatttatccatgtcgtgtttatcaaaagtttgttcctttaatcacagagtaatacttcactctatgaatatacaaaaatttgatgatcattctcctgtaggtgaacatttgggttgtttccagtttttagttactatgaataaggtatgaacgtggctttttaaaaaattattgaataaacttgtatagarcatgttagaatcagggtagacacagttatgcttcagtaacaaacagccccaaaactcatggcttaagacaacaaagaaataaacaaaggtttatt

SEQ ID NO: 444581 - DNA, 480 bp, Homo sapiens
tttcttgctggttctcaggtgggggctgctctcagctcctagaggtcccccacagtccttgtcaggaagccccctccatcctgaagcaaacaatggtgcttccaatctctgacttcctaggcattccacaaagaatttaattggtttagaattcatttaagtcaacctactaatttaaggatttaggatatgaggttctaagtgaaatctccagatttgaagggcttgtatgattaggtcaggtccaaactgataatctccctttatcttayagtcagctgtgacttatcatatagtttaattatggaagtgaaatttgtctgtaaactgggggcaggaattttgggagacttgttagcattttgtctaacacaagttatatgatttttaccaatgtgagtttcatttttataacaaagcagaattcaaatcaggatccagaatgtgtgttttccacaaacataaatatattctacaaac

SEQ ID NO: 444582 - DNA, 599 bp, Homo sapiens
gagaccctgtctgcgggaaaaaaatcaaaaactagctgggcatggtgatccatgcctgtggtcccagccacttgggaggctgaactgggaagattgcttgagccaaggagatcggggcttcagtgagtcatgattgtgccactgcactcagcctgggtgacagaataagaccctgtctccaaaaaaaaaaaaaaaaaaaaaaaaaaaagagtcactttgccctataaacaaagttgaaaatggaacaagtcatggacatggtaattaacatcatcaatgggatatgctcccttggctagaaccacagatggttcaatgcctgatgaactgaatgtacaatgtggcagtctattatactacatagggaataagtaacttgagcatggcatggtgctgaaragattttctttgtttgaataattgaaagaaattgcactgtttgtgtcatccaaacaaaagtttccacctcagctcactagcaaaggttggattgaaagcttagcctttttggcaggtcattcacagctggccacacaaatgtataatttgattggctcattctcattcaaaattattgatttggaagtataatttggcaa

SEQ ID NO: 444583 - DNA, 599 bp, Homo sapiens
gagaccctgtctgcgggaaaaaaatcaaaaactagctgggcatggtgatccatgcctgtggtcccagccacttgggaggctgaactgggaagattgcttgagccaaggagatcggggcttcagtgagtcatgattgtgccactgcactcagcctgggtgacagaataagaccctgtctccaaaaaaaaaaaaaaaaaaaaaaaaaaaagagtcactttgccctataaacaaagttgaaaatggaacaagtcatggacatggtaattaacatcatcaatgggatatgctcccttggctagaaccacagatggttcaatgcctgatgaactgaatgtacaatgtggcagtctattatactacatagggaataagtaacttgagcatggcatggtgctgaagarattttctttgtttgaataattgaaagaaattgcactgtttgtgtcatccaaacaaaagtttccacctcagctcactagcaaaggttggattgaaagcttagcctttttggcaggtcattcacagctggccacacaaatgtataatttgattggctcattctcattcaaaattattgatttggaagtataatttggcaa

SEQ ID NO: 444584 - DNA, 514 bp, Homo sapiens
ggaacaagtcatggacatggtaattaacatcatcaatgggatatgctcccttggctagaaccacagatggttcaatgcctgatgaactgaatgtacaatgtggcagtctattatactacatagggaataagtaacttgagcatggcatggtgctgaagagattttctttgtttgaataattgaaagaaattgcactgtytgtgtcatccaaacaaaagtttccacctcagctcactagcaaaggttggattgaaagcttagcctttttggcaggtcattcacagctggccacacaaatgtataatttgattggctcattctcattcaaaattattgatttggaagtataatttggcaaagaacaatctggccaattttcctgttgaactaggtttccagaaataaaagccatggcctcaactatattctcaatattgtaagaattaaaaactgaattctaaaaattcttattgaatttcaaattttatgaaaacaagagaactttattcagctc

SEQ ID NO: 444585 - DNA, 534 bp, Homo sapiens
catgctagagacctggaataagcagagctgcacttaactagggtgtgattctcccagacaagttcagtgaaaggaaagaggatcaacagtaggaagcacatgcaaggaaggggttggagccaccaaccactgaacttgagcaggctgaggagaaagtgggcacatgagaagctgaggacatagatgtgtgtgcctgtgrtataatatgaaatgttcttgttcttgtcacagagtacccttggaatttcctgagtgataggagtgtcttttgttatgcattaatagcccctttcacatctgagtttatgctactgaggtggcttggggtagatcccctggatagcctcgggatggggccagtcaccacaaagaccaaaggattagagaatccctgcattccccctacaatctccaagaagtgagggtgggggctggagatgaagctctgtaaaaacccttgaacaacaagatttgatgagcttctgggttgttgaacatgttgacatgctggaagggtagcaggtggtataccca

SEQ ID NO: 444586 - DNA, 534 bp, Homo sapiens
catgctagagacctggaataagcagagctgcacttaactagggtgtgattctcccagacaagttcagtgaaaggaaagaggatcaacagtaggaagcacatgcaaggaaggggttggagccaccaaccactgaacttgagcaggctgaggagaaagtgggcacatgagaagctgaggacatagatgtgtgtgcctgtggtataatatgaaatgttcttgttcttgtcacagagtacccttggaatttcytgagtgataggagtgtcttttgttatgcattaatagcccctttcacatctgagtttatgctactgaggtggcttggggtagatcccctggatagcctcgggatggggccagtcaccacaaagaccaaaggattagagaatccctgcattccccctacaatctccaagaagtgagggtgggggctggagatgaagctctgtaaaaacccttgaacaacaagatttgatgagcttctgggttgttgaacatgttgacatgctggaagggtagcaggtggtataccca

SEQ ID NO: 444587 - DNA, 514 bp, Homo sapiens
ctgggtccatgagtctgaggctgagacctgtgtctccagaggcaagcctgaagcctggtccacagaggctgatctagcacttgatggggtgggccttagacctacatctacaggggctgggcaggtgctgggatgatcctggagcctgagtccacaagcactggcttggcactggggctggcctggaccctgagtccatagtgcaggtctgggtcctgggcccacagggcctggcctggatcctatgtctgcagatatagtcttgaagcctcagtccatgggatctagcccgccattggcgtctactacagtgggccttgaccctgcgtctgctggaacaagcctggatcttgtgttttctggagcctgtttccactgggatcaacctaggctaacctggtgctagggctggtgtaaagcctgggttcacagggtctagtctgaagcctaggtctatgggaactgacyttgtgcctggagatcctggggctggtcttaagcacggggctgtcag

SEQ ID NO: 444588 - DNA, 553 bp, Homo sapiens
gaaaggttcctgcaggatcagatgtaatctcagaatatgtaaaagcctgtgatggaatcggaggagctatgcataaagctatgcttatggctcaagcaataacaggagttgttttaggaggacaagttagaacatttggaggaaaatgttataattgtggtcaaattggtcacttaaaaaagaattgyccagtcttaaataaacagaatataactattcaagcaactacaacaggtagagagccacctgacttatgtccaagatgtaaaaaaggaaaacattgggctagtcaatgtcgttctaaatttgataaaaatgggcaaccattgtcgggaaatgagcaaaggggccagcctcaggccccacaacaaactggggcattcccaattcagccatttgttcctcagggttttcaggaacaacaacccccactgtcccaagtgtttcagggaataagccagttaccacaatacaacaattgtcccccgccacaagcggcagtgcagcagtagatttatatactatacaagcagtctctctgcttccaggggag

SEQ ID NO: 444589 - DNA, 553 bp, Homo sapiens
gaaaggttcctgcaggatcagatgtaatctcagaatatgtaaaagcctgtgatggaatcggaggagctatgcataaagctatgcttatggctcaagcaataacaggagttgttttaggaggacaagttagaacatttggaggaaaatgttataattgtggtcaaattggtcacttaaaaaagaattgtccagtcttaaataaacagaatataactattcaagcaactacaacaggtagagagccacctgacttatgtccaagatgtaaaaaaggaaaacattgggctagtcaatgtcgttctaaatttgataaaaatgggcaaccattgtcgggaaaygagcaaaggggccagcctcaggccccacaacaaactggggcattcccaattcagccatttgttcctcagggttttcaggaacaacaacccccactgtcccaagtgtttcagggaataagccagttaccacaatacaacaattgtcccccgccacaagcggcagtgcagcagtagatttatatactatacaagcagtctctctgcttccaggggag

SEQ ID NO: 444590 - DNA, 553 bp, Homo sapiens
gaaaggttcctgcaggatcagatgtaatctcagaatatgtaaaagcctgtgatggaatcggaggagctatgcataaagctatgcttatggctcaagcaataacaggagttgttttaggaggacaagttagaacatttggaggaaaatgttataattgtggtcaaattggtcacttaaaaaagaattgtccagtcttaaataaacagaatataactattcaagcaactacaacaggtagagagccacctgacttatgtccaagatgtaaaaaaggaaaacattgggctagtcaatgtcgttctaaatttgataaaaatgggcaaccattgtcgggaaatgagcaaaggggccagcctcaggccccacaacaaactggggcattcccaattcagccatttgttcctcagggttttcaggracaacaacccccactgtcccaagtgtttcagggaataagccagttaccacaatacaacaattgtcccccgccacaagcggcagtgcagcagtagatttatatactatacaagcagtctctctgcttccaggggag

SEQ ID NO: 444591 - DNA, 553 bp, Homo sapiens
gaaaggttcctgcaggatcagatgtaatctcagaatatgtaaaagcctgtgatggaatcggaggagctatgcataaagctatgcttatggctcaagcaataacaggagttgttttaggaggacaagttagaacatttggaggaaaatgttataattgtggtcaaattggtcacttaaaaaagaattgtccagtcttaaataaacagaatataactattcaagcaactacaacaggtagagagccacctgacttatgtccaagatgtaaaaaaggaaaacattgggctagtcaatgtcgttctaaatttgataaaaatgggcaaccattgtcgggaaatgagcaaaggggccagcctcaggccccacaacaaactggggcattcccaattcagccatttgttcctcagggttttcaggaacaacaacccccactgtcccaagtgtttcagggaataagccagttaccacaatacaacaattgtcccccgccacaagcggcagtgcagcagtagatttatrtactatacaagcagtctctctgcttccaggggag

SEQ ID NO: 444592 - DNA, 622 bp, Homo sapiens
acaaaccttattggagtcaataaaaaaagttaaatgaggagagttgctggaatatttagtgatattatagcccctttattaattttttaaatcaatttattcattcactctttcaaaaaatatattttgagtacatactacatgacttagacatcggtcattggtttagttatatatatctgaatttgatttgttgttgcgaacaaaggcatagaaagtcatgggaagtagggaagtgatgtcatcaagatggccgaatagaaggtaacctgttcttatccctcaataacaagatttctgctcacacaaggatccagaaggagacttgaatatataacacagctcaggagtatgagcttcttgacaagctcaccagcttccatcacacagcaaattccaagggggcccagtgtctgctctggcccctctrtctgtagtttgtgaactatcccagctgtgctgagacctgctggaaaacatataactgtatggggcaacaaagcaacctttctagcctctgtcccacagaagatcctgaggatcccagtctcaggttcagcacccctgctgcaatcagtgaactattctgtctttgcagggacttaccgggagatgcacacct

SEQ ID NO: 444593 - DNA, 605 bp, Homo sapiens
ggttgtaccttagttaacattttagttctygtttataacatgtatttacatagctcattactgttgagctcactagaactatataatattaatgaagtttgtttcaataggccaaagtgagaaactccaatttttctataaatttttaattaatttggaagtcttaagttttcagtgaggccaacagatgtaaattaaatattaaaaatggtagaatgagaatagaaatatgaccaagaatcctacgcccacaaattttaactatagttctcaaaaagcatctggaacttttttttaaatagaggagtgacttttaaacagagctgcacattaatatcagctatgaaattacaaattccccctctcatctctgcatttagtggattcagaaaggagactggatatgtataattatggagatttatatatttatgatgcacttatgcatttagaaaaaggcattgtgcatacaaatgagtgttaagacaaactgtgtttaaataatgatgatactttatcgctaatgttaatagcatattcagtactaatttagcagttatgatgctatagtatagtgtcagtcaacgttgtcaataataataact

SEQ ID NO: 444594 - DNA, 605 bp, Homo sapiens
ggttgtaccttagttaacattttagttctcgtttataacatgtatttacatagctcattactgttgagctcactagaactatataatattaatgaagtttgtttcaataggccaaagtgagaaactccaatttttctataaatttttaattaatttggaagtcttaagttttcagtgaggccaacagatgtaaattaaatattaaaaatggtagaatgagaatagaaatatgaccaagaatcctacgcccacaaattttaactatagttctcaaaaagcatctggaacttttttttaaatagaggagtgacttttaaacagagctgcacattaatatcagctatgaaattacaaattccccctctcatctctgcatttagtggattcagaaaggagactggatatgtataattatggagatttatatatttatgatgcactyatgcatttagaaaaaggcattgtgcatacaaatgagtgttaagacaaactgtgtttaaataatgatgatactttatcgctaatgttaatagcatattcagtactaatttagcagttatgatgctatagtatagtgtcagtcaacgttgtcaataataataact

SEQ ID NO: 444595 - DNA, 598 bp, Homo sapiens
tgcacagcaaaagaaactatcagcacaatatatagacaacctacagaatgtgagaaaataagtgcaaactatgcatctgacaaaggattaatatccagaatctataaggaacttaaaccaataagccaaaaccaaacaactccattaaaaaytgggcaaaggacatgaacaaacacttctcaaaagaagaccatatatgcaaccaacaagcatatagacaaatgctcaacatcactaatcatctaataattattagagagatgcaagtcaaaaccacaatgagctaccatctcagaagagtcagaatcactattattaaaaagtacaaaaatgacagatgctgttgcagctgctgagaaagggaacacttacacactgttggtgggaatgtaaattagttcagccactgaggaaagcagtttagagatttctcaaataacttaaaatagaactaccattcaacccaggaatccatactaggtatgtacccaaaaggaaataaatcattctaccataaagacatatgcattctatgttgtctcagtactatctacaatagcaaagacgttgtgatggttatactgagttcaacttgatt

SEQ ID NO: 444596 - DNA, 598 bp, Homo sapiens
tgcacagcaaaagaaactatcagcacaatatatagacaacctacagaatgtgagaaaataagtgcaaactatgcatctgacaaaggattaatatccagaatctataaggaacttaaaccaataagccaaaaccaaacaactccattaaaaactgggcaaaggacatgaacaaacacttctcaaaagaagaccatatatgcaaccaacaagcatatagacaaatgctcaacatcactaatcatctaataattattagagagatgcaagtcaaaaccacaatgagctaccatctcagaagagtcagaatcactattattaaaaagtacaaaaatgacagatgctgttgcagctgctgaraaagggaacacttacacactgttggtgggaatgtaaattagttcagccactgaggaaagcagtttagagatttctcaaataacttaaaatagaactaccattcaacccaggaatccatactaggtatgtacccaaaaggaaataaatcattctaccataaagacatatgcattctatgttgtctcagtactatctacaatagcaaagacgttgtgatggttatactgagttcaacttgatt

SEQ ID NO: 444597 - DNA, 679 bp, Homo sapiens
gggctgattttttgagtccctgggaacagcatttcaaagcagaagagagatgtgcaggaaaaaacataactactgaagcagtttgaatgactttcaagtgagaaaattaaactttgatactaataaggcggttactgaagccctgctttctttaattagtgatcctatgggctgcataggacctagtaggttagcattatatgcaaagaggaagaaggatattttattaaaactttgcacttcaaattaatgttctttaccataatatataaactataaatacattgaccttgatgtgagggctgggcttgattaaagaaatgtttaacagataatgagtaatatccaatagatgcagatgctttgaaaagtgcttttaggacaacatacaatttttattayttactcctttattctttattttaaacattttaaagtaatatttattaaatttctcttgtacacaacggattattgtgttagaaactgtggtagcccagtttcaatttccacttctttctcttctatatgtgtttttaccttgtattcctctaaaatatatttaaagtaatatatacatattctgccattgtatatatattcatatatgctattcaaagaacttatttacacacactaatatataaatgtatacactataatatatttatatataaac

SEQ ID NO: 444598 - DNA, 337 bp, Homo sapiens
gtgatgctactctgtcagcctgtaatgtttccactaaagatctgctgccagatgtattggagttttattttatgttgtttgtttcatttttcctactgcttttgggatcctttttwaaatccttgaattttggaagtttgattattaaatgccttcaagttgtcttctttgggttaaatctgctttgtgttctgttaccttcttataaatgaatgttgatatttttctctatgtttgggaagttttctgttatcatcactttgagtaaacattatatccctatctctttttctaactcctctttaaagccaataactcttagatttgacttttggag

SEQ ID NO: 444599 - DNA, 687 bp, Homo sapiens
ggagtctctattttatttcactaattcatttgtctattttggttttaccaataccatgctgttttggttattgtagctttatagtacatcttygcttcagatagtgtaagtcctccaactttcttcttcttgggagttttgtctcacctcataaacaaaataacttgctgagattttaattaggattgcactaaacctatacatcatgttgggaaaaattgacatgttgtcaatattgagcctttctttccatgaacatggaatgtttcttcttttatttgtttttctttcatttattttattagcttgtaggtttttaaaatatagatattatacatattttgttagttttatacctaagcatttcattttttggtgctaacataaattgtattgtgttttttatttcaaattccacttttttgcaggaaaacaattgctttttatataataaccttgtatcttgcaaccttgctataatcacttattattgctaggagttttaaaatttctttcagatattctatataatcatgtcatatttaaaaacagttttctttcatcttatccacgtacatttttctttgctttattttgttgcactaccaaataattccgttaacatgatgaaaatatgataaagagaacatctttgccttagttctaattttagtggggaagcttcta

SEQ ID NO: 444600 - DNA, 687 bp, Homo sapiens
ggagtctctattttatttcactaattcatttgtctattttggttttaccaataccatgctgttttggttattgtagctttatagtacatctttgcttcagatagtgtaagtcctccaactttcttcttcttgggagttttgtctcacctcataaacaaaataacttgctgagattttaattaggattgcactaaacctatacatcatgttgggaaaaattgacatgttgtcaatattgagcctttctttccatgaacatggaatgtttcttcttttatttgtttttctttcatttattttattagcttgtaggtttttaaaatatagatattatacatattttgttagttttatacctaagcatttcattttttggtgctaacataaattgtattgtgttttttatttcaaattccacttttttgcaggaaaacaattgctttttatataataaccttgtatcttgcaaccttgctataatcacttattattgctaggagttttaaaatttctttcagatattctatataatcatgtcatatttraaaacagttttctttcatcttatccacgtacatttttctttgctttattttgttgcactaccaaataattccgttaacatgatgaaaatatgataaagagaacatctttgccttagttctaattttagtggggaagcttcta

SEQ ID NO: 444601 - DNA, 687 bp, Homo sapiens
ggagtctctattttatttcactaattcatttgtctattttggttttaccaataccatgctgttttggttattgtagctttatagtacatctttgcttcagatagtgtaagtcctccaactttcttcttcttgggagttttgtctcacctcataaacaaaataacttgctgagattttaattaggattgcactaaacctatacatcatgttgggaaaaattgacatgttgtcaatattgagcctttctttccatgaacatggaatgtttcttcttttatttgtttttctttcatttattttattagcttgtaggtttttaaaatatagatattatacatattttgttagttttatacctaagcatttcattttttggtgctaacataaattgtattgtgttttttatttcaaattccacttttttgcaggaaaacaattgctttttatataataaccttgtatcttgcaaccttgctataatcacttattattgctaggagttttaaaatttctttcagatattctatataatcatgtcatatttaaaaacagttttctttcatcttatccacgtacatttttctttgctttattttgttgcactaccaaataattcygttaacatgatgaaaatatgataaagagaacatctttgccttagttctaattttagtggggaagcttcta

SEQ ID NO: 444602 - DNA, 526 bp, Homo sapiens
gtaaccctggaggattggatcagacccatggctttgttctctggcttcttgaggttaagcatctgctgtggtggaagggccraggtgttcctgtcttctggcaaaagcactacaacacggggtgacagcaaaagcactcgatctgggtgatggcagtgggatcagcatgtgtacattagcagcagcaaggtggtggtggtatccacacatgcacatgccagatatataatttgtaagctataaatgtacttaacaccagagacccaaaatatgtgaagaaaagacacataattgaagagagaaatagacaattagatataattcaatactccacattcaatagcgaatagaataactaggcagatcaataacaaaatagaatacatgaataacacaacaacagtataacataatgaaacctactatacacataaagaacactccacacaacaaccgagaatacacattattctcaagtgtatgtggaactttctccaggatatactgtatgataggttataaaaca

SEQ ID NO: 444603 - DNA, 526 bp, Homo sapiens
gtaaccctggaggattggatcagacccatggctttgttctctggcttcttgaggttaagcatctgctgtggtggaagggccgaggtgttcctgtcttctggcaaaagcactacaacayggggtgacagcaaaagcactcgatctgggtgatggcagtgggatcagcatgtgtacattagcagcagcaaggtggtggtggtatccacacatgcacatgccagatatataatttgtaagctataaatgtacttaacaccagagacccaaaatatgtgaagaaaagacacataattgaagagagaaatagacaattagatataattcaatactccacattcaatagcgaatagaataactaggcagatcaataacaaaatagaatacatgaataacacaacaacagtataacataatgaaacctactatacacataaagaacactccacacaacaaccgagaatacacattattctcaagtgtatgtggaactttctccaggatatactgtatgataggttataaaaca

SEQ ID NO: 444604 - DNA, 526 bp, Homo sapiens
gtaaccctggaggattggatcagacccatggctttgttctctggcttcttgaggttaagcatctgctgtggtggaagggccgaggtgttcctgtcttctggcaaaagcactacaacacggggtgacagcaaaagcactcgatctgggtgatggcagtgggatcagcatgtgtacattagcagcagcaaggtggtggtggtatccacacatgcacatgccagatatataatttgtaagctataaatgtacttaacaccagagacccaaaatatgtgaagaaaagacacataattgaagagagaaatagacaattagatataattcaatactccacattcaatagcgaatagaataactaggcagatcaataacaaaatagaatacatgaataacacaacaacagtataacataatgaaacctactatacacataaagaacactccacacaacaaccgagaatacacattattstcaagtgtatgtggaactttctccaggatatactgtatgataggttataaaaca

SEQ ID NO: 444605 - DNA, 567 bp, Homo sapiens
gcataattgctctggttagagtttccagtaatacactgttgcagagaagtggccattgtaaatagtcctgcaataaacatatgagtgcatggtatcagaattttaaggaaatatatatttgtattcaacctcaatatttttggaaactttcagtgttttattcggtaaaagacaaatatyttcttctatctatattttaaaagaattttcctccctttctctttttaaaactatcattttatcgtaaaataaaatggaaagagtaaaacacacacacacacacacacacacacacaaacaaaaaagaaactgcctctccctatttagtaaaataggaacctaagtttaaagtgttgttacaatcaagagtttgattgtaaaaaattacctctcatctcagaatcttcatcaatagatgtgttcagaaagtaatagaatatcatacttatattactatactatttatttatttattagtaattgaattctacttaactatccaggattgcatatttagcttaaagtgaacattagtttttttgtttgtttgtttgtttgtttgtttgc

SEQ ID NO: 444606 - DNA, 567 bp, Homo sapiens
gcataattgctctggttagagtttccagtaatacactgttgcagagaagtggccattgtaaatagtcctgcaataaacatatgagtgcatggtatcagaattttaaggaaatatatatttgtattcaacctcaatatttttggaaactttcagtgttttattcggtaaaagacaaatatcttcttctatctatattttaaaagaattttcctccctttctctttttaaaactatcattttatcgtaaaataaaatggaaagagtaaaacacacacacacacacacacacacacacaaacaaaaaagaaactgcctctccctatttagtaaaataggaacctaagtttaaagtgttgttacaatcaagagtttgattgtaaaaaattacctctcatctcagaatcttcatcaatagatgtgttcagaaagtaatagaawatcatacttatattactatactatttatttatttattagtaattgaattctacttaactatccaggattgcatatttagcttaaagtgaacattagtttttttgtttgtttgtttgtttgtttgtttgc

SEQ ID NO: 444607 - DNA, 595 bp, Homo sapiens
catgtgagtctataagaaaaaagtagctaaaattgtattaaactaccaaaggccgaatttgggctagtgtgcaatagctggagacccagacacatgggatgttgaccctcattcacaactcttccctatcagcctatgatagatgctaatgagaaagactgggaacaaggaaggcgagcagagggacccaccccatcagtgcaggctgtaggcaataaaagggaataaactaatatgtgcaataacatgataaatctcaagtgcattraaaaaagaataaaaaggctaaactgaaaaggaaacataatgtatgtttttattgatatggcattctggaaatggcaaaattatgaggatagtaaataagtccataattgccaggagcttaggctgaagcagccaggattgattaattggaatgaggcataagtgaaatttctagggtaaagaaaatatgccatatcttgattagagtggtggatattcaactatacgtttattaaagttcatagaagtgtaaagctaagggtaagttttagtgtatgtgatttgtaaccaacagatttgatgatctttctgtagatacatatatgtc

SEQ ID NO: 444608 - DNA, 564 bp, Homo sapiens
ctttttgcaggtgaaaggagcctggaactagggatttcagaaatctgcctggtgttttattttactgtggctgagctggtatccaattgtaagacaaagtcctcttttctgtctcctttctgcaagcaggagtctgtccgtgagctgcactacctggggttgggggagaggtggcacaggctgttccttggcctggacagctggtgtctctctgtgttatgtgcaccccaagtccgctagctctgagcccarcacagcaccaggacttgctcaaagactgtagttcttgtggcctgattgcctttcaaatttatgcaggaccccagggccctttatttcactggtggggagtgctagccagaactcagattcctaccactgagctagaacagtggtctaaatgatccctctatgggcactgacgaaaatctgtgttgtgttccatggtggcagggcagcacagagttccagtataaagttccacaatcagttcgctgtccctcccacacacagattctgtctccacatgtagcctgagtacaggggaggggtggtgtaggcagt

SEQ ID NO: 444609 - DNA, 564 bp, Homo sapiens
ctttttgcaggtgaaaggagcctggaactagggatttcagaaatctgcctggtgttttattttactgtggctgagctggtatccaattgtaagacaaagtcctcttttctgtctcctttctgcaagcaggagtctgtccgtgagctgcactacctggggttgggggagaggtggcacaggctgttccttggcctggacagctggtgtctctctgtgttatgtgcaccccaagtccgctagctctgagcccaacacagcaccaggacttgctcaaagactgtagttcttgtggcctgattgcctttcaaatttatgcaggaccccagggccctttatttcactggtggggagtgctagccagaactcagattcctaccactgagctagaacagtggtctaaatgatccctctatgggcactgaygaaaatctgtgttgtgttccatggtggcagggcagcacagagttccagtataaagttccacaatcagttcgctgtccctcccacacacagattctgtctccacatgtagcctgagtacaggggaggggtggtgtaggcagt

SEQ ID NO: 444610 - DNA, 577 bp, Homo sapiens
ggccactctaagcctcaaaggctcaaacaaatattcaaagtaaagataatcttgaaagaaaatatattcttatattgctgtgtgttaaatgtaatgcttatgaatgattttagtcaaaaagtaaaataaaatttaaaaataaagacaataataagaaaaatatgatccattaccgtatctagcaattctgctacaaacattattgtaaggcatataaattcaagatgaaaaaataataattaaaactcaaaagtacccttaataaagaaaacagtgatttcattttaaatcaattatttgaaatgaaaacaaatctgtattacctaaagacagtatccatagtcaagtacaggagtgggagtcccacttgctaccctgggctgaaatatttgacaggttagctaaattaatgtttagtgggtcactgtggtgaaaattgatgtgtaagtaacctaayttctgaataactgcttctagagcttgaaagcagttgaaaacttaaagggactgacacaaccttcactatttagtgtttgcaaagtgctccctagaaatcagggctcagacctcggtttcc

SEQ ID NO: 444611 - DNA, 528 bp, Homo sapiens
acagcagtcagatctctctcagacgcctatctaaggatcccaagtaaaagggagtcattgtctgggsctccattacatgaccatttggagtttgatgacctctaggtgagaagaaacacattttacaaggaggttaactatttgtgggccaaatatgagtattatacaaagaggaggtaaaagcggaaaatccataccagtgccagagatagcaaaaataaaaagtaaaataaactatcattctgaaaacaatgtggccaaagctgtgtcaccttggtgaaagaaattcaatcttgtatggtggaggggagttacattttagaagagaaatagctgtttaggggagtagatgatcccacgggtgttcaggattatggggtccttgaccaagacaccttatgctgaggaacagaatgaaggtgagaacagcaagcataggcaagactataaaggagatagccatggaaagttaattattgacatctatcttttgtgatctttaacttgaggtctccaatttcttcacac

SEQ ID NO: 444612 - DNA, 600 bp, Homo sapiens
gggaggagccctgggacccatcattcctgctggaccatgggggagattggctctggactcagtgacctacatctccatggggaggtcaccttctagtggtccccttcctcatgttgcctgakcaatccttcttaaagtgccctgacttgctatattagtagcaactaataggggcacctcagagattctggggtgtgtaggcctacaaggtggccattagagcctctgcctttttcttgcaactcttctctctttcttgagcaccaccccccaatccctactgtaaaataccaaggtggccactttcaggaggttctttaaagtactgtcttgttccatggcctgtttctgcagcttcctcctgataacaggggccacccaagtaatacacttatcctttaggtgttacatttctttgtcatagagccatgtgtacatgaggtaatctattacttgatacagaaattaacaaaacgtttagagtccctacatccaaatactgtagaggtcatttttagataaataaagcaatatatgcaattaataaacatagtgccatgaacataataagcatttcatgaaggtctgttttggaaatta

SEQ ID NO: 444613 - DNA, 600 bp, Homo sapiens
gggaggagccctgggacccatcattcctgctggaccatgggggagattggctctggactcagtgacctacatctccatggggaggtcaccttctagtggtccccttcctcatgttgcctgagcaatccttcttaaagtgccctgacttgctatattagtagcaactaataggggcacctcagagattctggggtgtgtaggcctacaaggtggccattagagcctctgcctttttcttgcaactcttctctctttcttgagcaccaccccccaatccctactgtaaaataccaaggtggccactttcaggaggttctttaaagtactgtcttgttccatggcctgtttctgcagcttcctcctgataacaggggccacccaagtaatacacttatcctttaggtgttacatttctttgtcatagagccatgtgtacatgaggtaatctattacttgatacagaaattaacaaaacgtttagagtccctacrtccaaatactgtagaggtcatttttagataaataaagcaatatatgcaattaataaacatagtgccatgaacataataagcatttcatgaaggtctgttttggaaatta

SEQ ID NO: 444614 - DNA, 582 bp, Homo sapiens
cgtattttttttccctgtaagtattctcgacgaatgacattttcctcatttacattcttaaagtagaaatggatttcccactagagaccatcctatgtttatacaaagtaaacttcttataacttttctttgtcatttgttttttcatgttataaaataaatgtttcaaacaagaggcagagaatatttgtactagagagtggcttcctttttttttttctcccttaaagtttaacctgattatagggtgcaatcatagagaggtccatttagtttgcactgaaaatagtaaggtgtcatctcaagaaatttcacagagaggttaaaaacaggatggatatgaacaaggagtatcgtctacctaaaaaattctaaatcagaaccttttatttggtgctagtaatttagctttgtaaatgctgatattgtgctagtgaattttmtccacattttggaggatatatggatcaccgtaacaaatagggagaatgtttttccaataggaccttctttttaacatgacaacattcaaagtctgtctaatggacttgaaattttgaagtcctttgtattgtatattct

SEQ ID NO: 444615 - DNA, 339 bp, Homo sapiens
cataaatccctgggtaaggattaaatattctgagccatatgttaatgaaagtagattatggcccaatgattattttgtgctaatcattgttttaattactttccatgaattaaatccatgtgtgttctcactttagaaatgagaaagggaagcaaatgagaaattaatatcagtccaaacaggcaatagtattcacctcacactgttagatagtgaaggtggaggtgatgyatatcagtaatgtgaaattagaaccaatagaacttaatataaaaattgtcattcacaagagtgacaaaatttcaaataaatctcaaatttcttacttttctgggggag

SEQ ID NO: 444616 - DNA, 575 bp, Homo sapiens
tttgctctttcttgctgtctcaaggtattcaggtgccatgttgtgctctttcctctggagtgtcccaaatggtaagaaactgaaggaaaacctagccaacagctagtgagaaactgcatacgtcagtctatcaacatacaaaaaactgaatcattcctcaaatcacaggagttagtttgcatgtagatccctgacaagctgagcatttagatgagaccagagycctggccaacaggttgattacattcttatgagatatcttgaaatggagtgatgtggtttggatctgtgtccccactcaaatatcatctcaaattgcaatccccacgtgttgagggagggacctggtgggaggtgattggatcctggggatggtttctcctgctgttctcatgacagtgaattctcacgagatctgatggttttaaaagtggcagtgtcccctgcactctttctcctcccaccatgtaagacatgcttcgcttttctttcactttgcaccatgattctaagtttcctgaggcctcctcagccatgtggaactgtgggtcaattaaatctcttttgtttataaa

SEQ ID NO: 444617 - DNA, 575 bp, Homo sapiens
tttgctctttcttgctgtctcaaggtattcaggtgccatgttgtgctctttcctctggagtgtcccaaatggtaagaaactgaaggaaaacctagccaacagctagtgagaaactgcatacgtcagtctatcaacatacaaaaaactgaatcattcctcaaatcacaggagttagtttgcatgtagatccctgacaagctgagcatttagatgagaccagagccctggccaacaggttgattacattcttatgagatatcttgaaatggagtgatgtggtttggatctgtgtccccactcaaatatcatctcaaattgcaatccccacgtgttgagggagggacctggtgggaggtgattggatcctggggatggtttctcctgctgttctcatgayagtgaattctcacgagatctgatggttttaaaagtggcagtgtcccctgcactctttctcctcccaccatgtaagacatgcttcgcttttctttcactttgcaccatgattctaagtttcctgaggcctcctcagccatgtggaactgtgggtcaattaaatctcttttgtttataaa

SEQ ID NO: 444618 - DNA, 593 bp, Homo sapiens
ccacctctttgagcagtttgtaagggaaatgatgtgttcaggagtagctacaatttagttaagagaaaaaaggtgaaggtaactctaaagagaagaactttattaatgccagactttttttttttttttaacagacttaagccagattgggttttgagaagagataacatggaagaaatcacaaatcccctgcaagctattcaaatggtgatggatacgcttggcattccttattagtaaatgtaaacattttcagtatgtatagtgtaaagaaatattaaagccaatcatgagtacgtaaagtgatttttgctctcygtgtacaacttttaaaatctgactttgttttaaaaaaacataaactgttcattacattcttcatttttatcatttatagttttatgcatgtaataaactaatatgtcataagatgattatattattcctgtctattatcttaaagtattatagtagtttcaatgtaatcttattactaaaaggaaataatagctgattacaccttttttataggtaagttgaggaattttcataaaacaaatgttagaaattgaagttctgtctactcactaaga

SEQ ID NO: 444619 - DNA, 593 bp, Homo sapiens
ccacctctttgagcagtttgtaagggaaatgatgtgttcaggagtagctacaatttagttaagagaaaaaaggtgaaggtaactctaaagagaagaactttattaatgccagactttttttttttttttaacagacttaagccagattgggttttgagaagagataacatggaagaaatcacaaatcccctgcaagctattcaaatggtgatggatacgcttggcattccttattagtaaatgtaaacattttcagtatgtatagtgtaaagaaatattaaagccaatcatgagtacgtaaagtgatttttgctctccgtgtacaacttttaaaatctgactttgttttaaaaaaacataaactgttcattacattcttcatttttatcatttatagttttatgcatgtaataaactaatatgtcataagatgattatattattcctgtctattatcttaaagtattatagtagtttcaatgtaatcttattactaaaaggaaataatagctgattacaccttttttataggtaagttgaggaattttcrtaaaacaaatgttagaaattgaagttctgtctactcactaaga

SEQ ID NO: 444620 - DNA, 519 bp, Homo sapiens
aatataggataaggaacattgtaaagaaagaaaaggaaatttggatagccatcactgcatctatgccaacagggacaaaaaccttgcactttttgaaaaatatctttctgtattgagaatgtagcttttatgtaggtgcaagattgttataggaaaggcacccttatagactataacataattcataaaaaaacaaagtcattatatgacaacttacagccaaagggaagtaaaggagttaaagctggaaaatttaatggcagcaaaagacagtttgataattttagaaaaagttttggttttaaaaatgtcaggaaacagaagtagcttctgccaacctagaagcagcagatgaattcccaggtgccattaagaaaatcattgagaagaaaggatatctgyctgaatgcactttaaatgcagacaaaaatgtcctaaataaaagaaactgacacaaaggacatttattagtaaggaagacaagcaagtaccatgatttaagtcaggaaggggtatgct

SEQ ID NO: 444621 - DNA, 489 bp, Homo sapiens
gtcaatgctctggaagagaatccagatagagaacccctgaaagaaagagcatcataaaagtctggaagaattacactactgaagatgtcatttgttgttgtataaatagctgtgaatgccatcgatcataaaacaataaattcctgctgcagagaactgtccagatgtgcatgccttcacaggatttacaatggagccaatcaaggaagagtgtggatatggcaaaagaaaaaaaaaaggtaaggagtgaaaggtttaaagatatgaattttgcagaaattcaagaggtaatagacaccacagcagagaaattaatagaagacttgatggagaagagkgcttctgaaccagtgccaaattatgaggaagaagatagagaagaagcagtgccagaaaacaaatttacattagacaatctggcagaagggttctgattattcaagactgcttttgacttcttttatgacatggacccttctatgatatggg

SEQ ID NO: 444622 - DNA, 570 bp, Homo sapiens
cttttgtgcctccctacctgttaagtctgcacaccagattcacgccctttcctgagttctggacaggaaagtttgtgttcggttggaattgttactaagttcagctggaggtttccttctccctgtggtcttttcccagttcctccggcagcccctgtgagacaagtcagaaatggcttctctggggacccacagagacgayggggctttaccctttgcttcctctacccctgtatttcgctcagctctctaaattgtctgagctccaggtaaggtcaaatccttctcctgtgatctagaccttcaggttccccaagggtgtgtgttcaggggtggacaatacccctttcacacttttcacagtttgggcattcacagtatgtgggctattttctgggtcatgcaggagcaatatactttcttcagagggtctgtggattatcttggctttcctgttatatccttgcagcagttcttggagcaaaagttcacaatgcgagtctccacatcctgctctgtccatccaagtgggagctgcaagttagtcctgcctcctatccaccatttttt

SEQ ID NO: 444623 - DNA, 622 bp, Homo sapiens
tgtcatgaaaattattatctaagtggatctgatttaattcaatgctataactttggttggtacccagaatctcctgtatgcgaaggtaaatttttaaatttaatactcgcaaaatgccatgtctttatcagctttaatctctattagctctgacaaaattcctgtggtcatatctattttttttcctgagtcctatttttaaaataaatattatcttttaaatcagtgctattttyagcaatctttaatatatcccacctgaataaatcttgttttgtcttagtttgtaaatgactatatcttttaaatttattattttaaaatatctattatacattttaaatcccttattataacgaataacttttcttattgggaattattaggactaattaccccaatctggcagctttgcaaggatattttctcttaatttgccacatatttccagatgtaaaaattaatctccaaaatagtgaggtagaaagcagagaaagcaggaaaagcagaagaataatgcccagaagtgaaaatgggaaaagaggtcatcttgtaaaagctgcccaaaaatgtaatatctatggtcacatttctattactggaagtgtccaaacaggtaatg

SEQ ID NO: 444624 - DNA, 625 bp, Homo sapiens
tcccttggctaggaaaggaaaatcccccaaccccttgcacttcccagggaggcaatgccctgctttgctttggctccccctccatggactgcacccgctgtccaaccagtcccagtgagatgaaccagatacctcagttggaaatgtagaaatcacccatcttctgcatcgatcacrctgggagctgcagaccagagctgttcctattcggccatcttggaacagaatcaagatcaattattttcaatggcattttgtttttaacaattagttaaaaaaagactataaacaaccaataaagaactgtcatgcaaaatactggaataacaaacagagatttagagatacacattttattttagtgaattaagacacattctcttgggatttgctcaagtaaactgtgatcaatacattaaagtgccaataacagtatataaaactagctagtttgaaaatatttatgagattattagttagaacatatttcaattttatttttgtgtatgcttgatttattcagattatttttgtcttgaatgtcaattatttattttacacaagaattaatatataattttataaactaaccattaatgaaagattattaaatgagaaaaacaca

SEQ ID NO: 444625 - DNA, 581 bp, Homo sapiens
agttatgacatcttcctatcctctttttgatgtttttattgatgtatcttttgttattacttctattaatatgtatctgtcttgacatgccttgctaagggtctatacattttattagtgttttcaaaaaaccaacatttgcatttgttgattcatcaaattttgctttctattttattaattatgctrttatctttattatttcctttcttctatgttcttggatttcttttgttactctttttctggcttgtttagatgaatacatagattactaattttcagcatttatattttttctaatacatgaatttaaaaatagaaatttctctctgagcacaactttaacttcatccaaaccatttttatatcttggatttttactgtcattcagctcaaaaattttatagtattcattttgatatattctctgtgctctgaatcatttagaagtttctttttaaagttctgaatatttaggggattttctagttttcttttggttactgatttctagtttaattcaattaagacatactttgaattatatctgcactttaaaatttgttgatatttgcttt

SEQ ID NO: 444626 - DNA, 439 bp, Homo sapiens
cactcttgtcttttggcttcaaagatttcttgaaaactaactggctggttgtctgggcccagatctgtaaagcccattttctgcagtttttggtacctacagcattcatagtgctgagtgtaggtttttcttttagattttccacattggtacaaagaagcatatcttggagcttaacgaagtcacagtgattttcattttccacttggaaaactccccaaggctagtgacggcctctgaccatccttttaccaactttcacttcatccatactccctaccacagcaaaggrtaacagcccatgtttttggccgggcgcggtggctcacgcctgaaatcccagcaccctgggaggcgaggggagggatcacgaggtcaggagattgcccgaccaccccggccaacacggtgaaaccccgtctccactaaaaatacaaaa

SEQ ID NO: 444627 - DNA, 614 bp, Homo sapiens
acacactttaacaattcttccaggctgttattcaacaacaaaaatcaattcatttccatgtgaaatgcaattaatgcttcattcgatgtcatgttttcagagagtttaagtataataaatacttgcctgtttttaatggttttatgaaggtcaaactggactgtgccacagcgataatgggttttgtccttttgtttgttttagaaattggagttctgaatattgataaatctaaaataaattagaaaacaaaactaagagcattaaaatayaaattccctaaataggtcagtgatttgaaagttaaagtttgggttcttcacaatcatattcatttagcaaacacttaataaccactgtactccacgcactaatgctatgaattcagtggtttatcaaaccaacatccagaagtcacagaccataaaccacaatttattttgtgtttacagaggctaaagtctagattcaaccaaaacttattgtgtctgtatattccagactctctacgaggtgctgagaatatgcagaattgaaaaatatggtctcagccctgaagtagttctcagtctggtaaaaaaagaagtttaaaaatggtagaagagccttcccag

SEQ ID NO: 444628 - DNA, 500 bp, Homo sapiens
gattaagaataagttttgtgatgttgcttaaaagcatcaaacataattatgctattaatattgcagatattttattgacataattgtttagtttctatttaatattattttttatagcaacacaccaacttaagaggtgcaaaatagcaggagttaatataaaaacattactcaagctatctgggaaagaatttaatcataattctagaatacgttacagatgttcagacatcttcagatacaggcactcagtctgtataaacgggaaatggaatcctgaagtagactgcacaggtaagatttgtttaaaacattttkttgatcttgttgcttctttacaagaaaaattattttgaaattagaatgtttttaaattaaatatttattgtggcatataatttctatgctaatagtaaagtagaaactagttataatactctttccagacaaatgttattctttaaaagccttggctttctggtaaagatgagagagtaaag

SEQ ID NO: 444629 - DNA, 601 bp, Homo sapiens
ccaaaacataaaatgcaaaggttgataggactataaaatgaaagttgaaatgtttaagcagkttttatgtaaagtagttgtgtatcctttaactaaatgtttcgtggaaatggatattatgcctgactgaggaatgtttcccctacctagtactgtaaaacaggacatataaatccaccctatgagcaatattaactgaacatgctaagtgggagctagtaagattgtccaaggctagagtttagggtgaaagctgagagtgctggtagggatgaatcctccacttgatagccctttgtggaatgttcactaggactgatggcaaaagcctgtgagtgcctcccaacagcgactactagcgctttggaggagagaatttccactttaggggcatttacggcattgctatgggaaaatacccctctgcaagtgaaaacagcagtgcacagaagacttccatgataaaatggaaatgattcttataggatcttgctacttggggagcacaaggaggagattctaagaatcagggagctattttttcctctaggactgactttttcccctgtgattcaattcccacttgacttatggatgacaa

SEQ ID NO: 444630 - DNA, 510 bp, Homo sapiens
tactgggccccgactcgtttttcactgccaatacactgctgctaaagctatatagtatcaagcaccttccctaaagtttcagggatcatcttagaagaggagggcgcttgagattgtaagagctggactagatgagtggaatgtggaggccaaagtaactccgtcttagaagctaaactgccttgttggcttctgattaacttcagaagcaacttctgttgctccttgtgtaagagcaggtacttaccatcaatcctgtccttaggtaaaacaaccttgaagttattgtacttcaattgtcctacacatcccttctgaaccacccctcctgtggggtatgtaagccctgagactgagggataatggctcagagatccaccatcttgtctctctgccacttctgacacagacatggctctgttcattaaatctgtrttaaatgtttctttctaagaaaaaaaaaagagattacatggaagccttgatatttatttcaccagacctgtctgg

SEQ ID NO: 444631 - DNA, 480 bp, Homo sapiens
catcatgggggcagtttaacccatgctgttcttgtgatactgagtgagttctcttgagagctgatggttttaaagtgttgcatttcctctctctctctccctctctctctctctccctcctgccaccatgtgaaaaaagtccttgcttcctcttcaccttctgcgatgattgtacatttcctgaggcctccttagccatgcagaactgtgagtcaattaaacttctctcctttataaattacccagtctccagtagttctttatagctgtgtaaaaacaaactaatacagaaaattggtgctgggagtggggcactgcgatagagatacctaaaaatgtggaaaagactggaactgggtaamgggcagaggctggaatagttgggagggctcagaagaagaaagaaaggtgtggaaaatttggaacttcctggggactggttgaatggttttgaccaaaatgctgatagtgatatggaca

SEQ ID NO: 444632 - DNA, 613 bp, Homo sapiens
gaatctctactagggcaatgcagaagggaaacatggggttggagcttccacacagagtccccactgggagactgcctagtggagctgtgagaatasggttaccaccctctagatcccagaatggtatatccaccaacagcttgcattgtgcaccagaaaagtcgcaggcactcaacaccagcctgtgaaataagctgcgggggctgtaccctgcaaagccacaggggcagagcagcccaaggccttgggagcccacctcttgcatcattgtgttttggatgtgagacacggaatcaaaggagtttattttggtgctttaagatttaataagtgccctgccagttttcagatttgcatggggcctgcagcccctttggtttggccaagttcttccatttggaatgagaacatttacccagtgcctgtacccccattgtatcttggaagtaactaacttgtttgattttaacagctcatggtcagaagggacttgctttgtcagatgagactttggaattggacttttgagttaatgctggaatgtgttaagactttgggcgactgttgggaaggcatgattggttctgaaatgtgaaaaggacatgagatttgg

SEQ ID NO: 444633 - DNA, 613 bp, Homo sapiens
gaatctctactagggcaatgcagaagggaaacatggggttggagcttccacacagagtccccactgggagactgcctagtggagctgtgagaatacggttaccaccctctagatcccagaatggtatatccaccaacagcttgcattgtgcaccagaaaagtcgcaggcactcaacaccagcctgtgaaataagctgcgggggctgtaccctgcaaagccacaggggcagagcagcccaaggccttgggagcccacctcttgcatcattgtgttttggatgtgagacayggaatcaaaggagtttattttggtgctttaagatttaataagtgccctgccagttttcagatttgcatggggcctgcagcccctttggtttggccaagttcttccatttggaatgagaacatttacccagtgcctgtacccccattgtatcttggaagtaactaacttgtttgattttaacagctcatggtcagaagggacttgctttgtcagatgagactttggaattggacttttgagttaatgctggaatgtgttaagactttgggcgactgttgggaaggcatgattggttctgaaatgtgaaaaggacatgagatttgg

SEQ ID NO: 444634 - DNA, 576 bp, Homo sapiens
taaaaatgaatgtagttaaaagtttaaattgtgatttagaaatctgttaatttttcttactaaaatagagctccgaatatgtaataaaacaagtactactcatagtaacactaaaattatattaataaaacttaaaggctcatctttcaaatktacatttttatgcagacaaaagctaatgatagattaataataaatataggttaaacagaagtataaagtagtggagggaaaattgtctaaatagatgtttgacaaattattttgaactccttttctttttataaagtttgcagatggttgtatctcagcatgtcatgggtcacatgtggatttcaacagcactttgaacaaaattacttctaataatatatggaaaagtgggaaaatatttagatttcattctttgaaatatcatgaatttttaggaaaattaagagtatatacattcaatcacaaaagggagaatttataaagaagtaagtctggagtacagaaacacttctaataaaaggttttgatcaaatgttaaataaagctcttatctcagcaatatttgcttatttttattgaagc

SEQ ID NO: 444635 - DNA, 570 bp, Homo sapiens
ccccactccctcccattgcttctccttgccattcttcctatcatatttagatagccacttagtcaagccaaaacctaggagtcctcctgaactcttttctctgcctcactgtcccccacatctaatcaattatcattataatgatgtcacatcctaaatatcttatttcagcctattttgtaccatcctgctgctgccacyggtgtaagtgactaccttatctttgccagatgactgcctcgttttcctcagtgatttctctttgcccacactttttgcccttcagatcagtctctccatattacagtcagtgatgtcttttaaaaattcccagtaagcatcgcattctatttagtgacttccaaaatctttaatttgacctacaaaggccttcacaatcagggctccaacctctccaagtttcgcatactcctctctgtccttcactcctttccactcaatccatactgggtttttattagcttcttggaaatgtcatgttctttgctgtatttcatgttctttctctacatgaattcttatcatttctcccatccaatctcagcctat

SEQ ID NO: 444636 - DNA, 570 bp, Homo sapiens
ccccactccctcccattgcttctccttgccattcttcctatcatatttagatagccacttagtcaagccaaaacctaggagtcctcctgaactcttttctctgcctcactgtcccccacatctaatcaattatcattataatgatgtcacatcctaaatatcttatttcagcctattttgtaccatcctgctgctgccaccggtgtaagtgactaccttatctttgccagatgactgcctcgttttcctcagtgatttctctttgcccacactttttgcccttcagatcagtctctccatattacagtcagtgatgtcttttaaaaattcccagtaagcatcgcattytatttagtgacttccaaaatctttaatttgacctacaaaggccttcacaatcagggctccaacctctccaagtttcgcatactcctctctgtccttcactcctttccactcaatccatactgggtttttattagcttcttggaaatgtcatgttctttgctgtatttcatgttctttctctacatgaattcttatcatttctcccatccaatctcagcctat

SEQ ID NO: 444637 - DNA, 618 bp, Homo sapiens
gttaccactttagcaagggacagttaacaatctaatgagtataagaatcctttctataggatgaactcctcaaaagagacattgatagctaggggttagaatgagagactagaagagaggaaaggggtctgggggataagaaggcttcaaagacaacttagtcctgtcccagtattggctgaaggatagtgatcatagagaggtaatttttattctctatgaaaatccatggagacatgtgaggcccaaagagagatgaaagtatctgggtgaggactgttcattgcaggaccttcaatgtggragactcgcctacaataatagagaagagttcaggtaggctttgcatgagctgtggtaggatccacacattttatgtggcattttaaaagcatcatctttttacagtttctatatcttatagcattatctaaaaacttacatgaattatctaaaaacttaaatcatttgaaaaataagatgtccaataaaaacacaaaggagaagagatagagattcatggtaaaatatggtaaaaattcaataattgtactctctatgaagtagtatagagctatttgaaagtggacttggattagctataaatatatattgtaa

SEQ ID NO: 444638 - DNA, 545 bp, Homo sapiens
cctgcacaagatgattataacagatttattcataattgtcaaaagctggaagcaaccaagatgtcctttagtatgtgagtagatcaataaatgatggtacatctagacaatgacatattatgcaccaaaaagattgagttttcaagccttgaaaagacatggagaaaacttaaatgattattactaagtgaaagaaactaatctggaaagaccatatactgtatgattccaactatatgaaattttggaaagagcaaaactttggaaacagtaacaagatcagcagttgtcacaggttaggaggaaggaagagataaataggcagagcacagcagatttttaggacaatgaaactatccgatatgctactaaaatggtagatacatgtcattctacagttgtcaaaaacccacagaatgagcaataccaacagtgaattctaatataaaccatggactttgggtgatgatgagtcaatgtaggctcatcaatcataacaaatgtattatgatggtgctrtgaggagagtaacagtaggggaagtt

SEQ ID NO: 444639 - DNA, 566 bp, Homo sapiens
ttattgactgaaggaaaggacttgttccaaaaaaaggagatatggtttggctgtattcccactcaaatctcatcttgaattcacacgtrttgtgggagggacctgatgggaggtaattgaatcatgggagcagttctttttcatgctgttctcatgacagtaagtatcacaagatctgatggttattataagggggcgttttcctgcacaagctctttttggttgctgccatccatgtaagatgtgacttgctcctccttgccttctgccatgattgtgaggcttccccagccacatggaactgtaactccaattaaacctttttcttttgtaaattgcccagtcttgggtatgtctttatcatcagtgtgaaaatggactaatacagaaggagatggctaagtcccagtgctgacccagagcactttgtgcagccctcaggtagagatcaaaagctgtctgtcctgtttgtccctggtgctctagtctctggtacagggcctggcactttgtatatatgttctttatggacttaaatatatatctgcttaactgaagaagccttt

SEQ ID NO: 444640 - DNA, 570 bp, Homo sapiens
cacactttaagtcactcaaagaatacctgtgtagtaagaacacactaagtgagaaggagtagggtggtgctagacagggaacacaggctcagaaaaggcaaatattccatattcacccagctaggaaacaggccagccaagaatggaaggcagcctgcctggttccaccactccatctctcctgccatcctgccacggtagatagacactcatatatagaaactagttyaaacgatttgttttttcctgctttttcacaattttaaactttaaaaggctaatccaggtttttgcaaattgctctagctttttgaaggtatagccatgggttggacacagtcaactaacaagttacttctagaagtcttaagtcttgtttgcccgcttcctagatgacttggtttttgatgcctcagtgtgtgccactattgtaagaatgaatctagaaggagtctgcttttgtagccagtaaggtgagggggtgtctcagaaaagcctagggagcacttgtgatgtgtagagagaaggaaaccttgttcaggcttctgtatataagaaaaatggctagtg

SEQ ID NO: 444641 - DNA, 570 bp, Homo sapiens
cacactttaagtcactcaaagaatacctgtgtagtaagaacacactaagtgagaaggagtagggtggtgctagacagggaacacaggctcagaaaaggcaaatattccatattcacccagctaggaaacaggccagccaagaatggaaggcagcctgcctggttccaccactccatctctcctgccatcctgccacggtagatagacactcatatatagaaactagtttaaacgatttgttttttcctgctttttcacaattttaaactttaaaaggctaatccaggtttttgcaaattgctctagctttttgaaggtatagccatgggttggacacagtcaactaacaagttacttctagaagtcttaagtcttgtttgccygcttcctagatgacttggtttttgatgcctcagtgtgtgccactattgtaagaatgaatctagaaggagtctgcttttgtagccagtaaggtgagggggtgtctcagaaaagcctagggagcacttgtgatgtgtagagagaaggaaaccttgttcaggcttctgtatataagaaaaatggctagtg

SEQ ID NO: 444642 - DNA, 635 bp, Homo sapiens
tcaggccatgtattgatcagagcatgagccaaagtcaagttatctatggacagagtataaragacaactcaggcttccacactggcttagtatgtagtgttccctatcgggtcaaagaaacctgatttaatcacactgtagcttttgggaagtataaatatagctatcatttattgagtgatacgtttctgtaatgcatttatatgaattaatcccattaaatttgcctaaaaacttccataaaatatgtaaaactctattttacatatgaggaaactgaggcataaagaaactaaaaagcttaaactgggcgatactatttcaaggtaataaaacacaaggctctaaattccaaaaacatttgtgcctagggtcactaagaaaaaaatctttgctactggattatatcatgcttttctcaatatggttcttttccagatagcatgggcactatcatatgatagacatgaactttcttacatgttcttttttttattgtggtaaaagacacaaacatgaaatttaacctcttaacaacattttaaatgtacaatacagtattgttagctataggcaccatgttgtacagtaggtctccagaactttttcatcttgcataacagaaatttaatacc

SEQ ID NO: 444643 - DNA, 547 bp, Homo sapiens
ttccacatccatgaagcagtgtgaggaagctggcaagacttgaagaaggagcttccaaaacctctccagatgtggccgaggataagataaaatgaatgggctgggtgcagtggcttacacctgtaatcccagcactttgagaggccaaggcagaccgatcacaaggtcaggagatcaagaccttctggccaacatggtgaaaccctgtctctactaaaatacaaaaaattaggtgggtatggtggtgggcgcctgtagtcccaggtactcgggaggctgagggaggggaattgcttgaacccgggaggtgaaggctgcagtgagccaagattgcaccattgcactccagcctggtaacagagagagactccattgcaaaaaaaaaaaaaaaaagataaaatgaatgacatcagtgaaggtaggacaaaagagacaattccatcaggtaaatcaagyactcatgatagaacatttcccacctccagggtagagtacccttgcaataactatctaatgggatttcagaattgctttaaacaagtgaatg

SEQ ID NO: 444644 - DNA, 538 bp, Homo sapiens
cagaaagcttttgttaattttgkcaaaaattgtgtacctttagtcaacctatggttgcaactgataaacgaacattctaatgtgactgttacttgacatttttctttacatacattacagtgaaagactaacatgaaaaaatgaagaagtatgttgaaacttcacttaattggcaataattgcaggatcaaatgcattttctaattctggaaaaatattcctcattttttttctgcttttctcaatgtaatgagtattttcacatcatacttttaaatttaatttgcattattaacattatcttcatcatttctaaaagtctaggtcaaaagtcaacaaactatggccaacgggaaaaatttgattaaatgtttgttctgtaaataaagttttactggggcatagtcacactcatttgtttatagattgtctgtagtggctttcacactaccgtggcagctctggctgagagattgtatgtcccgcaaaatccaagatattaatattatttggccctttacagaaacattttgccagc

SEQ ID NO: 444645 - DNA, 595 bp, Homo sapiens
catatctcattaagccctgccaagggaacttaatcctgaggacagtagacagtcactgaaaggttttaggtagaaaagtgagattgtctgattcatgtttcagataaatagggcagtgaaattgtggagaatggatataattatatggagagcctatggcataktggttaagctactgtgtggtgaaattgcctaggtttattccagatgttataacaatgttaaaagagttttttaaaggcaatagccgctgagttgtggcttcatctttgaaggtaattatctgatcacacacgcaatcattgcatattcctagggagtgtccttagatttgggtgcaagcttccagcgttgggacctaagacagactatcaaaatttggaaagagacctcaagccaaaaacctgcattgaaatggatattagactaagagaggtcagagtggtggcctagaagctgggtggggagccaagtggctgttggacaacaaaagaaggcaagaaagagcaagaaacatgagtggagatgctttggagaatcctggagatagggtgtcaatgcttgtagcagctctgaaacatgtccccagtgcatg

SEQ ID NO: 444646 - DNA, 568 bp, Homo sapiens
gtacatacacaccatggaaaactaggcagccataaaaaagaatgagatcctgtattttgtgggaacatggatggagctagaggccactatcctttgcaaactaatgcaggaatagaaaaccaaataccacatgttctcacttacaagtgggagctaaatgataagaacttaggaaaacaaaaaaggaaacagacactggggtcgacttgaagggggagggrtggcggagggagtggaacagaaaagataactattgggtactgggcttaatacctgtataataatctgtacaacaaacacctgtgccacatatttacctgtgaaataaaccttcacatttacccccaagcctaaaataaaagttaaaaaaagtttatgaattgtttgatttaaaccttaaatattgttagggttcattcacttctcttaataaattgtagagaacatggtcgtgaagatcatggctgggagggttagaattagaactcagagctcccgagtccttttgaaatttttatcattaccctgcctgatgacaaacactgcctttttctgccatagagagatg

SEQ ID NO: 444647 - DNA, 568 bp, Homo sapiens
gtacatacacaccatggaaaactaggcagccataaaaaagaatgagatcctgtattttgtgggaacatggatggagctagaggccactatcctttgcaaactaatgcaggaatagaaaaccaaataccacatgttctcacttacaagtgggagctaaatgataagaacttaggaaaacaaaaaaggaaacagacactggggtcgacttgaagggggaggggtggcggagggagtggaacagaaaagataactattgggtactgggcttaatacctgtataataatctgtacaacaaacacctgtgccacatatttacctgtgaaataaaccttcacatttacccccaagcctaaaatraaagttaaaaaaagtttatgaattgtttgatttaaaccttaaatattgttagggttcattcacttctcttaataaattgtagagaacatggtcgtgaagatcatggctgggagggttagaattagaactcagagctcccgagtccttttgaaatttttatcattaccctgcctgatgacaaacactgcctttttctgccatagagagatg

SEQ ID NO: 444648 - DNA, 568 bp, Homo sapiens
gtacatacacaccatggaaaactaggcagccataaaaaagaatgagatcctgtattttgtgggaacatggatggagctagaggccactatcctttgcaaactaatgcaggaatagaaaaccaaataccacatgttctcacttacaagtgggagctaaatgataagaacttaggaaaacaaaaaaggaaacagacactggggtcgacttgaagggggaggggtggcggagggagtggaacagaaaagataactattgggtactgggcttaatacctgtataataatctgtacaacaaacacctgtgccacatatttacctgtgaaataaaccttcacatttacccccaagcctaaaataaaagttaaaaaaagtttatgaattgtttgatttaaaycttaaatattgttagggttcattcacttctcttaataaattgtagagaacatggtcgtgaagatcatggctgggagggttagaattagaactcagagctcccgagtccttttgaaatttttatcattaccctgcctgatgacaaacactgcctttttctgccatagagagatg

SEQ ID NO: 444649 - DNA, 591 bp, Homo sapiens
tgctgcatttttcagctccatcaggtcatttatgttcctctctaaacgggttgttctagttagcagctcctctaaccttttatcaaggttcttagcttccttgcattgcattagagcatggtccgttacctctgtgaagttcgatattacccaccttctgaagcctacttctgtcaattcatccatctcatcctccgtcctgttctgtgcccttgctggagagatattgcagtcgttcgaaggagaagaggcactctggcctttccggctttcagtgtttttttgttgttgttgattccttctcatcttcatgagtttgtctagtttgtatctttgaggctgctgatcctttgatgaggtttttgtgggagctttatttttgtttgtttgctgctgctgttgttgctttctgtttgtttgacattytttcaatagtcagttccctcttctgtagggctgctgtggtttgctggggttcacttcaggcactattcatctggttcactcctgctcctggagatatcacttgaggaggctggataacaggaaagatgggttcctgctccttcctcttggatctctgaccttgag

SEQ ID NO: 444650 - DNA, 512 bp, Homo sapiens
ctttcaaatttctgcttttagtttttgtaccacagttaaaaagtaacatccagtagtttttcctacctgtgggagacatatttcaatatctccagtggatgtctaaagcagtagagagtgccaaactctatatatacagagaaagattgtttggaaggctaagtcttccctcttaataagtaaaggtttttgctttataaaaattttttgagtcattttgcctaaataaatgacttatggtaacctggaattgtatttgataatatcaattgttttaaaccattaacatatttgataggcttccygaaatcaaacttcagcttcaaaaatgtcttttctgacccctaactttggaatgctacagagagcccctggagcatccaaaagagaggtaaacaggattatttgacatgtttagtatgcggctcatctgtagcagctgctgtgaagacactgactgcagcagtgtaggtgtggctggggttgcatgctcaaaagggccagcaagaacc

SEQ ID NO: 444651 - DNA, 512 bp, Homo sapiens
ctttcaaatttctgcttttagtttttgtaccacagttaaaaagtaacatccagtagtttttcctacctgtgggagacatatttcaatatctccagtggatgtctaaagcagtagagagtgccaaactctatatatacagagaaagattgtttggaaggctaagtcttccctcttaataagtaaaggtttttgctttataaaaattttttgagtcattttgcctaaataaatgacttatggtaacctggaattgtatttgataatatcaattgttttaaaccattaacatatttgataggcttcccgaaatcaaacttcagcttcaaaaatgtcttttctgacccctaactttggratgctacagagagcccctggagcatccaaaagagaggtaaacaggattatttgacatgtttagtatgcggctcatctgtagcagctgctgtgaagacactgactgcagcagtgtaggtgtggctggggttgcatgctcaaaagggccagcaagaacc

SEQ ID NO: 444652 - DNA, 581 bp, Homo sapiens
tcacctctccccactcttggcacctactctggtgtggagcaaagttgtggtcgagcctgggcactcttgtgacccaactgggtgtgtgagtgcttgagatggcactgacatgccaactccctgccacctcagcttcctctggactttgggtgcccgggagcaaaggagggaggcctgcaggttcccctcagcacaaatgacctgggcatcattgatagcatgttgatggtgtgaggcagacaggttcctgcatggaaagaggcaggtctccagtaaaaccccaccttcaagccagggatggcctgaagcctggaggccaggctgccaatttcaagtagagttgctgaccaggagtgagaacttatggtcttctcccaggcctgcccatggctgcccattgaccaatcagcacacacctcctctcttttgagcccataaatacscttgactcagccagactcacacagacatcaggactaccagctacaggaaggagctatccattttatatctcctcaactcatcaagatgacctgtgtgtagaaacgtgctacccactattggtctcccctttcccgaga

SEQ ID NO: 444653 - DNA, 515 bp, Homo sapiens
tgagtgcagcctgccaagcctagtcagtagaaggagcccagtagaagtgagcaaaacccaagcaaagatgccaccggagacagaggtttctggctggccaagtgaagccctaaggacactgtgacaataccttttamaattaagcatacatacctatgataaagtttaatttataaataaggcacaataaaagattaacaaaaataataaaagagaacatttataacagtttaagaaactctatagatatggcttccctctatctctcttaaaatatattattgtactataccatgggtaattgaaactatggatagcagaactgcagataagaagggattactgtacacaccacaattactttattacagaattctgaaatttgctatgtatttaaccttaccagtgagttttatactttcatatgttttcatagtattatataatgccctttatttaaatttgaaaacgctttttagcatggtttttaggacatcctatatttataatagtcc

SEQ ID NO: 444654 - DNA, 534 bp, Homo sapiens
cttttgtttggctcttctaatagcctaatttcgactaacctttcttcaagttccttgattcttttttctgcatttttgagtctactgttgaaacactctattagattttccgttctrtcattgtattcttcatctccaatatttgtgtttggttctatttttatggtttctatttctttattaaactttttatattgtttatacacttaaatccctcagatactgttgtttatttgggttctcttgcatcacgctgagcttctttaagataattgtgaattatttgtcatacaattcatagatctccatttctctggggttggttattggaacgttattagtctcttttgatgttatatttgcctacttgttcattatcagtgcagctctgctttggtatttgtgcatttgaagaagcaaacacttcctcctgtttttacagactgatttaggcaagtaaagacctcttcctttgggtctctggcctaatgagattgcccccaagaatcacagttgagtaggattggtgctagg

SEQ ID NO: 444655 - DNA, 534 bp, Homo sapiens
cttttgtttggctcttctaatagcctaatttcgactaacctttcttcaagttccttgattcttttttctgcatttttgagtctactgttgaaacactctattagattttccgttctgtcattgtattcttcatctccaatatttgtgtttggttctatttttatggtttctatttctttattaaactttttatattgtttatacacttamatccctcagatactgttgtttatttgggttctcttgcatcacgctgagcttctttaagataattgtgaattatttgtcatacaattcatagatctccatttctctggggttggttattggaacgttattagtctcttttgatgttatatttgcctacttgttcattatcagtgcagctctgctttggtatttgtgcatttgaagaagcaaacacttcctcctgtttttacagactgatttaggcaagtaaagacctcttcctttgggtctctggcctaatgagattgcccccaagaatcacagttgagtaggattggtgctagg

SEQ ID NO: 444656 - DNA, 596 bp, Homo sapiens
ggctacatatggccctttatagaaaatctttgctgacctccaacttacgttgcacatgtggttaaaaaccagcttcatccaattcgggaatgtgagttttrcaactgacaatattgtagtagacatatatgtccttcagtttatctgacctagtaaaacagcaggagaaaacaaagtaaaacaagcacatatatatattttaaaaaagacaaaacatgttgagtattctgtgcataatataaaacctgtggtttgccatgggagattggaagaaatttgagcaattatcccttcaacatacatgagtaaagagaaaattgactatagctggacaaaacctaaataaaatgagtgccatggaaagttggggatttgtgcatgcccttactctttcatagtatctaagggggcttaattgttgtggattggatacactaactcagaaggataacaaagtctcttgattgcacatgatgttggaagacaggctaatttagtttaagaatttatattagaaagtaaaatcaccaatctggaggaataaattatatgagtggaatatgagagttggatgaactatacaatggtaacacaca

SEQ ID NO: 444657 - DNA, 419 bp, Homo sapiens
aacaagcagcccccagagtcttagtggtttcaaatacaacccaagtttacttctgccttctgctatgttttcattgcggmggttgtgagttctttcctttataggcatccagggataaagactgatagagcaggcaatatctcaagtatgtttgacaccatgctgaggcaagtatatactctggactctggcctacaagaattacatgtcatgttttgctcacaaatctttgtccagagcccttttacataactgcactgaaacatgggggcaggaaatagaaatatacctgaaatggtacttgaaaaggtacccatggggccttatgtgatcacatcagcctctgcccatgttacctctgagatctcatctcctattactctcgcccttacttgatttcaattctgccacaatagctt

SEQ ID NO: 444658 - DNA, 229 bp, Homo sapiens
catatatgtatttatgtgttctaaagaaaaccatacatttaggaatgggatagtgtgtctgcatgtatgtgtgtatgtagaaaatttagaaaaatataaatctccatatatcaatataaattttctcattaatasattaattatctacatctatatagatatatcaaaaataattcttaaaactgtacatcaaaatactattgatgcaggctgggcatggtggatcata

SEQ ID NO: 444659 - DNA, 591 bp, Homo sapiens
tgaaattgatctacagatttaatgtaaagcccataaaaaccccaagggaactttggtagatatagacgaactgattctaaaatgcatatagaaggtcaaaggaatgaaaataaatataaaaaacttttaaaaagaataaatttggaggaataactacttaagtattactataaagctacaataattaaaagtgtgttttaacaaagggttagatgcatagataacagaacaaaatggaatctagaaatagacccacacaaacatggcctttgatctttgacaaagttgctgaatagatttaatggaaaattggaagatggcgtcaagatgattatatttaaaataaaaaggaaaagaaaraaactcaaatatttcttctcatacaaaaatttacttaaaatggatcacaaatataaatgaaaaatacagaactgtaaaacttttcaaagagaatgtacaagaaatcttgtgttaggtagagcttttaggtgtgacattgaaagcacaattcataagaaaagaaaaaaagtcataactgaatagcatcagaattaaaacttttgctctctgaaaaacactattgagggaatt

SEQ ID NO: 444660 - DNA, 607 bp, Homo sapiens
ttctatgctactcctataagacatataaaactttttatctggctttttcatttaaaattttagtatatgtatttctctccatgcaactaaaactttgaaaatatgatttttaatgatagcataatgttttattgcgtgatagtatyaagatttactcacttctttgtttaaaattttggatatttccagaattattctaaatataggtgccatattgtgataaacattttagtttatagatcattgatgacttttcaagatatttgcttggacatccaaagtggatttgtcccttcaaagaatgttggcattttttaagatgcttgatatatattttctaattatttcaagaaatagtgcaccaatttacaatcctagcaaagagcatctgtctcataagcattagccagttttaaagataattagtgttttctggaatggacatacacccacatgcatgcatacacatgaaaaatcatcttggtgatcaagttatttagaataaaattctaataaacattcctatattgctttgtcttatgtgtgttccatgacattttactatttaaaaaaacctgtaagtatgaaagaaattggcaaagcttga

SEQ ID NO: 444661 - DNA, 607 bp, Homo sapiens
ttctatgctactcctataagacatataaaactttttatctggctttttcatttaaaattttagtatatgtatttctctccatgcaactaaaactttgaaaatatgatttttaatgatagcataatgttttattgcgtgatagtattaagatttactcacttctttgtttaaaattttggatatttccagaattattctaaatatargtgccatattgtgataaacattttagtttatagatcattgatgacttttcaagatatttgcttggacatccaaagtggatttgtcccttcaaagaatgttggcattttttaagatgcttgatatatattttctaattatttcaagaaatagtgcaccaatttacaatcctagcaaagagcatctgtctcataagcattagccagttttaaagataattagtgttttctggaatggacatacacccacatgcatgcatacacatgaaaaatcatcttggtgatcaagttatttagaataaaattctaataaacattcctatattgctttgtcttatgtgtgttccatgacattttactatttaaaaaaacctgtaagtatgaaagaaattggcaaagcttga

SEQ ID NO: 444662 - DNA, 607 bp, Homo sapiens
ttctatgctactcctataagacatataaaactttttatctggctttttcatttaaaattttagtatatgtatttctctccatgcaactaaaactttgaaaatatgatttttaatgatagcataatgttttattgcgtgatagtattaagatttactcacttctttgtttaaaattttggatatttccagaattattctaaatatagrtgccatattgtgataaacattttagtttatagatcattgatgacttttcaagatatttgcttggacatccaaagtggatttgtcccttcaaagaatgttggcattttttaagatgcttgatatatattttctaattatttcaagaaatagtgcaccaatttacaatcctagcaaagagcatctgtctcataagcattagccagttttaaagataattagtgttttctggaatggacatacacccacatgcatgcatacacatgaaaaatcatcttggtgatcaagttatttagaataaaattctaataaacattcctatattgctttgtcttatgtgtgttccatgacattttactatttaaaaaaacctgtaagtatgaaagaaattggcaaagcttga

SEQ ID NO: 444663 - DNA, 607 bp, Homo sapiens
ttctatgctactcctataagacatataaaactttttatctggctttttcatttaaaattttagtatatgtatttctctccatgcaactaaaactttgaaaatatgatttttaatgatagcataatgttttattgcgtgatagtattaagatttactcacttctttgtttaaaattttggatatttccagaattattctaaatataggtgccatattgtgataaacattttagtttatagatcattgatgacttttcaagatatttgcttggacatccaaagtggatttgtcccttcaaagaatgttggcattttttaagatgcttgatatatattttctaattatttcaagaaatagtgcaccaatttacaatcctagcaaagagcatctgtctcataagcattagccagttttaaagataattagtgttttctggaatrgacatacacccacatgcatgcatacacatgaaaaatcatcttggtgatcaagttatttagaataaaattctaataaacattcctatattgctttgtcttatgtgtgttccatgacattttactatttaaaaaaacctgtaagtatgaaagaaattggcaaagcttga

SEQ ID NO: 444664 - DNA, 487 bp, Homo sapiens
gtgtactttacattttactcactgatgttgcaagttatcagatgctattaggacctcttttagaaagatttatgataatacgtattcatcacaaagcccatcattctggagaacagaaagtgatgctgcattcattttgtgtgattaatgatttgcatgtaatgaggaaaaacgttcaggactaatctacaattgtaaatgaaaatgaactttataaagagatttttcttgttaatgtcaacaaaaraaagaaaccctgcatatgtgcaatatttgcaagtatttacatcaggtaacaagaaccattatatcaagcaataagactatctgttaatttgtatcataattaaagattcacattctgtaatacctcagaccttttatcatgtttaataaaatttaggtggtgtatttattttgctatcccagataggatattaatgaatgggctgattcaaacctaatttgcatagtaagtgaatataat

SEQ ID NO: 444665 - DNA, 621 bp, Homo sapiens
tgctggcaaatccttcctgatcttttcaccaccagaaagacaggatagaaaggcagagagggatggagggagagcaagagggttaacatagcttgttcatttatttactcaccaaactaatatttattgtttgtcatgtgacaggcaccaaggttggttctgggaatttgaagatgaatgagttaccacccttgccttcaaggtgtttcagtctagcagggagaacgatgtttaaaccagtaattaagcttgatacggcaattattttaatgctgagccacagctctgaacagaaggggcgcagatgtggagacacaagctcatccttttattgagttccctaataaagagcaagatgcttaactctgttgatctctagcttcttcattaaaatgggtgggagagcatcttctcacttgcagacagtgcatgtaaagtgcccagaagagtgcttgacacatggtgggcattcagcaaatggtagagtgtggatgtactacaggggctatgaaggactcaagggcagtaggaccataggaggggtcctgaagtcacacgtcagatatgcaagaaagaacttcttgcacacckcaagaacactaggtaccaggattagcaagg

SEQ ID NO: 444666 - DNA, 558 bp, Homo sapiens
tggttaaagttgtttactctaaataggcatgtgattcactgattgtacacatgcagtcaattcttagctatactctcttacccctttctcatgtggggtttctgctcactaaactttgtcaagctctccctctgtttggggtttaggagatttattttgaatcttaggcttgatatggatgtgttttcttttggaaaatcctggaaacagtgttaacacaaatgataatttgtattttgtgagatggtgaagagcatctatttgggcttctctagaagggcttatgataattctgcctttcagtgctacctttrttcttagaattgagctctttcctcagtagtaattcacttcaaactccaccaacatcaacaaaaattagaacagtttgaaacgctttctacacttttttttttaatcacacaggaaagaggagtggagtttagtaacttgaactcatttaagagtcagcagaggccttcaggttagatatgactctcactcttcagggttgttaaatactgaaaaaagctcctgaaagagggagatttcttttct

SEQ ID NO: 444667 - DNA, 597 bp, Homo sapiens
cttccaaattataaatcatcatgactcaccagattaatattgattaatattgtttcctttgcctggaatgccttttcttttcattccctttagtcccttgtcygcggtgactcaattcaagatcacatacactcattacactcatacacacactgcttaaaatctgaaattatgtgctttatccagagctctggacttagttggttcttggatatattgagtcttctgggcctggctttgctacttgtctctgcacattccctcagtttcaactgggaccttccccctgcttctctgccccacagaaattggaccttgacacattacattggctcttttcttcagctcatcctgagactttgagatcaagtaaaactgactttcaccctaccctgcccccagccacctgtgtgcaggaaagttgctcagcctctcagagccttcatgttttgatctgtaaaatggccctgatgaggatccctactgcatggaattgtggtgaagagtgtgaattgaattctgagggaaaagcaaccagtgcagtgtggggcagggggtaaggctcagccagaggtaactcctgagtaattcacccat

SEQ ID NO: 444668 - DNA, 509 bp, Homo sapiens
cataaaacaagtttttagagacccacgaaaagacaggcacaaaataatagtgaaagatgtcaacactcmactgacagcattagacagatcatcgaggcagaaacctaacaaagaaattatggacttaaacttaacacttgacaaattggacctaatagacattgacagaatactcaacccaacaatcacagaatatacaatcttctcatctacacacaaaacataatctaagattgaccatatgtttagccataaagcaagtctcaataaattcaaacaacttactcctgaatgattttaaggtaaacaacaaaatgaaggtggaaatcaaaaaatctttgaaattaatgaaacagaattacaacataccaaaatacttgggatataatgagagtagttttaagaggaaagtttatagcactaaatgcctacatcaaaaagtttaaaagttctcaaattaacaatctaacactgcacctacaggaactggaaaaacaagaacaaaacaa

SEQ ID NO: 444669 - DNA, 541 bp, Homo sapiens
cagactatataaagatgctccatgacttagatggggttatgtcctgagaaacccataagttaaaagcattgtaagtcaagactgggtgttttgtagacatgatgggatgsaaaaccaaaaaacactatatccaaaaaatgctggcatcacagttacattgtagagtattggttgtttaccctcatgatcacttggctgactgggaggttttgcttgctgccgctgtccagcatttcgagaaagtacggaactgcatattgttagcctggggatagatcaaaattctaagtacagtttctactgaatgtgtacctctttcacatcatcatgaagttgtaagttgaaccatagtaagcctaggaccatctgtgtaaaggcaagaaaatttgagtctagaatttaattcctttagaatttaacatttttggacttgcaaggagatttagtttctagtctttaatatcttaatggaaaactaaggtttatatttaaaattggcgctgttatcttagtgtttagaaaaaaaaactagacaaattta

SEQ ID NO: 444670 - DNA, 346 bp, Homo sapiens
aagaaggaaggaagaaaggaaggaaggaaagaaagaaagaaaggagaaaaagtgtccttcatcagaatgcaagtatttttggtaaatgattttaagatccctgctttgaaaaacaattccatggatggtccttctattcctgtggaacttaaatattttattagaatgagagagcaaattcaatcgggcaaaaacaatgatattccgtaaacaataatgacataagcctaggaaatgttttaagaataaagctttggccgggcrcggtggctcacgcctgtaatcccagcactttgggaggccgaggcaggtggatccgaggtcaggagaccgagaccatcctggc

SEQ ID NO: 444671 - DNA, 584 bp, Homo sapiens
ttatggcagtttttccagcctactgtttgaaagcagttcatgagtggatatgacccatgtttctgagacctgagtcgtttcagcatacattctaaaatacttagtgtccttggaagagtatgaaagataaacctagggatttaaaaatatagagactattgtaggcagggggaaattcctaaaaatttctcttatgttttctctgacttcmaatcaacttaaaaatgtaaatgaaaggtttgggttacatttaggaggggttgccaggcagtcaaggagactatgtcttagcaatgatcaacataggcagcatcttttttttttcttttttgaagacagagtcttgctctgtggcccaggctacaatgcagtggcacaatctcagctcactgtaacctctgccctgtgggttcaagggattctcctgcctcagcttcccgagtacctgggactacttgcgcacacaaccgcacccagctaattctttgtattttagtagagatggggcttcaccatgtcgcccaggctggcctcaaatgcctgagctcaggcaatccgcccacctcggcctcccgaagttgtca

SEQ ID NO: 444672 - DNA, 643 bp, Homo sapiens
gttctattcagaatggtgcatacaggtctatgggtgccaaccagagtttaaaacaaagggagaaattatttgcctattatctatactattactttttttttttttttttgagtcagagtcttgctcygtcgtccatgctggagtgcagtggtgtgatctcagctcactgcaacctctgcctcccaggttcaagtgattatcaagcctcagcttcctgagtagatggggctacaggctcccaacaccatgccctgctaatttttgtatttttactagagatggtgtttcaccatgttgcccatgctggtcttgaactcctgacttcaagtgatccacctgcttgggcctcccaaagtgctaggattacaggcgtgagccaccgtacctggcctatactatcacttttaatgtctgtgtatgttttattagcaatagcaaaaacaacaaaaaaaatgacaatgtgagcattattgtttaaaatataagaacaagtactagatacaggcaggactcacttaagatgccagctctgttttatgctgttaggactgaggctggaggtgtctgagcctctactttcttatgtgtagaatgaatggacaacatcttccttgttaggattaaacagagttatgtgtgtatg

SEQ ID NO: 444673 - DNA, 643 bp, Homo sapiens
gttctattcagaatggtgcatacaggtctatgggtgccaaccagagtttaaaacaaagggagaaattatttgcctattatctatactattactttttttttttttttttgagtcagagtcttgctccgtcgtccatgctggagtgcagtggtgtgatctcagctcactgcaacctctgcctcccaggttcaagtgattatcaagcctcagcttcctgagtagatggggctacaggckcccaacaccatgccctgctaatttttgtatttttactagagatggtgtttcaccatgttgcccatgctggtcttgaactcctgacttcaagtgatccacctgcttgggcctcccaaagtgctaggattacaggcgtgagccaccgtacctggcctatactatcacttttaatgtctgtgtatgttttattagcaatagcaaaaacaacaaaaaaaatgacaatgtgagcattattgtttaaaatataagaacaagtactagatacaggcaggactcacttaagatgccagctctgttttatgctgttaggactgaggctggaggtgtctgagcctctactttcttatgtgtagaatgaatggacaacatcttccttgttaggattaaacagagttatgtgtgtatg

SEQ ID NO: 444674 - DNA, 643 bp, Homo sapiens
gttctattcagaatggtgcatacaggtctatgggtgccaaccagagtttaaaacaaagggagaaattatttgcctattatctatactattactttttttttttttttttgagtcagagtcttgctccgtcgtccatgctggagtgcagtggtgtgatctcagctcactgcaacctctgcctcccaggttcaagtgattatcaagcctcagcttcctgagtagatggggctacaggctcccaacaccatgccctgctaatttttgtatttttactagagatggtgtttcaccatgttgcccatgctggtcttgaactcctgacttcaagtgatccacctgcttgggcctcccaaagtgctaggattacaggcgtgagccaccgtacctggcctatactatyacttttaatgtctgtgtatgttttattagcaatagcaaaaacaacaaaaaaaatgacaatgtgagcattattgtttaaaatataagaacaagtactagatacaggcaggactcacttaagatgccagctctgttttatgctgttaggactgaggctggaggtgtctgagcctctactttcttatgtgtagaatgaatggacaacatcttccttgttaggattaaacagagttatgtgtgtatg

SEQ ID NO: 444675 - DNA, 616 bp, Homo sapiens
cttacatatacacaggtgtgtatatctgttaaatgtggtaatttacatacccagcagcattgtatgaaagtgtatgattcattttgtccttaccaacattaagtaatagcatttcaaaaatatttgataattgcatgggcaaaaacatattattgtttttattatatatttttcttttcttttcttttctttttttaagacagagtcttgctctgttgcctaggctggagtgcaatgacatgatcttgrctctctgcaacctctgcagggagccaagcgattcccctgcctcagcctccagagtcgctgggattacaggtgccccccaccatgcctggctaattgctgtatttttgtagagagggggtttcaccatgttggccaggatggtctggaactcctgacctcaagtgatctcctcgccttggcttcccaaagtgctgggattacaggcgtgagccaccatgcccagactattttattatatattttaaatattataattctttttacagcttaaattaggacttaaaatgttaatttttcctcaaataaaatgcattattaatttctaatgttattttattctcagctgtgtttgcctaactgcaaatgt

SEQ ID NO: 444676 - DNA, 635 bp, Homo sapiens
cttttctctcatgtgattcctgttccggacctccatgtccagggcttactttctggatgggtcagtattttatgttatcatcatgtttgctttattatattattmtggaagaattcgttaagaaagagttagtgctgagacattttcattccattgtaatctggtagtatgtaaataaaaatgtggagtgagaaggaaaagctcattatatttcattctgcccttatacttcactagacggaatcttgcctacattgcttaagtgtgtatttaagaagaataattaagaggggtatgtgaaagccttctcctagtcagagaagaactagggaaagtcttcccttctcatcagtctggcaaggttgtgaaaatttggctctgtgaaattttgcttcatgtaagccacataaccttggagaagttgaaacagaggagcttcgagttggtatgcatgtatgaaatattgacctgtgatgtgatgcataatgatttccttcggttcttaactagatcattgctcaaagaaacaggaactctggaatctcagctggaagcaaataaagtaagtattgttttttcattaactgaagatattgccaaaattataaggagtgtaaaaataatcacctaaggga

SEQ ID NO: 444677 - DNA, 635 bp, Homo sapiens
cttttctctcatgtgattcctgttccggacctccatgtccagggcttactttctggatgggtcagtattttatgttatcatcatgtttgctttattatattattatggaagaattcgttaagaaagagttagtgctgagacattttcattccattgtaatctggtagtatgtaaataaaaatgtggagtgagaaggaaaagctcattatatttcattctgcccttatacttcactagacggaatcttgcctacattgcttaagtgtgtatttaagaagaataattaagaggggtatgtgaaagccttctcctagtcagagaagaactagggaaagtcttcccttctcatcagtctggcaaggttgtgaaaatttggctctgtgaaattttgcttcatgtaagccacataaccttggagaagttgaaacagaggagcttcgagttggtatgcatgtatgaaatattgacctgtgatgtgatgcataatgatttccttcgrttcttaactagatcattgctcaaagaaacaggaactctggaatctcagctggaagcaaataaagtaagtattgttttttcattaactgaagatattgccaaaattataaggagtgtaaaaataatcacctaaggga

SEQ ID NO: 444678 - DNA, 587 bp, Homo sapiens
atggtattgactcacaactataccatgtgactttgccaatggaaagacaaaaaaaaaggggaagaatgggttgcaagtcagcagcaatgttctggagagattgcaataacagtgaaaaggcgagatatctaggaggttttagaaatgatgggaaaagatcacacattttaaacaatcaygaagtactgagaactaacatgaggaggggctgaaattggctttagggactgtttcatctttcacataggagaagaagaggaataaaaaggaaaggctagattaaagtagaatgtgaggtttcaaagatgtgtccttgggtgtatgtcaccctcatgccctactggccttccaaccctgatatttcactctaattctgcacctagatgtttttatttttaaaccaagaatttgtcaccaaaatatagaaaaatgctgatgacctccaacttactatatttggctcacatttttttactgcaatagtgtggaagcaatacccattcatagaagccatacttggagtacccatacaaccatctgctttttcactttcagctcaccgtccaataaattacaagagatattca

SEQ ID NO: 444679 - DNA, 587 bp, Homo sapiens
atggtattgactcacaactataccatgtgactttgccaatggaaagacaaaaaaaaaggggaagaatgggttgcaagtcagcagcaatgttctggagagattgcaataacagtgaaaaggcgagatatctaggaggttttagaaatgatgggaaaagatcacacattttaaacaatcacgaagtactgagaactaacatgaggaggggctgaaattggctttagggactgtttcatctttcacataggagaagaagaggaataaaaaggaaaggctagattaaagtagaatgtgaggtttcaaagatgtgtccttgggtgtatgtcacccycatgccctactggccttccaaccctgatatttcactctaattctgcacctagatgtttttatttttaaaccaagaatttgtcaccaaaatatagaaaaatgctgatgacctccaacttactatatttggctcacatttttttactgcaatagtgtggaagcaatacccattcatagaagccatacttggagtacccatacaaccatctgctttttcactttcagctcaccgtccaataaattacaagagatattca

SEQ ID NO: 444680 - DNA, 587 bp, Homo sapiens
atggtattgactcacaactataccatgtgactttgccaatggaaagacaaaaaaaaaggggaagaatgggttgcaagtcagcagcaatgttctggagagattgcaataacagtgaaaaggcgagatatctaggaggttttagaaatgatgggaaaagatcacacattttaaacaatcacgaagtactgagaactaacatgaggaggggctgaaattggctttagggactgtttcatctttcacataggagaagaagaggaataaaaaggaaaggctagattaaagtagaatgtgaggtttcaaagatgtgtccttgggtgtatgtcaccctcatgccctactgsccttccaaccctgatatttcactctaattctgcacctagatgtttttatttttaaaccaagaatttgtcaccaaaatatagaaaaatgctgatgacctccaacttactatatttggctcacatttttttactgcaatagtgtggaagcaatacccattcatagaagccatacttggagtacccatacaaccatctgctttttcactttcagctcaccgtccaataaattacaagagatattca

SEQ ID NO: 444681 - DNA, 587 bp, Homo sapiens
atggtattgactcacaactataccatgtgactttgccaatggaaagacaaaaaaaaaggggaagaatgggttgcaagtcagcagcaatgttctggagagattgcaataacagtgaaaaggcgagatatctaggaggttttagaaatgatgggaaaagatcacacattttaaacaatcacgaagtactgagaactaacatgaggaggggctgaaattggctttagggactgtttcatctttcacataggagaagaagaggaataaaaaggaaaggctagattaaagtagaatgtgaggtttcaaagatgtgtccttgggtgtatgtcaccctcatgccctactggccttccaaccctgatatttcactctaattctgcacctagatgtttttatttttaaaccaagaatttgtcaccaaaatatagaaaaatgcwgatgacctccaacttactatatttggctcacatttttttactgcaatagtgtggaagcaatacccattcatagaagccatacttggagtacccatacaaccatctgctttttcactttcagctcaccgtccaataaattacaagagatattca

SEQ ID NO: 444682 - DNA, 563 bp, Homo sapiens
ccaggcacccagctagagagcatgttaaattttgaagcatatttatgraatagttatgggactttggcttagcaccagatgtcaaaatctccatcaacttttgaaagatttttctctcctatggaaagacaaaggaggaaaaagcaacactcttctcatttttcatttttaggtagtactggcacaggtgtgctgttgttccctgtggttttactgtttagcgatcacgaagaaccttagatttgaaaacactctccctcattaatcatcagttcctcacactgtgatgtaggctctacaatgagttcctcctaacagggctggaaaggaaggtgaggagagacagcaccacacactcgcaagcacaactgtgcacaagcacacacagaattgattttgtcgtttcttacattcatttattggcctgctctatatgttcaataagtgactaagtaccatcagaattgacactaatgtgtaattacatgtaattgtaaaagcgggtgattatatttatgggtaatgttcttagtttatttaattacttgaatacctatgactta

SEQ ID NO: 444683 - DNA, 612 bp, Homo sapiens
actgcaaaatgcaaattgtgagttcacttgaaatcaatttctataggctacattttttcttgtgtataagtagtttacaaaatttttgtattagtaaatatttttggttgaaaaccgaacattttaaaaagaaattgtagtaattctaaaatctgattttttggggagttactctttttttgtgtctaacaggcagttcatttttctggaccaatgcaaaatatttattaccaacttcttgcagcaatttatgtattttttcatgttgtttggcttcaagatgctgctttacttcttttatctttcttttctagtctggcctcctgattatctccactgaatgtatagtttagctatctgmatatagtttagctggcagcaaatatttgtacagaatttatcctcagatcttaagactctttctctctgtattttcctagatgtgtagttcctttaacacttcttaattctgctgtctaacaactcaagccaatatggtgtccacttgcagccttcaaatctatatggtaccagaggaatacactcaggcaatgcttataaactatcaaactcacaaataataccaaaagtcgttcagtctttcaagagtat

SEQ ID NO: 444684 - DNA, 536 bp, Homo sapiens
agcgggaattgaaagaattaaagaagacctacttttttaatgtttacctcaaataaatttaaattgtataatcgaagaaacatatataattttcttcatgcaaaatgtgttgtcatcagtatttaaaacctcatatcaatgcaggagaggatttaatgatacaggagtgagaagggacaaacagtagggctgggtccaaggcagaggaggaaacaaggtctggagctgaactgaagttggaactaaggtcttttttccactttagcactcataagcggataggtggatagaagaatgtatctgcctccctgaaaacagttgattgagactttttttttttttttggccggcgctattgatatttccattattatctgcttattttctccccacacctctagctggcctcctggtcattaggattycgctggcagttgccctgtgtccctgctattttctccgcaggagccgagcgaaaccccttttctagagacaatttactcagctcttaaaaatgctagtgtagttttgtggga

SEQ ID NO: 444685 - DNA, 598 bp, Homo sapiens
tccaataggaaataatatggttctgtgaaaattgtcccccaatatctagtaaacaaagtcattcactcatatctcaaagtagaaagtccacccatcagtccatagctacctcttccagaaaccaacagagccacctcctcttttccaaatgtctccatcttcattgctctgcagcccaataagtaggaaggttgtaaccacagccacaactctaagcatcacagggaattgctaagtgggagaaaggctttcttctaaagggctctttcctggggggctyagggaaaagcaactctatgccccatgagactaattaggaaaacacttgctgacacactcccctttcatgaggtcaacacacctatgggaaggtaggtttttcagtcaggctagaaatcagatgaaaagagtacttggctttccattctgtccaaggggtaaaagaatagtttaaattacaaaatctgctgagaaagggaaaggataaggaacaaaaggaatgaaactaacgcaatgtggttcaaaggcaggagaattttctctactctttggagcagtttagtgatcacacagcacaaccctgaagtgtattgcagaa

SEQ ID NO: 444686 - DNA, 561 bp, Homo sapiens
tttttaaacttttttccaaattgaggagccatagataaaatcctttatagattgagcactgaatggcaaaatagcaaaaataaaacaaagtgccagatgtttctctgttcttgaagaacttctttttttattattatactttaagttctgggatacatgtgcagaatgtgcaggtttgttacataggcatacatatgccrtggtagtttgctgcacccatcaacctgtcatctaggttttaagccctgcatgcattaggtatttgtcctaatgctacctctcacttgcttatgtgccactcttatacccaatgaacaaacgagaaaaaaaggcaaataaaaatcctgggtactgtgtctgccaggccaggtatagtttgcctcactaataaaaatgtagtgtacctattgtatctatttcaccatataggtatacaactaaaatttgatttctaggaagagccttcaaaatcctgtttctgtatctctcctttctcagatatgattcaaaggaggacaactagctggtggcaaggcactccgttaaatttatctttctgag

SEQ ID NO: 444687 - DNA, 561 bp, Homo sapiens
tttttaaacttttttccaaattgaggagccatagataaaatcctttatagattgagcactgaatggcaaaatagcaaaaataaaacaaagtgccagatgtttctctgttcttgaagaacttctttttttattattatactttaagttctgggatacatgtgcagaatgtgcaggtttgttacataggcatacatatgccatggtagtttgctgcacccatcaacctgtcatctaggttttaagccctgcatgcattaggtatttgtcctaatgctacctctcacttrcttatgtgccactcttatacccaatgaacaaacgagaaaaaaaggcaaataaaaatcctgggtactgtgtctgccaggccaggtatagtttgcctcactaataaaaatgtagtgtacctattgtatctatttcaccatataggtatacaactaaaatttgatttctaggaagagccttcaaaatcctgtttctgtatctctcctttctcagatatgattcaaaggaggacaactagctggtggcaaggcactccgttaaatttatctttctgag

SEQ ID NO: 444688 - DNA, 598 bp, Homo sapiens
gcaatatggtcttttcaatttgatttttaaacattttatccagcttttctaaatgtattgactgaagtactggtctgccatgagctgctgcatcagagccagaagtgaaagtatgmctctgacatgtcacttagtacctaatatataataaatgttagctaaatctaaatatttagtgactgaaaacaagaataaacaaatgaacagattaaaaatactttttttatttagtaaagagaccttgatcaaagtgctgaatctaatattaaattttcttggaaattataacaatgttcaaactatcctatcaactgttgcatttttttttcttttttgtgggggggtgcaggggtgttatgttacagaggttatagtagaaagaaattctggggacaggatatatacgaatatttcacattttcttcttccaccaatgtaataattgagaactggaaatattagttaaattagtgtaagaatacgtagagaagcttaatctgttctgctagttactataatttacaaaaggacaagaagtatattaggttaaaatttcttaatgttgggttaattgtaataaataagagttctttaattt

SEQ ID NO: 444689 - DNA, 595 bp, Homo sapiens
cattcccgtggctgtgctcaagggctaccctctactgctctggttctgggcagtatgtcagcttcttccctcttttctttctgaaggagaccgcagaatgtcatcccaaaatatggcaccctagtatgcttaagtattttgaaaatgaagcccttggagatcagcaggtgctaggagaggctttcccctatctgcagagggactgggcacacccaaaaagaaaacaattaccttctgtcccttccctgagttttcattaagtaaactcatattgtagggagtggggaatgtaactacacatggacaaatttatttcatcaggagccactgtctattcccctagacccattcagtttccaaagaaactaaccattggttaggaaccattgtctgagcattgggcctattcatttcccctaacattgtttactctagatttcctaatctcccttcccctgtgaagaaggttttaaaagtatatgcacttcatttggttttggataatcattctacggtgatttttttttttttacccacgcatawtaaaataaatttgtatgcctttttctcctgttaatgtgacttttgtcagttt

SEQ ID NO: 444690 - DNA, 548 bp, Homo sapiens
ttcttctcttttcagttctatcagtttttgtttcttatattttgaagctctgttattacatgcatatacatttagtattgttatgtctttttgatgaagttaaatcttcacattatgaaatatcaatctttatccctggtgaaattctttgttctgaagcctttagtaaactaataaaagccacatgagctatcttttgattagtttttgcatagtgcatatttctccatctttttgcttgcactctgtttcttayatttaaagtgagattcttataaatagcatataatcaggccttgtttttattctattcaatctggtaatttttcttttttaattgtgatatttagacaatttacacttagtgcaatcatcaatatggtttattttaaatctggcaagttgctatgttttttctttttatctatcactttatgtctcctttagatcaattttgtatttattgtgattccatcttatcttcaaattggcctattagctacaattgctgttttgtgtttgtgtgtgtatgtttattatagcacagt

SEQ ID NO: 444691 - DNA, 623 bp, Homo sapiens
cttaatataaataaaatattagataaacttgtgtttgacttcttttactgaagatccttatttagtgtaactatagcttcttctttttattgtttattagtattcaattgtatagaattgtaagaatgatccattgctgatgtacatttgggtttttaatttgttttaatcttaacttttcaatcaaataaatgtattaaaaacaactgaatttcaaaatggttaaatgaatgcagtgactgattaacttaaatgtatacataatcacctacataccatattcaagtatgaacaataatcagcaattttccttattagtgatgagtcctaactccagtttgaggactgggaagtaattgggtcacttctgtgtcctgtttctcttctatggtcacctgactagctcrgttggtagagcatgagactcataaccccttctggtttgcttcgtactctagtctgtgttgacctctttgagttctgtgctgttattcctgattggaaaggtcctcggatgccttgtaaacattgtattcttgtgttagaggatgttttgcctcaactgcaaaacatcaggtatttctactatgttgtgtaagcaaacaaacaaacaacaacaacaa

SEQ ID NO: 444692 - DNA, 548 bp, Homo sapiens
ttcttctcttttcagttctatcagtttttgtttcttatattttgaagctctgttattacatgcatatacatttagtattgttatgtctttttgatgaagttaaatcttcacattatgaaatatcaatctttatccctggtgaaattctttgttctgaagcctttagtaaactaataaaagccacatgagctatcttttgattagtttttgcatagtgcatatttctccatctttttgcttgcactctgtttcttatatttaaagtgagattcttataaatagcatataatcaggccttgtttttattctattcaatctggtaatttttcttttttaatkgtgatatttagacaatttacacttagtgcaatcatcaatatggtttattttaaatctggcaagttgctatgttttttctttttatctatcactttatgtctcctttagatcaattttgtatttattgtgattccatcttatcttcaaattggcctattagctacaattgctgttttgtgtttgtgtgtgtatgtttattatagcacagt

SEQ ID NO: 444693 - DNA, 548 bp, Homo sapiens
ttcttctcttttcagttctatcagtttttgtttcttatattttgaagctctgttattacatgcatatacatttagtattgttatgtctttttgatgaagttaaatcttcacattatgaaatatcaatctttatccctggtgaaattctttgttctgaagcctttagtaaactaataaaagccacatgagctatcttttgattagtttttgcatagtgcatatttctccatctttttgcttgcactctgtttcttatatttaaagtgagattcttataaatagcatataatcaggccttgtttttattctattcaatctggtaatttttcttttttaattgtgatatttagacaatttacacttagtgcaatcatcaatatggtttattttaaatctggcaagttgctatgttttttctttttatctatmactttatgtctcctttagatcaattttgtatttattgtgattccatcttatcttcaaattggcctattagctacaattgctgttttgtgtttgtgtgtgtatgtttattatagcacagt

SEQ ID NO: 444694 - DNA, 549 bp, Homo sapiens
gggtttctgtctgctgaattttaattccatggtaagattcttgttcagacagaaggcaaataaataagtaagttcataaattctactgatttcagcaggctctgtcactggggatgctttatttttaagccaaaatatcatcagtgttttacatgattgtgttagaggctccagcccctattattcctcttccaagatcagcaacacctgtttactgaacaaaggctttgaacatgaacaagagaagcaaagcggaaagtcattgcgcagcctctatagataatagctaagagtatgacatggcaagatttgctgtctcargccttgcagacattttgcttggtaccactgatttccacctcctcctcttctattttgttttctactttgtggaacaaaacaatgaacgttaagattaaaacataggtcacagaatgtgaaaacttatgcagtctttggtcagcaagtgccaacatttttgcctctaaagtgtggagaaatttgtgaagtgacttcagttactcctcacctggatgtggaggaaaagag

SEQ ID NO: 444695 - DNA, 523 bp, Homo sapiens
caggtaatatctatcttttacttttgagaaagaagaaagtgtggtatttaataatacctttacaggcaggccatatttattccaaaatagcactttcttagggctataaacaatgcaattaatcatgctctacttttatggtatgcaaatgcgtactacctaaatggaagagattacttagaacactagctatgaatcactgaggcccctgtgacactcttcaaaatgcaccaagggaacggtcagtgcttttgaaataatacaaattatatttgctagtattcgttaaatacttatcatgtwttaggcatgtgttaagctcttgtaggaaacgttagagtagtaaaaatatctggaaaattgaatttctgatttgtccatagtctcaaagtaaatatagggttagaaattgaataattattacttcaatttacacatttcaaccgtacaaacatttgtaaaattgggattttttaaacattgtattttgacattgtattttgaaacattgtattttctagaa

SEQ ID NO: 444696 - DNA, 523 bp, Homo sapiens
caggtaatatctatcttttacttttgagaaagaagaaagtgtggtatttaataatacctttacaggcaggccatatttattccaaaatagcactttcttagggctataaacaatgcaattaatcatgctctacttttatggtatgcaaatgcgtactacctaaatggaagagattacttagaacactagctatgaatcactgaggcccctgtgacactcttcaaaatgcaccaagggaacggtcagtgcttttgaaataatacaaattatatttgctagtattcgttaaatacttatcatgtattaggcatgtgttaagctcttgtaggaaaygttagagtagtaaaaatatctggaaaattgaatttctgatttgtccatagtctcaaagtaaatatagggttagaaattgaataattattacttcaatttacacatttcaaccgtacaaacatttgtaaaattgggattttttaaacattgtattttgacattgtattttgaaacattgtattttctagaa

SEQ ID NO: 444697 - DNA, 548 bp, Homo sapiens
catgaccacccaccactgccactgctcccactactgccttcacctccctcttgtcataaaagcactctgtcaatttttttcctatacaacatagtaagtcaggttaaaggaagaaasagaatttctatgactattatactttttcaaaatccctattgaaaataaaaggactttcagttcatggtgttgaggcactaaaataagatggttactcattgtaaaacaagatggactacattatatattatgactgtattacattttattttttgaagaaacggtaaatgaatattggaaaggtgattgactttgtatgactgaaagcctgaatgaatcatatttttatatatgtatactgcatgaaataaagtatctttaacatcttcaccttcgccttctattttcaaataataaattcaaaaataaaagaagaaacattagaactgttgtcaaagaaataaaagagatcacaagaaaagattacaaataattatatgccaataaactagaatatctagagaaaatagataaattcctagaaacagtca

SEQ ID NO: 444698 - DNA, 589 bp, Homo sapiens
ggaatccgggagataggttaaatacagggagaaagggtatcctgaaaataacaccatgtatttattgaacccatgctgtcacaagagaaaaaaaatagcatgatgagttgggtaagcatgtgtgttcgctgtgattgaaaatgctggccaggtgcagtggctcagcctgtaatcccagcacttcgggaggccgaggcagatggatcacctgaggtcaggagttcaagaccagcctggccaacatgatgaaatccaatctctaccaaaaatacaaaaatttgccaggtgtggtggtgcgtgcctataatcccagctacttgggaggctgaggcaggagaatcgcttgaacccgggaggtggagaccacagtgagccaagatcgcrccactgcactccagcctgggcaatagagtgagactccatctcaaaaaagaaagaaaatgcttcacaaaatagtgcctttcactggagaaagattaaaacagccaaggttcatgaggcacctaagtgtggtaggtaagtactggctgacaagctcttcagatctcagcttaatctttactttgccattctgtgtgacattagtcta

SEQ ID NO: 444699 - DNA, 574 bp, Homo sapiens
atttcttgacttttgttaatagtgctgagataaacataaaagtgcaaaagtgcaaatacctccttacaatcctgattttaattcttttggctgtatacccagaagtgggactgctagattgtatgataggtctatttttcrtttttaggcaatgctacactgttttccacagtggctgcaccattttacatttctatcaacagtgtacaattgttccaacttcttcatattttcagcaatacttatttttctattcctttgagagtagccatcctaacagatgtgagataatatctcagtatcgctttgatttgcattttcctgatagtgatgttgagcacgttttcttatacctgttagccaattgtatgtcttctttggaaaatcatctgttcaagtcctttgctcattttctaattttcgtttttgttatagatttgaagaagctccttgtatattttggattttaacctcttgttagatgtatgcaaatattttcttccattccataagagaactttttttattgcttattgttttctttgctgtgcagaagatgtttagtttgatgtag

SEQ ID NO: 444700 - DNA, 637 bp, Homo sapiens
ttaagagggaggaaactatagctaatagggcttaagcttttgtccaaggatacacatttagtaagaagctgagttataatttgaacccaggtctctgcttgttcaaaagcttttctcttaactaccatgctacatttttaaatattctagctatattcttgaggaaatagagagatgtattatctaacattctttggagactccgaaccaataggatatttatctatttatctataaaaatrtattataaatattggctcatatgcttatggagaccacagacttcatgatctgctgcctataagctagagaatcaggaaaacttgtgacataatttaacctgagtctgaaggcctgaaaacaagggaaactgatagtataaacccaggtccaaatccaaaggcctgagaatcaggagcacccagtgtccaaaggcagaaggagatgaacatcccatctcaaaacaaaaacaaatttgcctttcctttacctttttgttctatttagggtttcaaaggatcagaagaggcagtaaatccttgagtgatgtttacttttttcttaatataacttaaatactatgatgtaaaattaacaattattaaatattgatataaagcaatgtgtcttatgttat

SEQ ID NO: 444701 - DNA, 537 bp, Homo sapiens
ggcatgaacccgagaggcggagcttgcagtgagccgagattgcaccactgcactccagcctgggtgacagagcaagactccatctcaaaaataaaaaaaaaaaagcactttttggggatatgatttcaacttttattgtagatttagagggtgtttgtgcactttgttacatggatatattgtgtgatgctgatatttggggtatgaatctcatcacccaggtagcgatgaaactatccatggccgtctctctcttgctcctctctagcagtccaccatgtctattgttcccatctttacgtcatgagtactcaatgtttagctcccacttacaattgagaacatgtggtgtttgcttttctgttcctgcatccatwccgtaagaattatggcttatagctgcatccacgttgctgcaaagaatcttatttctctttttttatgattgcatagcatttcatggtgtatatatctatataccaaattttatttatctaattcactattaatgatcacctacgttgattccatgtcttt

SEQ ID NO: 444702 - DNA, 596 bp, Homo sapiens
atagaatgggagaaaatatttgcaaactatgcacctgacaagggtctaatatccagaatctgaaaggaacttcaacaaatcaacaagcacaaaacaaataaccccattaaaaattcacaaagaacagacacttctctaaaaaagaagacataagcagccaacaaacatatgaagaaatgttcatcagcactaatcatcaggtaaatttcttctataggtcatttctgaatgctgctttgatgtgttgcctcttaggtatcttctgcttagtgagcatcartacatctcatcatggggtgaggagtgcaaaaatatacttattaaggcaactttttgccaaggatactctcgtaaagattatgcatgtgactttatgacattcagtacagcatgaatgctttatcacaaaaagaggaccaggacagatacaacctggaccctagccctgaaccatagccccagttaactctggtagaattgcctggcaaactctggtagacatacaattgttgccatgggccaggtcactagttggtgagtgaagtgtcagaatctctcaactaatgtgctaatcttatgtgtaaggaattcagagt

SEQ ID NO: 444703 - DNA, 538 bp, Homo sapiens
atcaggtaaatttcttctataggtcatttctgaatgctgctttgatgtgttgcctcttaggtatcttctgcttagtgagcatcagtacatctcatcatggggtgaggagtgcaaaaatatacttattaaggcaactttttgccaaggatactctcgtaaagattatgcatgtgactttatgacattcagtacagcatgaatgctttatcacaaaaagaggaccaggacagatacaacctggaccctagccctgaaccatagccccagttaactctggtagaattgcctggcaaactctggtagacatacaattgttgccatgggccaggtcactagttggtgagtgaagtgtcagaatctctcaactaatgtgctaatcttatgtgtaaggaattcagartaattttcagatttctagaaatacaggcaactatttctggcataatggtggccatcagtgaggagcaggctctggccactggactgagtttcagcttctggactggtgaaaggggctacagaggaaggaagggttcag

SEQ ID NO: 444704 - DNA, 611 bp, Homo sapiens
aggtatatatacatacctatgtatataatttttaatggagattaagatatattatataatatatttaaattttatttgctgagtgttacaaataataatagaaaaatcatgctgctgtaaagacacatgcacacgtatgtttactgcagcactattcacaatagcaaagacttgcaaccaagccaaatgtccaacaatgatagactggattaagaaaatgtggcacatatacaccatggaatactatgcagccataaaaaaatgaagacgttgtgcacatgtaccctaaaacttaaagtatawaaaaaaaaaagaaaaagctagtcgaattccctatttcacccagtgattgtttctttgttcctgtaattctctcatttgatttctgcaatacatcattgccttgattctctcttcgtttcctgaactcttcgggataagacaataagatagacctaggttcaaattcttactctgccacctgcttagctacctgactacagagaaaatacatggtcattaaacaatagttttctcatctgttaagtggaaataataatgactaatttacagaactatgaaaggataaaatgagatgaaatataaaaatg

SEQ ID NO: 444705 - DNA, 611 bp, Homo sapiens
aggtatatatacatacctatgtatataatttttaatggagattaagatatattatataatatatttaaattttatttgctgagtgttacaaataataatagaaaaatcatgctgctgtaaagacacatgcacacgtatgtttactgcagcactattcacaatagcaaagacttgcaaccaagccaaatgtccaacaatgatagactggattaagaaaatgtggcacatatacaccatggaatactatgcagccataaaaaaatgaagacgttgtgcacatgtaccctaaaacttaaagtataaaaaaaaaaaagaaaaagctagtcgaattccctatttcacccagtgattgtttctttgttcctgtaattctctcatttgatttctgcaatacatcattgccttgattctctcttcgtttcctgaactcttcrggataagacaataagatagacctaggttcaaattcttactctgccacctgcttagctacctgactacagagaaaatacatggtcattaaacaatagttttctcatctgttaagtggaaataataatgactaatttacagaactatgaaaggataaaatgagatgaaatataaaaatg

SEQ ID NO: 444706 - DNA, 596 bp, Homo sapiens
ctttattaaggtaaatttaacaaataaaaattgcctatatttatggtgcacagtgtgatgttttgatatatgtatacattgtgaaatgaaatgataaagaaaaaataatatatctatcacctaagacttataaatttgttatagtgagaatatttaaggtctactctcttgataatttcaagaatgtagtaactgtagtcatcatgggtacaatagctctccagaacttactgcttttaattgaaactttttatcttttgaccaacatctccccagtacccttgtaacccccattagactctcagtttatataaggtcaatttttttaaattccatgtataagtgagatcatgcggtattgatctttctgtgcacatcttagcataatgtcctccaggtttactcatgttgtcctagatgacaggatttccatcttttttttaggccttaatggcatcccattgtgtttttttaatttttaatttttgtgggtacaccgtcagtatatayatttatggggtacatgagatattttggtatagacattcaatgcctaataatcacatcatagaaaattgggtatccatcccctcaag

SEQ ID NO: 444707 - DNA, 589 bp, Homo sapiens
acattcaatgcctaataatcacatcatagaaaattgggtatccatcccctcaarcatttatttttgtgttacaagcaacccaattatacattttttagcattttaaaatgtacaattaaattattattggctacagtctccctattgtactgtcaaatactaggtgctgttcattcctttttttttaaataccaaataaccatctccaccttcccctcctcagtccttctactacccttcccagctctgttaactatccttccattccctgtctccatgagttcaattattttgcttttcagacaccacaaataagtgagaacatgtaatgttatgtctttctgtgcatggcttacttaatttaacataatgacctccagttccatccatgttgttgcaaatgagagaatttcattcttttttatggctgactagtattccattgtgtatatataccacattttctatatccattcatctgttcatgaacatttagattgctcccaaatcttggttattacaaatagtgctgcaacaaacatgggaatgcagatatctctttgaaataccgatttccttttttatcggt

SEQ ID NO: 444708 - DNA, 589 bp, Homo sapiens
acattcaatgcctaataatcacatcatagaaaattgggtatccatcccctcaagcatttatttttgtgttacaagcaacccaattatacattttttagcattttaaaatgtacaaytaaattattattggctacagtctccctattgtactgtcaaatactaggtgctgttcattcctttttttttaaataccaaataaccatctccaccttcccctcctcagtccttctactacccttcccagctctgttaactatccttccattccctgtctccatgagttcaattattttgcttttcagacaccacaaataagtgagaacatgtaatgttatgtctttctgtgcatggcttacttaatttaacataatgacctccagttccatccatgttgttgcaaatgagagaatttcattcttttttatggctgactagtattccattgtgtatatataccacattttctatatccattcatctgttcatgaacatttagattgctcccaaatcttggttattacaaatagtgctgcaacaaacatgggaatgcagatatctctttgaaataccgatttccttttttatcggt

SEQ ID NO: 444709 - DNA, 317 bp, Homo sapiens
tgatgaggccatatttttctgggtggtgttsatgcttgtagatgttggttggtgtctgggcattgaagagttatacatttattgcagtcttcacagtctaggcttatttgtacctgtccttcttgggaaggctttgcaggtattcaaaggcacttgggcctcaagcccatcaatgatgtggtgttttttgcagactcaaggaggtacccccttggtggtcttcgagaagatccagaataatctctggattaccaggaagctgatccagagattaccattttctttttcccttacattttctttttccttactttttc

SEQ ID NO: 444710 - DNA, 613 bp, Homo sapiens
tgtgaacaatgctgcaataaacatgggagtgcaaacatctctttgacaaactgacttcatttattttggatatatatccataaatgggtttctygaatcatatggtagtcccactttttattctttgaggaacctctgtattgttttccataatgacagcatccctttacatttccaacaacagtatacgagggttcctctttctccacatccttgccaacacttatcttttgtctttttgataatagccattttaacatgtgtgaggtgatgtatcactgtggttttagtttacatttcctaatgattaataatgctgaacatttttaatatactttttagccatttgaatgtcttcttttgagcaatttctattcagatcctatcccattttttaaattggcttttgttttgctattgcttgagcttcttatatacgttggatattaaccccatatcagatgtacattttgaaaatattttctcccatcctgtaggttgtctcttacctctgttgattgtctcctttgctgtgtagaaatttttcagtttgatgcaatccctttgcctatctgtttttttgtttttgtttttgttttttggctgtgctttt

SEQ ID NO: 444711 - DNA, 613 bp, Homo sapiens
tgtgaacaatgctgcaataaacatgggagtgcaaacatctctttgacaaactgacttcatttattttggatatatatccataaatgggtttctcgaatcatatggtagtcccactttttattctttgaggaacctctgtattgttttccataatgacagcatccctttacatttccaacaacagtatacgagggttcctctttctccacatccttgccaacacttatcttttgtctttttgataatagccattttaacatgtgtgaggtgatgtatcactgtggttttagtttacatttcctaatgattaataatgctgaacatttttaatatactttttagccatttgaatgtcttcttttgagcaatttctattcagatcctatcccattttttaaattggcttttgttttgctattgcttgagcttcttatatacgttggatattaaccccrtatcagatgtacattttgaaaatattttctcccatcctgtaggttgtctcttacctctgttgattgtctcctttgctgtgtagaaatttttcagtttgatgcaatccctttgcctatctgtttttttgtttttgtttttgttttttggctgtgctttt

SEQ ID NO: 444712 - DNA, 582 bp, Homo sapiens
gactatacttaacaaaaatgtatgtactagggtgacagaagccctgaataccctgacttgattactatgcattatgtacgtataacaaaatatctcatgtaccctatacatttgtacaaacaaaaaagaaaaagataaagaaaaatattgaagaaataacagctgaaaacttcccaaatttggtggaaaatattaattcactagttcaagatattcaagaagccacaagtaagagaaacacataaggtacattcaagtacattttagttaaatttcttatagtaaagagaaaatattaaagcaacwagagaaaaatgacacattatatgagtggaaaaatgatacaattaatggtagcattctcaacagaaacttttgaagacagagacattgaaaatggcatagaaagatgaaagaaaaaaaccctgatgactagtaattttatatccagtaaaaatacatttcacaaagaaagaaaaagtgaagatattttcaaataaataaaaatggagataatgtattgctagcaaaactacaccataagaaatactaagagaaatccttaaggatgaaggaacataa

SEQ ID NO: 444713 - DNA, 574 bp, Homo sapiens
atttgttccctggtcttcacctggtggatcacatgctatgtaaagctgggctaccctaacttcaatagttctggtttaggttcccatagccaacagagaaaaaaatgcacattggtgattcttcatcatatactttgactatatacatttttctaaatgaattagagctctaatctaacaaggaaaccattaaaattaaaatactgctgttaaaagcagctaagaaaggggagatggtctttcaatccyatatgacattttaacctgtttccttcccaatcattttaaacatggttcatactaattataaataaagaaaacaaaaacttacaccaaaagacttgtacttgactaaaggttgcatttcatggcttaatggtggcctcctcaggaaacatattattttctcatgggaatttgaacttgctgtattatcattcccaggtttccagcaacgtgagttgaagaagaggatggaccaggggtgctggagaatccatagagagaccatagagggcaacttttaccccagtggacacctttaggaacgtcctcacaagtacctgcatgcata

SEQ ID NO: 444714 - DNA, 564 bp, Homo sapiens
tcacaaaaataattttaaatatatgatgaaatcatagagaacttttactattaatacatgaaataaattagtttgtgatggcaaagttagtgataataaaaracattacagaatataaaaatgcaatggaagaagaagaaaatggaatgctccagaaaactaaactagagagttagaattttgacttcagaaagtatcataaagctcaaaaaataataaataaagtgccctatcaagattgatgacaaaaaaactaaatcctagaaatgcaatattaatgaaatacgtattccagaaagagaaggtatagcagactgagaataaaatgaaagtgctacaacagttagcaataaaaaaattaccttaaaacaaaatcagacaactatttatgcttctaatcaaaataaaatagcttgtggtagacccagcttttcactgaaaataatgaggaagctgaataaaataagattaaaaactgcttggaggtattacagatggaaacactatgggcacttaatccccatagacactggggattataattcaagataagattttgggtgg

SEQ ID NO: 444715 - DNA, 564 bp, Homo sapiens
tcacaaaaataattttaaatatatgatgaaatcatagagaacttttactattaatacatgaaataaattagtttgtgatggcaaagttagtgataataaaaaacattacagaatataaaaatgcaatggaagaagaagaaaatggaatgctccagaaaactaaactagagagttagaattttgacttcagaaagtatcataaagctcaaaaaataataaataaagtgccctatcaagattgatgacaaaaaaactaaatcctagaaatgcaatattaatgaaatacgtattccagaaagagaaggtatagcagactgagaataaaatgaaagtgctacaacagttagcaataaaaaaattaccttaaaacaaaatcagacaactatttatgcttctaatcaaaataaaatagcttgtggtagacccarcttttcactgaaaataatgaggaagctgaataaaataagattaaaaactgcttggaggtattacagatggaaacactatgggcacttaatccccatagacactggggattataattcaagataagattttgggtgg

SEQ ID NO: 444716 - DNA, 549 bp, Homo sapiens
tgacctctttaaagaagtgagaaaatagagaaaacagaagaaatttggcaaatgatatagacaaacaatttacaggcacataaacttgaaagtctagtaattacatgaagagatgcttaaaaatctttattaaggccaagtgttagagcagatgaagagacaaagaaatacatgcacaactgataagaatgtaaactggtgtggccattttggagaaaaatctggtagaaatgaagttcaagtgtatcctctgtttyaataatcctgcttctaggaatatttgtcaaagacatttttacacatgtttataagttgacatacctgaagatgttctccagaatgtagagtatttggaggcaatctggagcttatcacggagaaaacaggtacttaacatacgccaaatgaatagttcagagaagcatgcaggtgttaaatattatgagctattgaactcaaagaaacaaaaataattcctgtaaataatactaaaaggtaaaaataagcaatacaatgaaaccaacaccatttacataaataaaaagtaca

SEQ ID NO: 444717 - DNA, 600 bp, Homo sapiens
ttgaaacaacatggatgtaattgggggtcattatattcagtgaaataagccaggcacagaaagaaaaactttgcatgttctcactcttttgtgggarctaaaaataaaaacaattgaattcatggagatggtagaataatggttactagagacggggaagggaagtggagaggttggagggggagtggggatggttaattggcataaaaaatggaaagaataaacaagatctagcacgtgatagcacacaaaaaataaatttcagtataaacttagatgtaaaagtgtatttttcaaaaaaacacatgaaattagtgttttgatatttgctttctgagttgacaatatgtttatgtctttccaatatttgtttatgactctatttttataatcacagcaaacagatctattatttccctataaaaccgctgcagcataatattctgtgttatgtctgcatgcaccttatgttatttattttattccttatcgatggaaatttagattgttttcaaacacttctaattttaaatggggctgcagtgaaacttgatatacaaatttgaatactgcaatattattgtgaaatcaattcttaga

SEQ ID NO: 444718 - DNA, 577 bp, Homo sapiens
ggagaggttggagggggagtggggatggttaattggcataaaaaatggaaagaataaacaagatctagcacgtgayagcacacaaaaaataaatttcagtataaacttagatgtaaaagtgtatttttcaaaaaaacacatgaaattagtgttttgatatttgctttctgagttgacaatatgtttatgtctttccaatatttgtttatgactctatttttataatcacagcaaacagatctattatttccctataaaaccgctgcagcataatattctgtgttatgtctgcatgcaccttatgttatttattttattccttatcgatggaaatttagattgttttcaaacacttctaattttaaatggggctgcagtgaaacttgatatacaaatttgaatactgcaatattattgtgaaatcaattcttagaagtataactacagtatccaatattattcaagattaaaaattgagcaaataatgacaaatcaccattccaaatattttaaaacactatatctatccagtagcattcattggaagttcctatttcaacacgttatcccacatagt

SEQ ID NO: 444719 - DNA, 577 bp, Homo sapiens
ggagaggttggagggggagtggggatggttaattggcataaaaaatggaaagaataaacaagatctagcacgtgatagcacacaaaaaataaatttcagtataaacttagatgtaaaagtgtatttttcaaaaaaacacatgaaattagtgttttgatatttgctttctgagttgacaatatgtttatgtctttccaatatttgtttatgactctatttttataatcacagcawacagatctattatttccctataaaaccgctgcagcataatattctgtgttatgtctgcatgcaccttatgttatttattttattccttatcgatggaaatttagattgttttcaaacacttctaattttaaatggggctgcagtgaaacttgatatacaaatttgaatactgcaatattattgtgaaatcaattcttagaagtataactacagtatccaatattattcaagattaaaaattgagcaaataatgacaaatcaccattccaaatattttaaaacactatatctatccagtagcattcattggaagttcctatttcaacacgttatcccacatagt

SEQ ID NO: 444720 - DNA, 590 bp, Homo sapiens
tgaggatgtaaagcctctactttgatgagcttaaccttgggacagaattagctgtgtaggcagctattttataagacatacaaagagggttcaccagcaytggccatggatgttagattttgttttacacccacaacattttagtatttcccttgagtggaaagaaaacctttttttaagcataatacctgtaaggaaagtacacacaaatcctatgtgtacacttggtgacttttcataaaatggacccagatccagcccctagatctagcaaacaccccagaagcccaccccactctactcctcttctagtttttacccaccgagggtaaccaatgttctggctcctaacacagtggattagttttggcttttgagcttatgatataaatcacacagtatcaatttttgtgtttctggctttgttcattcaattttatgtttgtgagattcatttatgttgttgcttattgttgcagtttattctcattgctttatataatcttgtgtgaatatatcataattttttattcattcatgtgctgatgaacatttgggtttttccaggtttgggctattatgaacagtgc

SEQ ID NO: 444721 - DNA, 590 bp, Homo sapiens
tgaggatgtaaagcctctactttgatgagcttaaccttgggacagaattagctgtgtaggcagctattttataagacatacaaagagggttcaccagcactggccatggatgttagattttgttttacacccacaacattttagtatttcccttgagtggaaagaaaaccttttttkaagcataatacctgtaaggaaagtacacacaaatcctatgtgtacacttggtgacttttcataaaatggacccagatccagcccctagatctagcaaacaccccagaagcccaccccactctactcctcttctagtttttacccaccgagggtaaccaatgttctggctcctaacacagtggattagttttggcttttgagcttatgatataaatcacacagtatcaatttttgtgtttctggctttgttcattcaattttatgtttgtgagattcatttatgttgttgcttattgttgcagtttattctcattgctttatataatcttgtgtgaatatatcataattttttattcattcatgtgctgatgaacatttgggtttttccaggtttgggctattatgaacagtgc

SEQ ID NO: 444722 - DNA, 590 bp, Homo sapiens
tgaggatgtaaagcctctactttgatgagcttaaccttgggacagaattagctgtgtaggcagctattttataagacatacaaagagggttcaccagcactggccatggatgttagattttgttttacacccacaacattttagtatttcccttgagtggaaagaaaacctttttttaagcataatacctgtaaggaaagtacacacaaatcctatgtgtacacttggtgacttttcataaaatggacccagatccagcccctagatctagcaaacaccccagaagcccaccccactctactcctcttctagtttttacccaccgagggtaaccaatgttctggctcctaacmcagtggattagttttggcttttgagcttatgatataaatcacacagtatcaatttttgtgtttctggctttgttcattcaattttatgtttgtgagattcatttatgttgttgcttattgttgcagtttattctcattgctttatataatcttgtgtgaatatatcataattttttattcattcatgtgctgatgaacatttgggtttttccaggtttgggctattatgaacagtgc

SEQ ID NO: 444723 - DNA, 590 bp, Homo sapiens
tgaggatgtaaagcctctactttgatgagcttaaccttgggacagaattagctgtgtaggcagctattttataagacatacaaagagggttcaccagcactggccatggatgttagattttgttttacacccacaacattttagtatttcccttgagtggaaagaaaacctttttttaagcataatacctgtaaggaaagtacacacaaatcctatgtgtacacttggtgacttttcataaaatggacccagatccagcccctagatctagcaaacaccccagaagcccaccccactctactcctcttctagtttttacccaccgagggtaaccaatgttctggctcctaacacagtggattagttttggcttttgagcttatgatataaatcacacagtatcaatttttgtgtttctggctttgttcattcaattttatgttkgtgagattcatttatgttgttgcttattgttgcagtttattctcattgctttatataatcttgtgtgaatatatcataattttttattcattcatgtgctgatgaacatttgggtttttccaggtttgggctattatgaacagtgc

SEQ ID NO: 444724 - DNA, 574 bp, Homo sapiens
tggtctgccagcaatctttagcatctgtcagcctgtgaatgtgtccctctaatcctcctttgcatggctatcttcccytctgtgaatctatgaatttgcttccagcttttcttgtgtagggtgttcttcaggttgctacttcaaggtcaaggtctgattcaagcccttcctcttccagcagtgttgccctcaccatctcaactcattcaactcaaccctccttgcaatttgattggatttactgccatttacattctacaatacttactatgtggctgttctaagtagagtgctacagcatcttatctgacgcatagccatcttcccctctgtgcatgtctgtcatggtgtcaaatttcccctttcataaggataccattcctattggattaggatccaccctagtgacctcattttaacttaattatctccataaaggccctatttctaaataaggtcacattctgaggtactaggaattaagactaatatatcttttgcaggaacacaatccaacccataataaggagaaatacttaggtttgtagggttttagtgagtaatgccacctaca

SEQ ID NO: 444725 - DNA, 239 bp, Homo sapiens
atagcctgattggatgaatgtcaaattatttccttaatcccaaggcacttgatcctaaatcttaaatgccttgtggtctacttgggatgataactagggggaaaaaaacatttaagyaaagagaattgtgtcagattaaatgctatagcagtttacttagaatagctgtgtagtaagtattgcagaatgtaaatggaagtaaatccaatggaatctcaaggacggtacagttgatgtga

SEQ ID NO: 444726 - DNA, 239 bp, Homo sapiens
atagcctgattggatgaatgtcaaattatttccttaatcccaaggcacttgatcctaaatcttaaatgccttgtggtctacttgggatgataactagggggaaaaaaacatttaagcaaagagaattgtgtcagattaaatgctatagcagtttacttagaatagctgtgtagtaagtattgcagaatgtaaatggaagtaaatccaatrgaatctcaaggacggtacagttgatgtga

SEQ ID NO: 444727 - DNA, 624 bp, Homo sapiens
tcaactgcagggtggcagagcacaattcattcgcaaacaatccgatcttagagcccaaggtcctgtattatgcctcaatatctgggggatttcttcagtcttctatctttcatatagttgacatttttgaagagtacaggtcagttactttgtaaaacgtctctccatgtgtgtttgcttgatgttttcttgtgatttttgaatttttgacagaaataacacagaagtgtgctatgttcttcttagtacctyatatcaggagacagatgatgatgatgtgtctcattactggtgatgttcactcttatcacttggttaagatgatggccagccaggtgtttccactgtaaaattaataaatatgtagcacttaataagtaacaaagaagtattttatgggggacaatatgagctaagtagatatcctgttcatcattaacctttgacccactagatttaatattgattgatgattactgcctgagtcaattattattatgatgattgccaaatggtaactttataaattctgtcattccttctagattattaataagcattctactctaaggtagttttctcttctctctggtttatttatttatgaatttccactttgctcaa

SEQ ID NO: 444728 - DNA, 586 bp, Homo sapiens
tcactcttatcacttggttaagatgatggccagccaggtgtttccactgtaaaattaataaatatgtagcacttaataagtaacaaagaagtattttatgggggacaatatgagctaagtaratatcctgttcatcattaacctttgacccactagatttaatattgattgatgattactgcctgagtcaattattattatgatgattgccaaatggtaactttataaattctgtcattccttctagattattaataagcattctactctaaggtagttttctcttctctctggtttatttatttatgaatttccactttgctcaaaggattaaaatatattactatcaaattgtcccagacaggaccagcaaaagccctttcaagctggcccctatgcccttttgacatataccccatcattctttgagcacttctcaattttctggtacaacatactatttcaggctcattttttattctcccaattcctgcccagacgtcagctatttctacagaaattgattccttttaatggagaatggtatttagaacccaagatctgggcactcgatttgcttgatact

SEQ ID NO: 444729 - DNA, 586 bp, Homo sapiens
tcactcttatcacttggttaagatgatggccagccaggtgtttccactgtaaaattaataaatatgtagcacttaataagtaacaaagaagtattttatgggggacaatatgagctaagtagatatcctgttcatcattaacctttgacccactagatttaatattgattgatgattactgcctgagtcaattattattatgatgattgccaaatggtaactttataaattctgtcattccttctagattattaataagcattctactctaaggtagttttctcttctctctggtttatttatttatgaatttccactttgctcaaaggattaaaatatattactatcaaattgtcccmgacaggaccagcaaaagccctttcaagctggcccctatgcccttttgacatataccccatcattctttgagcacttctcaattttctggtacaacatactatttcaggctcattttttattctcccaattcctgcccagacgtcagctatttctacagaaattgattccttttaatggagaatggtatttagaacccaagatctgggcactcgatttgcttgatact

SEQ ID NO: 444730 - DNA, 619 bp, Homo sapiens
ggaggtgagatgtgagctctgaattaaagaatggcagcaataccctggaacaataaaggcaggctgccaagtccccccaaaatcagaaccagattagaagcccagtctggggcttgaatccaggtgggtcctgattccagtgctggtactgtgcaagacacattcctctacgctgcaaaccagaaacatttcttatagccccacaraatcttgctggaatccattaagaaattgtttgaaccctggtgaacttttggctaaagaagagaggaggctcatgtttgcagcagaagtttcgttttgtcctagtgcaaaaagattttagtatgaaccaagacagaagttttccatggcttgtctatcattatcaacttctgagcactcccagcctaacaaatacatccaccaaagcataaaagatgcaattcattgtaaaggcagcagaagaatgactcaagatatgactaccttctcataggcagtaggcagtagtgaaatcacatccattcactaactaggaagacatttcttatgcagaagcctgtactgcattgccctgcttacaattgctaacaatcacgaagatggtaaaactttaatgagatttacaaaactattg

SEQ ID NO: 444731 - DNA, 603 bp, Homo sapiens
gacaagcaatgaagaacagctcagtggtttgaccaagagatgatccaaagcactccccaaaaccaaacttgcaccaaaaaaaaaggtcatgctcactgtctggtgttttgctgccaatctgatccactacagctttctgaatcctggtgaaaccattatctcaaagaagtatgcttagcaaatcaatgagawgcactgaaaactgcaacacctgcagccggcattggttaacagaaagggcccaatttttcttcatgacaatgcctgactgcatattgcacaaccaacacttcaaaagtcaatgaattgggctataagttttgcctcatctgccatactcacctgaactcttgccaactgcttaccacttcttcaagcatctcgataactttttgcagggaaaatgcctccacaaccagcaggatgcagaaaatgctttccaagagttagtcaaatcctgaagcatgaatttttatgctacaggaataaacaaacttatttctcattggccaaaatgtactgattgtaatggctcctattttggttaataaagatgtgtttgagcctagttacagtgatttaaaatttatggtccaaaaccac

SEQ ID NO: 444732 - DNA, 600 bp, Homo sapiens
agttttgcctcatctgccatactcacctgaactcttgccaactgcttaccacttcttcaagcatctcgataactttttgcagggaaaatgcctccacaaccagcaggatgcagaaaatgctttccaagagttagtcaaatcctgaagcatgaatttttatgctacaggaataaacaaacttatttctcattggccaaaatgtactgattgtaatggctcctattttggttaataaagatgtgtttgagcctagttacagtgatttaaaatttatggtccaaaaccacaataacttttgcaccaacctaatattagagaaaaatcacttaggcacaaagaaagacagtaaaaaaggaagagagaggttacaaaatcacaagaaaacaactaaccaaatggcaataagaagtccttacttatcgataataacattaaatgtaaatgggctaaattcttcaattaaaagataaagagtggctgaatggaataaataataaggyccaactatacgctgtaaacaagaagctcacttcacctataagggcacacaaactgaaagtgaagggatgggaaaagatactccatgcaaatagaaaccaa

SEQ ID NO: 444733 - DNA, 637 bp, Homo sapiens
taacaatagtaaatatatatgcacccaacactagcacatccaaatatataaagcaaattttaacagatctaaaaggagagatagatggcaatacaaaaatagtagggcaccccacttttagcaatggacagatcatccagacagaaatttaacaaaaaagcatcagggttaaactatattctagaccaaatggtgtaacagacatttacagaatatttcatccaactgctacagaatacatacttttcctatcaacacatggaacattttccagaataarccatatattaggacacacaacaaatcttaaaaaattcaaaattattcaaattatatcaagtatcttttttgaccacaatgaaataaaactagaaatcaataactttcaaaactatacaaatatagacgaactttggaaactatacaagtacatggaaattaaatatgctcctgaatgcttactgagtcaatacataaagaaggaatttttaaaaattcttgagaaacatgaaaacggaagtacaatgtaccaaaaactatgggatacaggaagagtgatactaagatggacatttatagcaataaatgcttatatcaaaacaatataaataatctaaataaacaacctaatgatgca

SEQ ID NO: 444734 - DNA, 637 bp, Homo sapiens
taacaatagtaaatatatatgcacccaacactagcacatccaaatatataaagcaaattttaacagatctaaaaggagagatagatggcaatacaaaaatagtagggcaccccacttttagcaatggacagatcatccagacagaaatttaacaaaaaagcatcagggttaaactatattctagaccaaatggtgtaacagacatttacagaatatttcatccaactgctacagaatacatacttttcctatcaacacatggaacattttccagaataaaccatatattaggacacacaacaaatcttaaaaaattcaaaattattcaaattatatcaagtatcttttttgaccacaatgaaataaaactagaaatcaataactttcaaaactatacaaatatagacgaactttggaaactatacaartacatggaaattaaatatgctcctgaatgcttactgagtcaatacataaagaaggaatttttaaaaattcttgagaaacatgaaaacggaagtacaatgtaccaaaaactatgggatacaggaagagtgatactaagatggacatttatagcaataaatgcttatatcaaaacaatataaataatctaaataaacaacctaatgatgca

SEQ ID NO: 444735 - DNA, 614 bp, Homo sapiens
aatatatttaagcctaaaaagttagagtcgaaaattccaaagtgatgaaaatatgcttgggttatatggtccatatgatgcccatatgcactaaaatttattttggtatataggacgtgtatattttcaagtctttgttcgacagtaacattttactgtattatcaactttgatctttcaccaaaatgtmacccacaaggttatatatatttttaattatttcttctgaagccaaccaaaaatctgcaggattaacaaatagattttaaatcaattttgggttgtagagccagtcaggctaattttattgtttttgtaatctcaagagatgaaattggatagacagaaaagtaacctttcacctagcagaggtagcaaccagaaggaactagttagtaatttagtctgtagttggtggctgtgtttccctgagctgtcatcaaatatcatgtaacaattatactattctgggagatataaacactgaaaatcccattttctggaagatcgaacgcaagcctaacctgctcagatctgtatcctgtgtccaactgtcacttccttgttagattttaatttcccacatgtgaactgataggtgttatcaaggaaaa

SEQ ID NO: 444736 - DNA, 564 bp, Homo sapiens
attatgaaatctatgagactaatacatttataaaaataaatttccctcttaaatctactcctatgggttcttycttccgcaatgaagagtcagtcccccacttggtgatgttcttggcctgaatattttatttcagtatctgttactgctcacaaaagtactatttttgagtggagagttagttgagtgcagagttagtggacagttagccctctccagttctcaaatggggaaaaatgaatcatttgagtggtaataatacacacacatacattatcttttgacatgtgaacactgtattttacagggttgttcaggattagaaacaaacttgaatccatagaaggtgacttaatcatcattttctggttttgcctgaactgtaccttacttattcttttacttcacaaggcctttcaaatcccacctcttccatgacatgtatttatttttatatctagaaagactactgtaggctatcttgacttttatgggcttcaatttgtcttcctcttgtttgcctttttagcgtgatttcattcataatccaactactaaaaaata

SEQ ID NO: 444737 - DNA, 564 bp, Homo sapiens
attatgaaatctatgagactaatacatttataaaaataaatttccctcttaaatctactcctatgggttctttcttccgcaatgaagagtcagtcccccacttggtgatgttcttggcctgaatattttatttcagtatctgttactgctcacaaaagtactatttttgagtggagagttagttgagtgsagagttagtggacagttagccctctccagttctcaaatggggaaaaatgaatcatttgagtggtaataatacacacacatacattatcttttgacatgtgaacactgtattttacagggttgttcaggattagaaacaaacttgaatccatagaaggtgacttaatcatcattttctggttttgcctgaactgtaccttacttattcttttacttcacaaggcctttcaaatcccacctcttccatgacatgtatttatttttatatctagaaagactactgtaggctatcttgacttttatgggcttcaatttgtcttcctcttgtttgcctttttagcgtgatttcattcataatccaactactaaaaaata

SEQ ID NO: 444738 - DNA, 581 bp, Homo sapiens
agcctcctgtgtgcattcctcgatggtcgatgcagaggaccacacggtatctgaggccctggccacatgtcactgtgcactggaaagagattgcaagagagaggagactcgtaggcaaagccttgtttacttttcttcacttcccatcgaaaacttttaatctaagttttctttttccccgcccccccccccccctcacgaggactcctggtaaatttataccacttcttaccagtcaagggatctttgttctatttggctatttgaggtgaagctcgctgaaaattaaatcactttcaattccatagctttggattaatcagtcagcaatctttaagtacccactgtgtgcaaagtctcaaaccaagcaccaaaaagaagaaaggagaaaagagactgtagagtgtgcttaattttgactaccagcactgtattttayttagttactttgctaatgaccgctacttccaaaaatatgggaaatacccctacatggatatcaaaaaatttaaactacgattatagctaaattatattgcagcattgttaatccaattgattacattgaaaggcaaaaataa

SEQ ID NO: 444739 - DNA, 536 bp, Homo sapiens
tgatctaagatgctactttagaacagagtccccagtgttaaaaaaaaaaaaaacaagccaaaattgggctcacactgctcagttgtagaatataactattgagatacatctctctctacaagaaaaatcctaaagtagttaaytccatgggcacctaatttaccggggttctgttcttttttttaattaaatttaatttttttgagatggagtctcactctgtcgcccaggttggagtgcagaggtgcgatctcggctcactgcaaactcctcctctcaggttcacgccattctcctgcctcggcctcctgagtagctgggactacaggcgcccgccaccacgcccggataattttttgtatttttagtagagatggggtttcaccttgttagccaggatggtctcgatctcctgccctcgtgatctgcccaccttggcctcctcacaggcatgagccaccacacccggccggttctgttctttttataatgaaaatgaaccataaagagatcctttcatggtttcaagggtttct

SEQ ID NO: 444740 - DNA, 536 bp, Homo sapiens
tgatctaagatgctactttagaacagagtccccagtgttaaaaaaaaaaaaaacaagccaaaattgggctcacactgctcagttgtagaatataactattgagatacatctctctctacaagaaaaatcctaaagtagttaactccatgggcacctaatttaccggggttctgttcttttttttaattaaatttaatttttttgagatggagtctcactctgtcgcccaggttggagtgcagaggtgcgatctcggctcactgcaaactcctcctctcaggttcacgccattctcctgcctcggcctcctgagtagctgggactacaggcgcccgccaccacgcccggataattttttgtatttttagtagagatggggtttcaccttgttagccaggatggtctcgawctcctgccctcgtgatctgcccaccttggcctcctcacaggcatgagccaccacacccggccggttctgttctttttataatgaaaatgaaccataaagagatcctttcatggtttcaagggtttct

SEQ ID NO: 444741 - DNA, 623 bp, Homo sapiens
gggtggggtgggtcctggaaccaatcccccatggatactgagggccaactgtactaacttctaactatttcacaagtttttctttagtttatcaccatgaggcagaagctatattggttctttactgcatctcttaggacagtgttctgcacacaggtgattagtaaataatcattgagtgaacttatgtcatcrgtgtgcagatgcaaaggcaagtaatgcaaccacatccaaaattaaaacaaaaaagcaaaaacaagtttttaaaagctagttaggaaaggaaggaaagaaactcccaaactgccactgttgtgcacatattcagtcccacgtcttgccttttgctggccctgccatctttgagagagggcagtctgatatggagagtggtctggcagtttaggaaggctgttcaggcaagcgggggtgattggctgatgtgagcagagaaaggacagattagtgactatgcttccatcctgcttaggttacctctgtatcttttcattggctatctcccagatataactctgaaagcttttaacaagatcttctcttctctctttctcatgtgtctttcagataccgtgctgctttggacaactcaacctgccctggac

SEQ ID NO: 444742 - DNA, 542 bp, Homo sapiens
ttcacttgtccacctcttgccaatttaagcccccttcattactgccttggagagaaaactaaaggtctgtgccaaaaaaaaaaaaaaaaagaaaatctgcaaaggtggttctctgattgtctcacaaagtgtaacttgcacaatttcctccagacagccttaactgtctcaccatctcacagattaagatatgtaaggctaaatgttgtatattttacatctaaagctgctttgaaacatcaaggtgtttattagctgrattcatgctatgcctttttagttgttgctgaaccacaggcttatactttgaggctttctggccacatgatggacctgacctttcacccaagaggtaaaaatgccacacatcattgcacaaattccaaaaatatttccattggcgtaagacagaagctttgcttataccatggtaggcacaagagaggattttacattttactagatcctaaatgtcttagtcacatgggaaagcatacagaacatagtgttaaatgtatgaagcagaaaacaaacgtggtaga

SEQ ID NO: 444743 - DNA, 570 bp, Homo sapiens
ggttttggaaccgtaagaaatctttagacttagagagagattttcatgattatctcctttggctccattagaggcatcagagtccgttaaaaattttccagagaaacttaaatcctttgagaaacctgaaattcctatagtttaaggagtaaacccagttagatttggacgcctgagagtggaaattcctgtgcccaatgcctgcgctgtccttccacatggtcaaggatcttgtcagattaagtcctcttcaatcccaaaaaccacaacaatagtagagtcaataatgctttgaatgttgcctaaattaaaactgtcatgctttctcaaaggatttggtccctccaaggcaattaggttatcagttttctgattwttttttttttttttttttttggccaacttggttttttgcttcctctccaattagttagtatccaggcatttctaaaggacatggtgaacctcatgtgacacctcccttccattgttaactctgactcttcattcacatctcagctcaaaaaagtctctccctaagagaaatcttctcttgcctccctaatcaaa

SEQ ID NO: 444744 - DNA, 514 bp, Homo sapiens
gtggtattcatccctgctgcccttcatgcaaccgtcctcttmcacacacacacacacacacacacacacacacacacacacacacagtaagtttgtatctgtttgctgattctctcctcttttttaagctggagtactagctagaaaaggaagtattttcattattactcagcaaatattttttgagggcctacaattgaccaagcactgttctcactgcttggaatacattaattaacccaatatacaaatcgcccacccttacgcagcatacgttctaacgaaccatgtggaacatggagatcatttataaaatgtttcctgctaccattacctcttggttgtagtttttgtcatttgagtgcatcataattattaacataggagttattcttgaattaaggccctaaaacatcaataattcaggatcttctcatctctcttactttctccccatcattccctaccctgctccctattctctctcattctctttcttttacccttctttcta

SEQ ID NO: 444745 - DNA, 514 bp, Homo sapiens
gtggtattcatccctgctgcccttcatgcaaccgtcctcttccacacacacacacacacacacacacacacacacacacacacacagtaagtttgtatctgtttgctgattctctcctcttttttaagctggagtactagctagaaaaggaagtattttcattattactcagcaaatattttttgagggcctacaattgaccaagcactgttctcactgcttggaatacattaattaacccaatatacaaatcrcccacccttacgcagcatacgttctaacgaaccatgtggaacatggagatcatttataaaatgtttcctgctaccattacctcttggttgtagtttttgtcatttgagtgcatcataattattaacataggagttattcttgaattaaggccctaaaacatcaataattcaggatcttctcatctctcttactttctccccatcattccctaccctgctccctattctctctcattctctttcttttacccttctttcta

SEQ ID NO: 444746 - DNA, 483 bp, Homo sapiens
acactacagacccacattccttagctcaagtgatctacctgcctcagcctcccaagtagctgggactacaggagttactgcgcttggcttggcattgtattctttatttccatgtccaattatatattcctagttcacagaaacatgattgatttttgtgtgttagccgtgtattatgtaaacttgatacactcactcaatacctctgagttttttggtagatgactgggattttctcartaaacaatcatgttgtttacaagtaagagtggttttgcctcttttcaatttgtaagccacttttttttttgtagtcttattgtactggctacgcatgcaatacaatagtgaataggaatgatgacaatggaggtccttatcttattcctaatcttaagaggaaagcattcagtttctcaccattgagtatgatgttagctgtaggtttttataaatgccctttatcagattgaggaagttccc

SEQ ID NO: 444747 - DNA, 632 bp, Homo sapiens
cgcatgcaatacaatagtgaataggaatgatgacaatggaggtccttatcttattcctaatcttaagaggaaagcattcagtttctcaccattgagtatgatgttagctgtaggtttttataaatgccctttatcagattgaggaagttcccttcctttcctggtttgctgagagttaataacatgaagggatgatgaattttattaaattctcttttacctcaactgacaaagtcctgtggtttttcttctttagattgttattgtgatgaattacattaattggtttttaaataaccaactctgcatttctgggataaactgtacttggtcatggtgtattattctttatatagatttctagtttgattcggcagtattttgttgaggctttttatctgtgttcatgagagatactggtctgtcgtattcttttttgtattgtctttgtttggtgttagtattagcacaaaatggcctcaaacgatgagtagagaagtaattgcttgtcttctttttttctggaaragattgtatggaattgaatatatttcttctttaaatggctgctaccatgccccagtgaaattttctggatctggagatttatttttcagtatgtaaccttatga

SEQ ID NO: 444748 - DNA, 632 bp, Homo sapiens
cgcatgcaatacaatagtgaataggaatgatgacaatggaggtccttatcttattcctaatcttaagaggaaagcattcagtttctcaccattgagtatgatgttagctgtaggtttttataaatgccctttatcagattgaggaagttcccttcctttcctggtttgctgagagttaataacatgaagggatgatgaattttattaaattctcttttacctcaactgacaaagtcctgtggtttttcttctttagattgttattgtgatgaattacattaattggtttttaaataaccaactctgcatttctgggataaactgtacttggtcatggtgtattattctttatatagatttctagtttgattcggcagtattttgttgaggctttttatctgtgttcatgagagatactggtctgtcgtattcttttttgtattgtctttgtttggtgttagtattagcacaaaatggcctcaaacgatgagtagagaagtaattgcttgtcttctttttttctggaagagattgtatggaattgaatwtatttcttctttaaatggctgctaccatgccccagtgaaattttctggatctggagatttatttttcagtatgtaaccttatga

SEQ ID NO: 444749 - DNA, 632 bp, Homo sapiens
cgcatgcaatacaatagtgaataggaatgatgacaatggaggtccttatcttattcctaatcttaagaggaaagcattcagtttctcaccattgagtatgatgttagctgtaggtttttataaatgccctttatcagattgaggaagttcccttcctttcctggtttgctgagagttaataacatgaagggatgatgaattttattaaattctcttttacctcaactgacaaagtcctgtggtttttcttctttagattgttattgtgatgaattacattaattggtttttaaataaccaactctgcatttctgggataaactgtacttggtcatggtgtattattctttatatagatttctagtttgattcggcagtattttgttgaggctttttatctgtgttcatgagagatactggtctgtcgtattcttttttgtattgtctttgtttggtgttagtattagcacaaaatggcctcaaacgatgagtagagaagtaattgcttgtcttctttttttctggaagagattgtatggaattgaatatatttmttctttaaatggctgctaccatgccccagtgaaattttctggatctggagatttatttttcagtatgtaaccttatga

SEQ ID NO: 444750 - DNA, 585 bp, Homo sapiens
taaaatgaatataaaatattctatatagaaagttgtrtgatatacatatagatagatattttttaaagaatacttttaggtacagtccttgggaagaattttcttgagaaaagacatttgcaacccatatctgtgaaatgacagaatttatgattcccatggaaattttgttcattgaatggagaaatgggttatctggtatctgaagcagatcatttagaattgttgattaataagctagaaatatgtcctgaagactggcatcatggttcagtcaacaaagccagaatagattagggcagatgcactcaatcgtaaaacagtgtgcctttgtaggaaagggcacccagaggaatgtgcagcacggtgggagaggatgtggcccctgcctcgccagctatactaatggcattaatcaccaaggaggcaggtgttgccaccagattgctctcacatcctaagagatcttaaacaccactctgtgcacaatattgtaatagatgccaagtagaagcatcttccaatccatcccaaatcattgaggatttatcagaaagtgagacaattattaatacataaacaact

SEQ ID NO: 444751 - DNA, 660 bp, Homo sapiens
atagatattttttaaagaatacttttaggtacagtccttgggaagaattttcttgagaaaagacatttgcaacccatatctgtgaaatgacagaatttatgattcccatggaaattttgttcattgaatggagaaatgggttatctggtatctgaagcagatcatttagaattgttgattaataagctagaaatatgtcctgaagactggcatcatggttcagtcaacaaagccagaatagattagggcagatgcactcaatcgtaaaacagtgtgcctttgtaggaaagggcacccagaggaatgtgcagcacggtgggagaggatgtggcccctgcctcgccagctatactaatggcattaatcaccaaggaggcaggtgttgcmaccagattgctctcacatcctaagagatcttaaacaccactctgtgcacaatattgtaatagatgccaagtagaagcatcttccaatccatcccaaatcattgaggatttatcagaaagtgagacaattattaatacataaacaactcaaaagtggctttttatgaacatgcagaaaatgaaatttttaattgttttccctattttgttttttgttaaattaagagtactgttccttaaagtatgtcctaagatatatcagctgattttaaca

SEQ ID NO: 444752 - DNA, 551 bp, Homo sapiens
gaactccattcagccaagcttcttcttttgtactaaggtgattctccagtcaccttcagtacttcttttttattattttgaaatatttaattaacaaataaaaattgaatatattcgtgatgtacaatataaatatttgacataggtaaacattgtgtaatgattatcacaattagattaatgaacacatccatcaccacccatgctatgcatcagatcyccagaacttgtttatcttacaactgaaaattcctattctttgaccaatatatcccctttcccctccctcctgagccctaacaaccattcttctcccctcagcttttatgagttgacttttcaagattcctcacatttcaagtgagatcatgcggttatttctcctttggtgtcttgcttatttcatggagcctaatatcctctgggttcatctatgttgtggcaaatgacaagatatacttcttttattatggttaaataatattccttcatatatatgtaccattttttctttatccattcatccatcagtggacacttagattatttgt

SEQ ID NO: 444753 - DNA, 628 bp, Homo sapiens
gtgccaactctcatcagttctgttcagtatggtactagaagacctagccagagcaagtaggcaagcataaaaaatgaaaaggagaatttaagttgcctctgtttgacgaagacatgactgtatgtgtagaaaccctaaagatgccactcaaaaaacggttagaagtaataaaaaaaattggtaaagtttcataatacaaaattaacatacaaaaatcagttgtgtttccatacactaacagcagactatctgaaaaagaaattaagaaaacaatcctatttacaataccatgaaaaagaatatgatacttaatgaatttaaccaaggaggtaaaagatctgtacattgaaaactgatgaagaaggcacaaatatatggaaagatatcccatgtacatgaattgaaagaattagtattgttaagattcccatactgcataatctattgattcaatgcaatccatatgaaaattctaacracatttttcatagaaatagaaaaatatactaaacattatggaaccacaacaacaaagtaactaaatagtcaaagaaattttgaaaaaataaagctggaggcatcacactgttggatttcaaattatattagaaagcagacatagtcaaaa

SEQ ID NO: 444754 - DNA, 579 bp, Homo sapiens
aaacattcctttctaattgtacattttgtttgtatgtgtgtggctacaatggaagtcagggaattattacacctaagacaggatgagtttctctgtaatttggttcattcaggcagcagggcatgggcagataaagctgtccctgaggaggaggggtatagtctgaccaggagaacacagtgcccaagggcactgagaacaaagctcagatcagcagtatctgatatggaagataatgtcaaggttgtcaaagaagagcatggcaatgggctatctaaggggaaattaatacatgggctctatgccctggctgcgyttttttttatgggagtcgtaggaggttgaatgagatggcacgataaaattaattctggaaagtatcagtcaagatgggctcaattacactgcagaaacaaacatgcctataatatcagtgactttggacaatagaaatttatttgttgttcacattgcctttccatcatgaatctcacagagcaagtggccgggtgagggagttctctgctcaatatagtttctgagggatctaggctgatgggacaacatacgctgttttga

SEQ ID NO: 444755 - DNA, 579 bp, Homo sapiens
aaacattcctttctaattgtacattttgtttgtatgtgtgtggctacaatggaagtcagggaattattacacctaagacaggatgagtttctctgtaatttggttcattcaggcagcagggcatgggcagataaagctgtccctgaggaggaggggtatagtctgaccaggagaacacagtgcccaagggcactgagaacaaagctcagatcagcagtatctgatatggaagataatgtcaaggttgtcaaagaagagcatggcaatgggctatctaaggggaaattaatacatgggctctatgccctggctgcgcttttttttatgggagtcgtaggaggttgaatgagatggcacgataaaattaattctggaaagtatcagtcaagatgggctcaattacactgcagaaacaaacatgcctataatatcagtgactttggacaatagaaatttatttgttgttcacattgcctttccatcatgaatctcacagagcaagtggccgggtgagggagttctctgctcaatatagtttctgagggatctaggctgatggracaacatacgctgttttga

SEQ ID NO: 444756 - DNA, 552 bp, Homo sapiens
cagtaattttccgattttttaaatgtacactatttttatagttgatcaagtctgttttcctgccttggagattatctttaaaatctccaggttaaaggattacggattgtggactcccgtttcacatcatagcaaacccctctggcagggtcagtagtttttgcccaatctgctacctccctggggcataacaaagaaggattcaaccttcagtgacagcaactcctggcagtttctaagtgagccttgcctgagctgtgccccactgagggtctcatcttcctgaatccaatgctcctctgctttcctttacagggagaaagcctgcctctgaccccgccaggtaagagctgagctgcmttcctgtgtgattagtgaaatgtccacagggtggaaaaatggaattgaatctgatgattaccaagagcacagtttctgccaggtgctgctgagctggggtgtggccactacctgttgtacgtccctggggatatcttaaggcaattcccaggacctttgcacccacccccttagctgtataggctgttatct

SEQ ID NO: 444757 - DNA, 562 bp, Homo sapiens
taagctatgaggacgcaaaggcctaagcataatataatagattctggggattcagtggaagagtgagagtggggtgatggataaagtactacacactgggttcagtgtacactgctctggcaacgagtgcaccaaaatctcggaaattactactaaagaagttactcatgtaaccaaacaccacctggtccccaaaactactgaaatttttttaaaaatgaaaaacccagctattcatttaataaaatcaaactttacagaattatctaagtaaaaataaaaagttttaccattttctttattttttcagaaattacttctgttgagtatttggtgacactttctagatcttttctatgtataagtacactcatagacacataaataaatacattaaaatcacacacgtgcatgggatcacaataacatactggtctacaacctgctttttccccttagctatatattatgggcatctttctgtggtattacttaaaaatytacatgactaacttttaaaactcatctttattaaagcataatttacacacaataaagtgta

SEQ ID NO: 444758 - DNA, 405 bp, Homo sapiens
actttcccgtggctcccactttacctgcaaggccctgcaccgtctgacctcatagcccatgctcccctctttcctcaatctactctaagacactggggttttttctatttccttcaacagaccaggcatgctcctgcctcaaggcctttgattgtgcctagaattctcttcctccaggtgtttgcctgtctcatttcctgtcctatttcaggtctttgcaggaatgctctctactcagttgagtctaccttggccctccttccccatttcaaactgcatcctcctcctggttcccygctctttctccttccttcctgctctacctccctcagcaccacttatcaccaggaagtgaggcagggtgcattttatccagctgcccttcaatgacaaatatgcaaagaa

SEQ ID NO: 444759 - DNA, 589 bp, Homo sapiens
tgcctccaaaatccaaataggcccactaggaattgtgcctctttcttggttgcaggaggggctgaatgcagcaasttatccttcaccttagaagaaatatctcgacaggccccacacaactggacccctagaaattttactgaggtagagggttcctgaattttagttgaatttattttccatcctctggcatgcaactatctcaccaataagtccagtgtatttgctactttttgctcactggatccaaccagcataatgtcatgaatgtaatgcaccaatgtgatatcttacagaagcaaaaagcaatcaagctctctccgaataagtttatgacacaaagctggagagttgatatacccctgaagtaggacagtaaaggtatattgctggccttgctggctgaaggcaaattgtgtctggtggcccttatggacaggaatggagaaaaaggcatttgccaagtcaatagctgcataccaggtaccaggagatgatgtgttaatttgctcaagcactgaaaccacatgtggtacagtagctgcaattggagtcaccacttagttaagcttacagtaatccactgtca

SEQ ID NO: 444760 - DNA, 595 bp, Homo sapiens
gtttggactcattatattaaaagagctttctatagtttgagtcatccaaaaaaggaatagaagctttgggacacagtgagattcctgtcagtggtgaagcatrtatatatacacaggcacagccacttggtaggggtgttagaagtgcaggaggaagtaggactcctggtgaatttccttccagtgacccattcctagattttaagaaatccttgtattggtagtcaggttttctagagaaacagaaccgatagtatacacacacacacacacacaaaccacattttcagaattggctcatgtgactgtggaggcttggtgaattcaaaatatgttatgggaggccatgaggctggagaatcaggaaatacttgaagtttgagtctaaaggcagagtgctagaaaaccaggaaggggcagtgttgcagataaagtctgaaggcaatctcctagggaagttttcttgctcagggtggtcagccttttgttctatcaagggcttcagttgactgaatgaggcctcccaacattatgaaggacaatctgctctattcagtctattgatttaaatgttaatctcattcccaaacatcca

SEQ ID NO: 444761 - DNA, 577 bp, Homo sapiens
ttgtacatcataaaggagtgcccttgtcttttcrttctccaaagacatcagaacctgaacagcacacctgccccaagaccaaactgagggtcaggctgcttattctcacagccaaataatgagatgcagatggactgggaaaggaggatgtttatttctgtaacccggtacaggcagaaggtctggaaattatccccagaccaactcaaaattacaaagttttccagagcttatataccttctgaactacatgtctacatgtaaatgtccattcatttaaagacataagtgattgacttcttctaatctataactaagatctgagtcctgaagaccttcctctggagcctcagtaaattttcttaatctaaatggaagcagatgtggagtgattacacttacttcatctcctgctaagacatggagctttgaggagtttcttcagacccccaataaacttgtttgtagaggcctggggactttcttcagatgaaacctgtttaatcctaaatgggtcctgttaagaattccttcattatcttgtcaggcttcaaggcccaggaaaggcctaggcaaa

SEQ ID NO: 444762 - DNA, 582 bp, Homo sapiens
gtcccatatggcactacatccacaaagcaagtttattgagtggtgatgtagaagacaggggaggagatttgggggtgtcacagcacatacattcagatgtatccgaagtacattaatctagtggttccccagagtaagcttgagtactctgcctatggagcacaagcaaggatgtgtttccgcagtggacaagtcagaggataaacaagacaataaacaacattgttatttacaaaatatacaaactttataaaatatacaaaagagttattgcactaaaagaaggcatagcagaaaataatgagtataattaaatgctgaattttatggtccaaagctatcatagttacatgtggttatttgagttaaaatgaaataaaaaatgttattccttcattgcactagttaggggctaccatattagcttaatataaaatatttctcttatcatagaaagttctattgaacagcactggttctgactgtatgtgctatagatacacaaaagaargagaacaaaaagatcactgaactgaagtaatcatggaaggcttcctgcaggaggtagtggtgggactatgt

SEQ ID NO: 444763 - DNA, 546 bp, Homo sapiens
tcggatattagtaatttgtgtcccctctcttttttcttaattagcctggccagaggcttattaactttattgatattttcaaagaaccagattttaaaaattgattttctctattgatttcctattttcagtttcattgatttctgttctagtttttattatttctttttttctgcttaccttggagttttttttttcttgtttcctgagatgggaggttagatgactgattctagatacttctttttaatatatacactcaatgctataaatttccttctaagtactgcttttgctgcatcccacaaatgttagatttgttaaattttcatttagttgaacatactttttagtttctcttgacatttattttttgactaatrtgttatttagatgtgtcttgtttaatctccgtgtattttgggactttctagttatctttctgttaattatttattgctcaatttaattgtgttctgagagccgacattgtatgatttctattctttcatatttgttaaagtgtgttttatggcccaggatgtg

SEQ ID NO: 444764 - DNA, 552 bp, Homo sapiens
tccataactcagtccctgggcatcaggttggtgctcttagtccaacaggcatgaaaagcacacagcagcagagggcatggggcaggtgatagggagcaggtracctagggaaaagacaggtgagcttatgagcagagaccctgagctttcattccagctctaccacttacttatccatgagcccaggtcttcacatctgtgaaatggggttaatattgtttgacagagttgtgaggatttaatgaatggctcattgttagtcaagtgtaaagtgttcgacaaatctaaggaatggttttggtctgggggtaataatactgaggctcttaacctgtcctacatggagatcagtgttcataatgggatcacattccagactggccttggactcaatattgccttaaaccctcactttaccacgctgagcctgatataccctcttttgtctcttagattctggatttattcttaacttactactctaataaattgtttctacaagagaaaatatttttgtttctttctgtatgggattcaggttgaaagtaaaaa

SEQ ID NO: 444765 - DNA, 580 bp, Homo sapiens
atatcaaaacttcacattgtaccccgtaaatgtatacaactatgatttgtcggttaaaataatattaataaaattaycatttttaaatttaaaatctagctaatcagtttataaagcattcatactttgaccttatcagtattttacccttaatatttccctcatgcataccccaatattcagtgtttttaattcctggggaagtttttgccctggaaataatactcacaaagaagaaaaacacaaaggatcttggtcctgccacccccttccaagaccaagagctaagtgtgttatgaagaggctggtactaatgttccaagttggattctagggccactgacacaagctctagctgtgtctttgcaaagggttggtttctggtctatggcatgaatggggttggacaggattgtgatgtttctgaggttgtagcgtccagctctcttgaggactgtcgtggctgggtgagcggttatggttcccaagaagttcctgtctgacctattttatatggtaggatttggagactgtttgcacaaagggttaagttgctaaaaataagtttgaagccacttga

SEQ ID NO: 444766 - DNA, 624 bp, Homo sapiens
tctctgcacagccctggaaagcctcttgtttctagtcactaggagagaaggtccagtctcccagcacacacttcttatctggatgtctctcattgtgagggactgggaggtctgtaggcctacctcagcctgattctggccctatctagtgaagcactcagtgatctcttgcgcccccctctggcctcagttctttagcggttgctacagcaagtggtctagttgggcctgcacttccaagtcagacccatagagggcaaccacttgccagtttatgagaaatyactctgggtgtggcctctccctttgttcacttccttttcagtgcttgtaaaattctagaaccacaggctgtcagaatcagagggtgtgtttagataacttatatttgaatatcctcatgataaagatagagaaacaggcccagagaagagatgagaccagtctaaactcagacagtgattcactctgtggcagttagggctagaatccacgtttcctgaatgccagttcagaacttttgaaacacacggccaagcatctaacccaaatgcctcattttatagttgtgaaaactgaggccccggaaagaagttgactaaggttgtacagtcgttgtgatag

SEQ ID NO: 444767 - DNA, 630 bp, Homo sapiens
tgactagggtaagtttggttctattacacagcacttttgggagattagaggcagacttcatggaggaggtgacttgtgggtcagggcttgaaggatgaaaacaacaaccaaaattttagttgcggctgggcatgctggctcacgccggtaatcccggcactttgggaggctgaggagggtggattacctgaggtcaggaattcgagaccagcctagccaacatggtgaaaactgtgtctactaaaaattaaaaaaaaaaaaaaattaactggggatggtaacacgagcctgtagtcccagctactgggaaggctgaggcagaagaatcacttgaacctgggaggcagaggttgcagtgagccgggattgcaccattgcattacagcctaggaaacaagagcaaaactccgtctcaaaaaaaaaaataataatttcaaagatgcacttattctttaaaaaaattcaaagtaaggctgggtgcagtggctsacgcccataatcccagcactttgggaggctgaggcgggcagatcatgaggtcaagagatcgagaccatcctggccaacatggtgaaacctcatctctactaaaaatacaaaaattagctgggcgtagtggcatgtgcctgt

SEQ ID NO: 444768 - DNA, 606 bp, Homo sapiens
atgttatttcttattgatataagatactatccaccaaggagctacatcactcatgaattatgtactgtacagcagagctctgaaattcatcaagcaaaactgctagaaatagtaagttgataaaaacagaataatcactgttagtttgaatgttagttggtgcaaatsatttaaagggcatgtcaatcagatgtctaggttacattatcgtaaaaaccaagctccaaatgtcaatggctcagtgaaatggaagtgtattattaatgctacatgtacaacataaatcaccaggggactctgctccatgtcctcattccatgttttcttattatgccggtatctcaacagagtgtattgaagtccactgctgcaacagaagagcatctttcattgaaattaaatgcttcatctcagaaatgacagatgttgtactcccaaacccattggctggaaatagtcacatagactcagccacttgcaatggggacaaggatgtataattcttgtatgtgtctaaaaggagaggagaaacacacaccagggaagattagcagtttctaccatgaaggataatttgacattatctaccaaaatttaaattatgca

SEQ ID NO: 444769 - DNA, 561 bp, Homo sapiens
gtgcaatgacactcataggctcaaaacagacggatggagaaaaatctaccaaacaaatggctatcagaaaaaatgcagggattgcaatactaatttcagaaaaaaaacagactttaaatgaacaaagatcaaaatagacaaagaatgtcattagaaaatggtaaagtattcaattcggcaagaagtcataacttttctaaatatatatgcactcaacataggagcaccgagattcataaagcaagttcttagaaacctacaaagagtttagcatccaacacaatactaggagatttcaacactccactgacagtattagacagatcatcaagtttgaaaataacgttcaggatgtaaaatcaagattgggttaaatggatatgatagagctctacagaattctycagcgaaaaccagcagaatacacattcttctcattgccacatggcacatactctaaaattgaccatatatccaacaaaaaaacgctcagcaaataattcaaaataactgaaatcataccaacgactttctcagactacagagcaataaaaatagaat

SEQ ID NO: 444770 - DNA, 614 bp, Homo sapiens
gtgggtcaagaaacttcatattgactaccatgttcattactgggtgatgaaatcattttaacaccaaaccccagggacaagcaattgacccatgtaacatacttgcacatatatcccctgaacttataatacaagttgaaagaaaaaaattgtaaaaattaaaacatgaataaaataataaattaaaataaaataagagttcataagtaagtcagtagccatctgaggaacatccactttgagcaggytctgagtcatgaagttataaatgaacatctgttgcctacttaataggtcattgagtagctgtgacccattcttaatttgtatgtaagcatattttttacatatttgtatctacttcattttcccttgaagcttgccaaattggtacacttcagtttgaactgatgtctcttatatgctgtaccaccttcttaaaaattcccttatctttccttccacctagattgataacaaagcatttgtttttgctggactttccactcttgaccataagatggtagcattccctaagatattgcagcacagtctaattccactgttgtcatctacagttaaatcgcaaataaaaaataataataagcagcaac

SEQ ID NO: 444771 - DNA, 594 bp, Homo sapiens
ccttttcttttgtttcaacctagggccatctgttttaaggtgtcctggtcttttacagtagtagcagactgggagggaagggttctcagaccgagggagcctaaaatctatctgacgctgatcgtttgagaagttaattgctttagctttaaatgcataactcgagcaatcttctgtttttcttttgtattgtagtgcaggataattggtcagctaagttaactggttaattagttctggctgtggcccagctggtcatgttgcattttataagggtggctaaatcatcatgtagtccatgtaagaaatttgcattcgataacgtatatttttgttgttttcaaagcaatcagttgacatcccgcaakagtgtcttaaagttttatcaaaacatgaaataatataaaattgatttgtttgtgttctggtggcatttttggattttattccaatccacaaccctttggaacactgaaggaataatatttaacagagtggctgctcgttcctacgcatctttatgcctgtctcctggatttggaggggggcgctggttgttgggggctctactggaccttcaggagtcaagtctgc

SEQ ID NO: 444772 - DNA, 567 bp, Homo sapiens
cagtacatgtgtcaaacccaaaatgtgctgcttgcgaacttagcttttcaaggttgttcccctctgaaccggtttggtccamctgtgtcgtggctacctggcacaaatgtgccaggagctaaggtgtgagaggggtcggctccttatatgcacctgctggctgagattagacactaaatatgttcttctgaaagggaaacttatttagagctgctgcatgtcttagggagcatttctcctagacaccctcatgagattctcagttgcctgagaatgccccaaaaggctgaatgaagggagtaaggtgctctatttctttggagtgggagactccacactcatgagctagagtgttctgagttggtcaaatctgataggggaaaggacagaaacatacaaatatacacatacacaaaaacagaaacaaacaacaaagcagttaagcaaaacttataataatcacacaaaatgtatgatttctgagcactctaagtataagcaggaaattgacaccagctggttgttaatgctaattttagtcatttagagaatttgcaagacagaatc

SEQ ID NO: 444773 - DNA, 565 bp, Homo sapiens
ggtgggaggatactgggagatattatgccaaatatatggccaccaaacatcctgaaaggccactttctctgtcatgaaaagaaccttgaagatacactaggatggtgcactaaaagggatccagaactcaagtttgggctttctctaccagactgtgtagccagctcttttattcgtgcatacctcccatctctctgcattcctcaatgatttctactttttaataccttactcttttggagaattagtgtgattatagatctcataaaacttgtttttgtacagttctctgtttatccatgcctgattgtctcaacagcattttacaatcttagggcagctaaaytgtccttgactatcccttcttatttgggtttatctgacaaggccactagtcagcaatgcttaaagctgctggaggccaggcacagtgtctcatgcttgtaatcctagcactttgggaggccgaggcggatggattgcctgtgctcaggagttcgagatcagcctgggcaacacgacgaaaccccgtctgtactaaaatagaaaagaaattagctgggtg

SEQ ID NO: 444774 - DNA, 565 bp, Homo sapiens
ggtgggaggatactgggagatattatgccaaatatatggccaccaaacatcctgaaaggccactttctctgtcatgaaaagaaccttgaagatacactaggatggtgcactaaaagggatccagaactcaagtttgggctttctctaccagactgtgtagccagctcttttattcgtgcatacctcccatctctctgcattcctcaatgatttctactttttaataccttactcttttggagaattagtgtgattatagatctcataaaacttgtttttgtacagttctctgtttatccatgcctgattgtctcaacagcattttacaatcttagggcagctaaactgtccttgactatcccttcttatttgggtttatctgacaaggccactagtcagcaatgcttaaagctgctggaggccaggcacagtgtctcatgcttgtaatcctagcactttgggagrccgaggcggatggattgcctgtgctcaggagttcgagatcagcctgggcaacacgacgaaaccccgtctgtactaaaatagaaaagaaattagctgggtg

SEQ ID NO: 444775 - DNA, 578 bp, Homo sapiens
tcagcatagaatgaacatacctgataagaataaaatcaatatatgaaaactcacagccaacattatactgaatggagaatagttgaaagcatttccactaagaattggaacaagaaaaggctatccactttcaccactcctatgcaacatagtactggaagtcctagccagaactatttgacaagagaaagaaaaaaaaaatgcatctaaatggaaagaaaatgaaagattygttttggctgatatgatcttagaaaactctaaagaatcctcacaagactcctgaatttgataaatgaattaagtaaagtctcagatacaaaatcaacatacaaaattagtagcatttctatacaccaataactaccaggctgagattcaaatcaaggaatcagtcccatttacaacagctgcaaaaaatcgaaaacacctcacagtacaattaatgtaagaggtaaaacatctctaaaagaaaaactataaaaaaccaaacaaagaaataatacatcatataaacagagaggaaaacatctcatgctcatggattagaagaatcaatatggttaaaatgaccaagc

SEQ ID NO: 444776 - DNA, 599 bp, Homo sapiens
atttgactttctgtttatgggtaatttcacttaagattatgatcaccactattatacatgttgctgtaaaacacacaactttgttatttttatggcagaatagtattttattatataccacatttactttatcaaatcatccattgatggacacttaatcagattccatatctttgtactgtgactagtgctgggataaacatacatgtgtaggtatttttatttatttttaaaaatttttaaatgaagcagaccttgcacgcactttcctttcagttcttatctagctgaaaaaatggtgtacactgctgccttgactcttcccactgcccattgttaatcatttccatccttttattttatttacttaatttattttttatatttatttttatttcaatagttttggggaaacaggtggtgtttggttgcatggaaaagttctttagtggtaatttctgagattttggtgcatccatcacacaagcagtgtacactgtacccaaygtgtagtcttttatccagcacccccctcccacccttcctgctgagttcccagagtccattttatcattcttatgcctttgcattctcatagc

SEQ ID NO: 444777 - DNA, 495 bp, Homo sapiens
atcttctttgttctaggacacattcaacagtcccctgccttcaatcaaagtatcttaacaaagaattctaagaaataagcttaggaattagtctagtattctagttataaatatcagggcttcaatttaacaagtcgatattgatcacctattgagtgcttagccctgtagagaaaaaaaagacaatgttcctgccttaagcagcttattgtctcataaaggatagcacacatatgcaaatgctgcarttttactttaggtgaggcactaagcacatccatccatttggaggaaccaagaaactttgcttggaacagatggcatttgagccagacttgcataaattttgctaggtagaaataaaatgagaagtatttcaagcaagaaagaatagcttaagtaagtgtgtacaaaagggaaagtgacaagcacattcacaaaacagcaaggagcccaagttggaggagtaggcattcatgtagacaaggctgaaag

SEQ ID NO: 444778 - DNA, 602 bp, Homo sapiens
aaattaatttaataagatagctttcctttcacctttttagctggaaatgtctgttctgatagaatggatatcctgatttggggaagaggaagaggaaggaacaaggagtaaggatcacacagaatccttctggggatagggtaaatttcgttgatggagtattgctgtgaggtgctcaaataagatagatagcatgaaggggctggaaagccaggagaaagagaatgtacagaataccacaaatatgctttgcccactttaaagcctaagttttcttgtgggccttagggccaagataaatggttgttttccttcttcatatatgaaagacctctatctagaaaatactagtcaatctgtatggaagtttctctgggcagtactattttaacatgttgttccaatgggcagacattataaataccaagcatctgttcttaaggttgtgggttgcctaaacatatggaatccctttgagccaaacagaggtgctatcaaaattgttttattatattgaattaccaatgacaataaattacaaaaaacamtgttttagacattgctgagtctaacaaaataggctgaagtttgatctttgtgaa

SEQ ID NO: 444779 - DNA, 568 bp, Homo sapiens
caggctggaaagcaatatgcttccctattatgccccgtcccagcattcaggacactcagattggacagacaccattgtctatctccaggctgcagtgtatccaagagccatgaaagatgcctgctccacagctcatcaacataatgtctttgacatggaacatccttcctcagcctaaaacaaacagctttgtggctcttctgttctccactgcaggaacattgctgctcaaaaaagagagggatagagctacacttttcatgcaagatctggcctagtggatacactgccaatgtggacacagctgcccctaatagccttattatagccatcctctgttctgtctatgccaacctcctgcagaagcaaccacagctgtgtctgtggcagtgtwgggggaggtgaagtccctctttctatgtatgtccatgcctgagcactgaggccacctggctgctgagatgaaaccatgctcctctcttgtgaagcagagtatagttcccaggtctctgctgagagtggtgcaatcactctcaatcagctagaggggtactcttgggcacagcaa

SEQ ID NO: 444780 - DNA, 568 bp, Homo sapiens
caggctggaaagcaatatgcttccctattatgccccgtcccagcattcaggacactcagattggacagacaccattgtctatctccaggctgcagtgtatccaagagccatgaaagatgcctgctccacagctcatcaacataatgtctttgacatggaacatccttcctcagcctaaaacaaacagctttgtggctcttctgttctccactgcaggaacattgctgctcaaaaaagagagggatagagctacacttttcatgcaagatctggcctagtggatacactgccaatgtggacacagctgcccctaatagccttattatagccatcctctgttctgtctatgccaacctcctgcagaagcaaccacagctgtgtctgtggcagtgttgggggaggtgaagtccctctttctatgtatgtccatgcctgagcactgaggccacctggctgctgagatgaaaccatgctcctctcttgtgaagcasagtatagttcccaggtctctgctgagagtggtgcaatcactctcaatcagctagaggggtactcttgggcacagcaa

SEQ ID NO: 444781 - DNA, 451 bp, Homo sapiens
  misc_feature (1)...(451): n = A,T,C or G
nnnnnnnnnnnnnnnnnnnnnnnnnnnnnnnnnnagagtttctgtcactgagttccccagggttcaaaccaactgctcaaccaatcgatcagtaatggtttttgatctggcagtttggttatctgggttttcatatcagtcataagttgggttatgttctttgattcatctggaatatacacacaacattcagtttttatgatggcgcaattccccccttgtgttgccattagtatttctaaagccatacagttttgtagctcagctttcctcataagcatgacctcwtcatttagcaaagagatagatactcatgtggccttttgagtgtaattcagtaaggcctctatatgccatataacatcttaaatacctatctgtggtataaatattgaagctaaatgattataccattggaataccaaacgtgtccaacaagatttttaaatga

SEQ ID NO: 444782 - DNA, 608 bp, Homo sapiens
gtctgtcataaagtagatgcccaaaatgcttttttttaaattgacatatgattctcatattatataatttgtgcatttgaactgtaaaattcagtggtttttagtatattcacaatatataatcacrttatgtaattcacattatataatcataaccattatctaatttgagaacattttttattatttccaaaaaaaccccataccattagcagaacccttcattctttcctacccccattctctggcaaacaccaatctacattctgcttctacagagttgtctattttgaacatttcacaaaaataaaaccaaataatgtgtggccttttgtgtttgcctatgttcacttagtgtgtttctatggttcatctttcttgtaccatgtattagtacttcatatccacttgctgcagcaccatttattgaaagactgttctttcttccattgaactgtttgagcatccttgtttcaaattgattacaaatatatgaattaaattttgggctttcagttctattgcattcatctgtatgtctattcttatgccagtaccacactatcttcattactatagctttgtattaagttctgaaactagaaagt

SEQ ID NO: 444783 - DNA, 583 bp, Homo sapiens
tcgtaacaggcagtagacaactatcctggtaggcaagggaacttaaggaatacgttaactggaagaacaaaacaaatcttgccacagaaaaatgtggatatgaagtaatgtgtcagtcataaaaatacaagacaagactctccccagtattgagatcagggcaaaaaataatgggtcctggtcataagaagcaagagcaagtagaaagacaagttactgaactggggtccaataccacagtgtgtctaacagcaaagcttgtggctttaggaatcatttcacctttcaaacctcatctgcaaatggaagaaaatcaaggtataaaaataayaactttggatgagaaggaacatggagaggagatggctaatgtgtatctcccacgtggatggacaaaacagtgtgtggagactcatgccataggcttttgctccaagaaccaccagagtaacataccagaaaaaaaaaaaaaagaattcacagactctttgaaagaagtggcagaccactgcaaattctgtttgaccagatgaaaaactatgaatgcccaaagtgtgaagggggggaaacctgcctccaaaca

SEQ ID NO: 444784 - DNA, 583 bp, Homo sapiens
tcgtaacaggcagtagacaactatcctggtaggcaagggaacttaaggaatacgttaactggaagaacaaaacaaatcttgccacagaaaaatgtggatatgaagtaatgtgtcagtcataaaaatacaagacaagactctccccagtattgagatcagggcaaaaaataatgggtcctggtcataagaagcaagagcaagtagaaagacaagttactgaactggggtccaataccacagtgtgtctaacagcaaagcttgtggctttaggaatcatttcacctttcaaacctcatctgcaaatggaagaaaatcaaggtataaaaataacaactttggatgagaaggaacatggagaggagatggctaatgtgtatctcccacgtggatggacaaaacagtgtgtggagactcatgccataggcttttgctccaagaaccaccagagtaacataccagaaaaaaaaaaaaaagaattcacagactctttgaaagaagtggcagaccactgcaaattctgtttgaccagatgaaaaactatgaatrcccaaagtgtgaagggggggaaacctgcctccaaaca

SEQ ID NO: 444785 - DNA, 524 bp, Homo sapiens
gacttttcaacaaaatccttggaggccataaggcagtaggatgatatatttgaaatgctgaaagaacaaaaaactttcagccaagaactttgtaactagcaaaaatgtctttagaaaatgaggaagaaataaagacattcctgaattttaaaattgggagagctaattactgttaaatctgatgtaaaaaaatatgaaaacaagttcttcagatggaaataaaaggaagctaggcattaactccaaaccatatgaatatatggagatctccagtraaataaatacaaagacaagtataaacaccaatattcttgtcatttggtttacagcaccacattttatctttcaaagggcataaaagacaaatgaatgtaactaattataaatctgttaccaagctcattgtatttaaggatgctctttgtgacatcaataatataaaatgggagtggcagagatgtgtaagaggacactcttatgtactatcgaagttaagttggtgtgaattcaaattagattgtcat

SEQ ID NO: 444786 - DNA, 601 bp, Homo sapiens
atatttaatgggatgctttgcttatacactgctcccatacaccacagcatgattatgtgactagaaccattttggatatggtaatctgaacttcaattctgaatctacaattgtctctttcattgtggctttgtagagaatgagtcatttaacctaagcagattttgcagatgactgcaaccatttaaaacaccaaaatgtttaattataaccacttgttaagaagaatcataaaatctacataacattttaccacctctttacaaatcaagtttgacatgttttaggttataaaataaaacatgatcatggtataatattgaggcaatagagaaatctatgaagaagaaaacaaaaacatctatgtttctaaaatttaaacacaatcactgttaatatttcagcatgatttcagcctctttacaatgaaatatatttctatgtgtacagttattatatatcaatcttatacctaatatattgttttaccytgctttttaaataaataatatatcatgattagattttttatattgcttcatgtctagacatatattataaaaatgactagtcatatttttatatcttttatctaactttt

SEQ ID NO: 444787 - DNA, 458 bp, Homo sapiens
ctctgttaggtcaaagctactcatattcccacacctcatggtgctaagactcatcattgacttttccttccagtgatatttagagagcattatttttctaccctattgtaaaaattctgctcttctgagcctcatgtcagacagttacagcaatttgtccccccttttatggcataacactatctcagcacattgccaattctgaattagtgcatttgtaaccccaaaactccattcctactatttgaacctagatatagatttcaatatctctttgagtgttccctaagaaagcgttracaccaaagcctcttgatcattgtaattttactgattatttcatttgaaatacagaagtgggtttccatctcacatgtttatcaggcccttaagatttaccataaaatatttattttcttcaatgtcccttctgtctgaagaaatcaatgggcatgctt

SEQ ID NO: 444788 - DNA, 625 bp, Homo sapiens
tctccttcacttcggaagcttagtttagctgcatttgaaattatgagttgaagattttatttctttaagaatgtcgaatataagttcccaatcttttctggcttgtagagtttctgctgagagtcccactgttagcctgaagacattcccattgcgggtgaaatgtcttttctttctagctgcctttaacattatttctttcatgtctaccttgaaatatytgatgactatgtgtcttgatgatgattttcttgtgtagaatcttgcagttttccatattttctgagtttgacttatggcctttctagcaaggttgcagaagtttttatagacaatatcctgaaatacgttttccaagttgttttctttctctccatcctttcagtgatgccagtcgttcatacatttggcctcttcataatcccatatttcttgaaggttttgttcattcattttcattcttgtttctttgtgattgtctgactgtcttatttcagagagccagttgtcaatttctgagattctttcctcagtttgatctattctgctgttaaaacttgtgattgcattgtgaaattcttgtagtgtgtttttcatctctatcagatgtatttgttttgttttt

SEQ ID NO: 444789 - DNA, 574 bp, Homo sapiens
cactgctaacatggtattgaaaaaaatggcctatccatgattatgaaagtamattctataagccaatctatggctatagtgcatccaagccacattcaattaaatgcccagcatggcacaagaatatctccttagcacataatttactcaataataatttgagtagtcagaaaagaaagaagtagggcattgtattggatttagattttattgaaaatgttagttctttcttattcaatttaaatgcttatgacaagaaatcaaatcaactgttaaaactaataccaacaatttgctctgtttttttaaaagcttttatcatttgcaaatacttatctgagtaaatcagaattcactctatttttaaccaagacacatacagagttaaattggatgtggaggcatgaaaatagcctgattgttctcatcaaatagagttacagttagtgttataagaaatatataataataaatgtatatttatatatttcatattttattcacaattgtttatgaatatgcacatatattaaaatatgcatatatacattaaatgttacaatgaccttcaaag

SEQ ID NO: 444790 - DNA, 570 bp, Homo sapiens
ctcagtggaattggttagatagtgggtgcagcccacagagggcgagcagaagcagggtgggatgtcacctcactcaggaagygcaaggggccagggacctccctcccttagccaagggaagccttgagggactgtgctaaccagcccagataccatgcttttcccacggtttttcagtttttgcaacctgtagaccagaagatttccttgtgtgcctacattaccaggacccttggtttcaagcacaaaattgggcagctgtttgggcagacaccaagctagcagcagaagtttcctgctccccacccccattggcgcctggaataccagcaagacagaaccgttcactcccctggaaagggggctgaagccagggagccaagtggtctcactcagcaggtcccactcctacagagcccagcaagctaagaaccactggcttgaaattcttgctgccagcagaacagtctgaagtagacctgggatgatcgagtttggttggggtaggggcgtccgcgatcactgaggcttgagtaggcggttttcccctcacagtattaaggaagccac

SEQ ID NO: 444791 - DNA, 577 bp, Homo sapiens
ggtatgtgtgtgtggtgtgtgtgtgtgtgtttgtgtttgtggtgaaaacacaatctactctctgcaaatttcaagtataataatatattattaactgtaatcaccatgctacccccaataacttattcatcttgtaactgaaagtttttacccattgcctaacatctccttgtttccatcagccccagccctgggaatcactgttctttatccatttatttgttgatggataccacttttatacacatgtaatatatgctatgttgaataattaattggaaatttctagtttaaaatatatctgatcatttgtttctgacaaaatatctccagatatcctataaaatattataaatctgtagaaaawgtcaagaacatgcagagcaaaaaaaaaatttaaaagagataaaaattttaaaaaagataaaatgaaggccaatatatgggctaatgagactagattaagaaactagaaaaagtctaccttaagaaagtaagatcattggtgagtagaagtgaggttaaccaactcaactttggcccattcagaatcctagaatctatactaaccagaatt

SEQ ID NO: 444792 - DNA, 577 bp, Homo sapiens
ggtatgtgtgtgtggtgtgtgtgtgtgtgtttgtgtttgtggtgaaaacacaatctactctctgcaaatttcaagtataataatatattattaactgtaatcaccatgctacccccaataacttattcatcttgtaactgaaagtttttacccattgcctaacatctccttgtttccatcagccccagccctgggaatcactgttctttatccatttatttgttgatggataccacttttatacacatgtaatatatgctatgttgaataattaattggaaatttctagtttaaaatatatctgatcatttgtttctgacaaaatatctccagatatcctataaaatattataaatctgtagaaaaagtyaagaacatgcagagcaaaaaaaaaatttaaaagagataaaaattttaaaaaagataaaatgaaggccaatatatgggctaatgagactagattaagaaactagaaaaagtctaccttaagaaagtaagatcattggtgagtagaagtgaggttaaccaactcaactttggcccattcagaatcctagaatctatactaaccagaatt

SEQ ID NO: 444793 - DNA, 553 bp, Homo sapiens
ggagccctttccctagtcctcttaagaaggataaattttctctcctagtttttaccgtccatgactgctgcacatttcccaagaaggcctgccctcattctacagctggaagataaataaggagaaaaaacttagaaaacacagaggctgaaagttcaaatacttctttggacgttgctctctaatctgcttgctttttttgttttgttttgttttgcttttactcttcacagggtttgagtagtttctgcatgtttttatttccccagagtttttacttgtaatcagtgagaaagaaagactgtagtgggtttattctatctagtccaaaactagaagttgtagatttatttttaatgtattaatctcaaggaatatctcttaaatttctactatgaggatgtttttcataagaattacctataatattactggcattaatacacaatatatggctaaagaaaatgaacagtaacttttttaaaaaaaagctyaagtccagagaatcaagagcatagactcaggagtcagattgtcttttttggaacatggt

SEQ ID NO: 444794 - DNA, 473 bp, Homo sapiens
tttaagttgaaggtgctgtatttactcaactctcctgtttctctctgtgagagacacacacacactagtcagcagacatgctggctacttcaattctctctctctttttatctccgattttatttatttgggtcttctttttttatttccttagttagcatggctaaagaaatgtaattttttaaatcttttcaaaacccaaatttatgtttgcttgrtcttttgtattatgttttattttgctttcaatttaatttacttatgctctgatctttattatttccattctatgaatttttggtttgctcttgcttttctagttctttaaaatgcattattagatgatttatttgaagtttttccactttttatgtaggcacttataggtttaaactttcctcttattatctgatatggcttggttgtgtccccatccaaatctcaacttgaattgtatctcccagaattcccac

SEQ ID NO: 444795 - DNA, 473 bp, Homo sapiens
tttaagttgaaggtgctgtatttactcaactctcctgtttctctctgtgagagacacacacacactagtcagcagacatgctggctacttcaattctctctctctttttatctccgattttatttatttgggtcttctttttttatttccttagttagcatggctaaagaaatgtaattttttaaatcttttcaaaacccaaatttatgtttgcttggtcttttgtattatgttttattttgctttcaatttaatttacttatgctctgatctttattatttccattctatgaatttttggtttgctcttgcttttctagttctttaaaatgcattattagatgatttatttgaagtttttccactttttatgtaggcrcttataggtttaaactttcctcttattatctgatatggcttggttgtgtccccatccaaatctcaacttgaattgtatctcccagaattcccac

SEQ ID NO: 444796 - DNA, 554 bp, Homo sapiens
tttttgcagtctgctcttctttgtacttatgattcttgagaaagctttacaagtattctaagggtgctatgatgtaagtctttggtcactttagccatatttgcattatggagcaccccaagcctggtatcacagtgactcttgaagactcacagaggaattgtcttattatcttgtttaagagctcagagaagtattctgattaccaggcagagactcctgttgtcttttcttactcttctgcaaacatatggaccatctctctccatgctgagctgcctggagttgggtgtggggtgatgtaaacwctcctgtcactactaccactgggtaggtgcttggtcactctttaagccagcacaatactgggccttgttcacagcctgcgttgcctaacactgatgttatttgaggctcaatggctctttaggcaatagatggtggatcttgtcagaactgtgtgttttcctttaggaaagcaggttctcttcaggcccagagtgggtcctaaaatgatgcacaggagctagggcctgaaattaagggctttataa

SEQ ID NO: 444797 - DNA, 559 bp, Homo sapiens
tcttcaggcccagagtgggtcctaaaatgatgcacaggagctagggcctgaaattaagggctttataaatcagcttcatgctgcattttactgtgcctaagttgccaagttgcaagacaaggtcttttttacacttygctcttttttttttttttttttttctcaagcaaaagaagtatctcttcatggtcaccacagccgagaatgcactgagtcacaccaaagccagcacagtactaggtcttgcccaaggctgtggcaactactaactggctaccactgatgtttattcaaggcctaagggctctttaatcaccaggagatgaatcctgttaggattatgtctttcctttcagggcagcaagtttctttcaggcataggtcctttctagaaatactgtccaagatctggagcctggaatcgtagactttaggaattagctttattttttaaaaacttttactgtgacttggttcccaatttcaaagaaagccttttctattcccccctgaccctccgcccgcccttttctcaagcaggtgtctctctggagtttca

SEQ ID NO: 444798 - DNA, 559 bp, Homo sapiens
tcttcaggcccagagtgggtcctaaaatgatgcacaggagctagggcctgaaattaagggctttataaatcagcttcatgctgcattttactgtgcctaagttgccaagttgcaagacaaggtcttttttacacttcgctcttttttttttttttttttttctcaagcaaaagaagtatctcttcatggtcaccacagccgagaatgcactgagtcacaccaaagccagcacagtactaggtcttgcccaaggctgtggcaactactaactgrctaccactgatgtttattcaaggcctaagggctctttaatcaccaggagatgaatcctgttaggattatgtctttcctttcagggcagcaagtttctttcaggcataggtcctttctagaaatactgtccaagatctggagcctggaatcgtagactttaggaattagctttattttttaaaaacttttactgtgacttggttcccaatttcaaagaaagccttttctattcccccctgaccctccgcccgcccttttctcaagcaggtgtctctctggagtttca

SEQ ID NO: 444799 - DNA, 577 bp, Homo sapiens
tcaagtgatagttacatgagaagcccaggcttcaccactactcaatacatctttttaacaaaactccacttgtacccctcacatttatacaaataaaaaatagaaaggacaaaaaaaaaaccccgaagtacctttttatcataatacctagaatacaatacatactcaatatgtaatttttaacaaatatatgcctggatgaatactatatcacataattggcaaatgtattactttccagtgacagttttttattcatatttttatcctcattatctagaacagtgattagaatatagtagattctcaaattaggttttctctaaagaaatgaatgaatgtgtaaacaaatgtctttcttgtwctttgggtaaatataatatagcatgattggttgactgaaagcatacaaacctttggtacccaaattaaatctctagatttatttagttcttcttctcccttgttttctacagtatttattgctttttccacccagtactggatgcttctttttaaccttcatatcatttcatatctatattatgactcattgtctacgtagactctgaatttg

SEQ ID NO: 444800 - DNA, 560 bp, Homo sapiens
ttgtgtacttggatattaatatctttttctaagtttgggaagttctctgacattattaattagaataatctttcgacctctatctttttatctacttcctctttaaggycagtaactcttagatttgttttttgaagctgtttttctggcgcgattcattcttttattttctattttattttgtttcctctgactgtgtattttcaaatagcctgtcttcaagctcactaattctatcttctgcttgatcaattatgctattaagagactgtgatttattcttcaatgtgtcaattgcattattcatttctggaatttccacttgattttgtttaattgtttcagtctctgtaaattttatctaataaaattctgaattccttttctgcgttatcttcaatttctttgagcttcttcaaaacagttattttgaagtatctgtcttaaagagtatatgtctgggtttctccagtattggtgctggtgccttatttagtttgtttggtgaagtaatccttacctgactggccttgatgcttgtagatgtttgtcagtgtctg

SEQ ID NO: 444801 - DNA, 567 bp, Homo sapiens
caatgcatttaagaaaatccctttcaaattattacttgaccactcagaatgkggagaaggttcttcagtggccacacattacaaaggtaacagacctagaaaaattatttagaaaagtaactaaacaaacaacaacaaaaagccaaaacaacaaagtctagaagagaggaaaacccaattttcagattttcaaattacattattttgctttttacccaaaaatgtatgagacataaaaagaaacaagaaagtatggccaatatataggaagaaaaagcaaacaattagtggcaagttttcctgaaaaagaccatatattggacttaataaacagtttaatgcagctattttaaatacgtcaaaaactacacatattcatgtgtaaagaagttaagaaaagtatgagaacaaagactcaccaaatagagaatattaataaaaggttagattttttaaaatttcaaagttgtaaagaaaaataactgaaatgaaaagtttattagaggggtacagcaggagacttgagaaggtaaaagatggaatcagtgaacttaaagataagacaat

SEQ ID NO: 444802 - DNA, 560 bp, Homo sapiens
ctgacctcgtgatccgcccgcctcggcctcccaaatcacttcctcttacattccattggccaygcatgtaggtgcaaggaggtggggagatgttgtcttggctaagtcacaaacatctcccctggtctttgctgtcctaccatgctaggtcctcctgttgtatactttcttatcagcatctcttcatactctttcttcataaattcaccagaattataatttttcatgtaatgagtgattatttgattaatatctgctctctctcctggatagtaatcttcattaaaggagagaccccatctgtttctcactattgaatctgaatgtagtacaggatcttgtgcacagtagagacactcactaaatctttattgaacaaactgaggtatgaaaatatccctcactaccacaaatagaggacagattcatgatccagaaaatatggtaaaaatctgttaccttgctgagaagccaccttataccagcataagtcctctccaacctagttaaattaagaatctttcaaaggatgactttcttttgaccttgccatattctcc

SEQ ID NO: 444803 - DNA, 368 bp, Homo sapiens
ataaaaaaatcccctattaattaattaattagtttatttattgagacaggagtctcattytgtcatccaggctggagtgcagtggcaccatcagggcccattgcaaccttggcctcctgtgctcaagcaatcctcctgcctcagcttccagagtagctgggattacaggcatgtgccatcacacccagctaattatttttattttttattgtttagtagagatgaggtctcattatgttgcccaggctgatctcaaactcctgagctgaagtgattctcccacctcagcctcccaaagggctggaatacaggtgtgagccaccacaaccagccacctatttagtaattaaaatttaatatattgtatt

SEQ ID NO: 444804 - DNA, 552 bp, Homo sapiens
tattgtctatggctgctttcatgctacaatgacagagctgagtggttgcaactaagcccatggcccatggagcctaaagtatttactgtctgaccctttacagaaaaaaaattttcatccctgctctaggtccagacgcactaagaggcagacatgctcctctgtccaaaagtgaagacagattgacatgcaaggctagagaaatcctggagtgatgagtgccaggwcagcttacttacatcctatcccaaaggccatggctacagcctgaccgcacctgaaaccagtgaggcaggcagcaccaggcagttggctcaggccatttcttggcagcgaggatagagctaatggtagttctgaaggtcaatgaagatgctcaataaaccattgactgatgtggtcaacttgcaagcaatatgtgtcttgcggttgactgagttctgcagatgatataaaattacgtttagctttgagtcagcaacctcctttcccaccaagccctctgtagagcagctgacaagttgcagaattgacagatttgagtattatcac

SEQ ID NO: 444805 - DNA, 571 bp, Homo sapiens
catgttgtcattgttctggattttggccattttctagcaggctattagtggtttatctcattgatgttctcagtcgtgtttstctaatgagatgatgttggacatcttttcatatgcttttttattatctgtatactttggtgtggtgtctgttaaggtcttttagtcatttttaaattgggttattttcctattgttgagttttaagagttctttgtatattttggataacagtcctttatcagacaagattttttttggcaaatattttctctcagtctgttttattttttcattatcttaacagtgtctcttaaaaagcagaaatatttaattttaatgaagtccagcttatgaattgctccatgggttgtgcttttggcatggtatctaaaatgttatcagccaacccaggatcatctcaattttctcttacgttgtctttgaggggttgtagtttcagacatagatctgtgattcattctgagttaatttttgcaaaggatgtaaggtctatgtctagattctttttttttttcatatggatatcctgtggttctagtgctgtttt

SEQ ID NO: 444806 - DNA, 571 bp, Homo sapiens
catgttgtcattgttctggattttggccattttctagcaggctattagtggtttatctcattgatgttctcagtcgtgtttgtctaatgagatgatgttggacatcttttcatatgcttttttaytatctgtatactttggtgtggtgtctgttaaggtcttttagtcatttttaaattgggttattttcctattgttgagttttaagagttctttgtatattttggataacagtcctttatcagacaagattttttttggcaaatattttctctcagtctgttttattttttcattatcttaacagtgtctcttaaaaagcagaaatatttaattttaatgaagtccagcttatgaattgctccatgggttgtgcttttggcatggtatctaaaatgttatcagccaacccaggatcatctcaattttctcttacgttgtctttgaggggttgtagtttcagacatagatctgtgattcattctgagttaatttttgcaaaggatgtaaggtctatgtctagattctttttttttttcatatggatatcctgtggttctagtgctgtttt

SEQ ID NO: 444807 - DNA, 409 bp, Homo sapiens
ttttgctaatcgtataacttcttgtgttatatatttttttctgtcctgtactaaccaggttaatacataaaacaaacattctaaatgatttctgttaactaatggaatcaagattaaagtgcagctattttaagggaaaatgtattatcaaatgagaaatgtatcttctttagttaaaaaatttacattagaaaaatgaaatatgatttaaaaattattgcagaacacacataaatccaacaacaagacacgccacaaccctgrtggagaatgaagtggtggggactctctcccaggtgccttaggctgaggctcagggcaactatctttctatgactttattattgctgctactagtatgaataaccatgaataactacatttgcagaacactctgactccctttcac

SEQ ID NO: 444808 - DNA, 496 bp, Homo sapiens
cagccatgtcacaggtcgaagctttaaacaaaaaatgtttgcaagataggaaatttcgcagctgcaatgaaggatatctgcataagtgcacaaatattacaataaaaccatactggaaaggggcaggaagagaagtgaggctatgaggattctgtgagggtgttgaattttcacccaccagagtcattagggaatgtccaacactgataaatcaacaaatatcatcatattctttagaaaatggagtcaacactagaaaaaaagaaaacagctagtttagctaaaaatggttgcctctagggagtgaactcaggagaagtgatgrttcaaagaacttccatttttcattataagctctaaagtcctatttgatttttaattacatgtatgtgttattttgaaacaacaatttaaattaataataaataacatctacttagtgcttactttatgctaaacacagtgcaagacccttcatgtacataatctcatgtaa

SEQ ID NO: 444809 - DNA, 496 bp, Homo sapiens
cagccatgtcacaggtcgaagctttaaacaaaaaatgtttgcaagataggaaatttcgcagctgcaatgaaggatatctgcataagtgcacaaatattacaataaaaccatactggaaaggggcaggaagagaagtgaggctatgaggattctgtgagggtgttgaattttcacccaccagagtcattagggaatgtccaacactgataaatcaacaaatatcatcatattctttagaaaatggagtcaacactagaaaaaaagaaaacagctagtttagctaaaaatggttgcctctagggagtgaactcaggagaagtgatgattcaaagaacttccatttttcattataagctctaaagtcctatttgatttttaattacrtgtatgtgttattttgaaacaacaatttaaattaataataaataacatctacttagtgcttactttatgctaaacacagtgcaagacccttcatgtacataatctcatgtaa

SEQ ID NO: 444810 - DNA, 496 bp, Homo sapiens
cagccatgtcacaggtcgaagctttaaacaaaaaatgtttgcaagataggaaatttcgcagctgcaatgaaggatatctgcataagtgcacaaatattacaataaaaccatactggaaaggggcaggaagagaagtgaggctatgaggattctgtgagggtgttgaattttcacccaccagagtcattagggaatgtccaacactgataaatcaacaaatatcatcatattctttagaaaatggagtcaacactagaaaaaaagaaaacagctagtttagctaaaaatggttgcctctagggagtgaactcaggagaagtgatgattcaaagaacttccatttttcattataagctctaaagtcctatttgatttttaattacatgtatgtgttattttgaaamaacaatttaaattaataataaataacatctacttagtgcttactttatgctaaacacagtgcaagacccttcatgtacataatctcatgtaa

SEQ ID NO: 444811 - DNA, 585 bp, Homo sapiens
aatctttaaatatccttagacagatatttccaatgttgttaaaaccgttacacagttggaacattttggtcaacttcctaaggcactgtattcattttcatgaggttaacatgtcactgattgccaaaatatgtcaaaaagagcaaagccaccataggctaatcttccatagaagtaaaaatgtaaaaacttaacaaataatctgtgcaaaaagaattcttggtctttgtccgcacatattgattctatgctagaacattaaaatacagaagtttagtaaaataataataatagccatcagtttatcaaagaaatrcagggataatttaacatagaatgcctattaataaaatctagcacttagtatatattaagactaaaggaaaaaaataaatagatggcaaaaagtaataaatttaatcttcattgtgttaaaatattagttaaacaatattttaaaactccattagcatgttgaagaatttatatcataagtttatagcaaacatcacattaaatgttgaaactattgagatattaatattagattaataagagattaatctaatattcaaagtgtgacat

SEQ ID NO: 444812 - DNA, 552 bp, Homo sapiens
actgacattgttgtattaggggggagctgaatttttcattaatggactgatagttgtttttaaaatttgaatcttcacatgcamagaagcatttttcttctaagtctgaccatttactcaactattactttattagagcaattctgcaataacaggaaagattctttaggaatttagacttaattaatttctgattggtaaatgaccaaattcatctattaaaaaagtcagcctgactttgttgtagtcattaaaattttaggcaataaaataatttaaaaaaaaacaagtagaaaggaaaacacaaagttattgccttacaatgttagattgtttacttagaaaagctaagagaatcaactgaaaacaatcataggcataataagaaagttagtaaaattagcacataaaggaaaaagaggccccaaataagtatgttaatggagagcttccaatatatgaacacataaaaatgtcagatagtgataaagctatgtggagacttaaaataggattatgtgataaggagtcactgagagatgatttaagaca

SEQ ID NO: 444813 - DNA, 552 bp, Homo sapiens
actgacattgttgtattaggggggagctgaatttttcattaatggactgatagttgtttttaaaatttgaatcttcacatgcaaagaagcatttttcttctaagtctgaccatttactcaactattactttattagagcaattctgcaataacaggaaagattctttaggaatttagacttaattaatttctgattggtaaatgaccaaattcatctattaaaaaagtcagcctgactttgttgtagtcattaaaattttaggcaataaaataatttwaaaaaaaacaagtagaaaggaaaacacaaagttattgccttacaatgttagattgtttacttagaaaagctaagagaatcaactgaaaacaatcataggcataataagaaagttagtaaaattagcacataaaggaaaaagaggccccaaataagtatgttaatggagagcttccaatatatgaacacataaaaatgtcagatagtgataaagctatgtggagacttaaaataggattatgtgataaggagtcactgagagatgatttaagaca

SEQ ID NO: 444814 - DNA, 539 bp, Homo sapiens
gaatgaggcccatggtctatccttctctaacctctactctctgatatatcccctctccttttagttctcttttatgcatgggcaatttcatttttcaaactcagaaaagcacatctgaaagatatacctgctcagaggctatgatagcagtctatttattatttccccttacagtcattcaatacatactatgtatggggcattggcagaaacacgggttgaaaagaagtggacccagttcctaccatcatagagctgattgtttagtgggggaaagtgatgtcaatcacatggttatacagacaagtataatcatattctttgaaggaggactgcatggtgctgatggtgctgctagaagctctaataatggcagcaggtaattagggaggtcagggaaggctgcttccgggaaagtgacaaagaagctgaaattgaataggagcaaacagagtgatccagatagagtgcacagtrtgttcaaaggccctgcaactggcacagggaatagcgtagactaaaagaagtcagtgtgatta

SEQ ID NO: 444815 - DNA, 518 bp, Homo sapiens
attcaataaattgttaaaagtacaattctcaccaaactgatcaatctcaattataatcggatcaagcatttttgtagaaattgacaacttaattataaatgkatacagaaatgcaaaggaccaaaagatccagaacaatcatgtcaaagaagaactaagttcaaggacatagactatctgacctcaagagttactttaaaggtaatccagacaatgcgatattggtataaggataatcaaaggcacagaataaagttcaagacttttatatggtcatttgacttgaaaatatcttttcagtaaacattattagaatagcgggatatctgtatgaactaaaaataattcttggcctcatacttcatatcatatgaaaaataatttagatgaattacatacctaaaatataaaagctaaagctaggaaacttctagaaggaaacataggacaaatcatttagtactgaaagtagcaaagggttcttaggacacagagagcaataaacaaagaagaagaat

SEQ ID NO: 444816 - DNA, 626 bp, Homo sapiens
aagttctagaaaagacaaagctactctatggtgggaaaaatatcagaagagtgatgattacccctggcagaatggcagtggggaatgactgggaaagggcatgaggtaattttcaggaacgatagtgtcttaagatttgtgtacttcaatggacaatttgtaaatttaacctcaatagaaacaaataaaaatcatcaacaaattttgaattctaattaatgatatgcacaatatacgggggtgaaacatgctgactattaaaatttactctgaaattcakgattaaagataaggtagactgatggattcagagacagatgtatggatagatatatgataaagaaagttcctcactctggctgactccagagtcagtttagaaatcagtttaacttctttatcccaaggtagttaataataaaagagccttggatattttagttaaccagagaagaatccataccattgctagcattttacactgtatgtggattaacaccatatgtgagatggaacaacttatatctaagttaaagaaatgacactcaaccatccaaggttgacccaaggcactgttagttctaattttctttatcaggctggaaatctttcagagggtggttcag

SEQ ID NO: 444817 - DNA, 626 bp, Homo sapiens
aagttctagaaaagacaaagctactctatggtgggaaaaatatcagaagagtgatgattacccctggcagaatggcagtggggaatgactgggaaagggcatgaggtaattttcaggaacgatagtgtcttaagatttgtgtacttcaatggacaatttgtaaatttaacctcaatagaaacaaataaaaatcatcaacaaattttgaattctaattaatgatatgcacaatatacgggggtgaaacatgctgactattaaaatttactctgaaattcatrattaaagataaggtagactgatggattcagagacagatgtatggatagatatatgataaagaaagttcctcactctggctgactccagagtcagtttagaaatcagtttaacttctttatcccaaggtagttaataataaaagagccttggatattttagttaaccagagaagaatccataccattgctagcattttacactgtatgtggattaacaccatatgtgagatggaacaacttatatctaagttaaagaaatgacactcaaccatccaaggttgacccaaggcactgttagttctaattttctttatcaggctggaaatctttcagagggtggttcag

SEQ ID NO: 444818 - DNA, 599 bp, Homo sapiens
aagttctagaaaagacaaagctactctatggtgggaaaaatatcagaagagtgatgattacccctggcagaatggcagtggggaatgactgggaaagggcatgaggtaattttcaggaacgatagtgtcttaagatttgtgtacttcaatggacaatttgtaaatttaacctcaatagaaacaaataaaaatcatcaacaaattttgaattctaattaatgatatgcacaatatacgggggtgaaacatgctgactattaaaatttactctgaaattcatgattaaagataaggtagactgatggatwcagagacagatgtatggatagatatatgataaagaaagttcctcactctggctgactccagagtcagtttagaaatcagtttaacttctttatcccaaggtagttaataataaaagagccttggatattttagttaaccagagaagaatccataccattgctagcattttacactgtatgtggattaacaccatatgtgagatggaacaacttatatctaagttaaagaaatgacactcaaccatccaaggttgacccaaggcactgttagttctaattttctttatcagg

SEQ ID NO: 444819 - DNA, 620 bp, Homo sapiens
catgattatgagtagaagtcctccatatttctttgaagaaaaagagattcatacacttagaaccctttagatttggatgaaaagccagactcgatcaacatttccattcctctgtattctcattctgacacacattcttgcccgttcatgcaattgaacagagtcagaaacttctgctctctgagccaggcaaaacagtcttcaactcaaaatatttgcaaatgcttccttccaattaatgatagatcagcctttttgacttcgatattcctataatgtatgcaaatgacatgtttctattatcttcaggaatcctcctgtgatcttaaagtgtgcctccaaaatactgacyactgatacatagggctaccattacagaccatatcgaaaagccaattttttttggatcaagatttgtgaagaatctgagattttatcctatttgcaaggtaacaagttacattgcctctgtttcatgggtgctgacaaaggacatagggatcctggttcagagataaaggctttattactcagagaaagagcattagccagagtgtcagcacattgtcagttctgtgagctccagttcccacaggcagatgcagaggccaggtggttac

SEQ ID NO: 444820 - DNA, 620 bp, Homo sapiens
catgattatgagtagaagtcctccatatttctttgaagaaaaagagattcatacacttagaaccctttagatttggatgaaaagccagactcgatcaacatttccattcctctgtattctcattctgacacacattcttgcccgttcatgcaattgaacagagtcagaaacttctgctctctgagccaggcaaaacagtcttcaactcaaaatatttgcaaatgcttccttccaattaatgatagatcagcctttttgacttcgatattcctataatgtatgcaaatgacatgtttctattatcttcaggaatcctcctgtgatcttaaagtgtgcctccaaaatactgactactgatacatagggctaccattacagaccatatcgaaaagccaattttttttggatcaagatttgtgaagaatctgagattttatcctatttgcaaggtaacaagttacattgccwctgtttcatgggtgctgacaaaggacatagggatcctggttcagagataaaggctttattactcagagaaagagcattagccagagtgtcagcacattgtcagttctgtgagctccagttcccacaggcagatgcagaggccaggtggttac

SEQ ID NO: 444821 - DNA, 620 bp, Homo sapiens
catgattatgagtagaagtcctccatatttctttgaagaaaaagagattcatacacttagaaccctttagatttggatgaaaagccagactcgatcaacatttccattcctctgtattctcattctgacacacattcttgcccgttcatgcaattgaacagagtcagaaacttctgctctctgagccaggcaaaacagtcttcaactcaaaatatttgcaaatgcttccttccaattaatgatagatcagcctttttgacttcgatattcctataatgtatgcaaatgacatgtttctattatcttcaggaatcctcctgtgatcttaaagtgtgcctccaaaatactgactactgatacatagggctaccattacagaccatatcgaaaagccaattttttttggatcaagatttgtgaagaatctgagattttatcctatttgcaaggtaacaagttacattgcctctgtttcatggktgctgacaaaggacatagggatcctggttcagagataaaggctttattactcagagaaagagcattagccagagtgtcagcacattgtcagttctgtgagctccagttcccacaggcagatgcagaggccaggtggttac

SEQ ID NO: 444822 - DNA, 622 bp, Homo sapiens
gatatacctccttccccaccatggtaccaagacactgtctgggcctgaatgccttacattccaggagacacttcacttcgataactttttctttttgacttgagctactttgtataggtagctttgattaaaacagaaattcccccaatttacaataatgtatttttttcctgggtcattgccagacactagagtttgctgagagtgtattattttcatttgtttttactaaaaattttatatattttaatgtcttactcatttcatgtgcttttaaaatctgcaccatgcttttctgaacgctagaggtgaatcagtctatttgcaattaggcctatttctaccactgtgctttaaccaatccagtgaagaccaccccatattaatattacttgggatgaagatggaatttcagacaacctcctagtcatttgaaggtcaccagacttatagaaagataaatggtaccttcrttcactacgtaaggccagaatgcaccttctggagcatttaacatgtattcacagagggactaatttatttatgttgtagcatgagctattattcaattagttctcatagcctcctgaggcctctgcatgcctcccagcaagtaaagcag

SEQ ID NO: 444823 - DNA, 467 bp, Homo sapiens
gtcaactgggtgcaaaatgagcagaggctaaatctggtctgtaggaatatttaatttggccatgatgtgttttaaaagtcagaagaatgtcacaggaaacaaggatttctaccttaaatagtatgacagggcacacwggggtctgaattactgtgtagcaacaaccgacatgagggaagtagctactgcaaccttttgaatggacatgagacctccagttgccatagttgccccattctctcttctttgcaaccagccctcttcatgcatttccatgacttgcttgggctgcataggcatttgagtctgtgcttcccatatactcaaggccccattacaaaacttcatggacaaaaagtctgcaacttaaaatatcaagtacttcccttctatttttgagcaccacaaaatcataaaaactaagaaaaatgatagccaaacatagtattgtatgcttatttcaatca

SEQ ID NO: 444824 - DNA, 467 bp, Homo sapiens
gtcaactgggtgcaaaatgagcagaggctaaatctggtctgtaggaatatttaatttggccatgatgtgttttaaaagtcagaagaatgtcacaggaaacaaggatttctaccttaaatagtatgacagggcacacaggggtctgaattactgtgtagcaacaaccgacatgagggaagtagctactgcaaccttttgaatggacatgagacctccagttgccatagttgccccattctctcttctttgcaaccagccctcttcatgcatttccatgacttgcttgggctgcataggcatttgagtctgtgcttcccrtatactcaaggccccattacaaaacttcatggacaaaaagtctgcaacttaaaatatcaagtacttcccttctatttttgagcaccacaaaatcataaaaactaagaaaaatgatagccaaacatagtattgtatgcttatttcaatca

SEQ ID NO: 444825 - DNA, 509 bp, Homo sapiens
attcaatccagggatattggttatcattcaatatttttataaccacaaccagcagatctttgtatatatacggcttaccttcagctttaactgcaatccagctctagaatgagtgtcaaatctataattttttgatactttgataaaaagggatattctaaatcttattgagaatgtagctattgagtgactgttgagtctagattccttgacactctggtatgaaggcatattccaagtcctattgggaacccatataaaaattttcttcagatccaaatgccaaaagaagctttgtttgacatattctgccctcctgccactgctctatcttttatggactctggagatcatgtaaattcacagtgtttccccttttgcttgaatgtcaagatgcccagagtcaaaatcatgggttggcagtaatacttaygagtcctctaatatgcagatctgtgttttaatttgctcttggcctcagacttctgtgctttctatatgttctctaa

SEQ ID NO: 444826 - DNA, 608 bp, Homo sapiens
cattttcacattcatagtgccacttaatccaatccccattgccaagagatattaygatctccatcatacagatggaagagaactacagacacagtttgctctgagacaaaccagccaggccactgttcattccagcaccaatatctgcattccagaaagtgggaaattctgaaacctaggacaacactgaggggcatgttctacctcggaataagctgttagtgaatcagttgacgatggctgagaagaaaagatacacacaaaattaagatgtaacatattcatgtaacgtaactaacagggaagtggcttcagctccaaccagaaagattggctagacagggaaaggttttctgatcccaaagtttacaaaatcaagacagtgaaaatttctctgtgtaactgcagacgttttttctttggagataattatttgaaaactagttatctattattctgggctggtaaagtgttgccagaaatttatgaaaaatactctagctgaactcctcctgtacttataaagcaggtatctatcaattatacaatgtgtgatttatcaccgtaaagcaacaagaacaccatgtttataaaatactgcaccttaa

SEQ ID NO: 444827 - DNA, 535 bp, Homo sapiens
acaatatcctatttttaactataggtactatgttgtacaacagatctctagaacatgtctatcttgcataactggaactttatgcccattgagcaacaatttgccattcctgcctcccctcaggccctggtaaccatcattctattctctgttcactgcttctgtgagtttgacctattttaaatacctcatgtaagttgagtcatgcagtatttgtccttttgtgactggcacattttacttagcataatggtctccaagttcactgatgatgttgcaaatactagratgttcttccttttgaaggctgaacaatattccattgtatgcatatatcacattttctttatccattcatccatcactggacatttgggaattcatctattcatctgttgatggacatttggaatctcaagtctaaagatgatttttaccctattgtgattgtcaatggaaataacttataaagccaaaaactatggtccactcttattcaatacaaaagttccgcctgggtctgatgttttaaaga

SEQ ID NO: 444828 - DNA, 535 bp, Homo sapiens
acaatatcctatttttaactataggtactatgttgtacaacagatctctagaacatgtctatcttgcataactggaactttatgcccattgagcaacaatttgccattcctgcctcccctcaggccctggtaaccatcattctattctctgttcactgcttctgtgagtttgacctattttaaatacctcatgtaagttgagtcatgcagtatttgtccttttgtgactggcacattttacttagcataatggtctccaagttcactgatgatgttgcaaatactaggatgktcttccttttgaaggctgaacaatattccattgtatgcatatatcacattttctttatccattcatccatcactggacatttgggaattcatctattcatctgttgatggacatttggaatctcaagtctaaagatgatttttaccctattgtgattgtcaatggaaataacttataaagccaaaaactatggtccactcttattcaatacaaaagttccgcctgggtctgatgttttaaaga

SEQ ID NO: 444829 - DNA, 535 bp, Homo sapiens
acaatatcctatttttaactataggtactatgttgtacaacagatctctagaacatgtctatcttgcataactggaactttatgcccattgagcaacaatttgccattcctgcctcccctcaggccctggtaaccatcattctattctctgttcactgcttctgtgagtttgacctattttaaatacctcatgtaagttgagtcatgcagtatttgtccttttgtgactggcacattttacttagcataatggtctccaagttcactgatgatgttgcaaatactaggatgttcttccttttgaaggctgaacaatattccattgtatgcatatatcacattttctttatccattcatccatcactggacatttgggaattcatctattcatctgttgatggacatttggaatctcaagtctaaagatgatttttaccctattgtgattgtcaatggaaataacttataaagccaaaaactatggtccactcttattcaatacaaaagttccrcctgggtctgatgttttaaaga

SEQ ID NO: 444830 - DNA, 554 bp, Homo sapiens
tttgggttttttgcagacatgtagaactgttgagtaattttattttgtaaccagttccccttaccagcgtgaataagctttaagttgattctcttgatactttcagatccatgatcgaaccatctcctttacartacttaaaccttgttatagtttggatttttgtcccctctaaatctcatgttaaaatttgctccccattgttaaaggcagggcctggtggaagggatttagatcatgggggcagatccctcatgaatggcttgaagtcattctcacaggattgagttcctgctcttacttcccttgagatctgattgttaaaatgcatggcaactcctcccctctctctcactttctgccatgtgatttatgtacaccagctccccttagccttctgccatgagcagaaggcacctgaagccctcaccagaaacagatgctggtgctatgcttgtacagcctgcagaactgtaagccagataaacctctgttcaatataaattacccaacctcaggtattgctttatagcaatacaaatgggctgagacag

SEQ ID NO: 444831 - DNA, 532 bp, Homo sapiens
  misc_feature (1)...(532): n = A,T,C or G
tgatttacacccagggaaccaacctgtagagaatgtgtgttgggtgtaaggcattgaggtgggggctgctgacaaaaggccacgaataagrcatctgaaggagcttatcaactaagagggtgataagactggttcagaaatagaagataacaatgtatggcaagaaatgaatgtaatgaaagttatgcttaattcctggtgaggtgatactcatgggccagagtgattctctacctttcaaggtagggcttaaaatgggcttttaagagtagctaagattaaatagaaaggggggatgtttatacctacttataaacaaaacaccactttgaaaacaggatcctagaactcatataccgagaaatttgaagcccctttctttgtcctcctcccccattgacctttttatttttatttttatttttttttaacttatcaagggaggagatacataatgcagagcaatgggaacagactttgaagcaacacggactggggtgagctgatacagagacttaataacctannnnnn

SEQ ID NO: 444832 - DNA, 567 bp, Homo sapiens
ttgatagtgatttttaccaatgacttgagagaatggaataacagggtttttcttagatttaatttttagaaaatagaaaataacctagacaaagggtattaaattcaagatgaatgtcaaaattagagaaaaggtctacaggcactattgtgaattaggaggcaacttgctttttcaattaatgaatttgatttttttcatatttgtatcttcagaattcagcacaagtctgacacatattggaactcaaaaatatttttcaatgagttaatcagtgaaaaaacatataaacaatgcggcatattaaatgtgttaattttatatctaaaaatatgacccatataaatcaatgtttcatgaargtaaagtatccctttaagaactgaaacttttgaaggggttccataactcactttttctttttatgagacaaggtctcactctgtcacccaggctggagtgcagtgatgcaatctcagctcactgccacctctgcttccccgatttaggcgcccctccaacctcagcctcccaagtagctgggactacaggcacatgacaccacgt

SEQ ID NO: 444833 - DNA, 486 bp, Homo sapiens
tatctcttcaacaactaaatgaagaagctcttattgttaattaaatctacaatcatagagctgaaaagaactcgaattccttgttgaaattcctttacttttgctcaaagtgttctccatgaccattagcgtcacattacatggaagcttgctggaaagktagatctcagaccccaccccggatactgagtcagaacatgtatatcaagatcccagggtgatgtgtatgaataagaaagtttgaaaaaaaactgttccaaccatccaaaagtgagggttgtttatcctgttttttataccataccacatatattattttcttattgttttatgctaattcattcctttgtaacatatatgtatatattctcagcacctttgctttttgaaaaatagaatccctaagaagtgaacatacacttggaaatactattaaagctattagacatttgagtaaatctctgtcccattcaaaagtaatttcta

SEQ ID NO: 444834 - DNA, 462 bp, Homo sapiens
gcattagttcaattctgcaagcattgatggagccccgtaatgtgccattctctgctaactaagaggataacacagagcaggaagaagttgtgcttcaaggtgttcataacctcaacttgcaagtcaagtgttgcgatatgaatagcgttatggtgagagtgtgcacagaaaaagagcccctgcccagatctggagaagagggcaggggttccaggagacttgcaggagaaaactctaaattaaggcttaaaaaattactacacaaagaagtgagaatgtcctgatccagtttgaccttgygatccgcccgcctcggcctcccagagtgctgggattacaggcgtgagccaccatgcctggcccccggctcactttcaacaggaattaactcaactagcagaagtccaattccaagaaatagggccacctttgtttaacccaggagatttgctattggtgaaa

SEQ ID NO: 444835 - DNA, 462 bp, Homo sapiens
gcattagttcaattctgcaagcattgatggagccccgtaatgtgccattctctgctaactaagaggataacacagagcaggaagaagttgtgcttcaaggtgttcataacctcaacttgcaagtcaagtgttgcgatatgaatagcgttatggtgagagtgtgcacagaaaaagagcccctgcccagatctggagaagagggcaggggttccaggagacttgcaggagaaaactctaaattaaggcttaaaaaattactacacaaagaagtgagaatgtcctgatccagtttgaccttgcgatccgcccgcctcggcctcccagagtgctgggattacaggcgtgasccaccatgcctggcccccggctcactttcaacaggaattaactcaactagcagaagtccaattccaagaaatagggccacctttgtttaacccaggagatttgctattggtgaaa

SEQ ID NO: 444836 - DNA, 579 bp, Homo sapiens
actaaatatccttgtatatgtagagcagttttcagttttcaaaaggatgtttgcctgacattatctatcagatcctcatgcctctcgggaatacagagtacatagagttttgtgcccattttattgataagctgaggctcagagatactgagtagccagcccaagtaggtagcattggcagaattggtatgaaaatccagtgtttagctcttcgcaccactcttgctctctttttgtgcagaaaaaaaaaaaaaagaaatgagtggactgtgaagagatgcatatctggccatgtcacacttctaatagttccacacatctggaggagaagaaggagaaggtctttttggtacgttgtccttagtcctgagccatccagtaatgactgacctttctggcctcttcttttgtacttctctcccttcttccacacacaccctgggccaggaatcrtgtccctttacttcattctgtgctccctcatgagcaattctctgtggcagtgggagccattaccccataccaaatgttcacgctctctcagaatgcagctgccaggaagcagctgcctacccaaga

SEQ ID NO: 444837 - DNA, 553 bp, Homo sapiens
caaagacgtctatttatttataattttcaaagttgctactactaattataatagaaaaaatattatttatgatagaaaaaagcagaaactatttaaatgttctactwcaggcgattggttaagcaaattacaggaattctcatgtggactattatttatatatttttgaagtcataaagtctaacaaacatgaaaatatgcttattatagagcattaaatgaagatggtgaatataaaataacatttaaataatgatcacaactatgggaaaatggatacaaaacaaaaatgctgaaaataattaaaccaaaatgctaacagtgatatattagccttatttttatctcaaatataataatgaaaaataaactttaacatggaatcggaacaaactaaaatgtatcttcagttgagaggggttctctgaagcagctgcttgggcagaagctctatttagaacatggtctgtccatgagaacagggatctgtaatagtgccttttcttagtaggtgctcaaaaacagttattgtataaataaaaggaaaaagatg

SEQ ID NO: 444838 - DNA, 553 bp, Homo sapiens
caaagacgtctatttatttataattttcaaagttgctactactaattataatagaaaaaatattatttatgatagaaaaaagcagaaactatttaaatgttctactayaggcgattggttaagcaaattacaggaattctcatgtggactattatttatatatttttgaagtcataaagtctaacaaacatgaaaatatgcttattatagagcattaaatgaagatggtgaatataaaataacatttaaataatgatcacaactatgggaaaatggatacaaaacaaaaatgctgaaaataattaaaccaaaatgctaacagtgatatattagccttatttttatctcaaatataataatgaaaaataaactttaacatggaatcggaacaaactaaaatgtatcttcagttgagaggggttctctgaagcagctgcttgggcagaagctctatttagaacatggtctgtccatgagaacagggatctgtaatagtgccttttcttagtaggtgctcaaaaacagttattgtataaataaaaggaaaaagatg

SEQ ID NO: 444839 - DNA, 553 bp, Homo sapiens
caaagacgtctatttatttataattttcaaagttgctactactaattataatagaaaaaatattatttatgatagaaaaaagcagaaactatttaaatgttctactacaggcgattggttaagcaaattacaggaattctcatgtggactattatttatatatttttgaagtcataaagtctaacaaacatgaaaatatgcttattatagagcattaaatgaagatggtgaatataaaataacatttaaataatgatcacaactatgggaaaatggatacaaaacaaaaatgcwgaaaataattaaaccaaaatgctaacagtgatatattagccttatttttatctcaaatataataatgaaaaataaactttaacatggaatcggaacaaactaaaatgtatcttcagttgagaggggttctctgaagcagctgcttgggcagaagctctatttagaacatggtctgtccatgagaacagggatctgtaatagtgccttttcttagtaggtgctcaaaaacagttattgtataaataaaaggaaaaagatg

SEQ ID NO: 444840 - DNA, 588 bp, Homo sapiens
catttataaaattctagcaaacttcatctagcaatatgttaaaagggtcatacatcatgacaatgaggtttaactcagaaattcaaggttgttttagcattgaaaaatccatatattaacagactaaaataaaaatgatataatcatctctgtagattcagaaaaagcatttcatgaaacatacattcaaagtagaaactctcggcaaattagaaatataatagacctttctcagcttaataaagggcatctattttaaaaaaaacctacagctaacacgagggaaagtaaatactctcgagttcatgaaagaggcaaggatgctcactctcttctatacaacattgtacattgtactagagcacctagctgatgcaataaggcaaaaaaaaraaaaagaaaaaaaaggaaggaaggcgagacatacagacaggataggaagaaagtaaaactgtctctaatcacagctgatataaccacttatgtagaaacttctaggaatctatccaaaaaatcatataagaactaagtgacttagcaaggttgcaggatacaaggctaacacacaaaaagatcaactgtctttcc

SEQ ID NO: 444841 - DNA, 607 bp, Homo sapiens
tggctttcagctggtaagaatttgctcttctttgtgtaggaaagtttactctgccagaaataatcttttttctgccttttccacgtgaaaatcttttatgttcttcaacatcagaattagtcctatctaataccaaaatgtttgaatttatagagaggaggaaacccttccgtatgaagtgcctagcactctgcactttgcttttggttcaattctcattctacctcttggcatgtgtgatctgttatagcttcaagagtacttttttatttttttcctgagtgattgctactgatggaccatcactaattacaatgattacaaaattgtgatgtttttcttccatgcaaaatctgtttggttttatcgaatctgctcactctcatgggagtatattgggcatgtgcgtggcatctttcctgttcatcgtgggagaaaatgattagaagcaagccctagacactattctcccaggcccggrtggactgtcactgctggcagcttgatgtgtccccaggttgaatttttaggatctccttcttgctcattggggtggccataatgcatttctagctctcagccccatttgtgaaaacatgtttattcc

SEQ ID NO: 444842 - DNA, 594 bp, Homo sapiens
cctgtctcctaaataaattgcaagtacctcaaaggccctagacactctacatttttctacatttttaatattctctatcttcaccgtgtctagaagtttgcctggcatttaaaaacttttgttaattaagctatattaagtagatgatttaacataagtgaagacacactaccagacgttggttctctaatcatgtaaaaaattatttgctagatggtgagatttcccaccccgaccycttccagggtggagatgttacacataagagattttctttcttgataagataagcccttcaggattcagaaaaatcaggctctgataaagtgactcattcttttaactacccagaaatttaaactccttgggtcttggcacagctactcacatctctattccaggaatgagagttactgacatagtagaacagtcaaatggtctgagaagatgaagtttaattacaactttaatagcacacaacttcaaagcatccagccaaaatggtgacaggaattacaatattcatttggtctatcaatcatactttttgttaatttcccgaatttggcatcatcaagtagtgatcccggctat

SEQ ID NO: 444843 - DNA, 594 bp, Homo sapiens
cctgtctcctaaataaattgcaagtacctcaaaggccctagacactctacatttttctacatttttaatattctctatcttcaccgtgtctagaagtttgcctggcatttaaaaacttttgttaattaagctatattaagtagatgatttaacataagtgaagacacactaccagacgttggttctctaatcatgtaaaaaattatttgctagatggtgagatttcccaccccgacctcttccagggtggagatgttacacataagagattttctttcttgataagataagcccttcaggattcagaaaaatcaggctctgataaagwgactcattcttttaactacccagaaatttaaactccttgggtcttggcacagctactcacatctctattccaggaatgagagttactgacatagtagaacagtcaaatggtctgagaagatgaagtttaattacaactttaatagcacacaacttcaaagcatccagccaaaatggtgacaggaattacaatattcatttggtctatcaatcatactttttgttaatttcccgaatttggcatcatcaagtagtgatcccggctat

SEQ ID NO: 444844 - DNA, 594 bp, Homo sapiens
cctgtctcctaaataaattgcaagtacctcaaaggccctagacactctacatttttctacatttttaatattctctatcttcaccgtgtctagaagtttgcctggcatttaaaaacttttgttaattaagctatattaagtagatgatttaacataagtgaagacacactaccagacgttggttctctaatcatgtaaaaaattatttgctagatggtgagatttcccaccccgacctcttccagggtggagatgttacacataagagattttctttcttgataagataagcccttcaggattcagaaaaatcaggctctgataaagtgactcattcttttaactacccagaaatttaaactccttgggtcttggcacagctactcacatctctattccaggaatgagagttactgacatagtagaacagtcaaatggtctgagaagatgaagtttaattacaactttaatagcacacaacttcaaagcatccagccaaaatggtgacaggaattacaatattcatttggtctatcaatcatactttttgttaatttccygaatttggcatcatcaagtagtgatcccggctat

SEQ ID NO: 444845 - DNA, 567 bp, Homo sapiens
aaagtatttggagcacatgagttaaaagtaaataaaagtaatatctataatgtctccaaactagaaatatgtacatcccccaaaaaaagaaatcaaccaataggttgaccaaatgtggacgctcatcatttagttactacagcctaggaaagtactgggcaaatggaaaacatattaaagcagggatacggttttttaaaaagtaattcttttgaattatgacattttaggtgagaaactgtagccaaaaattgacatattgaaaaaactgtagccaaaaatgaacacatcaaaagtaagacataagcaacttaatggcttttttggagggtataacatttggcactatctagggtcaaaggacctttaagtaagtttcacagtgaactaaaagtttccrttttaggtgtcaatgttatgttaatttttttggtgaacatatttctaatttatgtcatgaatacttgtagcttttcttaatagtccaagattcttttactctttcaccagacattaacactttctatgtctaaaatgtggttttgtcgtgatgatagctatgagtgt

SEQ ID NO: 444846 - DNA, 617 bp, Homo sapiens
tatctgattgcttccatttgcatttgcttacacactcatgtcctttttcatttattcaataaaagtccttcttttcctttcttttcttgaatgatttgataaaacatatctgtgatcacatcttttagagttacaaagatatttttaacacactggtacactttctctgctcccttcaattcattcagagtgattatatatgcagaaaaattaactctaaaatggggctgtgtcattttacaagtgcccattttttcagaaaaagcactcattgacttcctctttgaattattgcttttggatacataagcttctgcatttaaataaygccttctctttagccagggatttgcggtgtatccaattgggatgaaatataaaaatgcaggcttcccacatgttctagagcctctacttctcagagtgtatgcataataacagatgctacaaaagtaactagtgaaataatttggaaaacttcacaaagttaaacctgtttctttactgcagaacttctcagaatctataatatagcaaagtacatgtaaatttccatgtatgtgtcaagtaagatgtagtttaagacagtttcccccacacatccttatatataaaat

SEQ ID NO: 444847 - DNA, 617 bp, Homo sapiens
tatctgattgcttccatttgcatttgcttacacactcatgtcctttttcatttattcaataaaagtccttcttttcctttcttttcttgaatgatttgataaaacatatctgtgatcacatcttttagagttacaaagatatttttaacacactggtacactttctctgctcccttcaattcattcagagtgattatatatgcagaaaaattaactctaaaatggggctgtgtcattttacaagtgcccattttttcagaaaaagcactcattgacttcctctttgaattattgcttttggatacataagcttctgcatttaaataatgccttctctttagccagggatttgyggtgtatccaattgggatgaaatataaaaatgcaggcttcccacatgttctagagcctctacttctcagagtgtatgcataataacagatgctacaaaagtaactagtgaaataatttggaaaacttcacaaagttaaacctgtttctttactgcagaacttctcagaatctataatatagcaaagtacatgtaaatttccatgtatgtgtcaagtaagatgtagtttaagacagtttcccccacacatccttatatataaaat

SEQ ID NO: 444848 - DNA, 599 bp, Homo sapiens
atagtaataaaataacaaggcttttgaaatatgatagtctagatttaacttttaattaacattcaacaaarggttatgagagatgaacttaaattttatctcttctaattaaacctgtgtgaccttggtaagacacttaacctctgtggagctcatctgcctcatacatgctggggataatggtgtgtgctttaaggattgtagtgaggattaaatgagataatgaacccataaacaactgcacatggtaaagccctagtgaatgcatacaaatcctaatttataacaaaccatgatataacctaagagaaggtatatactaagaaaaatcaaagcagtgaaataaagtaaggacaaattattcacaaattccactgctccaaatcagtactctacccatcctcatattaagtgattctggttaatttactctgtcttcgtatccaacccccactgcttttcaaaagtcaatgtagtccaaaatcatttttaaatcattattttcctgagtaagcaactcgatgagtcaaccctaaaaggcagacatttcgtttgtttacataggaaggttttcaagaccattacaacatttttaaaag

SEQ ID NO: 444849 - DNA, 558 bp, Homo sapiens
gcccacatctcaaaaattgctgcaaacccacactctctacatggaattgttccrtaccctaaatgtttcaaagacccaggacacttgcacagtccaaagatgagggttcaactcactccacaaccacagtcagagtggcttcctatcagttgacctgcaactgcaatttattttcttttttctttttctttctttcttttttttttttttttgagacagagtcttgccctgtcgcccaggctcactgcagcctctgcctcccaggttccagcaattctcctgcttcagcctcccggatagctgggattacaggcacgtgccgccactcctggctattttttttgtatttttagtagagacagggtttcaccatgttggccaggctgggctcgatctcctgacttcaggtgatccgcccgcctcggcctcccaaagtgctagaattacaggtgtgagccaccgcgcccagcctacaatttatttttcagtaaaatcatgttgctattgacaatgtgtcctacccattttgaccgaagattccttccttcattcatttac

SEQ ID NO: 444850 - DNA, 389 bp, Homo sapiens
tggccccataccctactgcctctsgggctgacactgccacataaggtcactagtgaagcccaggtggttcggtaacttaggtatgatccagctttttttcctgataaatttatggcaaaatgggcccacacttctatcaaaatcttgcaacccatcagcatttttttttttaagacagagtcacactctgttgcccaagctggagtacagtggctcaatctcggctcactgcaacctccgcctcccaggttcaagtgagcctactgcctcagcaccccctagtagctgggattacaggcacatgccaccatgcctggctaatttttgtatttttagtagagacgaggtttcgctatgttggccgggctggtctggaactcctgacctca

SEQ ID NO: 444851 - DNA, 549 bp, Homo sapiens
tcatgccattgcactccagcctgggcaactagagcaaaactccatctcaaaaaaaaaaaaagatatagtaagacctcatatcagtttttaacagttatttccccccaaaaaagcaaaaaagggcagtaatttctgaaatttgtactatttcaagtaaaatgttaaggaacagtgaaactttaacaaacttttaactaactacattgacagaccagaaatattatagaaaatactttaagayataaaatgttgataaaatttaaaagacaagtcacttacctctttgtattcattgattagcttggtgaggccattcaaaagcattggacctaatggcttaatcttgatttctggacagctttaaataaaacacacatacacaaagcaagataagaatctcatgactacatatctttacggatgattacataaaataatgagagacataaccgaaataagttaaataatctattaaaatacaaaaatttttaaagatgagcaaacatgttttctttctaggtaagatgagtaaaacgatacacttgaagc

SEQ ID NO: 444852 - DNA, 491 bp, Homo sapiens
actaacatttgtcctctcttaagtattccacagccagagtcttagtttgagaccatctcatgttattatctgaatgattgcagatcagcctgttgccagtctcttctatctccaaaccatcctctatgacactacacaaatgaattttctaaaatggcaaatctccttgtgttagccctctcatcaggccattcactgagtcctctttcctataggacatacgtgaactcctcgtcagataatacagtctggtttcaatgagctctttagactaatctccagtcacttctcttgtgcaaactgtattctaacaacacaagctgcacccagcttgtcgaacaagtcattatgttctcaatccactttctttgtcttttctccccactcaaaaaaaaaaaaaaaaaaaaaaaaaaaaaamcagaaaacaggaatacttaaaatttattgagtataagctatgtgtcttgcctttgttacccttttaatcttca

SEQ ID NO: 444853 - DNA, 604 bp, Homo sapiens
atcttgtaaaactgaacgtytgtaaccattaaacaatactattccattcccccattctgcaggccctggtaaccaccattctattttctgtctctatgattttaactccttaactacttcatgtaagtggaatcatacaggtgatccgcttgcctctgcctcccaaagtgctggattacaggtgtgagccaccgcgcccggccacaaatatctcttttaagactctactttgaattttatggggtatagttccagaaatagaattactgtatcatgataattctatttttaaattttgagaaactaccatactgtttaccacaacagctctactgttttacattcccaccaacagtgtccaagggttccgatttctccacattctcaccgcttgttattttcctttttttttaatagtagccattctaatgggtctgagacagtatcttgtagtttttgtttgcatttctctgatgataagtggtgttgagtatatttgtatgggtttattggccatttgtatgtcttcttcggagaaatatctattcaattcctttgcccatttttaaattgggttgtttgtgtttttgttgttgtattttag

SEQ ID NO: 444854 - DNA, 400 bp, Homo sapiens
aacatttttctgtcaaattgttataaaagtttcaaaatattaattctgaattgctgtcacaaactggtgaaaaaccatttctagatggtcactagtccaytgatgacactttgaggagctcaagtactaggtctcataccacgtcactttctcaaagacacctatccagcaattcttcctctcacctacatcgctatttttctgctattacctctcattgctatagcaacatgattttatttcttccatcttaaaacaatcaaacaaaaaaaccctccttaggttgcagtgagccaagatcacgccactgcactctagcctgggcaacagagcgagactccacctcaaaaaaaaaaaaaaaaccctctcttgactggacttgaccccccacctactgccc

SEQ ID NO: 444855 - DNA, 569 bp, Homo sapiens
agataaatgtactcattcttgtatttcatcatcaatgtacttatatttcttgtctttaacagtttgttatacaaagaaaagctactgcattcagtgttcagattaagttataacaatgcaatgactttatcatgagccattctcctaattcccactaattgacacacattcagtagataaattgttggatactctcaaactattctrtttttataaaggagaaaattttagataattattaaatattcaaaaatatacaaattgaaatagacataatttttttttgttttgttttttcatagtgacagggtcttgctctgtggcccaggctggagtgcaggggcgtaatcatagctcactataaccatgaactcctgggcttagatgatctcttgcttcatcctcctgagttgctgggaccacaggcatatgccagcatgcccagctaattttttttatttttgtagaggtagggtctagattatgttgccaggctggtctcaaactcctgggctcaagtgatcctactgcctcagcccatcaaagtgctgggatgtcaagccatgagc

SEQ ID NO: 444856 - DNA, 536 bp, Homo sapiens
aaaatatatgtccacacaaagacttgggcatgaatgtttctaacagctttattcgtcatagccaaaaagtgcaaacaacttgaatacygaccatcaatgtattagttgataaataacactgtgatatacccatatacggtgaaatgtcatcccacaataaaaaagaatgaattgctgacatatgctacagtgtgaatgaatcccaaaatcatatgctgagcgaaagaagccaggcacagaaagatatatgctgcatggttatgtgtacaagtgtcctagaaaatgcaagctaaattgtagtgagagaaaaccgattgtctgggactaggtgtgtggggagaaagggactgcaaagggcccagggagctctgaggagtgacggcaatgttctgcgtcttgattatggtgtgttctcacagatgtctacatctctcaaagctcattgaatttatacttcaaagagatgagtttattgcacattggttctcttgcttcactatagttgatataaaacatttttagctatattattattt

SEQ ID NO: 444857 - DNA, 563 bp, Homo sapiens
gtaggacttgatttcttgaggtcttttgagttatcattaaaactgcatagagatataataaggattcatctcagcactttcatgaaggaagtattagtaaagaaatcacatattttataatcgataggggtttttcacagtaaccacttataatacaatatttgtttacatacttctttccttatttaaattaaaatttttaggcatctaagttctcctaaattttttattttgaattctaataatagtttggattatgacatcattctataataataacaagttagtgagaatcaatagtttatgcctccataatgctttactctgaaaatttttaatgcaagcaaaatttactgtgtctcatatacttaatgctagcaattmggattacattttggctttattagtatattgttgggttttagttattcttatacataggaaatgattagtataacatttatttgttcagaacttccatataatcatatttgtttacttatcttccccattctactttaggggagagtgtggaggaaaatgcaaatgtcgtggtgagattg

SEQ ID NO: 444858 - DNA, 541 bp, Homo sapiens
ctctgggcaagcactgtactggatgccttacatgtgaccttgtatgmcatctttgtcaccctttctctacatgtgtgccacttacagaaatagtctaagctcacacgtcctttgatcagttattttctttgttaatgcactcactaccactaggaaggaaaagaagccatcaaataagcagttcctccttttcccctcaaaggaatcttaatactaaaatttccacagatgtgttcttggtgttagaatctcaagtctgatctttaaccagttgttattctcccttaaaaacgtcaagctctacattataacatatatgaaacatatcagaaaaataatgtgttacctagtagtccctttcctcggagagatatgtaataaacatgaaatgtcagttatcccatttgctttctctttcttttgaaacattcatgaaagtgacacagaggaggaggaagatgacactatccacatggggaacgcgatcatgaccttctattcagctttgattgacctcttgggacgctgtgctcctgagatg

SEQ ID NO: 444859 - DNA, 652 bp, Homo sapiens
tacattagtgacttctttctgcttgctttaggtttattttactctttgttttcaaaattcttgaagtggcaggtcaggttattgatctgagtggtttccgctttttaaatgtaagcattgagtgttagaaatttccctcttggccttgctttagctgtggcaaaaattttcaaatgtgatgtgtccaatttcttttagtttaatgmatctttaaatttctccccatacttcctcaaaccatagattatttagaagtgtgttgtttagtatctctaagagtttggagattttccagttacctttctgttactgctttctaatttgataacaatgtgataaaaaaatgtgtatgatttcaacttttaaaaatgtcttgaggttattttatggcccgggatatgttccatcttagcaaatgtttcatgaacacttgaaaagagtgtgtaccttgtcgttgggtggagtagtctacaaaccttggtagatctattatttgatgatagtgtggagtttttccgtgtcatagctgatttttctgttcagctgttctatcaactgagagaggagtcttgaattctgcaagataattttggatttgtctatttctcctttcagttctatcagttttggcttcacatattttgctttgttg

SEQ ID NO: 444860 - DNA, 652 bp, Homo sapiens
tacattagtgacttctttctgcttgctttaggtttattttactctttgttttcaaaattcttgaagtggcaggtcaggttattgatctgagtggtttccgctttttaaatgtaagcattgagtgttagaaatttccctcttggccttgctttagctgtggcaaaaattttcaaatgtgatgtgtccaatttcttttagtttaatgcatctttaaatttctccccatacttcctcaaaccatagattatttagaagtgtgttgtttagtatctctaagagtttggagattttccagttacctttctgttactgctttctaatttgataacaatgtgataaaaaaatgtgtatgatttcaacttttaaaaatgtcttgaggttattttatggcccrggatatgttccatcttagcaaatgtttcatgaacacttgaaaagagtgtgtaccttgtcgttgggtggagtagtctacaaaccttggtagatctattatttgatgatagtgtggagtttttccgtgtcatagctgatttttctgttcagctgttctatcaactgagagaggagtcttgaattctgcaagataattttggatttgtctatttctcctttcagttctatcagttttggcttcacatattttgctttgttg

SEQ ID NO: 444861 - DNA, 612 bp, Homo sapiens
tcccaggtcactttttaaaaatgtttttattaaacatttataaaaacatatttttattaaagttctgtgttccatgtgtctcatgccttttgctggcttctgtctggaagtatttccatccactgatgttatttgagaaataggccacacatatacaatgctcattttttcctactgaataacttcagggaattcaggaaacagaaatcaaggataaaatagagtattagaatctattttaaaacagcctcatgaattcaaggagcagaactgaatgtactacatttaaggtggcaccatkaagtagcagaaaatgtggggctttggaattagatgtacatgggtgaaaattccagctttgggacatctgtgtttgcagggtggtatattggatgtggttaatagatatgctatgaaaatttcactgaaaatccaaaagaatatgaaaatataataaaattaacaatggtactgacaaagaaaagaatgtagttcaaagtctggcccaaattttcactaactgcatcattgagggggaagaattaagaagcactttcctagatgatgtaccatgtgctccacctaatctagtccctcggaaggtgatgaaaa

SEQ ID NO: 444862 - DNA, 566 bp, Homo sapiens
taggagaccctttactctggactgtaaccytcctcacataactacaaatttaaaatcacagcgtataaattagtaacctttgtttcagacgagagggcttttcctgggcataatctttgtggttgttaaactctggtttagtagcttctttgtctttgtcaacacgatcgggcactagatggccatgagctgtcttcatcagaacctcaaagtcagaatcagcatcataatcttccaagtcattcttgggcccaaaaaggccagccccagggagccctccagccaccgtcttggagaagacctccgcgcactcgatcggcatgctcaggcgataaaacatgatatcagtgttgctgttctgagaaccaaaagacttctgagtgacctttaaacatggggaactgtctatggtgccgtctattctggtcacctagcaaacgaagaagcgatagttcacattccaatcaccattgtcaatttcctgattctaaagatgactaaggcacatcacgttttcagaatcccaaatgcggtccacacatggcatcattttgtaagagatgatt

SEQ ID NO: 444863 - DNA, 618 bp, Homo sapiens
cccccactccctgacaggccccggtgtgtgatgttccccttcctctgtccatgtgttttcattgttcagcttccacttatgagtgagaacatgcggtgtttggttttctgttcctgtgttagtttgctgagaatgatggtttccagcttcatccatgtcctacaactggttacttcttctatrctagccaggaaaaggaaggcttgtacataaagtccagtaacttaatcatcatttaacctcctttgaaactaaaaaaaatatatatatagcttttttctctcccttctaaattttgtgactcttcagaattttcagattattttttagaaaaactcaataattaaatttaaaaaattatttaatccataacataaacagttgattcatcaccgtgatgaattcttacctggcttgtctgagaaatacgacgagtccggttgtaaagggccatgctgtctccctcccgagttctttcaattctccagccccaagccagcatagtttttaaagattctttgattggccagcgataaatttctttttcctagagaagaaaaaacaagaaacaacagatatattatgaatgtaaataaaaatgttaagtaacgctttgct

SEQ ID NO: 444864 - DNA, 576 bp, Homo sapiens
ttttgcaactataaggcaatgccacatatgcaatgcaacattgagcgacggtatctaaatctccatagcagcaaagctggagactttagcagggcactgggatattacaattacataagatttcatgttttgtatttttatattggatataatttctttggcctttataagattggagatgggactagggagagtttgagtccaaatgcaccggaaacttatcaaccttgtgcataatttcctgaactgcttagccattttatattcagaaacagtgttatgatcacaaggaaaatgctaccacaatgattaagtaaatataagttgcattttcaacatttgttatgaagttgagaaaagagaaaaaatcaagccatacgtgtcttggttagcaaagatagtattcaactaggaatacyatcttactaagaatgtgtggctctataccattttattgatacaaacaaacccacaaaccattaaattaccttttgagacagggcatcaaaaatgccccagaacaactttcttgataaatgaagttcttcttctgaggcagcaccaaagtttccccac

SEQ ID NO: 444865 - DNA, 495 bp, Homo sapiens
ttggccaggatggtctcgatctcctgaccttgtgatccgctcacctcggcctcccaaagtgctgggattacagacatgagccaccatgcctggccagtccagagtatttttatgcaaccaaatgtatcagcttaagatggtctattataactacaatattgtttrtcttagtttcatagtaaccacaaagaaaaaattgcagcagtcacactaatgagaaagggaaaggtatcaaagcttagcaccacaaaaaggtatcaaaccacaaaggtaagcaagagagcaagaaagaaatgaaggatctagaaaacaaccaacaaaatattaggaataattccttacctatcaataataaccttgaatgtaaatgaattaaattgcttagttaaaatatatagagtggctgcatggataaaaagcaagactcaactatatgctgcccactagagattcacttcacctttaaggacagacatagcctgaaagtgaagggat

SEQ ID NO: 444866 - DNA, 413 bp, Homo sapiens
ggccttcttggtgtaggacaaccttccacattgctatttggatatttttatgctttacttctcctttggagaccaaaaagtatgagagaaaataaagyctataactttactagttgggaacactggttttgaaagtctttgtcttagtagggttgattttggctttactgaaatatagggattaactagaagtcctggtctcttttcacaaagaccatgatctctgcctccaaacagtccatcgttggagatctgtgaagtgaatgtgaaaattatccacagggagaacgctgagagatgagagactggaggtccaggtggccatagaaagcaggttcagtggagtcacaggtgaattaagaggtggttcagctaaacagttaacagtgggggcaatctctaaggagtatgtg

SEQ ID NO: 444867 - DNA, 418 bp, Homo sapiens
ggagtttgaggctgcagtgagttataaggctgccactgcactccagcctgggcaacagagtgagatcctgtctctaaataaacaataattaatttttagaaagaaaaaaagaaacagcttcaaatcagggggaaattttgacaattaaatcgtaggttcatgttttactagaaaatgcattatctccatacctcagtattctgagaaataagagacctctcatctttaattcagggactcttgtttatcctacatacccattctttccttttctaacagctgggtataggatggcttggaataaagactgcattttccatcctcccttgcagctaggtataaccatgtaactaaattctgcccaatagwattgaagcagaagtattgtgggataacttaaaagaatctgccttctcag

SEQ ID NO: 444868 - DNA, 559 bp, Homo sapiens
ctattgtgggcattgccttgagtagtactcaagtgcaatatatatatttcatgagtgtcttcttttatttggtcaattaaaaaatgctttccctccctttaattctcttctgtttaaccctcttctgactcttactctgtacctaacacatcaatggcattcttctctcagattctaatctcttttctgccgccttaaaccatcctacacactttggagtaggtaatctgtggtaccttcataaattcctttctatggccatccatctcagacccagagaaaaaaactgtgamgctttagatgtgactagggtgtgtccttcagtttcagattctgtgatatgtcaaagaatatttacaatacatttcaatgaacttgaagttctagaaggagccttcttaatttttgagatgatatgggagtcctgtgatttatttgttgtctacaagataagcacaagcatcttttcatgacagcagttcagtcatagtcatttataagacgcctacattttcctggaagcctctattctctttctatttatagctgtatttgtttt

SEQ ID NO: 444869 - DNA, 513 bp, Homo sapiens
ttacttgacagaattttgagggcaaggccttgtcttacttatcttcatatcagctactctgagcttggcactgtaaatagacggtgctcattaaatgtatgttgacttgagttgcacacagggatggaaagaagaggattcagacacacagtttttgactcttgctggtcaggytgtctctccgcttctgagaatcagagcaggtggtgcactacctcctctcctcacccttttattccaaggggcttgtgagagctttcttcactcaagaccctcacagttcacactggggccagccttaagagataggcaaatgctgcacgttcagacgaggtttccccttccttctgcacaaatcagccagaacctgcaacggaagtgttctagaaactgtctcacctgttgccaggaatgccggctaaattgacctcaaacaaatcagtgaagaggcccccattgcctttgaagaagttaagattacagaagttaagggcactctgtaatattaacttc

SEQ ID NO: 444870 - DNA, 452 bp, Homo sapiens
atacaaacaccagccagcttgggctggcgtgcaaagtagcagttttccttttccctttctggacggggtgtcgttgtccgggggcttccctggccgtttcaggcagcggagcaggccaagggcgcagccctactgggtgcccgcttggcggcctgagggacttctctgttctcgggctcggtctttgaggctgccaccagtccacgcgcggtctgcaagcctggttggactgggctccctgctctttgtgtgttgggtggggaggcgagtgaagggttagcttgggtgcagacgccagctgtcracaaattcggggctcagtgataccagggcaatgtggctgcaagcctgattgggcgcaacgttgagaaggtcgggtgtttcatccctgggacgcgctcactcactaggggtttgtcagacactctggttgtgaggatttgaagggggaa

SEQ ID NO: 444871 - DNA, 570 bp, Homo sapiens
caactatttaccctctataaagtcttattaaatgaatatgaaattcttcagctctaaagcaaactggttaactccttcagttccacttttaaatcactcagctaccatttaaacaaactagcattttttactacaagaaataattaccagttcctctggaccacctgctgctggtgcatagaagagcttgtactgacgaggatttccctctgcatggtcccagcggacattcaaggtgctggtagaagggtcatacactctcaggttccttacagtgtttagaggttctgaaatgcacagaaatcccatcacagtataatgctaacaatcaagcacacatgaaacacagattcactgatatctcccaggcaccctagaacatagcaggcaccgcacaaacatttgttgaagtagtgaayaaacgacacacactgtgtccgcgtcagcctgatgcatatgtctcatctatccacaagacattttggtcttagagcacctttctatcctagaaagtaacatctttctccacaaacagagacaagtaattccaaggaaggatgttaaaaacga

SEQ ID NO: 444872 - DNA, 587 bp, Homo sapiens
aagctccatgatcccaagtccctctgaaaccctctgatgttacttcagtaatctttaagtttgttggggctggcacgggtcctatcakgagaaaaggcaagcagactaagtttttgaatgtgagctgcaaatgcaatttaatataataaaaactgccttgttttatattaatggacatctgaaaactgattgaatacattgcttagaaccaaatatttcaccaattcctagagctctggaaactgcaagcattctgtggatataataggttattaaggatattctatttaaatgattatttttttaagataccatttagtacctttctccaactttttaagaatcaaatcaacactatggactctttcacacagcaatacacaatacacaaagcacaaacttggccacatatcagagagttaatggaccttctccagtctatcaataaccccaaagacacacatagactctgggttaagaagtccttattaaccgagaatgtcataaactaggtatgctaatatattatacattaaagatgatgctcaaggaaatagttattcatttattgttcataatttgttgtt

SEQ ID NO: 444873 - DNA, 537 bp, Homo sapiens
ttagaatgttaatctgatagcattaataaatgtcatttagccacataaattccacttttaccaagaatcagcacatgaacaatcatttgaacaatataaatgtaatctaaatgtatcaacatacatacacacaaacacacaccagtcgctcctagcaatcagtttgaaaatgcataaatggtagtccactgtgagaactattctctttagttgccctagaaatgctgaatgacgctttcttttgaaaattcctacttcagcagattaaatgaaaaaccacctagtaaggacttcataaaataatgtaaccaagaacatcacaaaattktgagttccctgggataataatgtgacactgaaaaaaatgtttcagctgggtaaagatgcatattgtggaagaatacagtagtggaaaatgaaatggagggatatcaagagatctggaaaagcaatttcatccatgtggacctcatctgaaaatgttaagttttagagaagaatctcaggaggtttcaattctgtaaatgtttcagtcaa

SEQ ID NO: 444874 - DNA, 595 bp, Homo sapiens
aaattctaactccattataaataactttaactgctgacagcacatctcatccctggaaggaaattagttacatatttcactggaacaaagaatacttatttttaagagcacattgaatttttaccctcagctcttgaggttaattcccatttgaaagtcttctttagctgtctttactatgtaaatggtcatacacctttctattttctctacttggaatataaaagtacaatttaaaactgtttgttttatttggtttggctgtgggyttctttgttttgttttttatttgttttgataatcgatatcccaacaactagtctctaagttttaaatgtacagcacgtttttcctttgcttgatatataccattttcaatatgtgccttttcctctaaatttcctagattgcagtcaggaacagctgttgtgaaatgaccttgcttgaaagcaattttgaatttaaatgagctgcattaacgacgtttcaaaaaagtatcagacaaataaggttaactagaatgtggaaattatctttcaaattaacaccggggtaattttaaaacaatttcagcttttatttttcccaaaggttt

SEQ ID NO: 444875 - DNA, 595 bp, Homo sapiens
aaattctaactccattataaataactttaactgctgacagcacatctcatccctggaaggaaattagttacatatttcactggaacaaagaatacttatttttaagagcacattgaatttttaccctcagctcttgaggttaattcccatttgaaagtcttctttagctgtctttactatgtaaatggtcatacacctttctattttctctacttggaatataaaagtacaatttaaaactgtttgttttatttggtttggctgtgggtttctttgttttgttttttatttgttttgataatcgatatcccaacaactagtctctaagttttaaatgtacagcacgtttttcctttgcttgatatatacmattttcaatatgtgccttttcctctaaatttcctagattgcagtcaggaacagctgttgtgaaatgaccttgcttgaaagcaattttgaatttaaatgagctgcattaacgacgtttcaaaaaagtatcagacaaataaggttaactagaatgtggaaattatctttcaaattaacaccggggtaattttaaaacaatttcagcttttatttttcccaaaggttt

SEQ ID NO: 444876 - DNA, 489 bp, Homo sapiens
aaacaatatttatatgtagttacttttaacccatttatacctgaggttgcaattttttgaatttttgtaatcagaccttggcaatgaccttgagcagtaggatataaatcactcccacatgcttagcattccaatagtggaacactaggcataaatgggtttaatatatacgtatttttaatatatayctatatttgtaaatataagcaatatttatatgtagctgatttatatatacatacatgtataattatatgtgcatatattatacatattacatatgtattacatatgtaatattgttattacatattacatattattatacatatatacataaatatgtggtattcaggtatctccaattcagatatagatgaaatttggtatattaactttatacacttgttcaagcatttaaaactaaagtgtccatcttgatatataactttttgaaacatttttaatagggcacccaaaaaggggcta

SEQ ID NO: 444877 - DNA, 521 bp, Homo sapiens
ctctgggcctcattttctcatttggaaaacgagagaagtagaatagatgatctctatgttagcctctagtttgaaatttctgttataacacaaattagacataggattataaaaatatatacaaattagtctcaacctagacacaagacaaagctatagccacaactcaccgatgaattgataatattcaattgttcattatatattataaactataaatcagactaaccaaaattaacactctgtttttcagaaaacttgtattcatctctaatcctagattaattagaaaagtgcccagttctcagggaatactgaccattaacctttatatgcaaagtgttaagttttctacaggataattaacatactgtatcatacatgaaccaaaaataattcatacattctaggccactcagatacagttgataaagtctatgcagtgatgyggttgataaagtctctgcagtggctaaaaattatagatactgaagtgaaaaaatcatttccactcttatttc

SEQ ID NO: 444878 - DNA, 612 bp, Homo sapiens
tgtttttatttatgataatagagacagggtctccctatgttgcccaggcctgtcttgaactcctggactcaaacaatcctcccacctcagcctttcgatgtgctgggattacaagcrtcagtaacctcatccagcctaaaaagtaaattatagctaattctacgacacagactttagtttactatgttaaaatgcatgattatcaatccaccataataacaactaataaatacttcaacttagtcatcaatcttaagagtggtcataactaaaagactctaagtcatatgttatagcctgtatagttcaaacaggtaagaaagttcatgagacatgtaagcaagatttctgagtcccacagagtaacatggacatgagaaaacagcagaccccgctttccactacagcctgactcaccaccttttactgatttactggaggtaatggaatacagaggcttagtaagaacagaggagagctgtgcataatgggatttaaataatctgattttcctaagaaaagaaattgagaagcaaagagataaaggattttctgtacacacacacacacacacacacacacacacacacacacacactcacacacacagtc

SEQ ID NO: 444879 - DNA, 522 bp, Homo sapiens
aagcaattgttactagttactggacattttctttgtaccaagtagccatgctacaaatggaggtatggtcctattactgtcaacctcatttgcacaatgaagaaactaaggcttagagagttttcctaactctcccaagttcttgtggctgtgcttggcaaagtaagaatctgaattcaggtacatgtaactccagggcccacatccttaggtacaaatgtccaagtgcctctgccccatagaggcccagcatctgagctttgccaatcactaaatgccgttataaggtaagaccccaacactcacatgtacacacacacggtagtctgggaatgaatcaggagacaaagttytccagagagctatctgccataggaacacaaattgtttaaaatcttctagaatactggttctcacactttcacatacatcataatcatctacagggcttgtttaaaatcaggccccacccctagagcttctcactgagtaagtcgggggtggggaccaacatttgcactg

SEQ ID NO: 444880 - DNA, 672 bp, Homo sapiens
ctcttgttagtttgcacatgtgagcatattagtagactaaaaggcatacacaagcatccagacaaataaaaagaaactatgatacagtatgttcccattcgtggtattaaaaaaatggccacaaatacatgatgggtaaaatgacacattaataaacttaacttttaaatatggaaaactcccattcacaatcacaaaatatacattttatgtaggacctggatgctaaaatgtgcgttaaatgaaacctatggtcccttataactataacatyctatgatgctttgagtgtctttttatgtatgtatttgcttggattttttttcttgtcagggaaggtagctccagcctccttctggaatagctttccacctacatatcttcctactgcaatgacacaagttgagctgactgcacagtgatgtaacttcaggattaaaagaaaatgaaaaagagagttctaccccagtccttcatgctatcaccaccagggtccagctagtgaacattttgttttatcaaaatactagaggctacactaaaatggttcctaacaggttaggttaaaaaattttcctttcttttaacttattgagggtaagagggagaaaattacaaggagagcagaaagatcttttatgttacacatctacctatggagtacaaatcctg

SEQ ID NO: 444881 - DNA, 538 bp, Homo sapiens
ccttttgaggaaaagcccaaaagagcattctggaagagcttagggacaagaatcaacaagagttatgtaaacaggtgaagccaggtgttcctcctctctgaggagacacgaagagagttgagtcaacaatcctactcgctcttgggccaagcagtcgccacacaagcggttctcctcgccagggtgagtgcatcagaagagaggctgcactgttcaggagccacagcaaggagggtccatccccggctctctcttaagttcttggcacaggggcaggcgctttccatgtgccctaagagcctstgtctgtgtcttcctgtctccttaccggaaaaactaaaggcaacacatcttgtaaagtgcccctccctcccgaaaacacttcagtgaaagttagtatctactgtgtatatatttgcatcaagttataccgttaagaaaactaaaattacgagtaaaggaattagagagcagaaagtaacctttacaatttcataatcctgtgttcattcataatgtaaaagacttagaaaggtac

SEQ ID NO: 444882 - DNA, 587 bp, Homo sapiens
cttctcgttttatatttcaactcagaaatcgatgcatctgtgaggcagtttgttttcctggggaagtgtaaggagcggtggtggtggcatggagatgcgctccgtttagactcaatattgccacccactccctctgcagtgtcagagaacagtctcagaaagatctgttcctttctttctagactcagtaccacagactggcctatcctctgcaactttgcttagcagcaggagtagagaagtattgattgcccacaacttgcctttaagtcttgtttctgtggtgcaggatttttaaaaagcatttaatgttttccctgccttgaagacttcagaaycgtataaatgccactgtttaaagtcctgtccctgctgaaaaccagggcaggtctcatcacagccccatctccattttccttttgttgaagtgggtctgtgtgagagcgggctgtgccctccttctccacagggtggggaaaaggcagccctgtagtaaggaggttgaatagcctcgctcactttgcctcctgcttgaggtggactccgtgttcccagagatgttgggcctggtttagccagttgttaaa

SEQ ID NO: 444883 - DNA, 587 bp, Homo sapiens
cttctcgttttatatttcaactcagaaatcgatgcatctgtgaggcagtttgttttcctggggaagtgtaaggagcggtggtggtggcatggagatgcgctccgtttagactcaatattgccacccactccctctgcagtgtcagagaacagtctcagaaagatctgttcctttctttctagactcagtaccacagactggcctatcctctgcaactttgcttagcagcaggagtagagaagtattgattgcccacaacttgcctttaagtcttgtttctgtggtgcaggatttttaaaaagcatttaatgttttccctgccttgaagacttcagaaccktataaatgccactgtttaaagtcctgtccctgctgaaaaccagggcaggtctcatcacagccccatctccattttccttttgttgaagtgggtctgtgtgagagcgggctgtgccctccttctccacagggtggggaaaaggcagccctgtagtaaggaggttgaatagcctcgctcactttgcctcctgcttgaggtggactccgtgttcccagagatgttgggcctggtttagccagttgttaaa

SEQ ID NO: 444884 - DNA, 568 bp, Homo sapiens
gtatctagtttagaacttcttattagtctgtggtcttaagatctttgtcatcttaggcataggctcaaaggaattaaacttgggttttgattagtgaacttgagccagttagctggtggactggatgttattcaggcataaacttactcctatgtagtttctagaaggttggcctgggccacagaactttctatagaatatctcatccatgcatctatttggatttagagcatggatgtaaatgaccctaaaggtagtacctaatgtgagatgcagcaggagggacctttatatttttttattttttattttattttttttaagaaacagccttttctatgcaatcctggatggttacgtaagttccattttatttgtatctatattccttataaagacaaagcagcaaaaatgcactaaaattagatttaatttccagctgtgggtatttgtattatgtctgccttagtccaccttctgcccccccmacccttgggttgatgtggttactgaagatagtgaggctatctggagattggacattgaccttcactatagaacaaactca

SEQ ID NO: 444885 - DNA, 420 bp, Homo sapiens
tttttttttttttttttttttttgagacagggtcttgcttgctgtgtcacccatgctggagtgcagtgatgcaatcatggctcactacaccctgacctccctggctcaactgatcctccctcctcagcctcccgagtagctgggaccacaggtgtgcaycaattaacttttttatgcccaactaatgtttttaaaattattttttgtctccctttattgctcaggcttattttgcagacatttttaagacaaaatttttgttatgtaagactttttgttataaaaattgttatataagactttataagacataaaattttgtaatatgaggcttttcctggttgaaaagtgtttcatttttcaatgttttgtatttgtatgaaatcagtctttttgccagcacactgaatcttgtcagat

SEQ ID NO: 444886 - DNA, 585 bp, Homo sapiens
ggtggcaggtaaactatggcatgtcaggtcccatcggcattttccgccaatgatagggaggcatgttttatgcccctgtctttctgttgatgagaaaggagcaagtgaagaacwccttgggtcttaaggaacaaggactagaaaccccacaatattagtgtttctgttttttgtaatgatctgtcacctcctgtttgttttcaaaacccatgagattttaactctgcatgtgtgtgtacatgtgtgtttcttccctgttcatattgcctccctatccatcagagaatatcttaaatgccactgggatacttgatgccatcccctccatttgtgggtttgtgggctagtccagcaacaggctttggagaagttactcgctactttattataacatacttaaactcaatagcaattcaggccttactgggtatttacctaatttattgtggcaatgcggtatttagaccactgattaagtgaagtttgtcagtatagttaaaagaaattagagacactatcattgctaaatcactttacaattcaaagaagaattgtaaacatatgaatccatttaattataatagt

SEQ ID NO: 444887 - DNA, 560 bp, Homo sapiens
cattcttagtccagagctcttttcactctaacaagcctgctcctatcgcagcctccttcctgtcctttaaaactagacagatgctgcctcttactccaaagaccaccttccatcaagggaggagggacamttgcaatactgtgacctccaaacccatgggtttcccaactccgttcttacccaggaagtcctggtcatgtcatggccacataagcttagtggaaaaaaacaccattgatacaactgtcattgtgaaagtatggaggtctggagtctctcataagcctgcggttttgggtcatcagggcctatggccaccttacctgggctgagcttttggacaaggtgctgtgccagtctacacccctcagccagctgttcttggaggtcctgcccctgggacttgtctggctcatccggagtgaggagggcctggagatgctgattcaatgagcgggaggcatctctcccttcccgtaacttctcccttaactgggtcagctctcgttcctgagagtgaaccaggactttatattgcctaaggtgagacggtagagaaa

SEQ ID NO: 444888 - DNA, 560 bp, Homo sapiens
cattcttagtccagagctcttttcactctaacaagcctgctcctatcgcagcctccttcctgtcctttaaaactagacagatgctgcctcttactccaaagaccaccttccatcaagggaggagggacacttgcaatactgtgacctccaamcccatgggtttcccaactccgttcttacccaggaagtcctggtcatgtcatggccacataagcttagtggaaaaaaacaccattgatacaactgtcattgtgaaagtatggaggtctggagtctctcataagcctgcggttttgggtcatcagggcctatggccaccttacctgggctgagcttttggacaaggtgctgtgccagtctacacccctcagccagctgttcttggaggtcctgcccctgggacttgtctggctcatccggagtgaggagggcctggagatgctgattcaatgagcgggaggcatctctcccttcccgtaacttctcccttaactgggtcagctctcgttcctgagagtgaaccaggactttatattgcctaaggtgagacggtagagaaa

SEQ ID NO: 444889 - DNA, 560 bp, Homo sapiens
cattcttagtccagagctcttttcactctaacaagcctgctcctatcgcagcctccttcctgtcctttaaaactagacagatgctgcctcttactccaaagaccaccttccatcaagggaggagggacacttgcaatactgtgacctccaaacccatgggtttcccaactccgttcttacccaggaagtcctggtcatgtcatggccacataagcttagtggmaaaaaacaccattgatacaactgtcattgtgaaagtatggaggtctggagtctctcataagcctgcggttttgggtcatcagggcctatggccaccttacctgggctgagcttttggacaaggtgctgtgccagtctacacccctcagccagctgttcttggaggtcctgcccctgggacttgtctggctcatccggagtgaggagggcctggagatgctgattcaatgagcgggaggcatctctcccttcccgtaacttctcccttaactgggtcagctctcgttcctgagagtgaaccaggactttatattgcctaaggtgagacggtagagaaa

SEQ ID NO: 444890 - DNA, 560 bp, Homo sapiens
cattcttagtccagagctcttttcactctaacaagcctgctcctatcgcagcctccttcctgtcctttaaaactagacagatgctgcctcttactccaaagaccaccttccatcaagggaggagggacacttgcaatactgtgacctccaaacccatgggtttcccaactccgttcttacccaggaagtcctggtcatgtcatggccacataagcttagtggaaaaaaacaccattgatacaactgtcattgtgaaagtatggaggtctggagtctctcataagcctgsggttttgggtcatcagggcctatggccaccttacctgggctgagcttttggacaaggtgctgtgccagtctacacccctcagccagctgttcttggaggtcctgcccctgggacttgtctggctcatccggagtgaggagggcctggagatgctgattcaatgagcgggaggcatctctcccttcccgtaacttctcccttaactgggtcagctctcgttcctgagagtgaaccaggactttatattgcctaaggtgagacggtagagaaa

SEQ ID NO: 444891 - DNA, 552 bp, Homo sapiens
tgtcctttaaaactagacagatgctgcctcttactccaaagaccaccttccatcaagggaggagggacacttgcaatactgtgacctccaaacccatgggtttcccaactccgttcttacccaggaagtcctggtcatgtcatggccacataagcttagtggaaaaaaacaccattgatacaactgtcattgtgaaagtatggaggtctggagtctctcataagcctgcggttttgggtcatcagggcctatggccaccttacctgggctgagcttttggacaaggtgctgtgccagtctacacccctcagccagctgttcttggaggtcctgcccctgggacttgtctggctcatccggagtgaggagggcctggagatgctgattcaatgagcgggaggcatctctcccttcccgtaacttctcccttaactgggtcagctctcgttcctgagagtgaaccaggactttatattgcctaaggtgagacggtagagaaaatttaagagtggaaagggttgagtgatmcgctcaaatattgcaacagagatt

SEQ ID NO: 444892 - DNA, 441 bp, Homo sapiens
ggggtcccctcacctgagctcctcagcttgcttgagctgctctgcaagcttctcctccttgaactgtcgctcattcctcagcatamattttatgaggtctttacactcttcatactctgagaaaagacagacacgcctgcctcagtgtaaggctggacatgctgctgtggtcactgcctacagggcaggagccaggtccatcccaaggacaaaactgtccccagtaccaggctctaggcagggatttccacatctttactcttcagtctcctgactttctggcatcttatcctccaaaatttaaagacgaagaaagagaaactcaaggcacatcaaggaagttgacaagatgattcaaccacaacgaagtggactcagaactcacagcccctgaggtctgactctgaatgcggggccactttcccaagcctggcagcctct

SEQ ID NO: 444893 - DNA, 441 bp, Homo sapiens
ggggtcccctcacctgagctcctcagcttgcttgagctgctctgcaagcttctcctccttgaactgtcgctcattcctcagcatacattttatgaggtctttacactcttcatactctgagaaaagacagacacrcctgcctcagtgtaaggctggacatgctgctgtggtcactgcctacagggcaggagccaggtccatcccaaggacaaaactgtccccagtaccaggctctaggcagggatttccacatctttactcttcagtctcctgactttctggcatcttatcctccaaaatttaaagacgaagaaagagaaactcaaggcacatcaaggaagttgacaagatgattcaaccacaacgaagtggactcagaactcacagcccctgaggtctgactctgaatgcggggccactttcccaagcctggcagcctct

SEQ ID NO: 444894 - DNA, 441 bp, Homo sapiens
ggggtcccctcacctgagctcctcagcttgcttgagctgctctgcaagcttctcctccttgaactgtcgctcattcctcagcatacattttatgaggtctttacactcttcatactctgagaaaagacagacacgcctgcctcagtgkaaggctggacatgctgctgtggtcactgcctacagggcaggagccaggtccatcccaaggacaaaactgtccccagtaccaggctctaggcagggatttccacatctttactcttcagtctcctgactttctggcatcttatcctccaaaatttaaagacgaagaaagagaaactcaaggcacatcaaggaagttgacaagatgattcaaccacaacgaagtggactcagaactcacagcccctgaggtctgactctgaatgcggggccactttcccaagcctggcagcctct

SEQ ID NO: 444895 - DNA, 546 bp, Homo sapiens
gacacgcctgcctcagtgtaaggctggacatgctgctgtggtcactgcctacagggcaggagccaggtccatcccaaggacaaaactgtccccagtaccaggctctaggcagggatttccacatctttactcttcagtctcctgactttctggcatcttatcctccaaaatttaaagacgaagaaagagaaactcaaggcacatcaaggaagttgacaagatgattcaaccacaacgaagtggactcagaactcacagcccctgaggtctgactctgaatgcggggccactttcccaagcctggcagcctctcctctgaaacactgcactggggcatgaagtrgtgatttcttgtacagtcgggaaggcccctaggactatgggactgatggtttcccttttactgggtatttcaaggacaaatatgtcaaggactttaaaacatttcatttttaaatcatatattcagatacggttttaagaatcatatcggaagcttaaagtgtgagacagaagacaataaggccatgaaggaaatatgcccaa

SEQ ID NO: 444896 - DNA, 546 bp, Homo sapiens
gacacgcctgcctcagtgtaaggctggacatgctgctgtggtcactgcctacagggcaggagccaggtccatcccaaggacaaaactgtccccagtaccaggctctaggcagggatttccacatctttactcttcagtctcctgactttctggcatcttatcctccaaaatttaaagacgaagaaagagaaactcaaggcacatcaaggaagttgacaagatgattcaaccacaacgaagtggactcagaactcacagcccctgaggtctgactctgaatgcggggccactttcccaagcctggcagcctctcctctgaaacactgcactggggcatgaagtggtgatttcttgtacagtcgggaaggcccctaggactatgggactgatggtttcccttttactgggtatttcaaggacaaatatgtcaaggactttaaaacatttcatttttaaatcatatattcagatacggttttaagaatcatatckgaagcttaaagtgtgagacagaagacaataaggccatgaaggaaatatgcccaa

SEQ ID NO: 444897 - DNA, 568 bp, Homo sapiens
agcatcaagatttagattagttgtgttaatttagaaacagcataagattagtttgtgttaatttagaaacatcagaatgaagaactaatagatagtgtttacactgtgccaattaatgttcaaggagattgacaggaaatacctcatgtaattcattgcagcaatttacagaggtaggtattattgtagtaccctctgaacagatgaggaaactgagggacagacaagamaagcaacttggatggagcccaggagacaggctgagggtccctgctttgcacactgcactgctgcttccacacattctcgggtgtgatctttcttcctctttaggaacaagagcctgtgtaccaggaagcaggacttcactctcaccaaggtactctctgctttttatttttatttttgtttgatttatctttttgtttgtttgttttttgacgagtcttgccctgtcacccatgctggagtgcaatagtgcaatcttggctcactgcaacatctgcctgctgggttcaaaggattcttctgcctcagcctcccgattagtggtgattacagttgcccg

SEQ ID NO: 444898 - DNA, 568 bp, Homo sapiens
agcatcaagatttagattagttgtgttaatttagaaacagcataagattagtttgtgttaatttagaaacatcagaatgaagaactaatagatagtgtttacactgtgccaattaatgttcaaggagattgacaggaaatacctcatgtaattcattgcagcaatttacagaggtaggtattattgtagtaccctctgaacagatgaggaaactgagggacagacaagacaagcaacttggatggagcccaggagacaggctgagggtccctgytttgcacactgcactgctgcttccacacattctcgggtgtgatctttcttcctctttaggaacaagagcctgtgtaccaggaagcaggacttcactctcaccaaggtactctctgctttttatttttatttttgtttgatttatctttttgtttgtttgttttttgacgagtcttgccctgtcacccatgctggagtgcaatagtgcaatcttggctcactgcaacatctgcctgctgggttcaaaggattcttctgcctcagcctcccgattagtggtgattacagttgcccg

SEQ ID NO: 444899 - DNA, 471 bp, Homo sapiens
tattgtagtaccctctgaacagatgaggaaactgagggacagacaagacaagcaacttggatggagcccaggagacaggctgagggtccctgctttgcacactgcactgctgcttccacacattctcgggtgtgatctttcttcctctttaggaacaagagcctgtgyaccaggaagcaggacttcactctcaccaaggtactctctgctttttatttttatttttgtttgatttatctttttgtttgtttgttttttgacgagtcttgccctgtcacccatgctggagtgcaatagtgcaatcttggctcactgcaacatctgcctgctgggttcaaaggattcttctgcctcagcctcccgattagtggtgattacagttgcccgccatgacgcccatctactttttgtatttttagtggagatggggtttctccatgttgcccaggctagtctcaaactcctcacctc

SEQ ID NO: 444900 - DNA, 471 bp, Homo sapiens
tattgtagtaccctctgaacagatgaggaaactgagggacagacaagacaagcaacttggatggagcccaggagacaggctgagggtccctgctttgcacactgcactgctgcttccacacattctcgggtgtgatctttcttcctctttaggaacaagagcctgtgtaccaggaagcaggacttcactctcaccaaggtactctctgctttttatttttatttttgtttkatttatctttttgtttgtttgttttttgacgagtcttgccctgtcacccatgctggagtgcaatagtgcaatcttggctcactgcaacatctgcctgctgggttcaaaggattcttctgcctcagcctcccgattagtggtgattacagttgcccgccatgacgcccatctactttttgtatttttagtggagatggggtttctccatgttgcccaggctagtctcaaactcctcacctc

SEQ ID NO: 444901 - DNA, 471 bp, Homo sapiens
tattgtagtaccctctgaacagatgaggaaactgagggacagacaagacaagcaacttggatggagcccaggagacaggctgagggtccctgctttgcacactgcactgctgcttccacacattctcgggtgtgatctttcttcctctttaggaacaagagcctgtgtaccaggaagcaggacttcactctcaccaaggtactctctgctttttatttttatttttgtttgatttatctttttgtttgtttgttttttgaygagtcttgccctgtcacccatgctggagtgcaatagtgcaatcttggctcactgcaacatctgcctgctgggttcaaaggattcttctgcctcagcctcccgattagtggtgattacagttgcccgccatgacgcccatctactttttgtatttttagtggagatggggtttctccatgttgcccaggctagtctcaaactcctcacctc

SEQ ID NO: 444902 - DNA, 568 bp, Homo sapiens
agcatcaagatttagattagttgtgttaatttagaaacagcataagattagtttgtgttaatttagaaacatcagaatgaagaactaatagatagtgtttacactgtgccaattaatgttcaaggagattgacaggaaatacctcatgtaattcattgcagcaatttacagaggtaggtattattgtagtaccctctgaacagatgaggaaactgagggacagacaagacaagcaacttggatggagcccaggagacaggctgagggtccctgctttgcacactgcactgctgcttccacacattctcgggtgtgatctttcttcctctttaggaacaagagcctgtgtaccaggaagcaggacttcactctcaccaaggtactctctgctttttatttttatttttgtttgatttatctttttgtttgtttgttttttgacgagtcttgccctgtcacccatgctggagtkcaatagtgcaatcttggctcactgcaacatctgcctgctgggttcaaaggattcttctgcctcagcctcccgattagtggtgattacagttgcccg

SEQ ID NO: 444903 - DNA, 578 bp, Homo sapiens
gaggtcacacggggatgagttttcagcactgccaataaaagcaatcacatgaattattcagtaattattcataggatccatataattcagtaaatattcacataattatttactagttgttcattgaccaattcgtacaaggcattttgctcaaaactgagcttatatttggacattgtatcttcatcataatcctgtggtaatgctattatccgtaagtaacaggtaagaaacctgaagaggagggatarcaaatcatgtatttggacatatttccattttttttttttttggtttttgtgatgctggaagaatgaccagaatgagtcataggaagagtatacattcctgtagtattttgcaggacagaggtgtgacctcctagagtactgggaccaaaattcccaagtgtctgcaaccttgctttaacagtatgggagatcacctctatcacctggaattcccctggaactctggaatatacaagagaagtatgagacttgggtcttcccttggctgtgtttaattcactcttctatggaataccaatgattctcactaagactttggccttttca

SEQ ID NO: 444904 - DNA, 578 bp, Homo sapiens
gaggtcacacggggatgagttttcagcactgccaataaaagcaatcacatgaattattcagtaattattcataggatccatataattcagtaaatattcacataattatttactagttgttcattgaccaattcgtacaaggcattttgctcaaaactgagcttatatttggacattgtatcttcatcataatcctgtggtaatgctattatccgtaagtaacaggtaagaaacctgaagaggagggataacaaatcatgtatttggacatatttccattttttttttttttggtttttgtgatgctggaagaatgaccagaatgagtcataggaagagtatacattcctgtagtattttgcaggacagaggtgtgacctcctagagtactgggaccaaaatycccaagtgtctgcaaccttgctttaacagtatgggagatcacctctatcacctggaattcccctggaactctggaatatacaagagaagtatgagacttgggtcttcccttggctgtgtttaattcactcttctatggaataccaatgattctcactaagactttggccttttca

SEQ ID NO: 444905 - DNA, 570 bp, Homo sapiens
ctactcaaagcatgcttgaatttggaatcagggcttccactcttccgaagttggagtgtcactgcgacaggcatgtgtcccgaagggctcgtgtctctgctatactcaaagtttaaatggagcccagcaagccagatgtcctttacttctaggttccctcaacagtttctcctccgctttagagaccgcattgaaaatattcttgttctgctgytgtgttttggctttggaatgatgtgatgcagctcaatgggtcccacccccaagttgatcaaagtaagaaacagctgggaaagtcagtgcaaatacaagttcattgtcctccttgcagggattctgattcagagggctcaggtggggcctggaatgtgtttgttaacatgactcagatgtgcagtcaatttggggactcactgacagcattgaccttacagtttatgggatgattctttctgttttgctgatgaagaaactgaggcacacagagtctgtaacttgcccaagttccccttgttgtaagtcctggagccagatctcaggtggaccagtgcttctctcccctatacctca

SEQ ID NO: 444906 - DNA, 570 bp, Homo sapiens
ctactcaaagcatgcttgaatttggaatcagggcttccactcttccgaagttggagtgtcactgcgacaggcatgtgtcccgaagggctcgtgtctctgctatactcaaagtttaaatggagcccagcaagccagatgtcctttacttctaggttccctcaacagtttctcctccgctttagagaccgcattgaaaatattcttgttctgctgttgtgttttggctttggaatgatgtgatgcagctcaatgggtcccacccccaasttgatcaaagtaagaaacagctgggaaagtcagtgcaaatacaagttcattgtcctccttgcagggattctgattcagagggctcaggtggggcctggaatgtgtttgttaacatgactcagatgtgcagtcaatttggggactcactgacagcattgaccttacagtttatgggatgattctttctgttttgctgatgaagaaactgaggcacacagagtctgtaacttgcccaagttccccttgttgtaagtcctggagccagatctcaggtggaccagtgcttctctcccctatacctca

SEQ ID NO: 444907 - DNA, 615 bp, Homo sapiens
ttgtcgtttattgctcagttatatgaattccttatatactctaggtactagacctgtgtcaaacatacaatttggaaatagttctcccattatgtggattatcttttcacttccttgacagtgtcctttgaagcatacaagttttttattttaatgaagtccatttatctatttttcsgttgtttgtgcctacttaaaaaatgtctaatccaaaatcacaaagatttgtacctaggtttccttcaagacatcgtcttttgaatgagaactttcctgggttttagaggagggtggacattgtttattgatgcctcctgtccattaccgatgtttctcctgattgttattcatatgctcaccacccctccatggagcatccatggcctgtgacagagctctggggactgatatccttccactgactttggcgctggtgagagccctggtcatgtgattcagcttggccttaacccgacccagttgcacatattcctcaggccctttagagttgaagtcgagacctctctgagaacgcttgccagcccatgctcttctaaggctggagcaaacttcctccatctattccagacagaggggactgcaggggttggactc

SEQ ID NO: 444908 - DNA, 615 bp, Homo sapiens
ttgtcgtttattgctcagttatatgaattccttatatactctaggtactagacctgtgtcaaacatacaatttggaaatagttctcccattatgtggattatcttttcacttccttgacagtgtcctttgaagcatacaagttttttattttaatgaagtccatttatctatttttccgttgtttgtgcctacttaaaaaatgtctaatccaaaatcacaaagatttgtacctaggtttccttcaagacatcgtcttttgaatgagaactttcctgggttttagaggagggtggacattgtttattgatgcctcctgtccattaccgatgtttctcytgattgttattcatatgctcaccacccctccatggagcatccatggcctgtgacagagctctggggactgatatccttccactgactttggcgctggtgagagccctggtcatgtgattcagcttggccttaacccgacccagttgcacatattcctcaggccctttagagttgaagtcgagacctctctgagaacgcttgccagcccatgctcttctaaggctggagcaaacttcctccatctattccagacagaggggactgcaggggttggactc

SEQ ID NO: 444909 - DNA, 533 bp, Homo sapiens
attcttaacaactaattacggctcatgtccaccgccatgcgatcatatttaaatctgtcaactatcctgttacttaggtattatcctgttcctgatgagaaaacaaactcagaaagattgcaaaatttccctaggtcacaaaactagtgaggagaggagtaagaattagatatccgttccttttggccttcaaagctaaccttgtaccattagatcaaactgatttacatacttttgctggaattagtctcasacttgtggttctcacttgattttcccaaggaaacagtgtgccactttaatatcgtttcaaactttgaaatttaaaactctttttattatacttttttgtctttgttctattccgttgcttttggtttcttctcaacggatccctcttatttatatgctaaatatttgttacctattttctgtcaattttcacctttttgagtgtttgttatctgtctgttgtatgctaaccgttcttcactgaggtaaaatttgcatagagtatactgcaaaaaaaccta

SEQ ID NO: 444910 - DNA, 533 bp, Homo sapiens
attcttaacaactaattacggctcatgtccaccgccatgcgatcatatttaaatctgtcaactatcctgttacttaggtattatcctgttcctgatgagaaaacaaactcagaaagattgcaaaatttccctaggtcacaaaactagtgaggagaggagtaagaattagatatccgttccttttggccttcaaagctaaccttgtaccattagatcaaactgatttacatacttttgctggaattagtctcagasttgtggttctcacttgattttcccaaggaaacagtgtgccactttaatatcgtttcaaactttgaaatttaaaactctttttattatacttttttgtctttgttctattccgttgcttttggtttcttctcaacggatccctcttatttatatgctaaatatttgttacctattttctgtcaattttcacctttttgagtgtttgttatctgtctgttgtatgctaaccgttcttcactgaggtaaaatttgcatagagtatactgcaaaaaaaccta

SEQ ID NO: 444911 - DNA, 533 bp, Homo sapiens
attcttaacaactaattacggctcatgtccaccgccatgcgatcatatttaaatctgtcaactatcctgttacttaggtattatcctgttcctgatgagaaaacaaactcagaaagattgcaaaatttccctaggtcacaaaactagtgaggagaggagtaagaattagatatccgttccttttggccttcaaagctaaccttgtaccattagatcaaactgatttacatacttttgctggaattagtctcagacttgtggttctcacttgattttcccaaggaaacagtgtgccactttaatatcgtttcaaactttgaaatttaaaactctttttattatacttttttgtctttgttctattccgttgcttttggtttcttctcaacggatccctcttatttatatgctaaatatttgttacctattttctgtcaattttcacmtttttgagtgtttgttatctgtctgttgtatgctaaccgttcttcactgaggtaaaatttgcatagagtatactgcaaaaaaaccta

SEQ ID NO: 444912 - DNA, 533 bp, Homo sapiens
attcttaacaactaattacggctcatgtccaccgccatgcgatcatatttaaatctgtcaactatcctgttacttaggtattatcctgttcctgatgagaaaacaaactcagaaagattgcaaaatttccctaggtcacaaaactagtgaggagaggagtaagaattagatatccgttccttttggccttcaaagctaaccttgtaccattagatcaaactgatttacatacttttgctggaattagtctcagacttgtggttctcacttgattttcccaaggaaacagtgtgccactttaatatcgtttcaaactttgaaatttaaaactctttttattatacttttttgtctttgttctattccgttgcttttggtttcttctcaacggatccctcttatttatatgctaaatatttgttacctattttctgtcaattttcacctttttgagtgtttgttatctgtctgttgtatgctaacmgttcttcactgaggtaaaatttgcatagagtatactgcaaaaaaaccta

SEQ ID NO: 444913 - DNA, 589 bp, Homo sapiens
agcaagtgatgactgtgacattcacttttgaacagctcatgagcattaatatatttaattgtggatctaaaccaaaaaccaaggggtgggcaagatgacaaccacagaatgtcactggcatatgtttaggttcaaataccattatgagaagtggcaggtaaaggaggtaggaaaaagaaaacacatcatgtaactgactgtcatatggaaatatttgacgytgaaagtcataatttaaaatgtataaaccaaatattagaagtgtgtctagttcaaaggggggaaaactatgaaacatttttaatcaatatcaaacatgagctacacaacccttcctaaatgccagaggcacacacagacacacacacacacacactcacaaagaatataaatatctagaaccaagaaatggagtaaatgcattctgctacatatggtaaacatagcctacaaggtggaagagattagaaaataaacagggaaatggaaatgtttttattaattcacatcagtacccacaaaaaccaatcagcataacaaaagattataacactgaatgtaaaaaacaatccaacagtccagagtgata

SEQ ID NO: 444914 - DNA, 589 bp, Homo sapiens
agcaagtgatgactgtgacattcacttttgaacagctcatgagcattaatatatttaattgtggatctaaaccaaaaaccaaggggtgggcaagatgacaaccacagaatgtcactggcatatgtttaggttcaaataccattatgagaagtggcaggtaaaggaggtaggaaaaagaaaacacatcatgtaactgactgtcatatggaaatatttgacgctgaaagtcataatttaaaatgtataaaccaaatattagaagtgtgtctagttcaaaggggggaaaactatgaaacatttttaatcaatatcaaacatgagctacacaacccttcctaaatgccagaggcacacacasacacacacacacacacactcacaaagaatataaatatctagaaccaagaaatggagtaaatgcattctgctacatatggtaaacatagcctacaaggtggaagagattagaaaataaacagggaaatggaaatgtttttattaattcacatcagtacccacaaaaaccaatcagcataacaaaagattataacactgaatgtaaaaaacaatccaacagtccagagtgata

SEQ ID NO: 444915 - DNA, 589 bp, Homo sapiens
agcaagtgatgactgtgacattcacttttgaacagctcatgagcattaatatatttaattgtggatctaaaccaaaaaccaaggggtgggcaagatgacaaccacagaatgtcactggcatatgtttaggttcaaataccattatgagaagtggcaggtaaaggaggtaggaaaaagaaaacacatcatgtaactgactgtcatatggaaatatttgacgctgaaagtcataatttaaaatgtataaaccaaatattagaagtgtgtctagttcaaaggggggaaaactatgaaacatttttaatcaatatcaaacatgagctacacaacccttcctaaatgccagaggcacacacagacacacacacacacacactcacaaagaatataaatatctagaaccaagaaatggagtaaatgcattctgcyacatatggtaaacatagcctacaaggtggaagagattagaaaataaacagggaaatggaaatgtttttattaattcacatcagtacccacaaaaaccaatcagcataacaaaagattataacactgaatgtaaaaaacaatccaacagtccagagtgata

SEQ ID NO: 444916 - DNA, 589 bp, Homo sapiens
agcaagtgatgactgtgacattcacttttgaacagctcatgagcattaatatatttaattgtggatctaaaccaaaaaccaaggggtgggcaagatgacaaccacagaatgtcactggcatatgtttaggttcaaataccattatgagaagtggcaggtaaaggaggtaggaaaaagaaaacacatcatgtaactgactgtcatatggaaatatttgacgctgaaagtcataatttaaaatgtataaaccaaatattagaagtgtgtctagttcaaaggggggaaaactatgaaacatttttaatcaatatcaaacatgagctacacaacccttcctaaatgccagaggcacacacagacacacacacacacacactcacaaagaatataaatatctagaaccaagaaatggagtaaatgcattctgctacatatggtaaacatagcctacaaggtggaagagattagaaaataaacagggaaatggaaatgtttttattaattcacatcagtacccacmaaaaccaatcagcataacaaaagattataacactgaatgtaaaaaacaatccaacagtccagagtgata

SEQ ID NO: 444917 - DNA, 445 bp, Homo sapiens
ttggggttcaaaataactaaagaaatgcagctayattatctttttactttttttgaacccaaaatatctcttctcctttttgttgtgtgatttgtggtgatatggactatgtgaaggagacaggtcagttgtcctgctcagtgttctacattctgcagttgtctggtgattacctcctatgaaactcaggctaagcgttttctgcaagaacatggcgttgttcatattctgcaccggcagagtcctgggtgacatgctgtctcctgccagcggctcctgactcctgttctctacaggatggaatcgagaggagcagggctaaggcctcccaatgctgtttgtccatctagctgtggtcttcctaagtactgacaccaattggaggctgaaggactgtggcttctctaaccaaaggagcctagcgggttaacaattgtcaagagca

SEQ ID NO: 444918 - DNA, 560 bp, Homo sapiens
atcaaactcttaactctgaaaaaggtctttctacctgcattataaacccctataataaaacatcagaaattcattcatgtttcttttttctaatcttaaatcttccattgtcaatctcaaactgctgccttagaggttctgagaaggtaacctaactggtagtttaggtaaataaagttcaaatccagggaggaaayaagaagcagaagcagaattagaagaaagatgaaataaaaggacagaatcaatgtacagataatgaagaaacaaaggttggtccactaagttagtcttttgtcgctggtttttttggcaaaagagtaatgatcggtctcgtaatcattataatactattatttgtctgcttgaagatgtataaagcatttgaaggaaatgtgatgtgaaaagattaagaacccttgccgtcaatgtttccttgtttgggagaatcccatttcctaagttaatatgctttgatgtgttagctatgaaaggagtagactagtttaaggaaatattgacggtcaaaatattaacatattagtcttttgatgaagttc

SEQ ID NO: 444919 - DNA, 560 bp, Homo sapiens
atcaaactcttaactctgaaaaaggtctttctacctgcattataaacccctataataaaacatcagaaattcattcatgtttcttttttctaatcttaaatcttccattgtcaatctcaaactgctgccttagaggttctgagaaggtaacctaactggtagtttaggtaaataaagttcaaatccagggaggaaataagaagcagaagcagaattagaagaaagaygaaataaaaggacagaatcaatgtacagataatgaagaaacaaaggttggtccactaagttagtcttttgtcgctggtttttttggcaaaagagtaatgatcggtctcgtaatcattataatactattatttgtctgcttgaagatgtataaagcatttgaaggaaatgtgatgtgaaaagattaagaacccttgccgtcaatgtttccttgtttgggagaatcccatttcctaagttaatatgctttgatgtgttagctatgaaaggagtagactagtttaaggaaatattgacggtcaaaatattaacatattagtcttttgatgaagttc

SEQ ID NO: 444920 - DNA, 560 bp, Homo sapiens
atcaaactcttaactctgaaaaaggtctttctacctgcattataaacccctataataaaacatcagaaattcattcatgtttcttttttctaatcttaaatcttccattgtcaatctcaaactgctgccttagaggttctgagaaggtaacctaactggtagtttaggtaaataaagttcaaatccagggaggaaataagaagcagaagcagaattagaagaaagatgaaataaaaggacagaatcaatgtacagataatgaagaaacaaaggttggtccactaagttagtcttttgtcgctggtttttttggcaaaagagtaatgatcggtctcgtaatcattataatactattatttgtctgcttgaagatgtataaagcatttgaaggaaatgtgatgtgaaaagattaagaacccttgccgtcaatgtttccttgtttgggagaatcccatttcctaagttaatatgctttgatgtrttagctatgaaaggagtagactagtttaaggaaatattgacggtcaaaatattaacatattagtcttttgatgaagttc

SEQ ID NO: 444921 - DNA, 623 bp, Homo sapiens
caagtgcacacaaagactgttataagaatattcagcacaagaattcaataaccccaaaattgagaagtgatctatgaaactacatggatatatctcatgagtataatgaatgtaactgcagaaaaaaggccagacacaaaacatatgtacattcattcatgtgaactttaagaacaggcaattgtaacctgtgggaatagacatcagaatagtgataactaagaggacacagggtgggaatcacctggacaggggctctaacaggcctttctcagatgatggcaattttctataacttgagctgggtggtgataacattgatcaaaactaaacaaattgcactaaagatttgtgcactttatgtgaactgtagcttctttactgttctcattgcttgaacctgggagacacaggttgcagtgagccgagattgagccacggcactscagcctgggtgacagaacaagactacgtctcaaaaacaataataatagtaataatttactgttctcataaaaattagcagatggggaatggaggcaagcctgtgcagaccatgacaactagtttagattttattgtcagctcattaaaaactcgtcctcgttttgtgtttttaaaaa

SEQ ID NO: 444922 - DNA, 597 bp, Homo sapiens
gggatgcctgtatgctgatatggttgatgcctgtatggttgaattgggtctaccgttcctcatctaattagctatggtctattaaggtgcatagctacacacaaatattggtactacgttcaattcagaggaataagatattgcattcttgamagtagacaagaacaccctgaatttggggtcactgtatcataagtcatgttatcaggtccctctaggaaggcttagaggaagatttccaggatacacttgtgacaacattgaaggcttctttcttccccaaagggacccgatctcccctcagtcgagaagctccaagtctctgaactggatgccaggttataaattccccctatactgactccatcaggcttctgtcctcagaactagagtttatcagtaaaagatagactcatgggagtctaggcatttattctcttattttatataaatcagttaatgtgcaggaacaaaacagactttgaagaaagacactcacagttgccacaggaaaacaccttcaacatcctcatgagtcatcatgggtgttctgttgggaggacttgataggaggctttcctcctcatgggctagtgc

SEQ ID NO: 444923 - DNA, 597 bp, Homo sapiens
gggatgcctgtatgctgatatggttgatgcctgtatggttgaattgggtctaccgttcctcatctaattagctatggtctattaaggtgcatagctacacacaaatattggtactacgttcaattcagaggaataagatattgcattcttgaaagtagacaagaacaccctgaatttggggtcactgtatcataagtcatgttatcaggtccctctaggaaggcttagaggaagatttccaggatacacttgtgacaacattgaaggyttctttcttccccaaagggacccgatctcccctcagtcgagaagctccaagtctctgaactggatgccaggttataaattccccctatactgactccatcaggcttctgtcctcagaactagagtttatcagtaaaagatagactcatgggagtctaggcatttattctcttattttatataaatcagttaatgtgcaggaacaaaacagactttgaagaaagacactcacagttgccacaggaaaacaccttcaacatcctcatgagtcatcatgggtgttctgttgggaggacttgataggaggctttcctcctcatgggctagtgc

SEQ ID NO: 444924 - DNA, 496 bp, Homo sapiens
caaagagaaaggacagaaaatactaacgatggctcagcacatgtggtctatcttgctgaatgctctatgtgagtttgagaagagttatttgttagctgttcttagatgtattttgcttaaatatcgacctggctaacatgtgtcattgattgtgtgaattaatyttgttctagtgggcagtaaaattactgtctgatcactttggacttatgtggactggtttatgttttattacaacggattcatggaaagcccacagcatttcccaagaccctctaatttggcaggactcaatcaccaatccacccctttgtgaatttgtcagggtttgcttttaggctttagcaggttggtctacaataggccttattgaaaagtgtgacacttattcctaaagcacatccattctagtgtctcagttggatacctgggtgctaatgaggtgtgcatgagttcttcccaccatggatggcagaaactccatcatacattcccc

SEQ ID NO: 444925 - DNA, 632 bp, Homo sapiens
cttgctgaatgctctatgtgagtttgagaagagttatttgttagctgttcttagatgtattttgcttaaatatcgacctggctaacatgtgtcattgattgtgtgaattaatcttgttctagtgggcagtaaaattactgtctgatcactttggacttatgtggactggttyatgttttattacaacggattcatggaaagcccacagcatttcccaagaccctctaatttggcaggactcaatcaccaatccacccctttgtgaatttgtcagggtttgcttttaggctttagcaggttggtctacaataggccttattgaaaagtgtgacacttattcctaaagcacatccattctagtgtctcagttggatacctgggtgctaatgaggtgtgcatgagttcttcccaccatggatggcagaaactccatcatacattccccaaccctccttcacctcaagtacctctggtccaaactcaatttcatagcagccacccctctgttaaaactgttagtcttttccttgtgcaggtagagtccactccttgataagtatgcacatggaaccccacatagactttgagagctgcacctttgatcagctgtctcctcactggtgccctgccct

SEQ ID NO: 444926 - DNA, 547 bp, Homo sapiens
cttctcaattgacagtgcagtgacccaacaaagacacgggttcttgaattcaaagtggagcaggagagacggtaaatacacatttactttaatatatatatatttattatttatgtgtytaaagcacaaattagtttggtaaaaaacatctcatgtctgttttatttccacatccctgagactgacaaggggatgcctatcaattaattcatttagagagccatacaccccaagaaataaattatttgtcctctggagcttgtcacagggggatttttaaaaaaacattaaacagaaagacaactgtgcatcttagaaagataaaaggccaattcttcctctccggctgataggttcttaataatagtgatatctactaataagatgttttacatagtgtaaagcatgttcacatacaaattacttagcctctttgagcctcagttttcttatatgtaaagctggattaatagtacattttgtgtttaaaaagataatgtatatgaagtgtttaccatttttcttggcatctagttcagttctcagt

SEQ ID NO: 444927 - DNA, 547 bp, Homo sapiens
cttctcaattgacagtgcagtgacccaacaaagacacgggttcttgaattcaaagtggagcaggagagacggtaaatacacatttactttaatatatatatatttattatttatgtgtttaaagcacaaattagtttggtaaaaaacatctcatgtctgttttatttccacatccctgagactgacaakgggatgcctatcaattaattcatttagagagccatacaccccaagaaataaattatttgtcctctggagcttgtcacagggggatttttaaaaaaacattaaacagaaagacaactgtgcatcttagaaagataaaaggccaattcttcctctccggctgataggttcttaataatagtgatatctactaataagatgttttacatagtgtaaagcatgttcacatacaaattacttagcctctttgagcctcagttttcttatatgtaaagctggattaatagtacattttgtgtttaaaaagataatgtatatgaagtgtttaccatttttcttggcatctagttcagttctcagt

SEQ ID NO: 444928 - DNA, 530 bp, Homo sapiens
gaaacagggatggattggaggagctgtttttctcctttctttcccccggcaatatttactatttaatgccacttactaacactcaaagaaacaaaaaccaaacttctcaattgacagtgcagtgacccaacaaagacacgggttcttgaattcaaagtggagcaggagagacggtaaatacacatttactttaatatatatatatttattatttatgtgtttaaagcacaaattagtttggtaaaaaacatctcatgtctgttttatttccacatccctgagactgacaaggggatgcctatcaattaattcatttagagagccatacaccmcaagaaataaattatttgtcctctggagcttgtcacagggggatttttaaaaaaacattaaacagaaagacaactgtgcatcttagaaagataaaaggccaattcttcctctccggctgataggttcttaataatagtgatatctactaataagatgttttacatagtgtaaagcatgttcacatacaaattacttag

SEQ ID NO: 444929 - DNA, 530 bp, Homo sapiens
gaaacagggatggattggaggagctgtttttctcctttctttcccccggcaatatttactatttaatgccacttactaacactcaaagaaacaaaaaccaaacttctcaattgacagtgcagtgacccaacaaagacacgggttcttgaattcaaagtggagcaggagagacggtaaatacacatttactttaatatatatatatttattatttatgtgtttaaagcacaaattagtttggtaaaaaacatctcatgtctgttttatttccacatccctgagactgacaaggggatgcctatcaattaattcatttagagagccatacaccccaagaaataaattatttgtcctctggagcttgtcacagggggatttttaaaaaamcattaaacagaaagacaactgtgcatcttagaaagataaaaggccaattcttcctctccggctgataggttcttaataatagtgatatctactaataagatgttttacatagtgtaaagcatgttcacatacaaattacttag

SEQ ID NO: 444930 - DNA, 530 bp, Homo sapiens
gaaacagggatggattggaggagctgtttttctcctttctttcccccggcaatatttactatttaatgccacttactaacactcaaagaaacaaaaaccaaacttctcaattgacagtgcagtgacccaacaaagacacgggttcttgaattcaaagtggagcaggagagacggtaaatacacatttactttaatatatatatatttattatttatgtgtttaaagcacaaattagtttggtaaaaaacatctcatgtctgttttatttccacatccctgagactgacaaggggatgcctatcaattaattcatttagagagccatacaccccaagaaataaattatttgtcctctggagcttgtcacagggggatttttaaaaaaacattaaacagaaagacaactgtgcatcttagaaagataaaaggccaattcttcctctccggctgataggttcttaataatagtgatatctactaataagrtgttttacatagtgtaaagcatgttcacatacaaattacttag

SEQ ID NO: 444931 - DNA, 547 bp, Homo sapiens
cttctcaattgacagtgcagtgacccaacaaagacacgggttcttgaattcaaagtggagcaggagagacggtaaatacacatttactttaatatatatatatttattatttatgtgtttaaagcacaaattagtttggtaaaaaacatctcatgtctgttttatttccacatccctgagactgacaaggggatgcctatcaattaattcatttagagagccatacaccccaagaaataaattatttgtcctctggagcttgtcacagggggatttttaaaaaaacattaaacagaaagacaactgtgcatcttagaaagataaaaggccaattcttcctctccggctgataggttcttaataatagtgatatctactaataagatgttttacatagtgtaaagcatgttcacatacaaattacttagcctctttgagcctcagttttcttatatgtaaarctggattaatagtacattttgtgtttaaaaagataatgtatatgaagtgtttaccatttttcttggcatctagttcagttctcagt

SEQ ID NO: 444932 - DNA, 632 bp, Homo sapiens
cttgctgaatgctctatgtgagtttgagaagagttatttgttagctgttcttagatgtattttgcttaaatatcgacctggctaacatgtgtcattgattgtgtgaattaatcttgttctagtgggcagtaaaattactgtctgatcactttggacttatgtggactggtttatgttttattacaacggattcatggaaagcccacagcatttcccaagaccctctaatttggcaggactcaatcaccaatccacccctttgtgaatttgtcagggtttgcttttaggctttagcaggttggtctacaataggccttattgaaaagtgtgacacttattcctaaagcacatccattctagtgtctcagttggatacctgggtgctaatgaggtgtgcatsagttcttcccaccatggatggcagaaactccatcatacattccccaaccctccttcacctcaagtacctctggtccaaactcaatttcatagcagccacccctctgttaaaactgttagtcttttccttgtgcaggtagagtccactccttgataagtatgcacatggaaccccacatagactttgagagctgcacctttgatcagctgtctcctcactggtgccctgccct

SEQ ID NO: 444933 - DNA, 547 bp, Homo sapiens
acacccgcccccatgattcaattacctcctcctaagtccctcccacaacgcatgggaattctgggagatacaattcaagttgagatttgggtgagggcacggccaaactatatcagaaagggatgaagtgacagcatatcctgatgtgtgtgatggtttcatgagttattatctatttcaaaatttattgcaatgtgtggaaaagaacaaggacttgtactatctgactttaaggtttactataagctattagacacaaggcatcaggagtgacaaacggataaacagcctgagttagaagacctgaaattgatccacagctatacggtcaataaatgggttttcaataaaagcagttcaataaaagaaaataagtcatttcaattaatgaacttctatatggatgtggggagaccaacaatgttattctccctcacactacacacaaaagtaatttcagccgcattacttaaaagttaaagatatraagcatttcaaggatactttgtgacttgttggcaggcaaagattagcctaccaacaagca

SEQ ID NO: 444934 - DNA, 618 bp, Homo sapiens
aacaggctttaaaaatacagaaaaaatatggcaaaatttcatcaaattaaatgctttgagaactaaaattaaaatccaaagccactcaaccaactggacagrctgcttcttggccaaggagaccccagagaagtcttaaatactgagttcctgcccagtagttggaatctcagacacctctccttatactctctccctttgtggtttagacacaactgaccagcattattgttaaaatagagatcctaagactgacagaacagactccttgcagtagtaagatatggtatgataaacgagacctaaggccacgccaggcaaggtggagtcatgcgcccctcaacttaaagaataaactatgttccaattgccacaggtttttttcttcttcctttttttctctagctaaacaagcactggccttgagataagcaatgctgaagcacttgcagctcacccattaccataaactgactgagccctccctacacaagccataactacagctttgattggacaagagactgatttcagtaacttccccttgataagagagcactggctgtggacgggttctggacggtttacagaggctgtgcacttgactgcctttgtgtc

SEQ ID NO: 444935 - DNA, 618 bp, Homo sapiens
aacaggctttaaaaatacagaaaaaatatggcaaaatttcatcaaattaaatgctttgagaactaaaattaaaatccaaagccactcaaccaactggacagactgcttcttggccaaggagaccccagagaagtcttaaatactgagttcctgcccagtagttggaatctcagacacctctccttatactctctccctttgtggtttagacacaactgaccagcattattgttaaaatagagatcctaagactgacagaacagactccttgcagtagkaagatatggtatgataaacgagacctaaggccacgccaggcaaggtggagtcatgcgcccctcaacttaaagaataaactatgttccaattgccacaggtttttttcttcttcctttttttctctagctaaacaagcactggccttgagataagcaatgctgaagcacttgcagctcacccattaccataaactgactgagccctccctacacaagccataactacagctttgattggacaagagactgatttcagtaacttccccttgataagagagcactggctgtggacgggttctggacggtttacagaggctgtgcacttgactgcctttgtgtc

SEQ ID NO: 444936 - DNA, 450 bp, Homo sapiens
tcatcaaattaaatgctttgagaactaaaattaaaatccaaagccactcaaccaactggacagactgcttcttggccaaggagaccccagagaagtcttaaatactgagttcctgcccagtagttggaatctcagacacctctccttatactctctccctttgtggtttagacacaactgaccagcattattgttaaaatagagatcctaagactgacagaacagactccttgcagtagtaagatayggtatgataaacgagacctaaggccacgccaggcaaggtggagtcatgcgcccctcaacttaaagaataaactatgttccaattgccacaggtttttttcttcttcctttttttctctagctaaacaagcactggccttgagataagcaatgctgaagcacttgcagctcacccattaccataaactgactgagccctcccta

SEQ ID NO: 444937 - DNA, 450 bp, Homo sapiens
tcatcaaattaaatgctttgagaactaaaattaaaatccaaagccactcaaccaactggacagactgcttcttggccaaggagaccccagagaagtcttaaatactgagttcctgcccagtagttggaatctcagacacctctccttatactctctccctttgtggtttagacacaactgaccagcattattgttaaaatagagatcctaagactgacagaacagactccttgcagtagtaagatatggtatgataaacgagacctaaggccamgccaggcaaggtggagtcatgcgcccctcaacttaaagaataaactatgttccaattgccacaggtttttttcttcttcctttttttctctagctaaacaagcactggccttgagataagcaatgctgaagcacttgcagctcacccattaccataaactgactgagccctcccta

SEQ ID NO: 444938 - DNA, 618 bp, Homo sapiens
aacaggctttaaaaatacagaaaaaatatggcaaaatttcatcaaattaaatgctttgagaactaaaattaaaatccaaagccactcaaccaactggacagactgcttcttggccaaggagaccccagagaagtcttaaatactgagttcctgcccagtagttggaatctcagacacctctccttatactctctccctttgtggtttagacacaactgaccagcattattgttaaaatagagatcctaagactgacagaacagactccttgcagtagtaagatatggtatgataaacgagacctaaggccacgccaggcaaggtggagtcatgcgcccctcaacttaaagaataaactatgttcyaattgccacaggtttttttcttcttcctttttttctctagctaaacaagcactggccttgagataagcaatgctgaagcacttgcagctcacccattaccataaactgactgagccctccctacacaagccataactacagctttgattggacaagagactgatttcagtaacttccccttgataagagagcactggctgtggacgggttctggacggtttacagaggctgtgcacttgactgcctttgtgtc

SEQ ID NO: 444939 - DNA, 580 bp, Homo sapiens
tgactgagccctccctacacaagccataactacagctttgattggacaagagactgatttcagtaacttccccttgataagagagcactggctgtggacgggttctggacggtttacagaggctgtgcacttgactgcctttgtgtccctgcttccccttttgaagcatagggcctaattataatgtatttaaatgttgtctccactccaaagtgaacatgggttgcatgtaacaggcatgtttactcagcatgcatgcagcaggatcccttcatgaatattcagagctcctcctattccctgttgaatatgtatatgtggcccaccasatcaacataaatccctgttcccccctcccctccctggaaacgtacttttcaggtttcagcaggagggtatgcctccctgtctgtcggaatggccaccttgcaggctgtaaccatttataaaaaataaaatctcccttctaaatttataaattgtgtgatttttcagttgacagctttcagtcagacttttcactgactgggaaaattcatttgcaatatatttattttaaaaatgactcctcagcatacaa

SEQ ID NO: 444940 - DNA, 632 bp, Homo sapiens
cttgctgaatgctctatgtgagtttgagaagagttatttgttagctgttcttagatgtattttgcttaaatatcgacctggctaacatgtgtcattgattgtgtgaattaatcttgttctagtgggcagtaaaattactgtctgatcactttggacttatgtggactggtttatgttttattacaacggattcatggaaagcccacagcatttcccaagaccctctaatttggcaggactcaatcaccaatccacccctttgtgaatttgtcagggtttgcttttaggctttagcaggttggtctacaataggccttattgaaaagtgtgacacttattcctaaagcacatccattctagtgtctcagttggatacctgggtgctaatgaggtgtgcatgagttcttcccaccatggatggcagaaactccatcatacattccccaaccctccttcacctcaagtacctctggtccaaactcaatttcatagcagccacccctctgttaaawctgttagtcttttccttgtgcaggtagagtccactccttgataagtatgcacatggaaccccacatagactttgagagctgcacctttgatcagctgtctcctcactggtgccctgccct

SEQ ID NO: 444941 - DNA, 521 bp, Homo sapiens
gaaaaactgcaatattcagccctgtctcatcaaatactcagattcttcatggtagcgaggattttagacgctgaaattagagtgaaggatgaaatctacaagatctacaaaattgagacaaaatcagagttgtgtgaatttgtcacatctgcccagatccaacatcttgagagtaggattagggtgccacaggcatggcctgagactaggaagagagccctgctcactgacccatcccttgcctgggcttccaagtggaactagagtttcattcaacctacatgtgcctataggtcctccctgtggcaatgacatctctcagctcagtaagggccatttgcagtaggaatatgaccctaaccagaagactcagtggatccttatcaccttcatagaaaggtactcaccatccatgtcaagagcccagccaacacgctgttgctccaatatgtaacaggcacttctgtagkgctggcatgagtcagtcagttcaagataacctgaaggagttgaataacatc

SEQ ID NO: 444942 - DNA, 521 bp, Homo sapiens
gaaaaactgcaatattcagccctgtctcatcaaatactcagattcttcatggtagcgaggattttagacgctgaaattagagtgaaggatgaaatctacaagatctacaaaattgagacaaaatcagagttgtgtgaatttgtcacatctgcccagatccaacatcttgagagtaggattagggtgccacaggcatggcctgagactaggaagagagccctgctcactgacccatcccttgcctgggcttccaagtggaactagagtttcattcaacctacatgtgcctataggtcctccctgtggcaatgacatctctcagctcagtaagggccatttgcagtaggaatatgaccctaaccagaagactcagtggatccttatcaccttcatagaaaggtactcaccatccatgtcaagagcccagccaacacgctgttgctccaatatgtaacaggcacttctgtagggctggmatgagtcagtcagttcaagataacctgaaggagttgaataacatc

SEQ ID NO: 444943 - DNA, 521 bp, Homo sapiens
gaaaaactgcaatattcagccctgtctcatcaaatactcagattcttcatggtagcgaggattttagacgctgaaattagagtgaaggatgaaatctacaagatctacaaaattgagacaaaatcagagttgtgtgaatttgtcacatctgcccagatccaacatcttgagagtaggattagggtgccacaggcatggcctgagactaggaagagagccctgctcactgacccatcccttgcctgggcttccaagtggaactagagtttcattcaacctacatgtgcctataggtcctccctgtggcaatgacatctctcagctcagtaagggccatttgcagtaggaatatgaccctaaccagaagactcagtggatccttatcaccttcatagaaaggtactcaccatccatgtcaagagcccagccaacacgctgttgctccaatatgtaacaggcacttctgtagggctggcatgagtcagtyagttcaagataacctgaaggagttgaataacatc

SEQ ID NO: 444944 - DNA, 618 bp, Homo sapiens
gtggaactagagtttcattcaacctacatgtgcctataggtcctccctgtggcaatgacatctctcagctcagtaagggccatttgcagtaggaatatgaccctaaccagaagactcagtggatccttatcaccttcatagaaaggtactcaccatccatgtcaagagcccagccaacacgctgttgctccaatatgtaacaggcacttctgtagggctggcatgagtcagtcagttcaagataacctgaaggagttgaataacatctatccagtgagtcctgcaagacttcaggccctttctcatccagcagctccctgctgagcctggaacagtgggaaaaagtaaagaataagccaggggraatcagaaaccacacagccccagctagatttcatggctaacataaggaagagtttgaaaagaaaaaggacagatccattaatgaggtaacaaattattgtctttatgttgggatagaacagggccaggtagaaaacaatgaaagagaaagacagagagacagagacagagacagagacagagagaaagtgagctagtgaattggccaggtgacatactggtaagggagtaaaaggacactctgagttagtgccc

SEQ ID NO: 444945 - DNA, 565 bp, Homo sapiens
tgttgctccaatatgtaacaggcacttctgtagggctggcatgagtcagtcagttcaagataacctgaaggagttgaataacatctatccagtgagtcctgcaagacttcaggccctttctcatccagcagctccctgctgagcctggaacagtgggaaaaagtaaagaataagccaggggaaatcagaaaccacacagccccagctagatttcatggctaacataaggaagagtttgaaaagaaaaaggacagatccattaatgaggtaacaaattattgyctttatgttgggatagaacagggccaggtagaaaacaatgaaagagaaagacagagagacagagacagagacagagacagagagaaagtgagctagtgaattggccaggtgacatactggtaagggagtaaaaggacactctgagttagtgccctcatgacacacagcaaactgcgatcatgaaaagagtgagctcaatagttttccataaaatatgctcaaaattcgatgcagtggccacgagagtacagcttttgaagtatggtcatcctatggtacgtta

SEQ ID NO: 444946 - DNA, 597 bp, Homo sapiens
actcaccatccatgtcaagagcccagccaacacgctgttgctccaatatgtaacaggcacttctgtagggctggcatgagtcagtcagttcaagataacctgaaggagttgaataacatctatccagtgagtcctgcaagacttcaggccctttctcatccagcagctccctgctgagcctggaacagtgggaaaaagtaaagaataagccaggggaaatcagaaaccacacagccccagctagatttcatggctaacataaggaagagtttgaaaagaaaaaggacagatccattaatgaggtaacaaattattgtctttatgttgggatagaacagggccaggtagaaaacaatgaaagagaaagacagagagacagagacagagacagagacagagagaaagtgagctagtgaattggccaggtgacatackggtaagggagtaaaaggacactctgagttagtgccctcatgacacacagcaaactgcgatcatgaaaagagtgagctcaatagttttccataaaatatgctcaaaattcgatgcagtggccacgagagtacagcttttgaagtatggtcatcctatggtacg

SEQ ID NO: 444947 - DNA, 516 bp, Homo sapiens
catgacacacagcaaactgcgatcatgaaaagagtgagctcaatagttttccataaaatatgctcaaaattcgatgcagtggccaygagagtacagcttttgaagtatggtcatcctatggtacgttagtaaatgataaggggaggaagaaatggaaacctaaacatctactgcaatgaaaaccaacagcaatgacagtaggagtaattcagccttcgttgaaaacatgaaatcaaacacactctggtttccctgaatctgttgcctccaggtgttaacacagaattaagcatccacaattgctgaaagttacctggggcatggtgggttttgatcttcttccccttcttttcttccccttctccttcttttcttcgttgatcttcttccccttcttttcttccccttccccttcttttcaatttctgcaataaattcagacatggacagacacattaagctgattcccctacacacataacaatccactgtctaatcctcacacagggacctcag

SEQ ID NO: 444948 - DNA, 516 bp, Homo sapiens
catgacacacagcaaactgcgatcatgaaaagagtgagctcaatagttttccataaaatatgctcaaaattcgatgcagtggccacgagagtacagcttttgaagtatggtcawcctatggtacgttagtaaatgataaggggaggaagaaatggaaacctaaacatctactgcaatgaaaaccaacagcaatgacagtaggagtaattcagccttcgttgaaaacatgaaatcaaacacactctggtttccctgaatctgttgcctccaggtgttaacacagaattaagcatccacaattgctgaaagttacctggggcatggtgggttttgatcttcttccccttcttttcttccccttctccttcttttcttcgttgatcttcttccccttcttttcttccccttccccttcttttcaatttctgcaataaattcagacatggacagacacattaagctgattcccctacacacataacaatccactgtctaatcctcacacagggacctcag

SEQ ID NO: 444949 - DNA, 516 bp, Homo sapiens
catgacacacagcaaactgcgatcatgaaaagagtgagctcaatagttttccataaaatatgctcaaaattcgatgcagtggccacgagagtacagcttttgaagtatggtcatcctatggtacgttagtaaatgataaggggaggaagaaatggaaacctaaacatctactgcaatgaaaaccaacagcaatgacagtaggagtaattcagccttcgttgaaaacatgamatcaaacacactctggtttccctgaatctgttgcctccaggtgttaacacagaattaagcatccacaattgctgaaagttacctggggcatggtgggttttgatcttcttccccttcttttcttccccttctccttcttttcttcgttgatcttcttccccttcttttcttccccttccccttcttttcaatttctgcaataaattcagacatggacagacacattaagctgattcccctacacacataacaatccactgtctaatcctcacacagggacctcag

SEQ ID NO: 444950 - DNA, 516 bp, Homo sapiens
catgacacacagcaaactgcgatcatgaaaagagtgagctcaatagttttccataaaatatgctcaaaattcgatgcagtggccacgagagtacagcttttgaagtatggtcatcctatggtacgttagtaaatgataaggggaggaagaaatggaaacctaaacatctactgcaatgaaaaccaacagcaatgacagtaggagtaattcagccttcgttgaaaacatgaaatcaaacacactctggtttccctgaatctgttgcctccaggtgttaacacagaattaagcatccacaattgctgaaagtyacctggggcatggtgggttttgatcttcttccccttcttttcttccccttctccttcttttcttcgttgatcttcttccccttcttttcttccccttccccttcttttcaatttctgcaataaattcagacatggacagacacattaagctgattcccctacacacataacaatccactgtctaatcctcacacagggacctcag

SEQ ID NO: 444951 - DNA, 534 bp, Homo sapiens
aatctacaaacccttgagtcaaaatcatagttctctgaatttgtcacatctgcccaggtccaatgtcatgagagtagaatcagagtgccacaggcatggcctgagactaggaagagagccatgctcactgacccatcccatgtcwgggcttccagttagaactagagtttcattcaacctacatgtgcctataggtcctcactgcagcaatgacatctctcagctcagtaatggccacttggagcaggaatatgatctttatatggaagactcagtggatccttatcaccttcatagaaaggtactcacctcccacgtcaagagaaaagccaacatgtttttcctccaatgcataaaaggaacttccatagggcaggcaggagtcaggctgttcaagacaactggaaggagttgaataacatctatccagtgagtcctgcaagacttcaggctctactgcctccagcagctccctgctgagcctggaaaaggaggaaaaagtaaagaataagccaggggaaatcagacacaaca

SEQ ID NO: 444952 - DNA, 517 bp, Homo sapiens
attcctcggtttttctcccagaaactgtgggtaaaatgtccctattctagtagatcgttatcccaatatcatttgtcccgagtttgtgcaaacagttatgccatatttttccaatcaatttaaagcaaataccctcaaatgatttctaggagaaaaactgcaatatttagccctgtctcatcaaatactcagattgttcatggttgtgaggactttagacactgaaattagagtgaaaaaggaaatctacaaacccttgagtcaaaatcatagttctctgaatttgtcacatctgcccaggtccaatgtcatgagagtagaatcagagtgccacaggcatggcctgagactaggaagagagccatgctcactgacccatcccatgtctgggcttccagttagaactagagtttcattcaacctacatgtgcctayaggtcctcactgcagcaatgacatctctcagctcagtaatggccacttggagcaggaatatgatctttatatggaagactca

SEQ ID NO: 444953 - DNA, 445 bp, Homo sapiens
agctgttcacaattgctcagttacctggggcatggtgggccttggtcttcttcctcttcctggtcctttttaattcctgcaatacattcagacagggacagacaaaataagccaattcacctacacccgtaacagtccactgtctaatccccacacagggatctcaggctcctcagcaagagaacaggacaatgtgagagatatacttcaggaggcctgaaagctggtcatgatattctttggtttgcatctcagaaccaagggtgaaatatccctattctggtagatcgttatcccaaaatcatttatcccaagtttgtgcaaacagttatgcctkattgttcccatcagttcaaagacaatgccccagatgatttctaggaggaaaactgcagtattcagccctgtctcatcaaatgcccagctcgttcatggatgcaagaat

SEQ ID NO: 444954 - DNA, 576 bp, Homo sapiens
atgaggtaatgaattattgcctttatgttgggatagaccagggccaggtagaaaagaatgaaagagaaagacagggagagggagagggagagagagacagaggagaaagtgagctcagcgaattggccgggtgacacactgatgaaggggtcaaaggacactctgagttagtgccctcgggacacacagagaacagtgatcatgaaaagagtgggctcaataattttccataaacttgcttaagattccrtgcagttgccatacagcctttgaggtatggtcaacctacagtaagttagtaaatgataaggggaggaagaaatggaaacctaaacatctactgcaaggaaaaccaacagcaatgtcagtaggagtaattcaaccttcgttgaaaacatgaaattgaacatactcttgttttccctggacctggcatctccaggtgtcaacacagaattaagcatccataattgctcaaagttacctggggcatgatgggtcttggtcttcttccacttcttggtacttttcaatttctgcaataagttcagacatggacagacatattaagctggt

SEQ ID NO: 444955 - DNA, 434 bp, Homo sapiens
agcttttgaggtatggtcaaccttcactaggttagtaaatgataagggtaggaakaaatggaaacctaaacatttaatctaatgagaaccaaaaagcaatgtagtaggcataatttagacttgtctgacaagacaaaatcattattttcagcatgtactgttttccctggacttggcatctccaggtgtcaacatcaaattaactgtccacaatttctcagactcacctgggacctgttgcctcttggtcctcctttttcacttgatcccaccgatgtcctgcaaataaattcagatggggcctcttacattaagcagttcttccttgcacacagaaacattcctctgtccaatcctaacacagggacatcagtctggtcagtgtgagaacaggagactttgagagaaatattccagtaggcctgaggtcaagt

SEQ ID NO: 444956 - DNA, 434 bp, Homo sapiens
agcttttgaggtatggtcaaccttcactaggttagtaaatgataagggtaggaagaaatggaaacctaaacatttamtctaatgagaaccaaaaagcaatgtagtaggcataatttagacttgtctgacaagacaaaatcattattttcagcatgtactgttttccctggacttggcatctccaggtgtcaacatcaaattaactgtccacaatttctcagactcacctgggacctgttgcctcttggtcctcctttttcacttgatcccaccgatgtcctgcaaataaattcagatggggcctcttacattaagcagttcttccttgcacacagaaacattcctctgtccaatcctaacacagggacatcagtctggtcagtgtgagaacaggagactttgagagaaatattccagtaggcctgaggtcaagt

SEQ ID NO: 444957 - DNA, 434 bp, Homo sapiens
agcttttgaggtatggtcaaccttcactaggttagtaaatgataagggtaggaagaaatggaaacctaaacatttaatctaatgagaaccaaaaagcaatgtagtaggcataatttagacttgtctgacaagacaaaatcattattttcagcatgtactgttttccctggacttggcatctccaggtgtcaacatcaaattaactgtccacaatttctcagactcacctgggacctgttgcctcttggtcctcctttttcacttgatcccaccgatgtcctgcaaataaattcagatggggcctcttacattaagcagttcttccttgcacacagaaacattcctctgtccaatcctaacacagggacatcagtctggkcagtgtgagaacaggagactttgagagaaatattccagtaggcctgaggtcaagt

SEQ ID NO: 444958 - DNA, 571 bp, Homo sapiens
aataaaactatccttctaaatacagggyggagggtgactgctctggggacagagcaaaaatgggcagcatgtgctcagtacatttgccacagatgagccaactcagggcacccagactctccctgtaaactaccatcatgacttgcagcacagagaactgacacagggcttcaactactttgcataaattgggttgagttttacatgcagcattcaagtgaagagagttcttgacgcagtgcagacacagatcttgtgtattaagggccccattttcccaatattttgatataatatatttaccttttcaatttcttttcttgcaaaaatactagccaacatactaccaacaaataggaagaaagcatatatacatctctccctggatttaaacacatgggagagaataggcaacaccaagaaatccctgtttgagggtctggagtggacttccagcaaactccaacagacctgaagctgagggacctgattgttagaaggaaaactaacacacagaaaggaatagcatcaacatcaacaaaaaagacatccatcccaaaaccccatctgt

SEQ ID NO: 444959 - DNA, 571 bp, Homo sapiens
aataaaactatccttctaaatacagggtggagggtgactgctctggggacagagcaaaaatgggcagcatgtgctcagtacatttgccacagatgagccaactcagggcacccagactctccctgtaaactaccatcatgacttgcagcacagagaactgacacagggcttcaactactttgcataaattgggttgarttttacatgcagcattcaagtgaagagagttcttgacgcagtgcagacacagatcttgtgtattaagggccccattttcccaatattttgatataatatatttaccttttcaatttcttttcttgcaaaaatactagccaacatactaccaacaaataggaagaaagcatatatacatctctccctggatttaaacacatgggagagaataggcaacaccaagaaatccctgtttgagggtctggagtggacttccagcaaactccaacagacctgaagctgagggacctgattgttagaaggaaaactaacacacagaaaggaatagcatcaacatcaacaaaaaagacatccatcccaaaaccccatctgt

SEQ ID NO: 444960 - DNA, 571 bp, Homo sapiens
aataaaactatccttctaaatacagggtggagggtgactgctctggggacagagcaaaaatgggcagcatgtgctcagtacatttgccacagatgagccaactcagggcacccagactctccctgtaaactaccatcatgacttgcagcacagagaactgacacagggcttcaactactttgcataaattgggttgagttttacatgcagcattcaagtgaagagagttcttgacgcagtgcagacacagatcttstgtattaagggccccattttcccaatattttgatataatatatttaccttttcaatttcttttcttgcaaaaatactagccaacatactaccaacaaataggaagaaagcatatatacatctctccctggatttaaacacatgggagagaataggcaacaccaagaaatccctgtttgagggtctggagtggacttccagcaaactccaacagacctgaagctgagggacctgattgttagaaggaaaactaacacacagaaaggaatagcatcaacatcaacaaaaaagacatccatcccaaaaccccatctgt

SEQ ID NO: 444961 - DNA, 571 bp, Homo sapiens
aataaaactatccttctaaatacagggtggagggtgactgctctggggacagagcaaaaatgggcagcatgtgctcagtacatttgccacagatgagccaactcagggcacccagactctccctgtaaactaccatcatgacttgcagcacagagaactgacacagggcttcaactactttgcataaattgggttgagttttacatgcagcattcaagtgaagagagttcttgacgcagtgcagacacagatcttgtgtattaagggccccattttcccaatattttgatataatatatttaccttttcaatttcttttcttgcaaaaatactagccaacatactaccaacraataggaagaaagcatatatacatctctccctggatttaaacacatgggagagaataggcaacaccaagaaatccctgtttgagggtctggagtggacttccagcaaactccaacagacctgaagctgagggacctgattgttagaaggaaaactaacacacagaaaggaatagcatcaacatcaacaaaaaagacatccatcccaaaaccccatctgt

SEQ ID NO: 444962 - DNA, 596 bp, Homo sapiens
aaacaaattcaaaagctagcagaagacaagaagtaactaagatcagagcagaactaaaggagatagagacacaaaaaacccttcaaaaaatcaatgaatccagggctggttttttgaaaagatcaacaagaaaaccctgtttggctagttcacctggctcatctgatggcaagttcctgtcttgagaggactatgaaattaaacccaatacaagtgccacaaataacatacaacattgtaaatcagcacaatttgtagctgggtgaatggaagaaatagttctattcatcacttcctcattttccctawatctacaatctccagatgtcactactgaattaacagccaacaattccacaacattacctgggagacactggccctttttcttcctcttcttcatcatcactttcattttctgtaaataaattcagagaagcaggtcacattaagcaattcatacttcacatatgaccaaatcactgtccagtcatagcacaaggacataactattctcagtgcaagaataaggattctgacaggaatattctagggtgccctagattaactttggtgagaattagatgaccctgctt

SEQ ID NO: 444963 - DNA, 480 bp, Homo sapiens
tttctgtaaataaattcagagaagcaggtcacattaagcaattcatacttcacatatgaccaaatcactgtccagtcatagcacaaggacataactattctcagtgcaagaataaggattctgacaggaatattctagggtgccctagattaactttggtgagaattagatgaccctgctttccagacccayaggccaaaatctccctctacgtgtacaccataatgccatattccctgcctgagtcaaagttaaacaaaattttttccccaaaaaaatctccaaaaattggtccattttctaagagtgttgctgcaatacggacttatatcaccagataacatggacattaaatgtttagaggcatctatacatgaaacacgactgatagataaatttgaacaactcttgctttaaaaagaatctgtgatttgggaggccaagacaggtgaatcatttgaggtcatgagttcaggacta

SEQ ID NO: 444964 - DNA, 480 bp, Homo sapiens
tttctgtaaataaattcagagaagcaggtcacattaagcaattcatacttcacatatgaccaaatcactgtccagtcatagcacaaggacataactattctcagtgcaagaataaggattctgacaggaatattctagggtgccctagattaactttggtgagaattagatgaccctgctttccagacccataggccaaaatctccctctacgtgtasaccataatgccatattccctgcctgagtcaaagttaaacaaaattttttccccaaaaaaatctccaaaaattggtccattttctaagagtgttgctgcaatacggacttatatcaccagataacatggacattaaatgtttagaggcatctatacatgaaacacgactgatagataaatttgaacaactcttgctttaaaaagaatctgtgatttgggaggccaagacaggtgaatcatttgaggtcatgagttcaggacta

SEQ ID NO: 444965 - DNA, 586 bp, Homo sapiens
cctaaaatggggatgacaagtctcttggctggatgaccataaaggtgatactagtgggctaggggagctccccaaatgcccataggactttgactcctgctggtgtccaggatcttgacacgattgcaagaaggaattcaaggaagagttggaaaatagtgaaagtacagagatttattccaaagcaaaaagtacacaagaaagggaagtgagagtgtcctggggagaaattcacatccaatgaaatttgaggcttctattcttataggtttctttatctaagtggtgaaatattcataaagatttctggaaaaggctgcatgtggtggctcatgcctgtaatcccagcactttgggaggctgaggtgggcagatcacctgaggtcaggagttcaagactagcctggccaacatggtgaaaccccgtctctactaaaaatacaaaaattagccaggcgtgttggtgggcgcctgtaatcccagctacttgggaggctgaggcaggagaatggcatgaacccaggagrtggaggttgaagtgagtggagattgtgccactgcactccagcctgtgtgacagagtgag

SEQ ID NO: 444966 - DNA, 611 bp, Homo sapiens
agaaaatctcaagaatagttttgttttagtgggaaatgtaaaactaaattaagcagttacagagattaacagctcaggacccatttccttactagcatattaacactgaagaaaagtatcagaagatgatgaaaagataagggtagattttttttttcaaatgagtaaatgtgtcacacctaaacaagaaagggtcttattcagaaaccattctgtaaaacatgtactttgtctgctctacatactctgcatgccaaaatcttggctgaaattttctactgtatcatcccagttgagatattatatttaatgccatttagaaaaattatttttacatattatttttaaataatagtaaaaaaattcagaatgactaaatgaataccttaaaataaattatacagatagctaaacaaataatttagaacatggttttctatactgttctagaggaacttacaagtctcctataaaagacaagccaaraccgtggtcttggtatcaaatgtaaatgaaattgttatatttataagaccgcattatcctaaaccacataataagtgcaaataacatagttgttctattgcattatatattgaggcatttgactc

SEQ ID NO: 444967 - DNA, 600 bp, Homo sapiens
ggcttgaccatctcacagctgctcacgtgatgaccatattcgtggcaggtaaaaagattgctgtatcaactcaagaaagcagtagcctcactgtctttgtattttgaattgcaacaacaactttgatatcaacaatgaagcaatggtatctaagaayaaaagagcatttgccaaaagtcatcataatatcaagtgattgtataagcagaaacaagctgtcacagacctgtgtgtcagctaacataaggagaatgctttcttctgatgctatttatttacaggcagttttaatatatatcacttcaattatatctacatcaaataaaataaaaaattagtgaagcccccagattcttcattggaccagaagacacagaaataaatcctggaaattatcaacatttcttccaccatgcagatgaagatgatgaggaggaagatgattctccaccagaaaggcagattgtggttggaatatgttccatggcaaagaaatccaaatccaaaccaatgaaggaaattcttgaatgggtctccttatttaaatatatcacagtagtggtatttgaagaggaggttattttgagggaaccagtggaa

SEQ ID NO: 444968 - DNA, 608 bp, Homo sapiens
attttccctgtatcaagcataggttgattatcatggaacaaaagtaaagaaggctttattaaaacatgaactatagactggtagaacaataattttgttttgttttgttttaaattgacagataaaattacatgtgtttatcacagtatgttttgatgtatacatacattgtggattcacctaatctagctgattaacgtatgcattacctcacatagttatcattttgtggtgagaacacttaacatccactatcttagcatttttcaagaatacagtatattgttattaactataaccatgttgtatgatagatctcttgaagttattcctctcatctaactgaaattgcatatcctttgaccaacatctttccaactctcttccccccatccacctcagcccktggaaatcactcatctactctccagttacatgaatcaacttgtttagattccacatacgtgtgagattatgtgataattgtgctcctgtgcctggcttatttcacttaacacagtgtcctccaggttcattcatattgttgcaattggcagaagatatctacattctgatgtttattgcagcactattcacaacagccaaga

SEQ ID NO: 444969 - DNA, 615 bp, Homo sapiens
gctcatgctgtactataaaagctttaagaacagaagcataatatgctttgctcagagtaatgtgaagataaccaaggcatcaatgtgaagatggattagagaggtgaaagaatggagtcagggagatcaattaagtttcaaggagaagaaattaaaagaattaaagttaaaagtggygttgctagaacagagagaagggactgagctaatgaaaaataagcccagggaagcaataaagatttggctagaaaaggcaggctgagaggatgtacatggaaaagaaagcaaatagaattcatcaaaaattatatatttggcttattttcttgcagccctctgtgtgcatggcttgagtatagagaacaacggcaagagcaacacaagagtaggctggaaagagtcatgagtcagatcattcctgtgtaggcatcttgagtgtttgaactgtttttctatgagcaatggaacaccattgcaggtatattagcaggagagagagagatggtcagcctcctcccttcctcacatctttgttaattctggctggattccataacacactacttcttgtttcttatgaatctcttaaactctgtgccctgttctccttctctc

SEQ ID NO: 444970 - DNA, 615 bp, Homo sapiens
gctcatgctgtactataaaagctttaagaacagaagcataatatgctttgctcagagtaatgtgaagataaccaaggcatcaatgtgaagatggattagagaggtgaaagaatggagtcagggagatcaattaagtttcaaggagaagaaattaaaagaattaaagttaaaagtggcgttgctagaacagagagaagggactgagctaatgaaaaataagcccagggaagcaataaagatttggctagaaaaggcaggctgagaggatgtacatggaaaagaaagcaaatagaattcatcaaaaattatatatttggcttattttcttgcagccctctgtgtgcatggcttgagtatagagaacaacggcaagagcaacacaagagtaggctgraaagagtcatgagtcagatcattcctgtgtaggcatcttgagtgtttgaactgtttttctatgagcaatggaacaccattgcaggtatattagcaggagagagagagatggtcagcctcctcccttcctcacatctttgttaattctggctggattccataacacactacttcttgtttcttatgaatctcttaaactctgtgccctgttctccttctctc

SEQ ID NO: 444971 - DNA, 555 bp, Homo sapiens
gggggtacaggcattgggtaaatgtttccattccaaatgggagaaattggccaaaacaaagaggccacaggccccatgccaatctgaaacccagtggggcagtcattaaatcttaaagctctaaaatgatcttctttgactccatgcctcatatccagcacacactgatgcaagaggtgggttcctacagcctcagacagctccacttctgtgactctgcagtgtacagtccctgtggctgctttcactagctggcattgagtgcctgtggcttttccaggtgcacagtgcaagccgttggtgtatctaccattctagggtmtggaggatggtggccctcttcttacagctcccctaggcaacattgccctctgcattgccctcccctctgcattgccctaatgaaggttctccacaagggttccaccccagcagcagacttctgtctggacatctaggtgtttccatacatcctttgaaagctaggtggaggctcccaaagctcaactcttgccttctgcacaactgtaagcccaacaccacgtgaaagctgca

SEQ ID NO: 444972 - DNA, 467 bp, Homo sapiens
aatgaacttatggccaatatttgccaattaattccttcgaatatatatgtagctttaagatccctctagaatcaggacctaagatttatggcttctgaagataaaggtgttcacagcattccttgtttaataactactctcactgccattgacttaagacatttgggaaatctcagagaaatccagtagaaaggatggccaaaaagagctctgaggggatttcttggccctctctggcctccaaagcactttctaactattctcagaagagcctggagagattgtcartaagacagggacaggaaagttactgttgaaaactcttagagatgctgatgatagaatcgttgatgttcaagaaatattttttctttgatgtttatgagtttatttgctttctacttttctttttcaagccttttgcttcttctgctttttgcatgacatgtcctctatttatgtgaaat

SEQ ID NO: 444973 - DNA, 494 bp, Homo sapiens
gaatgaaactgactgggggctctgggtacgggagatgtttcttgaccggcatcctctgccttttgcttcatgactagggcactgatcattaagcctgagaatccctaattactaggatgaggagggctttaattagcacattaacgtactgtcttatttttttctagtatgatcagagaagatagcccacatttttttcgttcagtgttaagtgcctggttttaggcagtcttacttccaggggtgggaaagggctagtatgtgtgctttctattccataaaccaggggtcagcaaatttttttctgtgaaagccagatagtaaaaatttaggcattgcaaactacatatagtttctggcacaaattctcattttataaacaatgctttaaaaccrcaaaaactgcaaaaataggtgttgggatatagtataccagtctctgcaaaacagacttgcatcagtccctccctcttcagcctcatgtttcactgtca

SEQ ID NO: 444974 - DNA, 588 bp, Homo sapiens
atacaaaaattagctggacatgttggcatgcacctgtagtcccaagctacttgggaagctgaggtgggaggatcacctgagcctgggaggtagaarctgcagtgagccatgattatgctgctgcactccagcctgggcaacaaacagagaccctgtctcaaaaaaaaaaaaaaaaaaaggtagagatgaatgtgtcattgggcttaaagtcatgaaaggttatttgaagatgggtggttagggatgaattcaggaggaggtgacatttgagttgggtaaaagggaagtcaatttgaagataaagtgatggggctggacgttcctagggaagaaacagaataagcacagtcccttttcaggtggcatgtgaagaggaatggttcactcaggagaagccttacctgcctaagtgagggaaggcaacattatgtgaagcaagtgtaagtacatacaaaaacccagacatgtacacaggattaattaaaattgtaaggagatgctcatataaatattgatggagattggtgataaatgattcatataatcaggaatttggatttgatgtggaagcaaatgggagccattaga

SEQ ID NO: 444975 - DNA, 506 bp, Homo sapiens
tgcccttgcaggagaaattttgaaaaggagggaatgaagtttttaaaatcaagcagaatatwttgaattaagtagttttttatttcagagacttctagaggggattagtacagctttgagccacttttctctatctctaaatctaaagttcccaggatactatttctaagatgaggactctgagatcttataagctgcttagtcattccaaagagatgcaatttttcttattgtactagatttactaagacagaaaagtagactgattcattacacaatagaaagaggctgactgcctttggaaggagtacttttccttctaaaatgcttaatccatcctattgtcaggctaaaaattgtgggagatggcatttactgggccaccctgattcttctgtagagtagaacctggaaggttttggtggctaaatgagtacctctaaacaggtgaagatggactgtgtgggtgctaagagaaccccaactgctgaattttgaacatgatg

SEQ ID NO: 444976 - DNA, 459 bp, Homo sapiens
attacctttgcttactttattttcctttgtcctttagagttttctgttatttacaggttcaaaaggttagaaatatgactattttctgtattcattatcatatcttctatctttttgatctctttatcttctctttttgtattttagaagtcttgtaatttgtatcattaattctatttgctcaactcttgagctccttcaggctggggattatgtctaattctaatttgtatagtaagtgctatccttctctcatgttatacatttttaaataggttccatatttgtttttyccctaataattcaaccctcaaaacagagatatttggcttttataatttactgaagtgttggcagaaaccctttcattcatctatgaaggtgaaagatgtatatagagaatttagtaaagctcctggtatgtttgagactcaatttctgtcctcaagactgtgaaga

SEQ ID NO: 444977 - DNA, 459 bp, Homo sapiens
attacctttgcttactttattttcctttgtcctttagagttttctgttatttacaggttcaaaaggttagaaatatgactattttctgtattcattatcatatcttctatctttttgatctctttatcttctctttttgtattttagaagtcttgtaatttgtatcattaattctatttgctcaactcttgagctccttcaggctggggattatgtctaattctaatttgtatagtaagtgctatccttctctcatgttatacatttttaaataggttccatatttgttttttccctaataattcaaccctcaaaacagagatatttggcttttataatttactgaagtgttggcagaaaccytttcattcatctatgaaggtgaaagatgtatatagagaatttagtaaagctcctggtatgtttgagactcaatttctgtcctcaagactgtgaaga

SEQ ID NO: 444978 - DNA, 488 bp, Homo sapiens
  misc_feature (1)...(488): n = A,T,C or G
aaagaaaagaaaaaagaactcaagaaaaatagacagatggacaaatgaataggaagtttaattgaaaakattgtgtctcaagaccagatacctttctattggtctgcttcctcttcctcttcttcttcttctcacttcttcttttgttggagtcttactctgtcacctagactgtagttcggtggcgtgatcttggcttactcttggctcactgcaacctccacctcctggattctagtgattctcctgccccagcctcccgagtagctgggattacaggtgcgttgtaccacacccagctagtttttgtatttttaatagagatggggttttgccatgttggccaggctggtcttgaactcctgacctcaggtgatctgcctgcctcagcctcccaaagtgctgggattgcaggcatgagccactgtgcccagccaattggtctgtttcttcacacagnnnnnnnnnnnnnnnnnnnnnnnnnnnnn

SEQ ID NO: 444979 - DNA, 488 bp, Homo sapiens
  misc_feature (1)...(488): n = A,T,C or G
aaagaaaagaaaaaagaactcaagaaaaatagacagatggacaaatgaataggaagtttaattgaaaagattgtgtctcaagaccagatacctttctattggtctgcttcctcttcctcttcttcttcttctcacttcttcttttgttggagtcttactctgtcacctagactgtagttcggtggcgtgatcttggcttactcttggctcactgcaacctccacctcctggattctagtgattctcctgccccagcctcccgagtagctgggattacaggtgcgttgtaccacacccagctagtttttgtatttttaatagagatggggttttgccatgttggccaggctggtcttgaactcctgacctcaggtgatctgcctgcctcagcctcccaaagtgctgggattgcaggcrtgagccactgtgcccagccaattggtctgtttcttcacacagnnnnnnnnnnnnnnnnnnnnnnnnnnnnn

SEQ ID NO: 444980 - DNA, 548 bp, Homo sapiens
tacctgtaatcctagctactcgggaggctgaggctggaggattgcttgagcccaggaggtcgaggttgcatgtgagccgtgattatgccactgcacttcagcctgggtgacagtgagatcttatttaccaaaaaaaaaaaaaaaaaaaaaaaaaaggctcctaggatccaggacattctttttaagtaatcctccccaaggaatataattataacaagttgatagttacctattttttattagcccagtgccacttccacagtaaaacctattatcttatacctggagtgatataacttgtttaaaaatttataatttttaataggtaattcygttgttgtcttaatgagatagcaatgtgtttagcagaaacatggcaatagacactcttagaggatttaaagtttcacaaatggcaaattatttggaagtgaataaattagttatataaaataagagacaaccagaatgcttccaggtgaaaattcaggctttctaagagaccccagtctgggagcatgcttgctatcttctgctttgtgaaaaca

SEQ ID NO: 444981 - DNA, 413 bp, Homo sapiens
aatcctactgatttttgtacattgattttgtatcctgaaactttactgaagtcttttattagttccaggagccttttggtttagtctttagagttttctaggtgtagaattgtatcatcagtgaagagagataatttgactttttcttttcctatttagatgccttttatttctttttcttgcctgattgctctggcaaagtattccagtactatgttgaataggtgtaatgcgagtgggcatccttgtcttattccagttctcttctcaaggggaatgctcccagtttttgcctattcagtaagatgttggtggtgggtggatttgtcataggtggctcttactgaggtatattcttttgatrtctagtttgttgaggttttttatcatgaagggatgttggattttatcaa

SEQ ID NO: 444982 - DNA, 550 bp, Homo sapiens
gacagtgaagtcctttactattgttgtattgcagtctacttcttccttttgatctattaatgtttactttatttgtttcagtgctccaatgttgggggcatatatatttataatttttatattttcttaytgaattgaccccttaattattagatggtggccttctttgtctctctttgcagtttttgacttgaaatctatttgatctgatgtaaatatagctattcttgctttttaaaaatttccctttttatggaatatccttttaaacccatcacttttttttttttttttaagaaagagtcttgctcagtcactcaggctggagtgcaatggtgtgagcccagctcactgcaacctccagctcctggctcaagtgattctcccacctcagcctacctagtagctgggtctacagacatgtgccactatacctggctaatttttgtattttttgtagtgacgcagtttcaccatgttgcccagactggtttcaaactcctgagctcaagtgatcaaccaaccttcatctccaaaagtgctggtatta

SEQ ID NO: 444983 - DNA, 550 bp, Homo sapiens
gacagtgaagtcctttactattgttgtattgcagtctacttcttccttttgatctattaatgtttactttatttgtttcagtgctccaatgttgggggcatatatatttataatttttatattttcttattgaattgaccccttaattattagatggtggccttctttgtctctctttgcagtttttgacttgaaatctatttkatctgatgtaaatatagctattcttgctttttaaaaatttccctttttatggaatatccttttaaacccatcacttttttttttttttttaagaaagagtcttgctcagtcactcaggctggagtgcaatggtgtgagcccagctcactgcaacctccagctcctggctcaagtgattctcccacctcagcctacctagtagctgggtctacagacatgtgccactatacctggctaatttttgtattttttgtagtgacgcagtttcaccatgttgcccagactggtttcaaactcctgagctcaagtgatcaaccaaccttcatctccaaaagtgctggtatta

SEQ ID NO: 444984 - DNA, 582 bp, Homo sapiens
atttgtgtgtgtacttacttttaccagcgaattttatgccttcagattatttcttgctacatgtaagtgtctatttctttcagaataaagaactgcctttaccatttcttgtaagacaggtctggtggtgattaattctcctagcttttgtttgcctgagaaagtctttattttgtcttcatgtttgaagaataactttgctggatacagtatactcagttggaagtttttcccttcagcactttgaagatgtcattccactttctcttggcctataaaatttccactgagcagtctgttgcyagatgtataggaactcctttatatgttatttgctttttttctcttgctgctttaaggatttccctttaactttgacctttggagcttgattattacatgccttggggtagtcttatttggtttgaatcttctttgtattctttgaccttcttatacctggatatttatatctttctctaagttgaaagttctctgttactatttctttgaataaactttctaatatatttttttctacctctctttcccttctggcctggcccaaagggttgtatggaa

SEQ ID NO: 444985 - DNA, 582 bp, Homo sapiens
atttgtgtgtgtacttacttttaccagcgaattttatgccttcagattatttcttgctacatgtaagtgtctatttctttcagaataaagaactgcctttaccatttcttgtaagacaggtctggtggtgattaattctcctagcttttgtttgcctgagaaagtctttattttgtcttcatgtttgaagaataactttgctggatacagtatactcagttggaagtttttcccttcagcactttgaagatgtcattccactttctcttggcctataaaatttccactgagcagtctgttgctagatgtataggaactcctttatatgttatttgctttttttctcttgctgctttaaggatttccctttaaytttgacctttggagcttgattattacatgccttggggtagtcttatttggtttgaatcttctttgtattctttgaccttcttatacctggatatttatatctttctctaagttgaaagttctctgttactatttctttgaataaactttctaatatatttttttctacctctctttcccttctggcctggcccaaagggttgtatggaa

SEQ ID NO: 444986 - DNA, 563 bp, Homo sapiens
tcaggggctttgggattctgcccaatgctgtgctttactgtgactgggctggtacctggttgcaagacaaaatttcttrtactcttcccttttcttccccagttggaaggagtgtctctctgtgctgcattgcccagagttgggagtcctggcaacacaggcactcccatggctgccaaagctggtttcatgctgggttgtacccctagcacacagattctaagatcagtgtagtacgagagcttgcatgaagaccacagttactatggcctggatgcagctgaaatgtatctggggaccaaggccactttaggaagctggtagtgaagccagtcaggacccactttcctcttgctagacatcagattcccctctgccccagggctagcctaaatactcccttcctgggcacctgaagaattcttcctggtgctgcatagctttatttatttattttttaacttttatttaggtcagggtacatgtgcagggttgttacacaggtacattgtgtgtcatgggggattggtgaacagattattttgtcacccaggtaataagca

SEQ ID NO: 444987 - DNA, 563 bp, Homo sapiens
tcaggggctttgggattctgcccaatgctgtgctttactgtgactgggctggtacctggttgcaagacaaaatttcttatactcttcccttttcttccccagttggaaggagtgtctctctgtgctgcattgcccagagttgggagtsctggcaacacaggcactcccatggctgccaaagctggtttcatgctgggttgtacccctagcacacagattctaagatcagtgtagtacgagagcttgcatgaagaccacagttactatggcctggatgcagctgaaatgtatctggggaccaaggccactttaggaagctggtagtgaagccagtcaggacccactttcctcttgctagacatcagattcccctctgccccagggctagcctaaatactcccttcctgggcacctgaagaattcttcctggtgctgcatagctttatttatttattttttaacttttatttaggtcagggtacatgtgcagggttgttacacaggtacattgtgtgtcatgggggattggtgaacagattattttgtcacccaggtaataagca

SEQ ID NO: 444988 - DNA, 575 bp, Homo sapiens
ggcagacaagccagaccctgaaggctgatgaaaatagccaaattcaacatataatgacatcaatgatttaatcctttcattaccaagagtatcaaagaccattcacattagtagacaaaatcttaaaaaactggaggtggacctagaatttatattatactatatgatcaagctgtttccaaaaaccaaagctcattgtctaaaaattgaacatggagyctgttaaaattgttccttgtgagtcttggttgaaagaaatggtggaggtaactaaatgaactggcttatactcaaaaggcttaagccattatggtccactaggtaaaatatataaaaatgccaaatagttaatgtcactattaggaccaacaattgttggttaaagctgcattgtcagcaatgaagaatgtaattttagaaatataatgaaaactcttctatgataattcataaaaataatgtatatggaataagatgatgtgggaaaggggtacagtattccaaaataacacttgatcccaggtagtactgtttgatatttcttcccacaaatcctcagtgttggaggtggggcc

SEQ ID NO: 444989 - DNA, 591 bp, Homo sapiens
tctcccatcatttccttttctctacaatttatctgctaaggaatctgggcccttcattattaattattgcatgagctggactcagtagcaatcaggaaacagcttcatttttctcccatcactgcattcagacattctgtcaggtctcccctcctctagccttgacagtgtctctttcagatttcttttcatgataacaattttgtcatccagtattaaaaagttcagtcttgtctaactcaaagcattaatctaatacttgatttggagcgtcccctcctgtcagctcaggaatgactcagtgtgaggggaagagaagctgtgagaagacataggggaggactctgttctggttttttatactcctttcttctctccctatcccaccctcaaccttgccctttccatttctgaatcctgggagatggcagggatcaaaaaaggagctaatttataactctcatttgactatcagatgccctctgtcatagcagccttccaaatattggatctcattaagtacatttgcagattcttgggagactctcaacaagttcctatgccctacaygtttcctacaatagacaatga

SEQ ID NO: 444990 - DNA, 590 bp, Homo sapiens
aattgcctttccaacaagttcccaagtgatgctgctccagggatgacactttgagaaccactacctaacaaaaactttaatcatatttgtgatggctcattttacaggtcaacttgactggtccacagagtgcccagacacttggttaaacattattctggatgtatctatgagggtgtttctggatgagattaacattcaaatctgtagccaaagttaagcagattgtcctgcctaatatgggtgggcatcatccaatcctttagagrcctgaatagaacaaaaaggagaagtaagggagaatctgctttctctgcttgtttttgagctgggatgtcagtcttctgcatttagactgtaactataccaccagcctctcttctgggtctccaatttgcagacagtagataggggatttctcagtctccaaaacagaagagccaatgccttataaatctctttctgtatgtatatatgtgtgtgtgtgtgtgtgtttgtgtgtatctgcctgtgtgtgtcctactgattctgtttctctggcgaaccctaatacaatatttaagaaattatatatatatataaaatttaaa

SEQ ID NO: 444991 - DNA, 586 bp, Homo sapiens
ctctgttctaggccctagctgacagatgacaattctagacataccctgggccagaaggtaatctgctgccttaatggaaaaaatccagtcttgccagcattcatcacctgctagctacctaaataaccagtagcaataccyaggtactacatcaagggccttggtaagcctctgagacttgctggcttcaagtaccaacactgccacagaggcatacagcaccagtgagctcttggggtccccaattccaggacttgactcttggacagcatttctgaacctgccctggggcagagaggagcccagtgccctgaggggagtctagtctgaggctaaacagcattcacacaagctgacttaagagtccgtgggccttaagggaacatggctgatagtctggcagtagtcctcatggccaggggtggtggtggctatggggtgaggttcctctgcctttggaaaaggggaagaaagagtgggaaggactacatcttgcagtttgagtgccagctcagcaacaataaatagaaaatcagatagactcctaaggtttttgattctagtgcctgactcccagatagcactt

SEQ ID NO: 444992 - DNA, 573 bp, Homo sapiens
tgttttcctaatgattcctgagacattggtctgacaatgacagttctcaaaattctcagcctcaaaacaaacaaaaactcaattttcagaaatacaagatgcagcataaaaactcattaaatagggccaactgaaggaagtctgaacttgtgaaaattctgaatattcaaaagttattccagtcctttaatacaagcaattggctaaagaaactactcattrgacttcctcaaagatttgctttagtaaatgattatttctaattagtatacttttctaccatttactgctgttaaaaatttgaaaatgggttgttttcccaaataggttaaataggttaaatgcctctcttgacctcggtcaacttatttataatctattatttgcctacgcttcattatacctaaggtatttattcaggcagtgagagtttacagaagttaaaacatagggagccttggtcttagaattagtcaagtgaaggctatgtccttcttttgtcttagtaatgtttccataaatcattaaatacaagttggtgtgtaggaagtgtgataattattcaatgcagtt

SEQ ID NO: 444993 - DNA, 573 bp, Homo sapiens
tgttttcctaatgattcctgagacattggtctgacaatgacagttctcaaaattctcagcctcaaaacaaacaaaaactcaattttcagaaatacaagatgcagcataaaaactcattaaatagggccaactgaaggaagtctgaacttgtgaaaattctgaatattcaaaagttattccagtcctttaatacaagcaattggctaaagaaactactcattagacttcctcaaagmtttgctttagtaaatgattatttctaattagtatacttttctaccatttactgctgttaaaaatttgaaaatgggttgttttcccaaataggttaaataggttaaatgcctctcttgacctcggtcaacttatttataatctattatttgcctacgcttcattatacctaaggtatttattcaggcagtgagagtttacagaagttaaaacatagggagccttggtcttagaattagtcaagtgaaggctatgtccttcttttgtcttagtaatgtttccataaatcattaaatacaagttggtgtgtaggaagtgtgataattattcaatgcagtt

SEQ ID NO: 444994 - DNA, 573 bp, Homo sapiens
tgttttcctaatgattcctgagacattggtctgacaatgacagttctcaaaattctcagcctcaaaacaaacaaaaactcaattttcagaaatacaagatgcagcataaaaactcattaaatagggccaactgaaggaagtctgaacttgtgaaaattctgaatattcaaaagttattccagtcctttaatacaagcaattggctaaagaaactactcattagacttcctcaaagatttgctttagtaaatgattatttctaattagtatacttttctaccatttactgctgttaaaaatttgaaaatgggttgttttcccaaataggttaaataggttaaatgcctctcttgacctcggtcaacttatttataatctattatttgcctaygcttcattatacctaaggtatttattcaggcagtgagagtttacagaagttaaaacatagggagccttggtcttagaattagtcaagtgaaggctatgtccttcttttgtcttagtaatgtttccataaatcattaaatacaagttggtgtgtaggaagtgtgataattattcaatgcagtt

SEQ ID NO: 444995 - DNA, 577 bp, Homo sapiens
cataaatactgatgactatatctttccctatttcactgtacattaatttaacagtctgctactgaaatactgctgttggttaagcacagagttaactatttaaaaatattcttgtctttttaacccaatttctttcaaggatataattaatccagttaagaccgttcttaaaatatgtgcaggtcatgatagaaatgtcacttgtcaactctctgatgcatttcagatctgctctgccactatagagttccagrcagacaggaaacattgtaaatcactgaagaaacatacaagttaagaactgtgattttgttacttaaaattactgaaaaatagacaaaattcaagcatatatcaggagcgtaaatgtagaaatctgtaagcatttacccagaaaggtgcagatcattaaactaataaagctaactcatattcagtgcccaaggatatatcaaattttgtaaaaacaactttaagtcaccggaggcaaggagagctccaagttagcacaaagaatgttgatttcaccggggtgtggtgactggggataggcacacctggcaaaactccattctgt

SEQ ID NO: 444996 - DNA, 422 bp, Homo sapiens
tgtgtgacacagcacgggagcttggaggggccccaggccaaggcagggaccagccacacaggagccttgaccagtgagggatggcgagtggcgaggcccggcaggaagggactggggtggcaagacaggctgagcggtccgagaacagcctgttccgtgggtccctgaggcccatggtgagggggtracgggaggggacaagcatggagtccaagctctctcccctaaaagagctgccagtgaggctgtgagcccctgccctggagatgggcaagcaggcccaatgccctcagccccacttcacaggggtgctctgggctggcagcaggctgcggccgggggtgtggggagggatgcgggacactgtgggtgatcacagggggtgctctgtcagattcccggcgtcccagcctccaggtctg

SEQ ID NO: 444997 - DNA, 547 bp, Homo sapiens
aggacacgggggaggggggctgattccagccaacccacagcaggcctccaccccaggagccagaggggatgcgctctctagcctcttccacagccctcccgggggtggtgggctgggtttgacggagggtctcggggctgtgtgcagggctgttaccggcaggtgctgggaggtggggggtggctggggcaggacgggaaggtcactctagcctgaggataatttctactttatttcacaattccaaaatgaagagtgattttcttgcttcttgtttgagctgggctgtgacatgtgcttcctctcgaagagccagtggatttgatgagaagcaccgagagcaccgcccggctcccggcatctgcgaggcctcgcacaggtcctgttctgacggcagcgctgatcaacgctctccacaaaccccacgagggtcggaggcgtccgcatcacctgccygcatacggggaagggctgggaggctgcagggctgagtcaccgccgggcacccactccctgccagcccccgggaaggacaggggcagacgcg

SEQ ID NO: 444998 - DNA, 610 bp, Homo sapiens
aaagggagacacaccccttcagtcaaagccttgataarataaccagttttccaactgtgtcctgttgacaaagaaaaattgattcttattgcactgatgcaaacaactgtattgccataagagtacttacagatagtctccaaattctagaggaatcaggcggagaaaaatgaacatgctccaaattttgtttacaggagtataccttactcaattattaaaggctgtaaatagtttaaaataagtttccttgactctgaaaaactaaacaaggatcagcaatattccaagcgaaagttaaaaagtttgctttaactttctgagtgcagtccacttagttaaattttgttttgcttgatatttgtgaacatgtcagttttttaggagtcctgtagattctccctctatttcagtgttacaatcttcaaagctattacaaacctgcatttgagaacacctgttaaagtccttaatatagcttgattataaaccatcttttgagaaggaacaaagcaagacaacaattgtctgtgaatggcaacattcccagatagttaacagttaaaaacatgactggcaaagaactttatttatcttcgtggtttacaat

SEQ ID NO: 444999 - DNA, 610 bp, Homo sapiens
aaagggagacacaccccttcagtcaaagccttgataagataaccagttttccaactgtgtcctgttgacaaagaaaaattgattcttattgcactgatgcaaacaactgtattgccataagagtacttacagatagtctccaaattctagaggaatcaggcggagaaaaatgaacatgctccaaattttgtttacaggagtataccttactcaattattaaaggctgtaaatagtttaaaataagtttccttgactctgaaaaactaaacaaggatcagcaatattccaagcgaaagttaaaaagtttgctttaactttstgagtgcagtccacttagttaaattttgttttgcttgatatttgtgaacatgtcagttttttaggagtcctgtagattctccctctatttcagtgttacaatcttcaaagctattacaaacctgcatttgagaacacctgttaaagtccttaatatagcttgattataaaccatcttttgagaaggaacaaagcaagacaacaattgtctgtgaatggcaacattcccagatagttaacagttaaaaacatgactggcaaagaactttatttatcttcgtggtttacaat

SEQ ID NO: 445000 - DNA, 610 bp, Homo sapiens
aaagggagacacaccccttcagtcaaagccttgataagataaccagttttccaactgtgtcctgttgacaaagaaaaattgattcttattgcactgatgcaaacaactgtattgccataagagtacttacagatagtctccaaattctagaggaatcaggcggagaaaaatgaacatgctccaaattttgtttacaggagtataccttactcaattattaaaggctgtaaatagtttaaaataagtttccttgactctgaaaaactaaacaaggatcagcaatattccaagcgaaagttaaaaagtttgctttaactttctgagtgcagtccacttagttaaattttgttttgcttgatatttgtgaacatgtcagttttttaggagtcctgtagattctccctcyatttcagtgttacaatcttcaaagctattacaaacctgcatttgagaacacctgttaaagtccttaatatagcttgattataaaccatcttttgagaaggaacaaagcaagacaacaattgtctgtgaatggcaacattcccagatagttaacagttaaaaacatgactggcaaagaactttatttatcttcgtggtttacaat

SEQ ID NO: 445001 - DNA, 583 bp, Homo sapiens
ttcagatacctattttcatcttgctgcaatctgaattagacatgtgccagaggtaccacatattcttaagaatggaattcctaacatggaatagactattaagcctacattctgttaaaccttgtcttctaaatatgatacagcaagaawttgaacataagaataattctttgcactagcactgagcattgctctagaggctgtgatgaacaataaataaacacgaaattagcagcttttccataatgactatttgtcattgtatggggatatttttcagatgtaattttttatttgaatggagcaatttgtacatgaaacaaaaaagtcttctgaataaatacataggttgttgttttgatcaaagttatctcctcttaatgcatgtgttttttagacaggaaaagaatgtatgaagaaagtaaaattccgcaattttataattttatggttgcattttattacatcataacaacctctgtttatttagtacctgctggggtagaagcacaaagtgtgaggtaatttgtacctatgatagagaaacttataatgtagttagcaagataactcataatatagt

SEQ ID NO: 445002 - DNA, 583 bp, Homo sapiens
ttcagatacctattttcatcttgctgcaatctgaattagacatgtgccagaggtaccacatattcttaagaatggaattcctaacatggaatagactattaagcctacattctgttaaaccttgtcttctaaatatgatacagcaagaatttgaacataagaataattctttgcactagcactgagcattgctctagaggctgtgatgaacaataaatwaacacgaaattagcagcttttccataatgactatttgtcattgtatggggatatttttcagatgtaattttttatttgaatggagcaatttgtacatgaaacaaaaaagtcttctgaataaatacataggttgttgttttgatcaaagttatctcctcttaatgcatgtgttttttagacaggaaaagaatgtatgaagaaagtaaaattccgcaattttataattttatggttgcattttattacatcataacaacctctgtttatttagtacctgctggggtagaagcacaaagtgtgaggtaatttgtacctatgatagagaaacttataatgtagttagcaagataactcataatatagt

SEQ ID NO: 445003 - DNA, 583 bp, Homo sapiens
ttcagatacctattttcatcttgctgcaatctgaattagacatgtgccagaggtaccacatattcttaagaatggaattcctaacatggaatagactattaagcctacattctgttaaaccttgtcttctaaatatgatacagcaagaatttgaacataagaataattctttgcactagcactgagcattgctctagaggctgtgatgaacaataaataaacacgaaattagcagcttttccataatgactmtttgtcattgtatggggatatttttcagatgtaattttttatttgaatggagcaatttgtacatgaaacaaaaaagtcttctgaataaatacataggttgttgttttgatcaaagttatctcctcttaatgcatgtgttttttagacaggaaaagaatgtatgaagaaagtaaaattccgcaattttataattttatggttgcattttattacatcataacaacctctgtttatttagtacctgctggggtagaagcacaaagtgtgaggtaatttgtacctatgatagagaaacttataatgtagttagcaagataactcataatatagt

SEQ ID NO: 445004 - DNA, 577 bp, Homo sapiens
gttaaattttgtataaaaagttagtgttttgaggaacagtgatagatttgctttggcctatgaacgtggtcaccccagcaccaagatggaagttactggcatcatcttagaaaagagaacttatcttcttatggaaaatgaaataataacattgccttgttgctaattttatactcctagccaactatgctagatcagactctgcctatatgaagcatacaggtgtattacatacccacaatgtctcatacttcactattcttcagggcycacaaccactttagacttcaaaatgttggcaaacaattttgtgtagttactcgtattaaggttttctgtgtctaaaataattataaatccactattctgctatttcattaagaacttttcttactgtttcatgcaatatattacatatcaagagaaggtattactgaataataaaattttaagtaacagaagtaaaaactttagcataagtatttaaaataaaagcactggtttcttaatttggtaagagggaggactttattaggttctttgtacctaagcatagaatgtgatagttcaacgttca

SEQ ID NO: 445005 - DNA, 577 bp, Homo sapiens
gttaaattttgtataaaaagttagtgttttgaggaacagtgatagatttgctttggcctatgaacgtggtcaccccagcaccaagatggaagttactggcatcatcttagaaaagagaacttatcttcttatggaaaatgaaataataacattgccttgttgctaattttatactcctagccaactatgctagatcagactctgcctatatgaagcatacaggtgtattacatacccacaatgtctcatacttcactattcttcagggcccacaaycactttagacttcaaaatgttggcaaacaattttgtgtagttactcgtattaaggttttctgtgtctaaaataattataaatccactattctgctatttcattaagaacttttcttactgtttcatgcaatatattacatatcaagagaaggtattactgaataataaaattttaagtaacagaagtaaaaactttagcataagtatttaaaataaaagcactggtttcttaatttggtaagagggaggactttattaggttctttgtacctaagcatagaatgtgatagttcaacgttca

SEQ ID NO: 445006 - DNA, 671 bp, Homo sapiens
tcaagagaacaatttaaatgaaaagggtcattgtccagcaagccttttgccgttgaggaaagccaactggctgcccagaaatctcccccagagagtggcatcttcttggcaaagtcatcacaggacaagtcttggccttcaaatttgcaggttcacgtatgcgatttgtcaggttgtccatcacttaaaggtagattcatattaagcaaattctcagagactagaatttaaaccaacattttcatttattaatttaaagtgagaaacataactctaagtaaaatcatcccctggctatatgggaagaaaattgtaactgggagtgytcttggcatgcataaaatcagaacaagaagagttagatgatttgaatggctcttgttaatgatctattaaagtcttctttttgaagatagaagtacaacagagcaccccctacctgcaggagaggacacactgccaacacctgcctctcagattttccctttaccctgctttcattgctgactacaattttggatacattgtttctttagttatagtgattggacataatgttgcattttgtcagttaatggtggcatcacttatttctgtcccaatctctgatttacttcatagtttctttctcagaaagcattcctctttccctgtttccaaggttgggaaag

SEQ ID NO: 445007 - DNA, 595 bp, Homo sapiens
acttttggtgactgtcagcattccttgacttatggtcacctcactccaatctctgattctgccagcacattgccttctgctcttctctaatgaaatctccatttccttctctcttataaagaaatttgtgattacattagagcctatcaggataatgtcttcatctggaaatctttaattgcttttgcaaagatttgactatgcagggtgaaattcacaggtgccatggtttaggacttggaaatctctggggacttttttcagcccagcccagtgctcttttacattttatattggaatacttgcattattttcatgtatttgttaattttttatatattatggacattatattttatcaattatatataatgcaaatattttctcttaatgtgtcttttaatttggcttacggtagctttcataatacaggcattttaatgagcttatcatttattacaattaacacatctactagatggaaataaattaagaaaaatggtacatccatattatggaattgtaygcaaccataaaaatgtgcatctaaatattaacctaaaaatattccagaaatattaagtgacgaaaaaga

SEQ ID NO: 445008 - DNA, 591 bp, Homo sapiens
tgaaaataaatgttggaggaaagccaagacatttgtttttaaagtagaaaactattttctagtcacaactttcagtgccagagacattatagctatctaaccaaaggattttttaagtaaattgagatcacccaaagagagcaacagaatacytaatttgttctcacctatataaaaaggtaacattcttgcttcttttctaaagataccaaatcaaattcaaatatgctatttttcttttggtgggaacattgaaagaatgcattagcaacctattcaatcaactctctagcttgattgtgcacacttggattttgcttttttaaacaaagtagatgaatatgcatactaaaacagaagtctaaaatttggtgacatactctctgattttttttggtcactttataggcagtaatggctactgatgtcactatgatgtgtctgaaaaggacataagcaatgacataggacgcttttaatggcagtggtaatgagctgtgtgccacagtagtgatgatttgaattcttccagtcattgcttagtgcctttacagagtgaagcactattgagtgaatttcaacaaacactgc

SEQ ID NO: 445009 - DNA, 591 bp, Homo sapiens
tgaaaataaatgttggaggaaagccaagacatttgtttttaaagtagaaaactattttctagtcacaactttcagtgccagagacattatagctatctaaccaaaggattttttaagtaaattgagatcacccaaagagagcaacagaatacctaatttgttctcacctatataaaaaggtaacattcttgcttcttttctaaagataccaaatcaaattcaaatatgctatttttcttttggtgggaacattgaaagaatgcattarcaacctattcaatcaactctctagcttgattgtgcacacttggattttgcttttttaaacaaagtagatgaatatgcatactaaaacagaagtctaaaatttggtgacatactctctgattttttttggtcactttataggcagtaatggctactgatgtcactatgatgtgtctgaaaaggacataagcaatgacataggacgcttttaatggcagtggtaatgagctgtgtgccacagtagtgatgatttgaattcttccagtcattgcttagtgcctttacagagtgaagcactattgagtgaatttcaacaaacactgc

SEQ ID NO: 445010 - DNA, 591 bp, Homo sapiens
tgaaaataaatgttggaggaaagccaagacatttgtttttaaagtagaaaactattttctagtcacaactttcagtgccagagacattatagctatctaaccaaaggattttttaagtaaattgagatcacccaaagagagcaacagaatacctaatttgttctcacctatataaaaaggtaacattcttgcttcttttctaaagataccaaatcaaattcaaatatgctatttttcttttggtgggaacattgaaagaatgcattagcaacctattcaatcaactctctagcttgattgtgcacacttggattttgcttttttaaacaaagtagatgaatatgcatactaaaacagaagtctaaaatttggtgacatactctctgattttttttggtcactttataggcagtaatggctactgatgtcactatgatgtgtctgaaaagsacataagcaatgacataggacgcttttaatggcagtggtaatgagctgtgtgccacagtagtgatgatttgaattcttccagtcattgcttagtgcctttacagagtgaagcactattgagtgaatttcaacaaacactgc

SEQ ID NO: 445011 - DNA, 438 bp, Homo sapiens
tgaccacctgaaccaacatgctctttctcactgaaaaccataattgtctctgcaacagtccccacatctctaaccaaatgtatttccactcttgtttagtayataatactcataagccactttcaaattaaaaaaaaattgtacagatgaggtcttgctaggttgcccagactggtcttgaaaccctggcctcaagcagtcttcctgcctcagcctcccaaagtgctgggattataggtgtgagccaccatgcccagccacccactttttttttttttttttggagtctcatttctcagacgtacaaaatagaacaaatgtgccgttaactgtcattctgtccaaaattcaaagtattactactattgctatgattatcccttatatttcttggcttctcatagtttctagagagaacaggaggtgcccaaaataggt

SEQ ID NO: 445012 - DNA, 493 bp, Homo sapiens
cttacattatcacatcttctgaagaggttggtctctatttctcgtaaccagmaataattattttcaaatctatttgttttttctaaacggagtggtatcttctgtctctggtgtgtgtggagcaaaaaatttaagggaatttcaataacttaggcttagacaaaacaagtgtttgactttagctctcaagagctggctttggctcccagaaggtgactaggtttagggaccaggttagggaagggagttgacagggacatggcacacttgccaccatcctgaattccttcattttacctgtgaagattatcccatttattttattattatttattttaatgtattatactactgcattataaataaatacatacacccacagacgaacatcagcccttatgatcattcagatatttaaacaattagaaaatccaataaagaccaagccccaagacctggaccaatcattccttcctctgccccttcattgtct

SEQ ID NO: 445013 - DNA, 322 bp, Homo sapiens
ctatttgttttttctaaacggagtggtatcttctgtctctggtgtgtktggagcaaaaaatttaagggaatttcaataacttaggcttagacaaaacaagtgtttgactttagctctcaagagctggctttggctcccagaaggtgactaggtttagggaccaggttagggaagggagttgacagggacatggcacacttgccaccatcctgaattccttcattttacctgtgaagattatcccatttattttattattatttattttaatgtattatactactgcattataaataaatacatacacccacagacgaacatc

SEQ ID NO: 445014 - DNA, 503 bp, Homo sapiens
ctcgagcttggtatggggagggacatccgccattactgaagcttgagttgctggttttcccctcacagtgtaaacaaagccgtcaggaagttggaacttgggggtgcccatcacagctccgcaaagccactgtagccagagtgcctctctagatttctcctctcggkgcagggcatctccaacgcagcagccccagtcaggggcttataaactcccatctccctgagacagaacacttgggggaaggagcagctgtgggcacagcttcagcagacataaacgtttctgcctgctggctctgaagagagcagtggatctcccagcacagtgctcaaactctgctaagggacagactgcttcctcaagggggtccctgacccccaagcctcctgacagggagacacctcccagtatacacctcccaggggttgacagacacctcataccggagagctctggctggcgtctggcaggtgcccttctgggacaaagcttccagagga

SEQ ID NO: 445015 - DNA, 553 bp, Homo sapiens
gctggatcatattgtagctctatttttaggtttttgaagaagctccaaactgttctcaatagtggttgtactaacttacattcccacacatagtgtataagggttcccttttctctacatyctcgccagcatttgttattgcctgtcttttggataaaagccattttaactgtgctgagatgatatctccttgtggttttgatttgcatttctctgatgatcaatgatgttgagcaccttttcatatgcctgtttgctatttgtatgtcttcttttgagaaatgtctattcagatcttttgcccattcaaaaatcagattattagattttttgcgatagagttgtttgagctccttatatattctgcttattcattccttgtcagatggttagtttgcaaatattttctcccattctatgggttgtctcttcactttgttgattgtttccttcactgtgtactacctggttaccagtgctgatcagggctcaagtgctctggcagtggttttcccttttgcccagggtgtgtctagaaatattgtcagggagc

SEQ ID NO: 445016 - DNA, 530 bp, Homo sapiens
gttacattctatgatctcaatctagaaaaatggcatgaatatacgttatgctagtatcgtatgcatgagagcaagaaaccatttttaacatgagtgtaacaattcccttacatgatgccaagcaaaagattctgtacataccttttgcagtcatgacaaggatgaygttgatgaaactggacttaatgctagaatctcccaacataaagagagaatataaagatagagcacccaatttcttctcacaatgaagtctttcagtttttgattgtgggctattcgatttcatttttcttacctaaaaatgagctgatgtgctcctctgtatttctctttagacacttggatgctgggaaattatttatggtggacagcataccaaaagtagttaagaatcctacggccctggagctgaggtcattcactcaggtatgaggatatgctaaaatgctgacaaacatgatgcaagtgtgcccttagaaggtatggcatgcctagtattgtgcctgagaatgttggtctttgacatc

SEQ ID NO: 445017 - DNA, 559 bp, Homo sapiens
cacaaatccaagagggttaactgttatcactgaggacacaatcaagatccacagctttgataatcagagcctggaatgatgcactgagccagtaagttagcttccaataagcaaaattgtgtaactctacatttcccaaaaacaagtgcatatgtatggaaaagagcagatctgctttcgcagcactttattttttaaaatagtctgtcttcagatgtttgaaggggagtgacttgatggttccagggtgcagaaccagggagaatgtgtgaaagtctcaactttcagaaaggactttccctcagtgctgtccaataatggcaagagctgaggtacagacacagaacagggttgtttgtttcagagagggagtgtggattaggtactttccgggatcacttttaactgtgyccgactgtcccctgcacacctctccaacctcttcttgcatgactctcctccttgccactgacatgctggtcaaactggacttcttcccatccttaaactcaccatattgccaaccccagcttccaagcctttgcaggttttgtccatt

SEQ ID NO: 445018 - DNA, 518 bp, Homo sapiens
ttattgaaaaaaattaacttctttgtgatggaatgactgcggtcactctttctttctcgattttggctaggggtcactcttagctcctagaggctgctctgagctccttgtccccacatggcctccttcttctatgaagccacattgaggaatccccattttggtgaatccccccacacttcaactcacttttaggaagtgcaagagctatttataggccagttttacccatgatggttcctctttcttaaagttaactgtcccatataatataacctaatcatgataatgactgttccatcatatttacaagtcctgggatttgtacagggacatgtatgggtatatgaatcctgggggctattytagaattctttctaccacaacaaaataaaattttcttactaaaatacatctcagttcaaaggaagattttatacacttttgcagcttttatacttctttcaatatcttaaatgtatattttatcatacctacagagatcatatattaataag

SEQ ID NO: 445019 - DNA, 558 bp, Homo sapiens
gtttttggtataagtgactgaacacaaggagttgctatcatttgagatggagaagatgagaaaagacagggacttagtttttggacaagattcattttatatgttttctagatattcaagtggataagtcaagcaggaagttggatatgtaagtctggatttcatgagaaagacagggcctggagatgtaaattggaagtcacaggtatacagaaggtgtttgaaagccatgggattgagtaaaaacacaagggagagaatcaaggtataaaatagaagggtacttatgacttgaaacctggagcatttcaatgttaataggtcagaaggatggtgaaaaatgagtaaaggaaacatgaaaagagaaaccagtgaaacagaagaaaagccaaagtgtgtastatcacagacgccaatagaaaaatgattaaagaggaaggagtgataaactgtgtcaaatgctaccagtaagattaaacaaaatgggtccagagactagagcattggatttagcaatattgaggggattggtgacattgacaagttttagtggaatga

SEQ ID NO: 445020 - DNA, 432 bp, Homo sapiens
ggtagggagaaacctaccaatcttagcattttcatctgaagtgatgtcaagtcttcagtgtgtcagggtgtccctaatgctctaatctgctggatcatgggacagcttaacaacattgcacagcccagatctaacaaggccctgttgttgactctcaggtgcaagcctatcttcagcataaaatgtcatttgttcacaaaygaagaacctgcaagaaagttaatattttgaattcagatcagttccatataatacatctgtaaaagaacaatggagtagcttggtcatgcatggaatcatgggtagcagtagtggtatagagtctgaggctctgggattgaaggaagccttggcatttacaagttgtgtgaccttggagaagtgggctcatctttcagaacctcagttacttgtggataaaatgagggtttt

SEQ ID NO: 445021 - DNA, 489 bp, Homo sapiens
ttgtgtttgtagttttcaataatcagatcagtccactctaactcctttagtttattgtttcattgaactacagagatgattaaaactgagttatgttcttaacaatgtgactaaacatgcctcagttgttataattaaatttccattatattctatgtgttggatttggaaataaacgtattctacctgtaacagtttattggaaaaagtgttatatttcaggcttggattagtattttctttaatgtttggttgttgccaatttaactttggcaacatttatcaataaatatggcaagtagtaatattaatgggttaaatattgattgttsaaggttggcctttcttttaatcaattaaggagcagttattgaacaaccttcagcttaatcaatgccttgctcactgccttcatgtggtccctctttccctgctctagtagcatccatttgtgtttgcttattctgtttgaactttatgaaaaactat

SEQ ID NO: 445022 - DNA, 634 bp, Homo sapiens
tacagttacagttgtgtaaagtatgctgttcttggttttggcatgtgagaaatttcttttggctattcaaaaccttttgcaattctaaaatgcttatcttgaaaattcttactgaactaatgggaacacttgaatttctgatcagtagtggggaattcagtgtaattgtactagagtttaattgtgaagtgttcttcaaaccataattgttttatattactgtagtgcctgggaataatcagaaccatagccatkttataacaaaatactgcagtgatatgctagagccaactcatactggattgcaagaatgggtggctggtatgtcttcccaattccatgtccatagatttcacattggtggcttcaaaagagccaaaccgggagtatttcctcaagaaaatgggtaaaagctacaaatcagggctttttttgttccccagaaagccagcttttaaacctttgttagctcatcactggaaatatctaacaactcaaagatgctcaatttgtttaggcttttaaaaatggatattttcatttttctcattttacatagtaaacattgtcttacacttttttttctgtaagaatctgtcgtgaaattctttcaggaaatataaataaggaaaat

SEQ ID NO: 445023 - DNA, 634 bp, Homo sapiens
tacagttacagttgtgtaaagtatgctgttcttggttttggcatgtgagaaatttcttttggctattcaaaaccttttgcaattctaaaatgcttatcttgaaaattcttactgaactaatgggaacacttgaatttctgatcagtagtggggaattcagtgtaattgtactagagtttaattgtgaagtgttcttcaaaccataattgttttatattactgtagtgcctgggaataatcagaaccatagccattttataacaaaatactgcagtgatatgctagagccaactcatactggattgcaagaatgggtggctggtatstcttcccaattccatgtccatagatttcacattggtggcttcaaaagagccaaaccgggagtatttcctcaagaaaatgggtaaaagctacaaatcagggctttttttgttccccagaaagccagcttttaaacctttgttagctcatcactggaaatatctaacaactcaaagatgctcaatttgtttaggcttttaaaaatggatattttcatttttctcattttacatagtaaacattgtcttacacttttttttctgtaagaatctgtcgtgaaattctttcaggaaatataaataaggaaaat

SEQ ID NO: 445024 - DNA, 634 bp, Homo sapiens
tacagttacagttgtgtaaagtatgctgttcttggttttggcatgtgagaaatttcttttggctattcaaaaccttttgcaattctaaaatgcttatcttgaaaattcttactgaactaatgggaacacttgaatttctgatcagtagtggggaattcagtgtaattgtactagagtttaattgtgaagtgttcttcaaaccataattgttttatattactgtagtgcctgggaataatcagaaccatagccattttataacaaaatactgcagtgatatgctagagccaactcatactggattgcaagaatgggtggctggtatgtcttcccaattccatgtccatagatttcacattggtggcttcaaaagagccaaaccgggagtatttcctcaagaaaatgggyaaaagctacaaatcagggctttttttgttccccagaaagccagcttttaaacctttgttagctcatcactggaaatatctaacaactcaaagatgctcaatttgtttaggcttttaaaaatggatattttcatttttctcattttacatagtaaacattgtcttacacttttttttctgtaagaatctgtcgtgaaattctttcaggaaatataaataaggaaaat

SEQ ID NO: 445025 - DNA, 495 bp, Homo sapiens
cactgtctgccacatgacagtcacttaataaatgacaggtggtattatatttcacagtgagtttgccctttacatgtmatacataattactgataccagtccaattttggactttagggaatgaatccacatttataaaactgagagaattttcagggaaagagtagaattttcccttgcaacaccttttttctttttcctttagaaatgagtattgcatagctctattgagaattcacctcctattatttaaaacaacgtttgattgggttcaaactctctcctgacatcttctcaaaggacaatccaaactcttcaattatctttttcacatacatctcaaaaggtattctgagtgcctgaaaggcaataattcttttcccttaaagttttgaattccatctgatgaagatattacacttagtggaatagtaccatgtcacagaaacaatagcttaaattaacctctcactgtgttcagtcaggttctttctt

SEQ ID NO: 445026 - DNA, 609 bp, Homo sapiens
tggtttcttgataacagcccttctaagaaaagctcggtggtgggaatattgagggaattgagtaagggatgcctggaaatcaccagcaagtgttcatgtaaccctattccccaagccaaaggtaattgagacttgacttcagggtaccagtggttctgtgaactttcacagaaattctttagcaatctwaaatgaaacagacaaacgaacaaaaacttgcccaaagcactgtaattgaaagatcatcagagttcatttttgatgacaactggacactctcagaaaaagaggatcttaaaatattgagactggctgacctcgttatctgagggaatattttccttttactactttaacatgacatgaatgttatttaagttaataatgtctgtttaatttatattgtactatagtgttttgtttgaagttccttttcaaatttgatattttcaatttcatatttaaaataaaagagtagtaatcagagtgaagggccacacagattcctttctggtccatctgaggagaatgaaccgtagaaaatatagaggatactacatcaccaaagatatttatgaccaatgtatacaaaaattaaaattttacagt

SEQ ID NO: 445027 - DNA, 609 bp, Homo sapiens
tggtttcttgataacagcccttctaagaaaagctcggtggtgggaatattgagggaattgagtaagggatgcctggaaatcaccagcaagtgttcatgtaaccctattccccaagccaaaggtaattgagacttgacttcagggtaccagtggttctgtgaactttcacagaaattctttagcaatctaaaatgaaacagacaaacgaacaaaaacttgcccaaagcactgtaattgaaagatcatcagagttcatttttgatgacaactggacactctcagaaaaagaggatcttaaaatattgagactggctgacctcgttatctgagggaatattttccttttactactttaacatgacatgaatgttatttaagttaataatgtctgtttaatttatattgtactatagtgttttgtttgaagttccttttcaaatttgatattttcaatttcatatttaaaatraaagagtagtaatcagagtgaagggccacacagattcctttctggtccatctgaggagaatgaaccgtagaaaatatagaggatactacatcaccaaagatatttatgaccaatgtatacaaaaattaaaattttacagt

SEQ ID NO: 445028 - DNA, 472 bp, Homo sapiens
tcatctggcaaatgtggctagttgaagaagcctagttatttaaaatgaaagttattgcatttcagaagagataaggtacattctgaaacactgcaatcatacccaracaatggaagaaaagaaatattttctctgaattcctacgactataatggaaacaagaaagaaaaacgttttggtttcctcttaaaaatgtaacatcatatttgtgaagacaaccacattgatgcataatgggttcccaaatatttgctgaataaatgaataattagtcaatacatttcaaatctatcctaattaaattcttgtcactttatattttaatggcccccttcaaataagggcctctgtttgttgtcagtttcagttgtctaggaagtagacactaaattgaaatcagaagtgaaagagacatttttggtggaatggggttggagaatgcctgtaaaagatacaggagagacaaaacagg

SEQ ID NO: 445029 - DNA, 589 bp, Homo sapiens
ataaacaccttaaattttatattcatttattcaattcacacaattagttaaaaaaaaattttagagtacctatgtaggtactggggaactaccaatggtcatgacaagaaaaattccctgttgttatgaaattcacattccaaagacctgaagaattaaaaaaataagagaacagtgctaaaaatgggtctagtagattctayaggaatatggaagaattgtatattactggaaaaattaataagattagtcaatctgaagtatttcacaatccattttatttggtagctgtgtgatgacctctattcggggcctagtcatgtatgattgtcctgcctctctcaggtggacagagattctaatgtgatcggttggggactggggactttatttctgtcaatacaccctctcccaaaatggagaaaaattccctcaaaagcatatgatgaactgataagaaaatgagaaatacctagacttgggattaattaagggaaggttggagcttaccatggtatgttgaacactgaagctggcattggccttgagagcatttgctgaacttgatgaactccaatcttgtttccca

SEQ ID NO: 445030 - DNA, 621 bp, Homo sapiens
ctaatacactggtgataaatttgatggaactaaaattttattttgagcatgttacattttctcctttctgctcttgtcctccataggcaaagatttaaaggcgacagaaaatggtgggaggaggccaggctgaagaaaatggacactgagccatgttgttaaggtcaatattcagttttgagccaggtatggagctcagraaagaagtctgtgctatatatataaatttgggggttatcagcatgtaaatgatatttcaagccttaagactggatacaatcacctatgatgcgagctactccctaaaatacatctcccccaaaactgtatctgtttccttggtccactgacatttttaaatacatattttgtttcatatatgtcagggacatcagaactacagatctctatttatggtgactaagtaccaaatgatttatatttttattaactctgctatctctcctgaaattattacaaacagcctttcttcccacactcttgcttacctgaactcttcagttttataggagctactatattccttcaccccctttcttacatattcttcaccttctctccctctctatttctgttcaaagactattctctcagttgtca

SEQ ID NO: 445031 - DNA, 594 bp, Homo sapiens
aattatcagctatattcaccaagctgtgcaattcacctaaaaaaaaataaaacatatccctccttactgaggctttgtaccctttgactgtaatcctcccattcccccacagcccagttgctagtaactaccatcctactttttggttctgtgacttctattgttttaggttccacatataagtgaaaatatgtggtatttgacttcctgtatttggcttatttcacttagcgtaatgtttgcccattccatccatatgaatttcaggacgtttttgaggcttctttttatctcttcacaagctcctcttaagttctgaagctctatcaatcttctacagttagttcagtatcagttacctccagaattctattattagactgatatatccatttcatttttagtaccaaatatacatatatttatatataatcccatacaggattaatctctcttaaatacaacataaacataaacaaaagcagattttaaaagatgaaataaagatacaatgaacaatattttacrgcttccttattgagatggctttagaacatcattatctttattcttgagtgacattaataagtaatg

SEQ ID NO: 445032 - DNA, 599 bp, Homo sapiens
acaacataaacataaacaaaagcagattttaaaagatgaaataaagatacaatgaacaatattttacggcttccttattgagatggctttagaacatcattatctttattcttgagtgacattaataagtaatgatagcatattatgtaaaaatcttgtttcaaaaagggatcttgaaagtttaggtttttggctaaatttttgttaaatctgatgagtcactgtttttacctctaaatgactcatgctggaaatagcagaagtattagcatcccactttcaaaatgagctgtctacacacacacacatacacacacactcrtgtgtgtatgtatatatatatatatatatatatatatgcacacacacacacacaatactaggttattcgtgtgtacttttatgaagatggtttttcagtcaaacttctgacaattctacctaaacaggaatttctcatttagatgctgaaaacaaaaatacttctttgtgttaatttccattcacatatattgtaatttctttatgattggccttaagtaatttagaaaatatttttctcttaatttatttaaatatttgctaggttaagtagttta

SEQ ID NO: 445033 - DNA, 599 bp, Homo sapiens
acaacataaacataaacaaaagcagattttaaaagatgaaataaagatacaatgaacaatattttacggcttccttattgagatggctttagaacatcattatctttattcttgagtgacattaataagtaatgatagcatattatgtaaaaatcttgtttcaaaaagggatcttgaaagtttaggtttttggctaaatttttgttaaatctgatgagtcactgtttttacctctaaatgactcatgctggaaatagcagaagtattagcatcccactttcaaaatgagctgtctacacacacacacatacacacacactcatgtgtgtatgtatatatatatatatatatatatatatgcacacacacacacacaatactaggttattcrtgtgtacttttatgaagatggtttttcagtcaaacttctgacaattctacctaaacaggaatttctcatttagatgctgaaaacaaaaatacttctttgtgttaatttccattcacatatattgtaatttctttatgattggccttaagtaatttagaaaatatttttctcttaatttatttaaatatttgctaggttaagtagttta

SEQ ID NO: 445034 - DNA, 597 bp, Homo sapiens
tagcaaattgaaattatgactaaaacactagtaagcagaagcttttgtaaatgctttggaagagcatttttgtgactgattttaatacgttgaaattaaactgtattacttaaaaggtgaataagtgaaaaaatgtacaagtctcagagtacctcatgtcaaaggaaagaaggaagcttaaccgcgacttagatattacttgcatatttcgctcactggctttagagtatcattacctgtattcttgagtgagattagtaatgaatgtaagtatattatgtaaagcgttgtttcaaaaagagagcttgaaaattttttttttggttaaatttttggttagatctgattagactgtcactatttttaccttataagactattgatacttgaaatagtagaactatcatcattccactttcaaaaccagcagsctttctctctctctctctctctctctctacacacacacacacacacacacacacacacacacacacacacagagttattattatgtatttcatgaagatagcttatcaaccaaacttctgagtgggtagaatcttgcctaaacaggaatttctcagttggttgctg

SEQ ID NO: 445035 - DNA, 580 bp, Homo sapiens
tctctatcctggcccttgagccattgctcgggtctgctcccacactgtggagtgtacttttgttttcaataaatccctgctttcattcttctgctgcttcattctttctttgctttgyggggcattatgtccaattctttgttcaaaacgccaaggaactggacaacttgcagtcacaacccactactggtgacactttggacagaggaaagtcaatttttcaatctttcacaaactttactgcatgtaaagaacctcctctacaaggctcttaagacacagaaatggaaagatacagctcagaaacttgggaggtcactttaaaaaaatgaggtagttaacatacaatttcaatacagcacagatatgctgtaataaaagtatttttaatatgctgtgaaagaagaataaagtgcctcaatctgtgagaaatttgtaggcaaatcagcccagagaaggaaatctataggtacgttgccaggacatagaagtttcccaaagcagaaaccaaccctacccagcccaagttggaagggtgaatacagccagtcaggatacttctatttttctgatcagtcat

SEQ ID NO: 445036 - DNA, 604 bp, Homo sapiens
cactactggtgacactttggacagaggaaagtcaatttttcaatctttcacaaactttactgcatgtaaagaacctcctctacaaggctcttaagacacagaaatggaaagatacagctcagaaacttgggaggtcactttaaaaaaatgaggtagttaacatacaatttcaatacagcacagatatgctgtaataaaagtatttttaatatgctgtgaaagaagaataaagtgcctcaatctgtgagaaatytgtaggcaaatcagcccagagaaggaaatctataggtacgttgccaggacatagaagtttcccaaagcagaaaccaaccctacccagcccaagttggaagggtgaatacagccagtcaggatacttctatttttctgatcagtcattgcattaggaatggctgcattaaatgatacaggacaacattagaagaaatatgtaggcagaaaggtcctgggaaaagttcaggagaaacctaaaaatgtgcacatattttcagaaaatgtgcaaaacttggggaggttgctttaactgaaaacggtccaaagcttactcagagttacattttgcatttgcaagctaaatgactta

SEQ ID NO: 445037 - DNA, 483 bp, Homo sapiens
ttgcagtcacaacccactactggtgacactttggacagaggaaagtcaatttttcaatctttcacaaactttactgcatgtaaagaacctcctctacaaggctcttaagacacagaaatggaaagatacagctcagaaacttgggaggtcactttaaaaaaatgaggtagttaacatacaatttcaatacagcacagatatgctgtaataaaagtatttttaatatgctgtgaaagaagaataaagtgcctcaatctgtgagaaatttgtaggcaaatcagcycagagaaggaaatctataggtacgttgccaggacatagaagtttcccaaagcagaaaccaaccctacccagcccaagttggaagggtgaatacagccagtcaggatacttctatttttctgatcagtcattgcattaggaatggctgcattaaatgatacaggacaacattagaagaaatatgtaggcagaaaggtcctg

SEQ ID NO: 445038 - DNA, 580 bp, Homo sapiens
tctctatcctggcccttgagccattgctcgggtctgctcccacactgtggagtgtacttttgttttcaataaatccctgctttcattcttctgctgcttcattctttctttgctttgcggggcattatgtccaattctttgttcaaaacgccaaggaactggacaacttgcagtcacaacccactactggtgacactttggacagaggaaagtcaatttttcaatctttcacaaactttactgcatgtaaagaacctcctctacaaggctcttaagacacagaaatggaaagatacagctcagaaacttgggaggtcactttaaaaaaatgaggtagttaacatacaatttcaatacagcacagatatgctgtaataaaagtatttttaatatgctgtgaaagaagaataaagtgcctcaatctgtgagaaatttgtaggcaaatcagcccagagaaggaaatctataggtacgtkgccaggacatagaagtttcccaaagcagaaaccaaccctacccagcccaagttggaagggtgaatacagccagtcaggatacttctatttttctgatcagtcat

SEQ ID NO: 445039 - DNA, 604 bp, Homo sapiens
cactactggtgacactttggacagaggaaagtcaatttttcaatctttcacaaactttactgcatgtaaagaacctcctctacaaggctcttaagacacagaaatggaaagatacagctcagaaacttgggaggtcactttaaaaaaatgaggtagttaacatacaatttcaatacagcacagatatgctgtaataaaagtatttttaatatgctgtgaaagaagaataaagtgcctcaatctgtgagaaatttgtaggcaaatcagcccagagaaggaaatctataggtacgttgccaggacatagaagtttcccaaagcagaaaccaaccctacccagcccaagttggaagggtgaatacagccagtcaggatacttctatttttctgatcagtcattgcattaggaatggctgcattaaatgatacaggacaacattagaagaaatatgtaggcagaaargtcctgggaaaagttcaggagaaacctaaaaatgtgcacatattttcagaaaatgtgcaaaacttggggaggttgctttaactgaaaacggtccaaagcttactcagagttacattttgcatttgcaagctaaatgactta

SEQ ID NO: 445040 - DNA, 533 bp, Homo sapiens
gggataataatgctatctaacttcgagagttagagtgaggattaagtgagataatgaatgtaaaacatttaatccagagccctgtaagtagtaaatgctcagtaaatcttaattacgttgttatcatcatattccttgtcatacagagcaaaacacctgggacaatcagtggggctgtgagaaggctgggcaaatgtttctgaggatctttccccatatacgtttgggagatacagataaattcatcatcctgaaagtcgccgtgtaagckaaagtcatttaaaaatcaaacttccaagatttttgaagacattaaaaatgcattttaaaattaaaatgctcacgttttctgcaaattgtgaactaggaaaaaacagcaacactaaaaaaccctggcatttctaggaatgccagcagtaaatggaaattccacaaaaattatctatgtccccactgggattatgccaccaaaaacaacatctgttacttattctcaggacaatttgtactgtgctcaaaaatgacacagggac

SEQ ID NO: 445041 - DNA, 612 bp, Homo sapiens
ggaaaacatatttgagagaataattttgtatttttttaaacgtagttacaaaggtaaaaatctggatacaggaaatttagagaacgcctgctagatactacacaagatgaacatcaccaaagcatattcatagtcatcaagctatccaaggtcaatgctaaagaaaagatcttaaagacagctatggaagggcaaatctcctataaaggaaattccgtcagactaacggaagacttctcaggagaaaccttacaaaccagtttatatgctgctaarctgagctttataaatgaaggagaaacagcctttcccagacaaggtagaggacagatgctagaaaagtttgtcaccactagactgaatctgcaagaaatattcaaaggagttctaaacatgaaaacaaatgaataatacttgctaccataaaagaacatgtaagtacaaatttaccaaccctacaaagcaattaaataagttacactacaaagcaactagctaaaaacatgatgacacaaacaaagccttacatatcacatataaatattaattttgagcataactgacctaaattctccacttatatagattggcaaattaaatttaaaaaatgag

SEQ ID NO: 445042 - DNA, 612 bp, Homo sapiens
ggaaaacatatttgagagaataattttgtatttttttaaacgtagttacaaaggtaaaaatctggatacaggaaatttagagaacgcctgctagatactacacaagatgaacatcaccaaagcatattcatagtcatcaagctatccaaggtcaatgctaaagaaaagatcttaaagacagctatggaagggcaaatctcctataaaggaaattccgtcagactaacggaagacttctcaggagaaaccttacaaaccagtttatatgctgctaaactgagctttataaatgaaggagaaacagcctttcccagacaaggtagaggacagatgctagaaaagtttgtcaccastagactgaatctgcaagaaatattcaaaggagttctaaacatgaaaacaaatgaataatacttgctaccataaaagaacatgtaagtacaaatttaccaaccctacaaagcaattaaataagttacactacaaagcaactagctaaaaacatgatgacacaaacaaagccttacatatcacatataaatattaattttgagcataactgacctaaattctccacttatatagattggcaaattaaatttaaaaaatgag

SEQ ID NO: 445043 - DNA, 543 bp, Homo sapiens
cctacaaccaaccgactgttggcaaagtttacaaaagtaaacaatgggaaatgggtaccctattcaataaatgacattgggaaagctggccagccatatgaagtcaaactggacccctacctctcaccatatacaaatattaactcaagatagactgaagatgtaaatataagacctgaaactatgcaatcgctagaagaaaatctaagaagaactcttctagatattggcctaggcaaagaatttatgactaaggctaamggcaaatgcaacaataaaaatggacaaatgagatctaattaaactaaacttttgcacataaaaaaatagtcaacagaataaacagacaaccaacagaatgggagaaaaaaatgcaaactgtgcatctgacaaagactaatatccagaatctatgagggacttaaacaaatcaacaaaaaccaaacaaataatccaattaagaagtgggcaaaggacatgaacagacacttctcaaaacaagacatacaagaggacaacaaacatattaaaaagtgctcaaca

SEQ ID NO: 445044 - DNA, 458 bp, Homo sapiens
gggtaaccaggccacacaccagatgagctcagcctgcagaacaacttagtttgctagtccttaccaccagcatatataatacatattaccaattactctattactaacgaattggtaatgcatttcttttaatgtgagtaggcagggtttatttgacatattctctttcttcaaatacagagtcaaatatattattttcgatttgaaagtgccctatatactagaaattttattttcaaaaggacattatatttatgttcatttatgaatacamacaaatctaatatctaaaatctgaagagatatctgaaatttcaaaaaacatgaaaatctaaatgaaaatgaaaaatccacacataagcgaaactctattgatactgctttgttaatgattgatgtaatattatatttaagctattacaaatagtacttatgtgactgtactcttattgaactga

SEQ ID NO: 445045 - DNA, 591 bp, Homo sapiens
atgaaggcaaattctgaagatttggggagaggttaaggagctaatgtgtggacatttagaatatggtgtctgtgtgcgcataagaacatgtctggttggtacttgtattagtcagagttctccagagaaaaagaaccaaaggaatatatagagagacagatagatgagagggtatttattagaagaattggcttatgtgattacggaggctgagaggtcccatgacagagttggggatgctgatagtgtggttcatttcaaatccaaaagcctcagaactagggaagcagatgctgtaactcagtccaaggcagcacgcctgagaaacctggggaatggctgctgtgagtcttgaagtccaaaggcctgagagcctaaagttgtgatgtccaaggtcaggaaaaggrgggtgtcccagctccaggagagaaagggagcaaattcacctttcttctgcctttttgttttatgccggaccccagctggttagatagtgctctcccacattgagggtgaatcttccccgctcagtccttgactcacacaccaatctcctctggaaatgtcctcacagacacaccttaaaataat

SEQ ID NO: 445046 - DNA, 591 bp, Homo sapiens
atgaaggcaaattctgaagatttggggagaggttaaggagctaatgtgtggacatttagaatatggtgtctgtgtgcgcataagaacatgtctggttggtacttgtattagtcagagttctccagagaaaaagaaccaaaggaatatatagagagacagatagatgagagggtatttattagaagaattggcttatgtgattacggaggctgagaggtcccatgacagagttggggatgctgatagtgtggttcatttcaaatccaaaagcctcagaactagggaagcagatgctgtaactcagtccaaggcagcacgcctgagaaacctggggaatggctgctgtgagtcttgaagtccaaaggcctgagagcctaaagttgtgatgtccaaggtcaggaaaaggagggtgtcccagctccaggagagaaagggagcaaattcacctttcttctgcctttttgttttatgccggaccccagctggttagatagtgctctcccacattgagggtgaatcttccccrctcagtccttgactcacacaccaatctcctctggaaatgtcctcacagacacaccttaaaataat

SEQ ID NO: 445047 - DNA, 541 bp, Homo sapiens
tagggagaaataagtagttaggaaaatcttttgaacagagtagttgagggggcagtcatctttcagctgaatctttgaacaacggatagaaattgataggaaatggacaacagagaaaacaatgatgtttcagcagaaaagagtaataagagtggagacatggatactggaattaacatggatactcaggagcccaaatggagtcagtataagagaaatgttaaataaatgtttggattcacatttactttgtactctgtgccataaacaatatcttttttttctccccgcaactccatagataatgttgaaatacttcatgccttctgagatagtttttagaaggaattgtccaagaggaactaattgtagaatgacctaactaaatcttctagttttcttttcttcaatggccctgcgtaggtcatgagtacttgaggattcacttttttctataaattcactayaacccaaccttgccactttcaatagtttcttaacactgacattgtgggatgatgaccacttgtggaattctggt

SEQ ID NO: 445048 - DNA, 468 bp, Homo sapiens
tcttaacactgacattgtgggatgatgaccacttgtggaattctggttgagagataaaatggccttcataagcacacttcaggttaatcagacttaaggatatttaatgtttcccttgatactgtctaccaaacaaagtacatttatatgcattctagaatgtctttctgaagctgaaataacacctacataaaggttctgctattaatgaaatatgtaaaaaatatcccagaaaatactaacattaaagaggtataaaatataggcttttctagtacatcgacctagtatgttcctgttacaagtcttcctattacttaaacagctgaactggcagctttaagaccctttaaaagttaatagtgmaatttcaatgagactctaaagtccatatgtgctttaatggatgttttaattacagtattttatacctgtttctatatgtgtctagaattatatgtttataac

SEQ ID NO: 445049 - DNA, 575 bp, Homo sapiens
gatgaattaggtaggaagatgaaagttgggcactgttagggtcattagaaggaaaggacctaacwgaaaataaggctaacctggagaaaaacaagggcatgggatgcaggtggggttgggtggtggtggtagacaaaaaaccaaaacaaaaaacagagtcttcatgacatttttgatacaaccatatgtgaaggtaaactttgggacttcagagatttataaagtcaataaatcccacttcctttctgggggctttgaatcaatgttattgtatttctacaacttgcaaatgtaaaattcctggctaatagaaataagaaattttatttactcgaacacgtttttgaacacctaatttgagcttctgacttatcacttagctatattttaatagaatctgatagaatatttttccattatatatacatatgaaatgtaaattttcatatcatctctgatgtaacatataaaatgaagtgccttttcagaaaaaaatgacaaaatttgcagtcatttaaataggacaaaaatgaacatctgcaagcaatgataacatgcagattaatgtttcttcc

SEQ ID NO: 445050 - DNA, 562 bp, Homo sapiens
attttctaaataagctggtttacctctaggatttgtttcagtaacatattagatttatctttgttactttagggttagagacattagcaatttcctttggaagtggaattctgaagaatyccacttaacgttaattccgcttataatgtttataagataaatgcatgaaaattattcatttatatttcaacaaataatggaacatatacatccaaatgagaagtaacaacttgaaagtcaatgcatttattacagtcagcttgctatgctcaaaacatctcaaaagttttcaaattgtctactccatgctactcatgaaaaaatgtcccccatatattagtttataaccatacaacgttttgaaaaatcattttggccattaattattccctttactcataggctgaaacctagaagttgaacatgtatgatatttttaaaggagttacaagaatttcatgccagatatatatcagagggcatatttgttgagaaggcaatgggaattaagtcagaatgttaagggcctagactttattctgttgacaaagaagagccattg

SEQ ID NO: 445051 - DNA, 507 bp, Homo sapiens
tttttaaatctttttaaaaaactcaatttaataacgagaactgattactatatttttcttatttgagtgctaagtgtctcaggatttacctgtgggaattaggtcttggtkcttacattgtggagttttaaaagtagcatattttgtctcaacttcttggaggtgctcctcctttgacaagagacagatgtttgggtagaggaacttattattcttgaagtgactcctcatagcctcctggttatttcactaagatttctcaaaggctataaaaacatagctttcttgaataggaaaggaaaaaatgttttgaaataggtttcctaaaagcaccatggtagggtatcttgatgctataattggcacttagtagtcacacatctggccatacacatcttttgtacttatgattccattggtacctttgcttaagcaataacatccctaaatccaaaagatgaaatagacaaatgatggaggcagaaaaataaaaaatatagtggtgga

SEQ ID NO: 445052 - DNA, 507 bp, Homo sapiens
tttttaaatctttttaaaaaactcaatttaataacgagaactgattactatatttttcttatttgagtgctaagtgtctcaggatttacctgtgggaattaggtcttggtgyttacattgtggagttttaaaagtagcatattttgtctcaacttcttggaggtgctcctcctttgacaagagacagatgtttgggtagaggaacttattattcttgaagtgactcctcatagcctcctggttatttcactaagatttctcaaaggctataaaaacatagctttcttgaataggaaaggaaaaaatgttttgaaataggtttcctaaaagcaccatggtagggtatcttgatgctataattggcacttagtagtcacacatctggccatacacatcttttgtacttatgattccattggtacctttgcttaagcaataacatccctaaatccaaaagatgaaatagacaaatgatggaggcagaaaaataaaaaatatagtggtgga

SEQ ID NO: 445053 - DNA, 538 bp, Homo sapiens
ttacagatataatctatcaaggctctcccaatggtgacccctatttgataaagttgaagagatacatccttagattatccagcgtagggagtaaatggagaaaatagtaagagatatttgttatattgaaaaaaartacatatatatgcctcatatcctgtagtcttcataggaaatctttacaaatggcttcattttatatacatatatgtgtatacagtatatgtgtatataaaatatatgtgcatgcggtgcatacatattttcatttgtcatattaaaatagtttctgaaatcatggtacttatttctgggttagagaattattattggaatctttaggacagtaaaggtttatacagcaattagcatatgccagaaacggaacgtaaaaagcactttacacatataaattcattgagttctctctctgagcttatcaaattggtattaacagtttcatcattttaaaataaagagtcatcagagaagttcagtagctcttccagggtcatggatctggtgtcgctcctgctcc

SEQ ID NO: 445054 - DNA, 562 bp, Homo sapiens
attttctaaataagctggtttacctctaggatttgtttcagtaacatattagatttatctttgttactttagggttagagacattagcaatttcctttggaagtggaattctgaagaattccacttaacgttaattccgcttataatgtttataagataaatgcatgaaaattattcatttatatttcaacaaataatggaacatatacatccaaatgagaagtaacaacttgaaagtcaatgcatttattacagtcagcttgctatgctcaaaacatctcaaaagttttcaaattgtctactccatgctactcatgaaaaaatgtcccccatatattagtttataaccatacaacgttttgaaaaatcattttggccattaattattccctttactcataggctgaaacctagaagttgaacatgtatgatatttttaaaggagttacaagaatttcatgccagatatatatcagagggcatatttgttgagaaggcaatggkaattaagtcagaatgttaagggcctagactttattctgttgacaaagaagagccattg

SEQ ID NO: 445055 - DNA, 611 bp, Homo sapiens
agaacattaccatgagatgttcaccatttctcaaatcacatcaccaatggtactgtgtttctctggttttgaggtaacaatacaataagatgaatcaatttacaattgtacctttagcattcacagagatgacacctagaggaacacgcatctacctatttcattatggttactaacatagtcatgtctaaacatttactcattaaatgtatagaattttttataaagtaatttcttccttttctccttcatatcatagttaagacattacagatagatacatagacygataggtgacgtattaaagtctgatgaaattgaaaaccaaaggcttagagccctgtacgaagatgatgtttttgatactaacagtttctatggagagttctgcctgtaatttttttccataatataatatgttctagatttttcttgtctttaattatcttttgtgtgtgtttgtgtgtgagagagtgtccatgataacctatcaataaggtaattagttaagaatttcagtgatttaattgaatggatacatgacttgttttgtatttgtcatgttttagtaaaaattaaactaataaaaataccagatactagagtaattt

SEQ ID NO: 445056 - DNA, 577 bp, Homo sapiens
tttagaactttattgaatctgtggatcagtttgtggagaaatggcaggcttaaactcagtataactcaccattcatttaaattttatttaatgacttccattatatttcataatattttctaggcaggtcttccaatttttattatatatactgttacctgtatttcttgtaaatggtaagtgctttgttttgttttgttttgtttgagatggagtctcgctctgtcgccaggctgaagtgcagtggcacgatctcggctcagcctcccgagtagctggaactacaggcgcctgccaccatgcccagttcatttttgtatttttcagtaagayggggattcaccatgttggcaggtttggtcttgatctcttgacctcgtaatccacctacgtcagcctcccaaagtgcagggattacaggagtgagccaccacatctggcccaagtggtattttttaatggagcaaaatgcatttgacttttatatattgagtctgtatcgatctactttgtccatctttcttattattttgaataattcatacgttatatacatgtgtaataatatatacataat

SEQ ID NO: 445057 - DNA, 579 bp, Homo sapiens
acagaattattcatttatctctcttatataaaatatactcacttgctcatccaatcacacataagctccaactccaggatattgtgatttatatcaatttgaatgtagctattcctgacctggcaacctacaaaccaaaagaagaccagttttctatytcacccacatccaacttacagtagtggaatagtggtaggttaaaagcaataatgtactatcattggaaaaaggaaagaatgagaagctctatggcagtcactcatctaaatgttctaagattacactgggaaattacaatcaggtcctttattctggagatggagaatgctcttaggtccaattctcatacctatgaagagtttccccttcttttattctctatagctcttagctctaccctctggactatcttttcttttccatgaactcttttgccacttttgaaggcagcattagcaaatatgctcaataaaggtcattcaaagtttgcttctcatcatgtaagtatgaggtcctagaagcctctctatattttgaaaagtttcagtccattgtagaccagcctgttgattcttttgc

SEQ ID NO: 445058 - DNA, 357 bp, Homo sapiens
ttttttctccttcagaaatccgaaccaatttgccttaatttgttactaaaatattcttgactactagatgatggtcagaggcaatgctatatcttaaaactagacaagcctcctgcatattccagatacaatgcaacaaaggttgtgcttttaagagkctgtaatagatgaacgcagccactgatttgtgtgtttatttataagtctccggtattccttaggagtagagtagtctattgtgttctatttgcacaattatctgctaatatttatttctacaggcaagattagtaccctccctctttattttttgtgattaatgctataaagaatggtattccaaagagtttctacata

SEQ ID NO: 445059 - DNA, 604 bp, Homo sapiens
gattacaggaaatggtctgagatgtttaagaagcaacctggttttttgttggacacaggggtatgaccttatcacttagagcttattctttgcataatagcttggagaaaagaaagagccaaatggcatcatctttctccctgtcttactgtcaggggagagctaatactcatatagtataataaaaaagagtattaaactgcatctttgaacaatcaaaaatgatgcactaaatgaatgctgaataaatggccaaaagcttttttttttaacaggagatcattttaccatttgcattgtgtcagaataatagaccagacttcccattctacagacacttgattgagtgcctactatgcgccatgtactattaggtgctacagaaaaaatgcagaagtcagtagaagaatgcctttcttccaagcctagtagatargatgaaacgagaaacaatgtaaccaaagtctgcatacggcatcagtaaaagagtttcgagcaaaatttcagagactatatcatcacgggttgtaaatctgggagggtttgatggtggaggatggtaagaaaggaattgtaaagaactggaagggtttgaaatgacaga

SEQ ID NO: 445060 - DNA, 604 bp, Homo sapiens
acgattatgggagaattccagcatttattaagacagtcacagtttataaactatatgtttttgaaatagaaaaaatagtttattatattttaacaaggatatccattttgaattcataatattctccaaaacataacagcatgcatggcatatatatatatatacagcatgcatggcatatatatatatatacagcatgcatggcatatatatatatatatatatatatatatatatatatatatatatatatayacacatgcaatttgtcatgaatttaaatagcaatgagtaaaatgtattaccaaatttgaatctgacataaattaaaactgaatgggttaaagaaaataatttcagtctcaggccaaaataatgctcaaatacaatttaatatgtattttgattttaatctcaaaagttattgctttatttctctggtcttttacaaaagcagataaatcaatgtttcatatgtggccttttcccctggcaatccctaaaaaagctcctcccatttacatgccaatttcaattactgattttcatatcttgcttctcttttgaagacacaatatataaggaaacatattaacaagcattt

SEQ ID NO: 445061 - DNA, 501 bp, Homo sapiens
atacaatgaatactattcagccataaaagaatgaaatagtgtcttttgcagtaacatggatggaactggaggccctaattttaagtgaaacaagttagacccagaaagacaaatactgcatattctcacttataagtgggagttaaataatgagtacacatggacatagagtgtggaatgatagacattgctgwctaaggagggtgagagagtgggagagaatgagaaattactcaatgagtacaatgcatgttatttgcgtgatggcctaaaagcccctgatttcaccactacataatctatgcatgtaaaaaaattatacttgtaccccataaatttataccaaaaaaaatgaaaggagattaggattagtatggttgtaaaagagaaggggaaggcgcacgtgaaaagccaaagttggcagcagccatggcagggagggccgtgtaggtcgtctattcagaacttgtatttggtggggatccagacacatagcataat

SEQ ID NO: 445062 - DNA, 501 bp, Homo sapiens
atacaatgaatactattcagccataaaagaatgaaatagtgtcttttgcagtaacatggatggaactggaggccctaattttaagtgaaacaagttagacccagaaagacaaatactgcatattctcacttataagtgggagttaaataatgagtacacatggacatagagtgtggaatgatagacattgctgtctaaggagggtgagagagtgggagagaatgagaaattactcaatgagtacaatgcatgttatttgsgtgatggcctaaaagcccctgatttcaccactacataatctatgcatgtaaaaaaattatacttgtaccccataaatttataccaaaaaaaatgaaaggagattaggattagtatggttgtaaaagagaaggggaaggcgcacgtgaaaagccaaagttggcagcagccatggcagggagggccgtgtaggtcgtctattcagaacttgtatttggtggggatccagacacatagcataat

SEQ ID NO: 445063 - DNA, 501 bp, Homo sapiens
atacaatgaatactattcagccataaaagaatgaaatagtgtcttttgcagtaacatggatggaactggaggccctaattttaagtgaaacaagttagacccagaaagacaaatactgcatattctcacttataagtgggagttaaataatgagtacacatggacatagagtgtggaatgatagacattgctgtctaaggagggtgagagagtgggagagaatgagaaattactcaatgagtacaatgcatgttatttgcgtgatggcctaaaagcccctgatttcaccactacataatctatgcatgtaaaaaaattatacttgtaccccataaatttataccaaaaaaaatgaaaggagattaggattagtatggttgtaaaagagaaggggaaggckcacgtgaaaagccaaagttggcagcagccatggcagggagggccgtgtaggtcgtctattcagaacttgtatttggtggggatccagacacatagcataat

SEQ ID NO: 445064 - DNA, 655 bp, Homo sapiens
ttacacctggcttataggctactacaaatctctaactcttgaaagaagcacaaaaccaaagacaccaataggctcactgcttgacagttgaatctagagatcatttataaatctgccacatgctgtaamtatgaccgtaagctgttcaaagttagttactcttgaagacgaaaaaatttaccagtccatcaaaatatttgaccagccttgcttagcacttcagtgataacaaaggagctaacatccaaactattattttcctgggttgcattcatggcactgacaataatatctccaatgtgttctgaattcttcccacacgtattacttttgatcttcaaaggtacaaggtggtaagtgaaatagtacatggagtacaagcagttctctacaaaaggctttttcagaagctttaattttttcttgcctttcttggttttcatagtaatgattggaataaaacagagacacttttcagtgatagaattaagacctctcttcagagtaaatccttctttactttgcctctttcaagtgcatgaaaagagctgctagataagtttatttaatcacttggaatacgtcatgttaactcaaggaagaagcaaagtgcctgaaaagccagaataaactgtgcataacttttttttttccc

SEQ ID NO: 445065 - DNA, 655 bp, Homo sapiens
ttacacctggcttataggctactacaaatctctaactcttgaaagaagcacaaaaccaaagacaccaataggctcactgcttgacagttgaatctagagatcatttataaatctgccacatgctgtaaatatgaccgtaagctgttcaaagttagttactcttgaagaygaaaaaatttaccagtccatcaaaatatttgaccagccttgcttagcacttcagtgataacaaaggagctaacatccaaactattattttcctgggttgcattcatggcactgacaataatatctccaatgtgttctgaattcttcccacacgtattacttttgatcttcaaaggtacaaggtggtaagtgaaatagtacatggagtacaagcagttctctacaaaaggctttttcagaagctttaattttttcttgcctttcttggttttcatagtaatgattggaataaaacagagacacttttcagtgatagaattaagacctctcttcagagtaaatccttctttactttgcctctttcaagtgcatgaaaagagctgctagataagtttatttaatcacttggaatacgtcatgttaactcaaggaagaagcaaagtgcctgaaaagccagaataaactgtgcataacttttttttttccc

SEQ ID NO: 445066 - DNA, 655 bp, Homo sapiens
ttacacctggcttataggctactacaaatctctaactcttgaaagaagcacaaaaccaaagacaccaataggctcactgcttgacagttgaatctagagatcatttataaatctgccacatgctgtaaatatgaccgtaagctgttcaaagttagttactcttgaagacgaaaaaatttaccagtccatcaaaatatttgaccagmcttgcttagcacttcagtgataacaaaggagctaacatccaaactattattttcctgggttgcattcatggcactgacaataatatctccaatgtgttctgaattcttcccacacgtattacttttgatcttcaaaggtacaaggtggtaagtgaaatagtacatggagtacaagcagttctctacaaaaggctttttcagaagctttaattttttcttgcctttcttggttttcatagtaatgattggaataaaacagagacacttttcagtgatagaattaagacctctcttcagagtaaatccttctttactttgcctctttcaagtgcatgaaaagagctgctagataagtttatttaatcacttggaatacgtcatgttaactcaaggaagaagcaaagtgcctgaaaagccagaataaactgtgcataacttttttttttccc

SEQ ID NO: 445067 - DNA, 542 bp, Homo sapiens
gtaagttagtgagagattacggtctggtttttatagcattttatgtagtatttgacaatccatagggaccttgcctgttagccctttacaaatataaaatgtaattttaaatttcacttcatcatggtaataggctatataagctttctttctaaagcctacagaccatcctgtcacctcagggagcctcmaacaacctgacttaatcacctcttggtgactcattgcactctgctcactcttttaaaaatatataaatcctaattatttttaaaacccttttaaaatgagcagtttttatgtacacactcaggctaagtgcgcacacacacacacacacacaccctagataggtaggaagacattctttatctttgaacgattgtatttctttcctatgtatattctctcctatgcccttccttcccatttgtagtaaagtctctttaatggagaaacttggttcaggcaggcagctaatcagccagatccctaatgggaaaataaaatagtggcaatcacttgtagtgtgatcctaaggt

SEQ ID NO: 445068 - DNA, 551 bp, Homo sapiens
atacccctcaaaactatcaaggtcatgaaaaacaaggaaacgttaagaaactgtaacacaccagaggacactgaggagacatggcaactcaatgcgatgtgatacaatttgagcaatgatgtaaatactgcagtattttatcaaaattagattggtcttagaacaaaaaaaacacagaggagtcacacatcttttcaaaacctctttacatatattatataatatattcatttattttaatgtcatacacatttttatgattgttgtcaatttttgaaaaaatttttttaagtattttcataaaagagctgcaagatttcagggcattgagatattcttgtgyggtgattactcttaaatactcttgcaagcatataaaatttgaattgttcaacttaactattccacagtgtatatatacttcaaaacatcatgttgtacatgacaaaaaatatgattttatttgttaatttaaaaaaacattaaacatttttgaattgaaaagcatttgaaacattgttagaaaccatttctactgtgggacagttaac

SEQ ID NO: 445069 - DNA, 540 bp, Homo sapiens
tgaggcaggaactgctttggagattgtgagcatgatggggtactagcctctttaaaatgaaaagtggaaagccgtagttagggaggcaggtgcagtctttagcagccccccagacccccaaacaattataagctgattacagcaaatgttggtgatggtaggctttatttcttttgaagatagctacatcttttgacatatcttaaatcatgagaagagtttatgtcctagcacatttttttttctgtatctcagtagttctgtaatgccagctctagatataaaaacacttatggctcagtaaaagcaagatttacttttactaataaggtgcagattattctcctgattcatagacacaatttcatatgttctgtttgaactttttacttttattaaagttatatgctaagatatagttttcatcatattaatcataaccctttcttacactgcacttaatgtaacatcacatatytagaagagtaaaatcctagaaactacaaaaatcacgtaatttgaatctaacttcactattat

SEQ ID NO: 445070 - DNA, 609 bp, Homo sapiens
tccagtaggcaagtacatttcaagtcttggtttgctaatcagccaaagtcagtcacatgaccaacccagatgcaaggagtgggaagtagatttcacgtgatggaagttgctgcaaagaatttgtggtcactcagattctacagtatgaggagtttatattggccagtcttcctcatgttcatacasagctatgaaaagaattctttagtatattttctaatgagttgacagctttgttccaataaaaaaatcaaaacctttaggaaaaagtacatcacttcttagaatacagagtcatcatctgcatctgattcttggcctctcacccataccaacataggtataaaatttccaaggtaattgtagcccaaacagattggtccagaactctccatacaagtcagcttcctttttactgtttggaaatctgttggaaagtacagcagttctgtatttccatgtttattcaagaaaatgcaggcataggacatgccagaaatgtctttgcaggagatatgagctggaaataaagcgcagagtttggaaaacatttgaagcaaacaaaacaacactacaactgcaccttttgcaacttctcagtcaaagcat

SEQ ID NO: 445071 - DNA, 588 bp, Homo sapiens
taatgccaatttcctcctccccctccccaaatccttatcacattgatggaaaataagaaaackcacctgaatgacttaacatatgctttgcttatgtcagcttgtcattttgaaggttggagttgggaacgccctcacccctccttttatttgttatttagaggattagaactaattcatctggcagaccttgagtttgagagaaaattttgaatcatctggtattcaaatgtgtttattcttggcaaagaagaatttcctgattttgcaccaaataaataaatgaacaaataaataaatgaggcttatgtaaaaagaaccaagcttacagggcacattggacatcaaatagctctcaaaagagtaacatttacatgaattaacaccaaatgactcagaaacataaggattgaattcccacaggaaatttacacatggacattgtacttaatgtattcaatggcgtgcatgttacaatttatctggaaaaatcatttattactcatcgtgactccacagggttcttcgtgctccatgagccctgggccaggagtcaaggctgaaagtccctgctctgctaactcagca

SEQ ID NO: 445072 - DNA, 569 bp, Homo sapiens
tttttctcaggagctttttgtccctgtcagagacttgatgcagggctaggtcaacactaaytcgtaatgatatcaatagccaacacatattgagtattaagtattttccatttattttcctgtttggtccttaacaagaactctctgaaacagataatattattattcccatttttttcagatggtaaaatcagcaacacagaaatgaagtgtcaagatttgaacctagacagtttgacttcataacctttacttctctaccccacctcttccacaaacaacaagggatgaatcagatccacaatggccattattctactctcgtatgggcactttcctctatccttgtagtagctaggacactgttatacacatatctaataatttgaatagatcactagtaaaaggatactcattaaggccacattattcccagaattttgaggtgcaaagagctaacatctattgagtgtttattatgctccaggatcaccacatgcttatgtgcatgcattcacctaaacttcacagcaaccctttgaggtaggtactatgatcaccaagtctat

SEQ ID NO: 445073 - DNA, 569 bp, Homo sapiens
tttttctcaggagctttttgtccctgtcagagacttgatgcagggctaggtcaacactaactcgtratgatatcaatagccaacacatattgagtattaagtattttccatttattttcctgtttggtccttaacaagaactctctgaaacagataatattattattcccatttttttcagatggtaaaatcagcaacacagaaatgaagtgtcaagatttgaacctagacagtttgacttcataacctttacttctctaccccacctcttccacaaacaacaagggatgaatcagatccacaatggccattattctactctcgtatgggcactttcctctatccttgtagtagctaggacactgttatacacatatctaataatttgaatagatcactagtaaaaggatactcattaaggccacattattcccagaattttgaggtgcaaagagctaacatctattgagtgtttattatgctccaggatcaccacatgcttatgtgcatgcattcacctaaacttcacagcaaccctttgaggtaggtactatgatcaccaagtctat

SEQ ID NO: 445074 - DNA, 586 bp, Homo sapiens
accaaacctgtgggtgccttgattttggacttcccagcctccagaacactgagaaatatatttatattctttataaattacctagtttcaggtattttgttatagcagcacaaatagactaagacatgtatcatttaacagaaaagttttgaatggaaatccacattttaataaagtatacctatgttagcatttataattaatcataattttttaaaacctcaagtcatgaaaattagttttatttaactcttttaaatgcccattaatggaacaacttttagattttctaaataaaatatgtgtttttttaaatgttttgcactctaagaaagaaaccattcacttatctagagaacacacccatccaaaatgacttcatattagtcagttttgctgcagtacaaacaactccaaaatctcagtaacttgcaatatgtatttctctctcaygttatatgtgtgcttggtggtcacctatggctcagtcccatgggtcttctgatttcagaacagctgccaaaggtatctgagagggaaagaataagaaaagtgatggaaatgtgcaatgcttcttggaattttc

SEQ ID NO: 445075 - DNA, 572 bp, Homo sapiens
caagcagtttcactcagtttgaattttcttgtcaaaattcgtrgtctttgccaaaggaggacattaaagaaaattatcctctttgtaaaaactgaaaggcctgggacagtgtccagctcatttatcatacaatgcatttagtgagggagggtttcactttatgtaagtaataagctacacatgcataacttcttttgcttggatagtggctcttcagacctggatttaattaatacagagctgcatctgggtctgtcagagggaagtgatgaaacatacgctcccatatggatttatagctagttagagtttttgcagactcaactgcaaaatcttcaagcgaaggaccgagtttggttgttgacataataatatggtcttatctaaatgttttgttttctttgactataacttgagttaatggtcaagcagagcaaaaacattggcagttactgattcagacacatttatagacatctttttccccccatggaaaaaaaggaacagaacagtgcaactgaagttcattcttccatttattcagagatgtgaagacatgtaagacattgtca

SEQ ID NO: 445076 - DNA, 572 bp, Homo sapiens
caagcagtttcactcagtttgaattttcttgtcaaaattcgtagtctttgccaaaggaggacattaaagaaaattatcctctttgtaaaaactgaaaggcctgggacagwgtccagctcatttatcatacaatgcatttagtgagggagggtttcactttatgtaagtaataagctacacatgcataacttcttttgcttggatagtggctcttcagacctggatttaattaatacagagctgcatctgggtctgtcagagggaagtgatgaaacatacgctcccatatggatttatagctagttagagtttttgcagactcaactgcaaaatcttcaagcgaaggaccgagtttggttgttgacataataatatggtcttatctaaatgttttgttttctttgactataacttgagttaatggtcaagcagagcaaaaacattggcagttactgattcagacacatttatagacatctttttccccccatggaaaaaaaggaacagaacagtgcaactgaagttcattcttccatttattcagagatgtgaagacatgtaagacattgtca

SEQ ID NO: 445077 - DNA, 572 bp, Homo sapiens
caagcagtttcactcagtttgaattttcttgtcaaaattcgtagtctttgccaaaggaggacattaaagaaaattatcctctttgtaaaaactgaaaggcctgggacagtgtccagctcatttatcatacaatgcatttagtgagggagggtttcactttatgtaagtaataagctacacatgcataacttcttttgcttggatagtggctcttcagacctggatttaattaatacagagctgcatctgggtctgtcagagggaagtgatgaaacatacgctcccatatggatttatagctagttagagtttttgcagactcaactgcaaaatcttcaagygaaggaccgagtttggttgttgacataataatatggtcttatctaaatgttttgttttctttgactataacttgagttaatggtcaagcagagcaaaaacattggcagttactgattcagacacatttatagacatctttttccccccatggaaaaaaaggaacagaacagtgcaactgaagttcattcttccatttattcagagatgtgaagacatgtaagacattgtca

SEQ ID NO: 445078 - DNA, 297 bp, Homo sapiens
gtttagtgctccctgaggacatctgcctctctagactataaactctttggggctaggtcttctttgtctttatatcttcaatgtctagcacactttcttgcatgggcttgcaaagatgatcarttttggaagattaacaacaacaacaataatactgtataagcattaaaaaaatctcttatattgtaggaacaactctaagtgctttgcatggatcatctcagttgccacattaagcctatcaagaaggtactattagtattcccattttgtggattataaaactggtgcttgagg

SEQ ID NO: 445079 - DNA, 471 bp, Homo sapiens
aatccaactttactttgattaaggaagagatccattcatctgaaaatgtttgaggtatagtaaacatctacattataattgaaattaagtaaatatgcacatattagtcaactgaacagagaactgactagaagarctcccatctttatatgatgtttatatactatagttgttgtttggtcagttggcatatcttacaagagctagtgagttcttataatcctgctaggtgtctggtgccaccaatatcaatgcctgtaagcacactgcctcactgcctctcaaatacagtcagactttatttaacagtgggtgtacattctgagaaatgagttaggtgatttttgtcattgtgtaaacatgataaagtgtatttacacaacctagatgtcatagtcgactatatgcctaggctatatgatacagccttttgtttctagactgcaaacctaaacagcgtgtgactgtact

SEQ ID NO: 445080 - DNA, 471 bp, Homo sapiens
aatccaactttactttgattaaggaagagatccattcatctgaaaatgtttgaggtatagtaaacatctacattataattgaaattaagtaaatatgcacatattagtcaactgaacagagaactgactagaagaactcccatctttatatgatgtttatatactayagttgttgtttggtcagttggcatatcttacaagagctagtgagttcttataatcctgctaggtgtctggtgccaccaatatcaatgcctgtaagcacactgcctcactgcctctcaaatacagtcagactttatttaacagtgggtgtacattctgagaaatgagttaggtgatttttgtcattgtgtaaacatgataaagtgtatttacacaacctagatgtcatagtcgactatatgcctaggctatatgatacagccttttgtttctagactgcaaacctaaacagcgtgtgactgtact

SEQ ID NO: 445081 - DNA, 558 bp, Homo sapiens
gaggaagggcattagcagcctggtctgtactgcagtcaggggagctgtcctcccttggtggtgctgaagcgagacagagaagtgactgtaagttggacagtggagggatgggtactctttccctcctgtgatggaatcccgaagaaaatgcataagatcaggctaccaaaaactttttcatccctctccacctacatttgctgcctatttactacgcatcacgcctactgctccgctgctcaaatygggcgtttatgctctaattttgcgccaactgctcactcctggggcttgtttatttccagctggtttctggttgcttccctaacgaagtaagatccactcacagatgtgcctttctcccgcatttaagagtaattgtaacccctggttttaaaagcaaacagccttgtttatctccttaagcagcaagttgtaattaaactattagtgttgttatcagcattgctgaacagagaagcatgcacactcccaataaattacataatctgggcatagagataattttgtttatgtcttaaccacaatttatgaaca

SEQ ID NO: 445082 - DNA, 403 bp, Homo sapiens
tttgagttaaaagaagaatgaatctctattatataggcacatttatatacaaaatattagttwtatttttaatttgaatattcagggattattcaaattgatgatctctagatatttgttgtataatagagtaagatattaaagaaattttagcaataaatggagagtgaggaaactaaatactaattcggctcctaattggcatttcaagtcttttaacctgttctcctttataattaaaattaaacgggtatgtaagatctatatttcccctttacccttttagattaccagggaaggtaaacatgtgggcagaccagctaaatggcagaatcctacaaaacaaaatatctctttggaattcacagaaagaaggatcctaacctctaagcactgacctagc

SEQ ID NO: 445083 - DNA, 403 bp, Homo sapiens
tttgagttaaaagaagaatgaatctctattatataggcacatttatatacaaaatattagttatwtttttaatttgaatattcagggattattcaaattgatgatctctagatatttgttgtataatagagtaagatattaaagaaattttagcaataaatggagagtgaggaaactaaatactaattcggctcctaattggcatttcaagtcttttaacctgttctcctttataattaaaattaaacgggtatgtaagatctatatttcccctttacccttttagattaccagggaaggtaaacatgtgggcagaccagctaaatggcagaatcctacaaaacaaaatatctctttggaattcacagaaagaaggatcctaacctctaagcactgacctagc

SEQ ID NO: 445084 - DNA, 418 bp, Homo sapiens
tctgtgctggggggttagagggagcgatagaaaacggggagcctgcgatagaaatgcagagcctggggacccagtgtggcttcttggtgaaggctgtgcttcagcagggcttcaggaaagagcagtttctcccggaaaggcagaggagagagtgtgtgtaaaggcatgagtgcaaatcgcatgcacacattgcaaagaacaagaaagctggtaggactggarcctgtcgtgggaccaaggacatgcaaaggatgagactggagagggagctggacaaggcagggccccagaggcttttgctccaaaaagctcatgataacaacatgagaaagatggatcagagcagcccgaaactagaggcagggaggtactgggttgatcttaaatatttggcaagacatgataaaggcttgagtta

SEQ ID NO: 445085 - DNA, 555 bp, Homo sapiens
atgtcttctttcacctaccatggcagagctgaatagtygtaatggagatggcatggcctgaaaaacctaatatatttactatctggccccttagagaaaaaaaaaaaattgctgacctctggcatataggaataccaacttcttatcatttattttatgtaatctgacctctacttagtttccgaccccaattcttcctacaccaatcctcaaccaagttgactcttttactcctttgtaaatgtgagcatttctgcttttactttcctatagtgtggaccctgcccgtaacttctggctctttgtttctgcttaaggactgctttttcgtcatgattgattaaaatttagcctcacttatagtctttctttatttgtcccaccttcagtgtgtaacatgtaatagttgcttctttagctatgttaatcggtccctaaattacaacgatatatttctaaattatgccgtagtttgcttgggtgtttcctaggcagccttctgcgtggcaattcagggatcaagtagctttccagcttgtgatgttgctagcttct

SEQ ID NO: 445086 - DNA, 555 bp, Homo sapiens
atgtcttctttcacctaccatggcagagctgaatagttgtaatggagatggcatggcctgaaaaacctaatatatttactatctggccccttagagaaaaaaaaaaaattgctgacctctggcatataggaataccaacttcttatcatttattttatgtaatctgacctctacttaktttccgaccccaattcttcctacaccaatcctcaaccaagttgactcttttactcctttgtaaatgtgagcatttctgcttttactttcctatagtgtggaccctgcccgtaacttctggctctttgtttctgcttaaggactgctttttcgtcatgattgattaaaatttagcctcacttatagtctttctttatttgtcccaccttcagtgtgtaacatgtaatagttgcttctttagctatgttaatcggtccctaaattacaacgatatatttctaaattatgccgtagtttgcttgggtgtttcctaggcagccttctgcgtggcaattcagggatcaagtagctttccagcttgtgatgttgctagcttct

SEQ ID NO: 445087 - DNA, 555 bp, Homo sapiens
atgtcttctttcacctaccatggcagagctgaatagttgtaatggagatggcatggcctgaaaaacctaatatatttactatctggccccttagagaaaaaaaaaaaattgctgacctctggcatataggaataccaacttcttatcatttattttatgtaatctgacctctacttagtttccgaccccaattcttcctacaccaatcctcaaccaagttgactcttttactcctttgtaaatgtragcatttctgcttttactttcctatagtgtggaccctgcccgtaacttctggctctttgtttctgcttaaggactgctttttcgtcatgattgattaaaatttagcctcacttatagtctttctttatttgtcccaccttcagtgtgtaacatgtaatagttgcttctttagctatgttaatcggtccctaaattacaacgatatatttctaaattatgccgtagtttgcttgggtgtttcctaggcagccttctgcgtggcaattcagggatcaagtagctttccagcttgtgatgttgctagcttct

SEQ ID NO: 445088 - DNA, 555 bp, Homo sapiens
atgtcttctttcacctaccatggcagagctgaatagttgtaatggagatggcatggcctgaaaaacctaatatatttactatctggccccttagagaaaaaaaaaaaattgctgacctctggcatataggaataccaacttcttatcatttattttatgtaatctgacctctacttagtttccgaccccaattcttcctacaccaatcctcaaccaagttgactcttttactcctttgtaaatgtgagcatttctgcttttactttcctatagtgtggaccctgcccrtaacttctggctctttgtttctgcttaaggactgctttttcgtcatgattgattaaaatttagcctcacttatagtctttctttatttgtcccaccttcagtgtgtaacatgtaatagttgcttctttagctatgttaatcggtccctaaattacaacgatatatttctaaattatgccgtagtttgcttgggtgtttcctaggcagccttctgcgtggcaattcagggatcaagtagctttccagcttgtgatgttgctagcttct

SEQ ID NO: 445089 - DNA, 618 bp, Homo sapiens
tttcacctatatgtaatatgttgttactacacttgctgagtctccatgttttgttttaatacatagttgtgctagagatattggtgaggaaatttgcccaggtaatatagcagagcaataaaaagaaaaaaataaagagcaaaggcagcaatttccattctgaatgtgtctctttctaatcctatctcaactcttcacacatcccaaggaggtagttcaatataatggaaattataaactttggtgtgtaaccattttttcaccctgcaatttaaaaacagcacgactttcacagggattcttcatctataaaacgtgggatatcatctatttcataagaatgttttgagactcaattttgataatgggtacaaaacagataccatccatgaaagcatgcattttgcatattcataaaacctctgggtgtatcttagttttcctgcccttctctatttctgactgtatgcatgtgtttacttttatgttgctaaaggacatgtgcctttgaaagctaccttcaaaactgttagaaaaakttggagtgtgccatttatttgttgcttcttggcactgaacttgtacttctttgttctactttgcgctactggagcagga

SEQ ID NO: 445090 - DNA, 565 bp, Homo sapiens
acaggggttactctttctggacttcttgttctgtaagcaaacttaaaccttaatgtaatagggttttctttgtgtgtagatgaatgaaatcctaacttactgagaattttgtccacaaatatggatgaatttgatgtttcacaggaaatctcttctatgaagtcagctatgttagactaaactcagccaagtttaaactcagctaagtctaacatggcttgtttgataatttgagcaaaaatttgaaattaatgtcatcaaggaaaatgtgtcatgtttctatttctatggattcctcacagtagtccaaaaatattggctgaatttcactctcttttttactgaataatcatatagttcatatcaagtgaaaactaggggagaaagtagatctctacttgtgacttttatctttgctggcaggcataagtgtacatgcgcgtgcacacacaccctctctctctgtctctctctctctctcacacacacacacacacacacagagatagagagagagcaagcatgcaggagakatcaaacattttctacaaaccaataccatgaa

SEQ ID NO: 445091 - DNA, 685 bp, Homo sapiens
gtgttacatctaaaatttcctccccaaaacaaaggtcacctgtttcactcatgtccgtgtgaagagaccaccaaacaggctttgtgtcagcaataaagctgtttatttcacctgggtgtaggcaggctgagtcggaaaagacagttagcraagggagatggggtgggagatggggtggagccgttttataggatttgggtaaaggaaaaagtggggctgttctctggtgagcaggagtggggggtcacaaggtgctcagtcggggagcttttgagccaggatgagccaggagaaggaatttcacaagacaatgtcatcagttaaggcaggaacaggccattttcacttctttcgtggtggaatgtcatcagttaaggcaggaaccgaccatctggatgtgtacgtgcaggtcacaggggatatgatggcttagcttgggctcagaggcctggcattcctgtcttcttatattaataagaaaaataaaatgaaatagtggtaaagtgttgggatggtgaaaattttttgggggtggtacggagagataatgggtgatgtttctcagggctacttcaagtgggattaggggtggtgtgggaacctagagtgggagagattaagctgaaggaagattttgtggtaaggggtgatattgtgggactgttagaagaaacatttgtcattt

SEQ ID NO: 445092 - DNA, 534 bp, Homo sapiens
gcttaggttttattttagggcccaagatatggttcatcttgrtgtacattccgtgggcacttaaaaaaaatatatatatatatgtttgtatatatattctgctgttggaactaaagtagtctataagtgttgaatacatcctgttgagtgatggtattgtggaactattctatattcttgctgctcttctgtctagttgttctacaaaatttaggaaaaaggtattgaagtctctcactatattcatagatttttatatttcttcttctatcggtttttgttttatatattttatgtctctgtttgttgcattaaatatgagataatatttctgctattggtttacacctcactttgttatatcacatatctgtacactgaaaagcacaaagcactgcttagagaaataaaagcagcactaaacaaatggagatctgcacccatgtttatatgtcataggtcttaatattgttaagacgtcagttcttcctaaagatagattctacgtaattccagtcaaagtctcagcagaat

SEQ ID NO: 445093 - DNA, 598 bp, Homo sapiens
aataactaacagcatagctatattatttattagatggaaatacatgtcagaaaaaatagcctaaatgtttgtaggtagctgcatgtgaggtggaagaattgaggtttgagaagggtggacaggagtctgctgatttttactacaaattttgagatattatttgaatttttaacctatgtacttgtattgcttttataaaaataaagcctaattatttacaaccctaagaagtttgtagttcattatgcaattttttttgacaaacattattgaaattaaaatgtgtattgcctaaaggaagaaaacrttcagaaaagagccatgttgaataattcaaagctaagcactctgggtaactgaaatttcactgtattattttagttttgttcttcatagatttcaacacttcagactattctgagattcctaattcattatacaaggtttatagaatatgtgagattctcaagcactagagaaatacaattattcctatgaatgtgtctagtttctcaatcataggaaggaggtggaatatttaaaaattggtgcattggtatagcagtaactatagacacatatttgagttcagtctttc

SEQ ID NO: 445094 - DNA, 606 bp, Homo sapiens
aatctctggaatcaattcactttctacaaataggactctcaccaagttcctcatggtcttccctgctgatgcccactttttctcaaactcctctcgtgcaccctcatttagctaatttaggatgctctaaatgttaggtctgtccctttgtacaatctttacatgtggatttagcatgcctctctcccggtccaaaagattcattgattttttatttctaaaagtgaccattacttggtgggacatatcacacttggagaagtgactgaatatttgggaaatagatcmttcaaaaagaaaaagctgttttaatattataattccaaaccgtattttggaaaactttcaaaaaccacatattgcttccataataaaacctataaaacagaaagttcatttccattcatttaccaactagtcatcacatacatactatatagcagacatgagtctagctgcaggacaagttttgctggcttagtaagaggaagcagacaagctggggtagtgctgagaaaagatggtcaaagtgaaatattggaaaggttctacaaagtggaaaatgacttttccactacttttgatgctgtttactacatcaaatct

SEQ ID NO: 445095 - DNA, 557 bp, Homo sapiens
tgaaatattggaaaggttctacaaagtggaaaatgacttttccactacttttgatgctgtttactacatcaaatctcaactctgaatattttttagcagccttgatagcatagcttcacctaagccactgtagaggatggaatggtggacccaaaaagatatacccatgctctaattcctggagtgtgtgaatgtgatcttatccaggtaagagctaaatccagtgacaagtgtccttacaagagacacacagggagaggaggagaaggtcatgtgaagacagaggctgagactggagtgattacatccacaagccaaggaataccaccagaggctgaaagaggcaaagagaaactcccccctggagcmttcagagagagtgcgaccctgctgacacactttaatttcagactgtgacctgcagaattgtgagagaatacatttccgttgttttaagccaccaagcttgtgttaatttgttacagcaatcacagtaaactaatgaagccatatcctctcatttgcactcaagtttccacaccctatagcaacagagg

SEQ ID NO: 445096 - DNA, 589 bp, Homo sapiens
ggccatctctgaactttgagtctttacttaaggaactacaactgaacttagtacctagacaaactgaaacctaacttaggagtacatttttgtgtaacagataggtctgagccaatcagaagcagctgagcttcagccaatcacaggctgccaacggatcagatatgtgcaaataaggcaaaagcccagctgtaaccaatggaactatttctgtacatgacttgcctcttctgtctataaatactcacggcccactggcagagcacaattctctgaatctcttctggttctgagtgctgcaagattcatgaatcattctttgttcagataaactctgctatatctaatttgtctaaagcttctcytttcaaagatttcattcatttcttagaattttgtaaagcaaaattgtataccaaatagcaccatggcctcctactgcagagtaaagaatgggaatgaaccttttactccgagcacctttcctgggatttcacattcctgatacaaaaagccaatagatccccgtccggggtctgcttttgtgggaagtttttgttggtttgttttgcccccaagctattaaaat

SEQ ID NO: 445097 - DNA, 589 bp, Homo sapiens
ggccatctctgaactttgagtctttacttaaggaactacaactgaacttagtacctagacaaactgaaacctaacttaggagtacatttttgtgtaacagataggtctgagccaatcagaagcagctgagcttcagccaatcacaggctgccaacggatcagatatgtgcaaataaggcaaaagcccagctgtaaccaatggaactatttctgtacatgacttgcctcttctgtctataaatactcacggcccactggcagagcacaattctctgaatctcttctggttctgagtgctgcaagattcatgaatcattctttgttcagataaactctgctatatctaatttgtctaaagcttctcctttcaaagatttcattcatttcytagaattttgtaaagcaaaattgtataccaaatagcaccatggcctcctactgcagagtaaagaatgggaatgaaccttttactccgagcacctttcctgggatttcacattcctgatacaaaaagccaatagatccccgtccggggtctgcttttgtgggaagtttttgttggtttgttttgcccccaagctattaaaat

SEQ ID NO: 445098 - DNA, 587 bp, Homo sapiens
ttaaggacatggttttagctatcaagaaattagtgttttaggaaaaaaaatatatataaatatatagagaccaaaatggtctctatatacacacatatatgtatgtgtatatacatatatatgtgtgtatatacacacatgcatacatatacatatacatatatatgtatacacacacacatatatatgtatgtgtgtatgtgtgtgtatgtgtgtgtatatatatatatakagagagagagagagagacataccacccaaagacaaaggcaagcaggaattcagatacaaacaaaaaggacaaaactaatttttggagaaaatgtcatgtgccaaagcctgaatgagcggagatgctggtagcttaagaatgaagaaatgacatgggaaactcaaaatgatgtgatgaaagctccttcatcaaaacaaagttcttgctcccaacacagatgagatagggaaaccacttgagagcagggagcagaggagaagcacgatccaatggtagagaaaagaaacgtttttggttgagaatgaatcactgactgcagaaaaatagtaagatatgttgataggaagtaattttt

SEQ ID NO: 445099 - DNA, 587 bp, Homo sapiens
ttaaggacatggttttagctatcaagaaattagtgttttaggaaaaaaaatatatataaatatatagagaccaaaatggtctctatatacacacatatatgtatgtgtatatacatatatatgtgtgtatatacacacatgcatacatatacatatacatatatatgtatacacacacacatatatatgtatgtgtgtatgtgtgtgtatgtgtgtgtatatatatatatagagagagagagagagagacataccacccaaagacaaaggcaagcaggaattcagatacaaacaaaaaggacaaaactaatttttggagaaaatgtcatgtgccaaagcctgaatgagcggagatgctggtagcttaagaatgaagaaatgacatgggaaactcaaaatgatgtgatraaagctccttcatcaaaacaaagttcttgctcccaacacagatgagatagggaaaccacttgagagcagggagcagaggagaagcacgatccaatggtagagaaaagaaacgtttttggttgagaatgaatcactgactgcagaaaaatagtaagatatgttgataggaagtaattttt

SEQ ID NO: 445100 - DNA, 494 bp, Homo sapiens
acttatatgtttattgtctatttcccccaggagaatgcaagctcctgggagaggacagatatttttatctgttttgtttactcttcacagttcccaaatggctagacactgcctggtacctagaaggtgttccattaaaatttgttgacgttcatttgaatgttgaataaataaaataaacagctacagtatgcatttttctctcatagatacgtgttttccaagtgcccaggtaaagtcgtttttctcttctaagaagtgaacattatgcctgaacactttaaaamcttgagtgagatctacagagaagtaaagcatattgtcctcaggacacaagtctttctacgcccaaacttacattgaggagataatatctggcacattgtaaatgtgaataagtaactgtatttcagctcttaaaatagattgggagaatagatagccaacggtggacctggaaatatgtatgaaggaaagtgttgaaattaactaat

SEQ ID NO: 445101 - DNA, 581 bp, Homo sapiens
tgtgctgttatgaaagtaactcaaatattacatatttaaatcctaagtttctccatagtgtcaatgagagggagataaaaggcgagcaaataargccttttatttaagaagagccagtaaataattttaaaacatagtaagaaaatttaagttataaaaggtaaatggatttatatttggaaaatgacacatttaaagtattctctacaaaaatcttgttttaaaaacagtgtttcatcaattcctcttgacatccatagtaatgacaaaatatccttacacattttcatatgtattattttctaaatggtataataaaagctgtcagccatcccctctgcataaaaacagaaaagtgcaatcctttgttctgtgagtgactgcatttgcacattatagaactatgaaatatttacaaagggaaggttaaatcaatacagctctaaaatttgtacttcagtcttcagggatttatatcatcttgatttaatgaactacgaggagttagaatgttgacacacagaaaaaacatatttcggtttctcctttattgtacatacagaaagtattgaagtaggatt

SEQ ID NO: 445102 - DNA, 642 bp, Homo sapiens
agcaggagctaggatgacgggagaagaagccacgagctaaggaatgaagatggcctctagaaactggaaaaagcaaggaaacagatgctccctagagctgcctaaaggaacgagtcctgctggcacatggattgtagcccagtaaaactgatggtaggcttccagcctccagaaatgtaacaggaaaaatgtgtgctgttttaagctaccaaatttgtagtaatttgttacagcagcattgggaaattaatacaagyaggaaatctgagttattcatattaatgtgagttcctttgtttacacaagctgttataatatctgggttacccaagctaaactcccacagttctagactgccagaaattagggtggcttttccttttttttcttttttttttttttttcccagttgatttgctcttagagagttccaggagaaaacatgcttccttcgggatgttggttgggaaaagcaagaagttggttcgatctcaattttcaaaagatccagtgtttttaaagcagatttactactccacacaagaatgctctcccaaaggcatttctagcctaaaaccccaagtagttcttaagagccagagtttccagagaacaacaatgaagttgtcatcctgtgttgat

SEQ ID NO: 445103 - DNA, 556 bp, Homo sapiens
cctccagtgcttctgtgagttggctgctgcaggcatcttggtgctcgtttgggaactctgtggccatgtgaatagctaaaacaacgtcaaacctgacactcccaaagcatctcccatggaagaagatgtcctgatctataaggcttctgcattctttaatagacatctgggctttgaatatttgggaaattgtacttcatgacctttggaattcccaatttccagcaaatattaaacaaatggcaggaaagttaatcttttccacaaggagtaaaggaattagttcaaccattcactgtttattattrgtagcaattgtgtgcaaaataaggcacgtttatgtaaatgtgaatgctcttccaactcaatgtcaatctgaaagtttataaaacataataaaaagctgggccctggctggtagtgcatgacacatgtttagcattcgttccctttctcttatccattctaaatgtgaaagcctgcctgcatttaatcaggttctcccatcattaacagcctataaaaaggcacaagatgatagaaaaaatatttctga

SEQ ID NO: 445104 - DNA, 556 bp, Homo sapiens
cctccagtgcttctgtgagttggctgctgcaggcatcttggtgctcgtttgggaactctgtggccatgtgaatagctaaaacaacgtcaaacctgacactcccaaagcatctcccatggaagaagatgtcctgatctataaggcttctgcattctttaatagacatctgggctttgaatatttgggaaattgtacttcatgacctttggaattcccaatttccagcaaatattaaacaaatggcaggaaagttaatcttttccacaaggagtaaaggaattagttcaaccattcactgtttattattggtagyaattgtgtgcaaaataaggcacgtttatgtaaatgtgaatgctcttccaactcaatgtcaatctgaaagtttataaaacataataaaaagctgggccctggctggtagtgcatgacacatgtttagcattcgttccctttctcttatccattctaaatgtgaaagcctgcctgcatttaatcaggttctcccatcattaacagcctataaaaaggcacaagatgatagaaaaaatatttctga

SEQ ID NO: 445105 - DNA, 619 bp, Homo sapiens
ctgtttattattggtagcaattgtgtgcaaaataaggcacgtttatgtaaatgtgaatgctcttccaactcaatgtcaatctgaaagtttataaaacataataaaaagctgggccctggctggtagtgcatgacacatgtttagcattcgttccctttctcttatccattctaaatgtgaaagcctgcctgcatttaatcaggttctcccatcattaacagcctataaaaaggcacaagatgatagaaaaaatatttctgagtatttaaagcaaaaaagtgatgaatgatgcatttccccagaattcaggtgttcttcctacacagtccgcctgtgaacattttactgttgggtataacagccaagtttcagcaagcagaacaagatgttcctttgctttctatcaggggatgtaaaatgtttgctttttcttgactgcattcaagatcactagcgagtctatgaagtgaatgcggatataaggstcaggatctgtgactggtacaagaggcacaattatgcttcattgcccatatattttaaaattctcttttgttccttatgtatgttcttatgtatggccatttcacacgttcccagatctgggtgcaatacagtt

SEQ ID NO: 445106 - DNA, 586 bp, Homo sapiens
atcttatttatatgtatattatatttaaagttttctaaaaaaaagtgagtgaaacaagatcaaaaacagggattccttacctaccattgagaagaaattgctttcaagtactttagaagaactaaactttgtaaatcattcttagctcttcattaaaatagccattcaaagcatttgaaaatctcaactgcctactttccagtactttctttgcctgcacatatatgcaaatacatatgtgtatgcaggtgtacaatactttcaagtaattatgtatatctatatctatctatctatctatatatatatgaacttttatataggattgtaagatatatacttctacatataaaatttgaacttttcacaatttcagattcttcctgtctttggtgtatctgccttgctgagttccatgtgggctttatctttacattatgatggaggagagacagctgtgtccttgagagcagcatagagttagccatagcatagtgggaacagtygagtgtgaaaacaaagaggcaacctgtctttattctttatgttgaccaggacctcacaagtgtacactgggcaaaaaaac

SEQ ID NO: 445107 - DNA, 632 bp, Homo sapiens
tacatttttaattgaatatgtttgtcttagtcatttatcagatataaaagtttttagaagtattaaaatactgccaactatttatgtatttacttttcttgattttttttgagacaaagtctcactctgttttccagactggagtgcaatggcacaatcttggctcactgcaatctctgcctccagggttcaagcaattctcctgcctcagcctgccaagtagctgggattacaggcgccgaccaccatgcccggctaaatttttgtatttttagtagagtcagggtttcaccatgttggccaggctggtcttgaacttctgacctcaggtgatccacccgccttggcctaccaaagtgctgggattacaggtgtgagccaccatgccaggtaaaatacagccaactatttaaatttaagctggaattgcagtaccattttcaatttycttttctcattttctattatgtagttattcttatttgtgtaagtctgaagagaagtgagctttagttatcatgtccacaagtgaccactgtagaagacatacataactagcaacaaaatgggagagctagctggaaatacccattcattagtttaaaatttttcaataaatatgtacggagcat

SEQ ID NO: 445108 - DNA, 632 bp, Homo sapiens
tacatttttaattgaatatgtttgtcttagtcatttatcagatataaaagtttttagaagtattaaaatactgccaactatttatgtatttacttttcttgattttttttgagacaaagtctcactctgttttccagactggagtgcaatggcacaatcttggctcactgcaatctctgcctccagggttcaagcaattctcctgcctcagcctgccaagtagctgggattacaggcgccgaccaccatgcccggctaaatttttgtatttttagtagagtcagggtttcaccatgttggccaggctggtcttgaacttctgacctcaggtgatccacccgccttggcctaccaaagtgctgggattacaggtgtgagccaccatgccaggtaaaatacagccaactatttaaatttaagctggaattgcagtaccattttcaattttcttttctcattttctattaygtagttattcttatttgtgtaagtctgaagagaagtgagctttagttatcatgtccacaagtgaccactgtagaagacatacataactagcaacaaaatgggagagctagctggaaatacccattcattagtttaaaatttttcaataaatatgtacggagcat

SEQ ID NO: 445109 - DNA, 632 bp, Homo sapiens
tacatttttaattgaatatgtttgtcttagtcatttatcagatataaaagtttttagaagtattaaaatactgccaactatttatgtatttacttttcttgattttttttgagacaaagtctcactctgttttccagactggagtgcaatggcacaatcttggctcactgcaatctctgcctccagggttcaagcaattctcctgcctcagcctgccaagtagctgggattacaggcgccgaccaccatgcccggctaaatttttgtatttttagtagagtcagggtttcaccatgttggccaggctggtcttgaacttctgacctcaggtgatccacccgccttggcctaccaaagtgctgggattacaggtgtgagccaccatgccaggtaaaatacagccaactatttaaatttaagctggaattgcagtaccattttcaattttcttttctcattttctattatgtagttattcttatttgtgtaagtctgaagagaagtgagctttagttatcatgtccacaagtgaycactgtagaagacatacataactagcaacaaaatgggagagctagctggaaatacccattcattagtttaaaatttttcaataaatatgtacggagcat

SEQ ID NO: 445110 - DNA, 574 bp, Homo sapiens
ttattaaaattaaaaacttctgctctgcaaaagacactgtcaagagaatgagaagacaagctacagactggaagaaaatatttgtaaaaggcatatctcataaacaaagaactgttatccaaaatacataaataacttamaattcagctataagggcacaatgtgatttaaaaataggcaaaagatctgaacagatacctcacctaagaagataaacagatgtgaaataattgtataaaaatatattccacatcattaaggaaaaacaaactaaagcaacagtgagataccgctacacatttattggaatggccagaatccagagcagtgccagcataaaatactggaaagaatgaggagcaacagaaagtcttattcattgctgctgggaataaaaaatggtacagccactttggacattatggtaacttcttacaaaactaaccatattcttatcatatgattaggcagttttgctccttagtgtttactcaaatgttttgaaaacttatgttcacacaaaaatctgcatatagatttttatagcagctttattcataattgccaaaacttg

SEQ ID NO: 445111 - DNA, 574 bp, Homo sapiens
ttattaaaattaaaaacttctgctctgcaaaagacactgtcaagagaatgagaagacaagctacagactggaagaaaatatttgtaaaaggcatatctcataaacaaagaactgttatccaaaatacataaataacttacaattcagctataagggcacaatgtgatttaaaaataggcaaaagatctgaacagatacctcacctaagaagataaacagatgtgaaataattgtataaaaatatattccacatcattaaggaaaaacaaactaaagcaacagtgagataccgctacacatttattggaatggccagawtccagagcagtgccagcataaaatactggaaagaatgaggagcaacagaaagtcttattcattgctgctgggaataaaaaatggtacagccactttggacattatggtaacttcttacaaaactaaccatattcttatcatatgattaggcagttttgctccttagtgtttactcaaatgttttgaaaacttatgttcacacaaaaatctgcatatagatttttatagcagctttattcataattgccaaaacttg

SEQ ID NO: 445112 - DNA, 512 bp, Homo sapiens
tcagaactcaactgggtctctaaatccagggatacaaatcaaaaagggctggcatttattaatttgttaggaatgggaaaaggggagaattgtgaaatgtagaagactggtgtaagacgatatgtttgatagtgacacgactgccttgaaaagtaaagatgagcccaactaaattaagtcagatttctgaaatgtcttccatcacaccaaagagtagggaaaaaaatatgtgatggtctgataactggaaataatctgaatacttggcttaatggtgggcattcaaggaagtagttgatggggaggctatttctttttaatcattacatgaatgtttgctggagggtgaataggttcttygatatttctgtttttcacataaaatattttcatgtcagcagctgagaaatgatatgagaatagatctcaggctggtaattgactaaaggaagtgaaaacattgaatgtctatataaatttgtatatgagaaagagatttgaagagggaatgt

SEQ ID NO: 445113 - DNA, 622 bp, Homo sapiens
aaaccagccgtagacaagacataaacaagtgggtgtggttgtgtgccaataaaactttatttataaaaatagtcagtggctggatgtggctcactgattgcagtttgctgactcctggtttagatactattgcttccttttgcagatgaggaaagmaaaacccaaaaagatgaaaagagcctgccactgtcatgggccagttagtggcaggacacaaaatatcaaaattccatattaagttctgctattttttgctcacggttttatgttttgcacataaaaacagtccctctgttgcctcagaagcctgaagaagcaagagacaactttcccctctaggttttgtcattaccctagctaaagcaaatgtctccacttgagaatgctactattctttgacatttaatatagaagaaaactttaatagaatagacatgtataaatatgtttaggaaatataagcatttcaaatattgaattggttacttaaagccataagggtaaaatcattgctaatagaggaggaaaaaaatgatttatatattaatacatctttgctcagaatgttggcatccttgttttccaggatgttcattaatatcctgcatttattttagtttta

SEQ ID NO: 445114 - DNA, 551 bp, Homo sapiens
tcctttctttattcaacaagaaagagatttactgcatattatgcctcaaagacagtgctagtaattaagagaatagtgactaagactgacaaagccctagcttcctagccttcataaggacacattttagtttgggaggtgtgatggttaatactaagtgtcaacttgattgtactgaaggatgcaaagtattgagcctgggtgtatctgtgagggtgttgccaaagaaattaacattgtagtcagtgggctgggaaaggcagactcacccttaatctgggtgggcaccatctaatcagctgccagtgtggctagaatacaaagcaggcagaaaaacgtgaaaagactagaccggcctagcctcccagcctacatctttctcccatgctggatgcttcctgcccttgaacatcagactccaagttcttcagttctgggacttggactggctgtccttgytcctcagcttgcagatggcctattgtgggaccttgtgattgtgtgagttaatacttaataaactctcatatatatatcctattagttctgtc

SEQ ID NO: 445115 - DNA, 522 bp, Homo sapiens
gtattgttattatgcatgaattaaaaatgttttaaaaaaggaaaaatggttttattcaagaaataattagtttgtagaacagaaaggaaagctggtactttattgtatatgagggataaggagagtgagaagtcacagctgatgccgccttcctagttgttctaactatatgcagttgtgctctcctttgagattctaaacaataagaggaagaagagcaggaagataatgatgatgatgttcagtgtgaagtgtaggcacttgcatatgttattctaaaattsaaatgaaagatgtgggcaagaaataagaagttgataagcagataagcattgcctaggggaaaagtataaagtggaagtaaagcaagattagttctaatgtttgaggaactcttttattgaaagaccatatagaaaggaaaagccagcagacacagaatgaaaggtgatatttgtatttgtttgtttttgtttctttttttagacaaggtcttgctctgttgcccaggctgtagtgcag

SEQ ID NO: 445116 - DNA, 522 bp, Homo sapiens
gtattgttattatgcatgaattaaaaatgttttaaaaaaggaaaaatggttttattcaagaaataattagtttgtagaacagaaaggaaagctggtactttattgtatatgagggataaggagagtgagaagtcacagctgatgccgccttcctagttgttctaactatatgcagttgtgctctcctttgagattctaaacaataagaggaagaagagcaggaagataatgatgatgatgttcagtgtgaagtgtaggcacttgcatatgttattctaaaattcaaatgaaagatgtgggcaagaaataagaagttgataagcagataagcattgcctaggggaaaagtataaagtggaagtaaagcaagattagttctaatgtttgaggaactcttttattgaaagaccatatagaaaggaaaagccagcagacacagaatgaaaggtgatatttgtatttgtttgtttttstttctttttttagacaaggtcttgctctgttgcccaggctgtagtgcag

SEQ ID NO: 445117 - DNA, 530 bp, Homo sapiens
caattagtcctgctagaggttaacgtcatttctcacagtctgaagttgctattgccttttaagcaaatatcttactcttgttaaagcatttttatgatgactacagcaaattaaagatgatctaaaaaattgctatgctttgggaggccgaggcagacggatcacgaggtcaggagatcaagaccatcctggctaacaccatgaaaccctgtctctactaaaaatacaaaaaaaaattagccaggcatggtggcaggcgcctgtagtcccagctacttgggaggctgagtcaggagaatggcgtgaacccaggagggggagcttgcagtgagccgagatcgcgccactgcactccagcytgagcaacagtgcgagactccgtctcaaaaaaaaaaaaaaacaaaaaaaattgctatgcctgttatgatgttcaaattctatgtgtcaatttggctaggctatgaagcccagttgtttgttcaaacactgatctagatgttgctgtgaaagtattttgtagatgtgattaa

SEQ ID NO: 445118 - DNA, 530 bp, Homo sapiens
caattagtcctgctagaggttaacgtcatttctcacagtctgaagttgctattgccttttaagcaaatatcttactcttgttaaagcatttttatgatgactacagcaaattaaagatgatctaaaaaattgctatgctttgggaggccgaggcagacggatcacgaggtcaggagatcaagaccatcctggctaacaccatgaaaccctgtctctactaaaaatacaaaaaaaaattagccaggcatggtggcaggcgcctgtagtcccagctacttgggaggctgagtcaggagaatggcgtgaacccaggagggggagcttgcagtgagccgagatcgcgccactgcactccagcctgagcaacagtgcgagactccgtctcaaaaaaaaaaaaaaacaaaaaaaattgctatgcctgttatgatgttcaaattmtatgtgtcaatttggctaggctatgaagcccagttgtttgttcaaacactgatctagatgttgctgtgaaagtattttgtagatgtgattaa

SEQ ID NO: 445119 - DNA, 610 bp, Homo sapiens
gggcaccaccactaccgacccatggagggttctgccaggccactgcttatgttcacataaagcccaagggctctytggtcaggttgtggtgaatgctgccaggcctgagactcatcctttagggcagtgggctttcctctggtccagggaaggcccagaaatgctgttcaagtccaagagcctaggcctggacagagggaccccaagagcctgcttggcgctctaccccactgtggctgagttggtacctaaggtacaagacatagctctctttgctttttcctctgcttttctcaaacagaaggggactttcaccatagctgcaacagctgggaatgtgctgggttacagctgaagtcaggtgtcagagcccaaggcccacagtgtactatctgggtatcactgctggttatttggagcctaagggttctttagtcagcatctgatgaatccttctaggactgggttcttcccttcaaggcagtaggttcccttttggcccagggtgtgtctagaaatgtctggagctagggcctggaatgagggctttgcaactctgacagttaccctatcctactgtagctaagctggtatccaagatgcaagacaa

SEQ ID NO: 445120 - DNA, 610 bp, Homo sapiens
gggcaccaccactaccgacccatggagggttctgccaggccactgcttatgttcacataaagcccaagggctctttggtcaggttgtggtgaatgctgccaggcctgagactcatcctttagggcagtgggctttcctctggtccagggaaggcccagaaatgctgttcaagtccaagagcctaggcctggacagagggaccccaagagcctgcttggcgytctaccccactgtggctgagttggtacctaaggtacaagacatagctctctttgctttttcctctgcttttctcaaacagaaggggactttcaccatagctgcaacagctgggaatgtgctgggttacagctgaagtcaggtgtcagagcccaaggcccacagtgtactatctgggtatcactgctggttatttggagcctaagggttctttagtcagcatctgatgaatccttctaggactgggttcttcccttcaaggcagtaggttcccttttggcccagggtgtgtctagaaatgtctggagctagggcctggaatgagggctttgcaactctgacagttaccctatcctactgtagctaagctggtatccaagatgcaagacaa

SEQ ID NO: 445121 - DNA, 553 bp, Homo sapiens
ctcattcaactttcatctgtagcaccttgctaggaccacagtaagtgttcattaaaatttgttggcttttgaaattaaattcagaacaagattcctgagaataaatggttcattctagctacatttatacaagaaaacyaaacttttcaacttgttttaaacatgatatagcttgtgaattagaataaacatctaaaatacttgtttattcagtaaaataaggatataatatatgatcataagtttttgcctttaaaatcaacccaagatggccttttaatcctttaaggtgtgaagagcctgggtaccaatgggattgcttatcaggtcgactatgacttcctccaatcaggagtcacttcagaaaaaaaaaaatggtgttcaccagtttgtatgtgtgtgattctgtatatataaaagttctacattttagcgtcataccttaataaagtactacaaaacacatcaacatcaatcccaatcaactttaacagccactttagaaattgtggtgatttaacagcaatattttatgacctgagatggcatctag

SEQ ID NO: 445122 - DNA, 694 bp, Homo sapiens
agatggccttttaatcctttaaggtgtgaagagcctgggtaccaatgggattgcttatcaggtcgactatgacttcctccaatcaggagtcacttcagaaaaaaaaaaatggtgttcaccagtttgtatgtgtgtgattctgtatatataaaagttctacattttagcgtcataccttaataaagtactacaaaacacatcaacatcaatcccaatcaactttaacagccactttagaaattgtggtgatttaacagcaatattttatgacctgagatggcatctagctattcactatttgcaacaatcttgrcctttaatgttgaagagttaatatcagctatgtatattcccctgcgtggtgaatgaccagggcaaaacacctattttatcatttggatttcttattacttttgatcatttatgtagtcttgtttttccagaattacccatttccatctaaaccataaagcacacacatgcagatgcatgcacaaatcacacagaaatagaagatactctaaagcaagacagctaagattccttcaaaaatcacatgaattatttggctttagtgccatcccacatttttaagaccatgtaaatcatctcagtaaactaaaaagaagatgaaagttatgatttcctctccaatcaaatgtggactgcacgcaattcttcatttataactaca

SEQ ID NO: 445123 - DNA, 541 bp, Homo sapiens
ccctggcctctctacttgccccttctgcagctgttcagcctgtatcttgaatgttctagcaacctcttcgaatgccactgttatgcacattctyttgcattgcaagggtaaataaaagttacatgcctatcaggaaatcaagagtttcagagtaaatataagttctctcatcatctctaattgtcacttgctatggatgtcaaactgacagagtagcagaatctaatttccttgtttgattcaccatgaaattaaactgaactgacaatttttattttcacctggcaaattcatctgacactatttaaatccagctaatcaagtacagttatctgctccgcacactcatctctcccaccacacctctgattctcagtatcctacttcctgaactccctccgacagccgtgtgttggattacatttacagttttagaaggtgtaaaggaatgcatgaacatagttagccaaggtgccagcaaatgtatcatgtcacaaaattactactgaaagatgaaaaaacaaaaagagtaaaaaacaaa

SEQ ID NO: 445124 - DNA, 541 bp, Homo sapiens
ccctggcctctctacttgccccttctgcagctgttcagcctgtatcttgaatgttctagcaacctcttcgaatgccactgttatgcacattctcttgcattgcaagggtaaataaaagttacatgcctatcaggaaatcaagagtttcagagtaaatataagttctctcatcatctctaattgtcacttgctatggatgtcaaactgacagagtagcagaatctaatttccttgtttgattcaccatgaaattaaactgaactgacaatttttattttcacctggcaaattcatctgacactatttaaatccagctaatcaagtacagttatctgctccgcacactcatctctcccaccacacctctgattckcagtatcctacttcctgaactccctccgacagccgtgtgttggattacatttacagttttagaaggtgtaaaggaatgcatgaacatagttagccaaggtgccagcaaatgtatcatgtcacaaaattactactgaaagatgaaaaaacaaaaagagtaaaaaacaaa

SEQ ID NO: 445125 - DNA, 586 bp, Homo sapiens
tttgtggtgcctggatccaccaggaggaggctattagcttggcccaaagctagcagatatattacatgtttacctgtaaacatccttcagtttcaggccagtttcaagattgctaagctcatttctacatgcacatggcctttctttactctgaaactgaaatgaagatccattggtttaaccctagccccaagacaccatcaaagatgaacagaaactctgggttgatttcacatttgggacagaatctaaaacatctctctatgcttactgattaagaaccatgtaagaatctgattaaacatgtgttccagcccttagaaaaatacatatgatgaataatcggcatataatttcacaatgtattaatgtaccccttgaagcccttacattaaccaaacataatcatagctacaattgtgggargacattttctatatgctggacattgtgttaacactttagagagagctcacactatctggcttggcctcttcagcccttctgagaagactcatgaaattaataactccaggccacttatcttgaggaagttacgtgaaattgttcttgtgacaagctgctc

SEQ ID NO: 445126 - DNA, 583 bp, Homo sapiens
gatgtttcttataagataacattctgtttctccataatgtgaacaatttgcatgaaaaaagtactcccaaagttacatttgtcccatttgctttacaacattatgacaggaacctttgagggatacttctgtttcatattcctatactgccagtggttgcaaaatttccaagagcaggagctgtaggtcacaatggaaaatggaaacagtagattgggatttgacttactaactgtatggctttagggcagtctcttaatacctagggttttttgttacttggtcacctgytttctttaaagaagggacttatagatggattctcaaagtctcctctaacttacaattttatattttgtgataaaaagagttgagtttgtcagaggacaaaattcttttcttgattttgtctgaaagggaggaatcttcaggtctggacaagatgcttcttttcttacctaattttctttctttctttctttctttttttttccctaattttctttaatgaacatttgtctttcttggctgaaagaagataaaccagatgggaaaaggttccatttaatattagtagtgtatt

SEQ ID NO: 445127 - DNA, 421 bp, Homo sapiens
atccatcataacacaacctgctatttactttccttgcggtgatagggatttaagaggatgatgaaagagaaccaagacctatgaagtaatttagaactttcttgaatttaaactctcccttttacttcctatcatatggcatattgaaaagataacataacacctaattgcagctagagtaattgctgccaaaattaataaagggaaacacaatagtttactgagtttcttgtttatagtattttataataccatacagaattatttgatagaarttagacaagaatataatttgttaggtagttatccatctttaatgttccggctctttcacataaggatgatctatcaggtattcttcaaaagcataaacagctaaatataaataaaacatcataagcagtactctaaaggaagtaag

SEQ ID NO: 445128 - DNA, 605 bp, Homo sapiens
cacaaagcatgatttctaattggctatttctggtactagccacaggggaagaggttgtttctttctattctacatctggcaaagatctagttttgatataacaaatgtcatgaagttaagatttattttaagatttacttcagagttgaaaaaaagctacaattgacagactgtttggctgtttcacatctcaggcctcccagtgtttggtgcatagtcatgtgaataagaaagctgtcttccccagcactttgtcattgcagttgcacaaactcaacatgagtctggttttgaacagcagcacagcttggacaatgttcaatcaccacacagagtctgggcaatgtaaaaagcagaccagggaggcctaaaaagaggrcataatagttacttgcccagatgatcaaatcacattttcctcttctaactgttagacatttacagggatacaattcggagatgcctttgggtcctatttaatccctatatagaaactaagcatttgctaataaagggccagattcttatgcagggaattttatacataggactttactgggcacaaatctggacagaaaaggattccagttttgaatactgcccta

SEQ ID NO: 445129 - DNA, 594 bp, Homo sapiens
aaaaaatggacaaaagatttgaatagacatttctcaaaagaaaacatacaaatggcaaataggcatgtgaaatggttctcaacatcatagatcatcagagaaatgaaaatcaaaactacaatgagatatcatctcaccacagttaaaatggcttacatccaaaagacaagcaataacaaatgctggcaaggatgtggagaaaagggaacccttgtacactgttggtggtratgtaaattagttcaatcactatggagaatagcttggaggtgcttcacaaaactaaaggtagagccaccatatgatccagctatttcactgctggatatataccccaaagaagaaaaataaatatatggaagagatatctgtactcctatgtttgttgcagcactgttcacaatatccaagatttaggaccaacctaagtatccatcaacagattaataggtaaagaaaatgtggaacttatacacaatggggtactattcagccataaaaacgaaggagatcctgtcatttgcaacaacatgaatggaactggagatcattatgttaagtgaaataagccaggcacagaaattcaaacattgc

SEQ ID NO: 445130 - DNA, 535 bp, Homo sapiens
ctcttagtctgtttggtgttgctaaaaaggaatacctgaggctgggtcatttataaagaaaagtagcttatttagctcatgtttctgctggctagaaagttcaagatttggcatcaggtgagagccttaggcttctcccactcatgaagaaaggggaagggatccagcatgtgcagagatcaaatggcaaaagaagaaacaagagagaggggctaggctctgtttaacaaccaggtcttctgggaaggaatagagtgggaactaactcattgctccctgccctcacaaacagggagagcattaatctattcatgatctaaccccatgacccacatatctcccactaggccccacctccaacattggggatcaaatttcaacatgagatttggagagracaaacatccaaactatagcacctgtgtagattactcacaggtgctcaacaaattgttgttgtcaaatcaaatatggaagtagggatagtaatactgactgaaactttttagtcttcttgtctcctgttaattgattt

SEQ ID NO: 445131 - DNA, 513 bp, Homo sapiens
gcttcttgctcttttatccacctggaaaactcctattcaccctttaagagccctcttagatgtagccttccctgatggcactctcctctccatcattatacagttgkttgctccatcctctgtgctgtcacaatagtatcctcctccttctggtctgtgaagttgccaggcaaaggagattgctctgctggtccttgtatcccaggaactcaccattgctcctggcgttggaaatacatgcaggaacatggctggtttactagacagtttacccaaatttttaccatgactctgtacgccattaaaaaaagagagatttagaaagatttactcacctgcctcaagtctcacagctgccaattaactctttgttgtagagagctgtctggtggttggtggaatttagcagtctcaggacacttggcttcccttttgttttccagtaaaatttgagtcttctgggcactgattttagattggtacaagagacagtgattggatgcagttttagct

SEQ ID NO: 445132 - DNA, 555 bp, Homo sapiens
cactgctagctgattggacggkggtgtcattcactgagatgaaaacaggaaatgaagctgttatgggaataaacggaagaagttggtgtgtttggtttcagacactctgagtttgaggtgactatgagatatccaggtagaggatgccgccaggaattaaatacatgggctaaagaccacagagaagatttggaccgaagttaaagagctgagagttgaggatgtttagatggtagttgagaccatcctgggcctccatttcctctttccaaaatggaacatatcagttatcatcaatatgccttacattggttcctcactaagttcaatatagaattaccatatgatccaataattccactgctagttatatacccccaaagaattgaaaacaggtgtccaaacaaaaatttttacacaaatgttcataacagcactatttacaatagccaaaaggtaaaaacaacacaaatgttcaaaaactggtgaatgggtaaacaaaatatggtctgttcatacaatgaaatattattcaaccataaaaaagggatgaag

SEQ ID NO: 445133 - DNA, 603 bp, Homo sapiens
actctgtaaactgtaaaggctacataaatatatgggattattatttctgtaagtgtcgaggagcaacgataacagtaagttaaataacagataatgaaggaagtatgggtatcctacctcttctccatatcaagccttataaagctagttgtggatatccttaaggggtggctcatgtgaacttacaaagagtggtcttatattttcttttctggataccttcattaatctcattaatttaagctgccatctagctacatgagcatggcatctcactgtggcctacctgcttcttggcatggtgccctccatgtccatgccatgttctcctcatgtttctgaagctgcacagcatagtgatgtcaaagacatattagaattccttcaatcttctttgagctgagctcacactgtgtccacataggatgtccttttcctccattttgtgtcacgtttggccacctgaccacaatgctggaccattaaagactgaagacttcttgatgacttagacttcactcaagattactttcactytgtgttgttgccaaaccagaaaacaagactagaagggatatataccagttatgattataaatgatg

SEQ ID NO: 445134 - DNA, 676 bp, Homo sapiens
gtagtatatactgcttactattactgctactattatgattgtatgttcttctacatttttcgaactgtaactctcacttcatataagcctctttcacaatctcaaacttggaaaagttgaagactttcatgcttgccttaattgatcttctggagtgtaatggaggcagtgggagcaattttttcagttatttgtatttggcaagcacagagggtgggggtgtttcatttccatattcttcttattgtatttttctgctttctcacaaccctctgattcagcttgttcccttaaaaataatagaagtaggttgttttatggacattggctttggcaagaagcctgtttacacttgctaagccccctagtagcaatatcaagaaattaattaaaatgctgagaccacagtacctacccagagaggcaaagaatgagtgtgctagtagtcccctgctctaaayctttgcaatcatttgttgaaataccttgaggaagtaagtttctatttcaccatgcagggtgatataaggtgatatgacatgccaatttttttaaatgataaaactatagggactaaaatttcctctttctcctcctccctccatgacacctaataaagctgcttccagaatgaaatagtcatactgcccactgagtttcttttatcaaactcata

SEQ ID NO: 445135 - DNA, 551 bp, Homo sapiens
attttgacaaccccaaagtcataaagatttcttccttcaccttactctaaaagttttatagctttaatctttcatatttaatctatgacccatttggggtgaatttttgcatacagaatgaggtaacaatcaacattcattttctctcgtcattgaattgcattgacattgttgttgaaaaatattttgactatggatataatatttctggactcttttttgttcccttgattgatatgtcttcattcataccacactcaagtactaaagctttatactgccttgaaatcaggtactgtactttctccagctttgtttttctttttaaaaattgctttggcaattctaaggtcacttgmatttccatatacatttaaaaatcaacttttcaatttctacttaagaaagccctgctggaatttggattaggattgtgttgaatctacagattaatttggggataattgacacgttaacagcattgaattttccaatccatgattatggctctctccattttatgtctttaatattttgcactaatgtttcat

SEQ ID NO: 445136 - DNA, 632 bp, Homo sapiens
tggtttctaatttaattctattgtggccggaaaatatactctgtatgatttcaaacctttttagattcattgatgtctgttttatggtcatacatgtagtcaattttggtgactgtaccatgtgtacatgaaagaaatgttcattctgcagttattgagtgacacagtctataaatatcaattaggtcaaacttgttgatagtattgttcagatcctctatgtttaacctgacttttgtccagctattctatgaattaatgaaagagagatgctaaaatctcctactatgattttggaattgtctatttctctctttaattctgtcaattgttacttcatgaattttaaagttctgctattaagcacatgtatgtttagaatattttcctggaaaatgatccaattatcattatagaatgttactctttacctttggtaatactcttcatcttaaagtttcttttagctggtgttaatgtagctactgtgacctcatacttactgcttacatattatacttttacacttttygcacatatctgtgtcatattaaagtatgtatgttatagagggcatatagttgggtcttgactttttagcatttctgataatatctgccttttgattggca

SEQ ID NO: 445137 - DNA, 419 bp, Homo sapiens
agacccatatggttgtaaggttactayattttgtgtaaatggtacactattaatacttagaagagtaacaacttcagaaagcacactctaatccctagagcaaccactaaatatatgtatatattaaaagattatagggaaaagttaatagataaattgaaatcaaattctaaaatatagttatgcatcacttaatgatgaggacacattctgagaaatgtgacactaggcaatttcacagttgtgtgaacatcatggagtgtgcctacaaacatctagatggtatagcctactacactactaggctacatggtatagcctattgctcctaggctacaaacctgttatgttactatactgaataccttaggcaattccacggtagtaaatattgtgtatctaaacatatctaaatctag

SEQ ID NO: 445138 - DNA, 632 bp, Homo sapiens
gttaatgccgacatattctatttagacagtaatgctgtagtaaagattagattaaactgggccagcgcctcttagcattctaataattatgtccttccctgttttcacagaatgaaagttgaggtaattcaggccaatgtgattgccaggctttgccctctattcacccttaactgtagttttaggattggagaaaagtataagagcatcagaaaaatttaatatgcaattaattatttaactgatccttctacagacatttgctcagtgagcccacatatgtcccagatactgcgctaggccacggagatactgagattaattgacctcatgtcaactctcaaggaggtcacaaatccggaagtctctgcacaatacagaatagtaaagttgcagactagcagtgaagtgggtaaaggagggcagggggataggagaaacttgsgacatttcccacctcagcaaagtcagtttggtgactggggtccacaatgaataaatgttattttggaaaaatggcttctttcttctagagtctcttgctccctttaactataaggggttaatttcttcatctctcaggagtgagaggtggacaaaaagtagagcgtgactcggaaggagaaagagag

SEQ ID NO: 445139 - DNA, 610 bp, Homo sapiens
ataaattttagtatgtctacttgtctttgtttttctgccagcatcaataaacaattgtgaatgtttttcagtaacctattgaccatagcacattgagtggaagtctggaattttaaaaataattaaattgaaatgttaatgccgacatattctatttagacagtaatgctgtagtaaagattagattaaactgggccagcgcctcttagcattctaataattatgtccttccctgttttcacagaatgaaagttgaggtaattcaggccaatgtgattgccaggctttgccctctattcacccttaactgtagttttaggattggagaaaagtataagagcatcagaaaaatttaatatgcaattaattatttaactgatccttctacagacatttgctcagtgagcccacatatgtcccagatactgcgctaggccacggagatactgagattaattgacctcatgtcaactctcaaggaggtcacaaatccggaagtctctgcacaatacagaatagtaaagttgcagactagcagtgaagtgggtaaaggagggcagggggataggagaaacttgcracatttcccacctcagcaaagtcagtttgg

SEQ ID NO: 445140 - DNA, 632 bp, Homo sapiens
gttaatgccgacatattctatttagacagtaatgctgtagtaaagattagattaaactgggccagcgcctcttagcattctaataattatgtccttccctgttttcacagaatgaaagttgaggtaattcaggccaatgtgattgccaggctttgccctctattcacccttaactgtagttttaggattggagaaaagtataagagcatcagaaaaatttaatatgcaattaattatttaactgatccttctacagacatttgctcagtgagcccacatatgtcccagatactgcgctaggccacggagatactgagattaattgacctcatgtcaactctcaaggaggtcacaaatccggaagtctctgcacaatacagaatagtaaagttgcagactagcagtgaagtgggtaaaggagggcagggggataggagaaacttgcgacatttcccacctcagcaaagtcagtttggtgactggggtccacaatsaataaatgttattttggaaaaatggcttctttcttctagagtctcttgctccctttaactataaggggttaatttcttcatctctcaggagtgagaggtggacaaaaagtagagcgtgactcggaaggagaaagagag

SEQ ID NO: 445141 - DNA, 562 bp, Homo sapiens
gaaggcaatgtgcttgatgtacaatgaaatcaggttttgtcgacaatttgtacagcttaaaaggagagaaaagtgagctgttttctaggtgtaaaggtaagctgcagttacacaattaaaaaatagttgtcttcaaagtaaaatacacacttaactaaggcaaaattatggctaccagtgcatgggtgaaacaaacagaaacacactgatctatacattaaatgcaactctttgaactgaatcccattgtgcaggtagagggttgtgtgtgaggaagattggtttctgttgagtgtgttctgaagtggacaaggagaggagtcttgacatcaacaggccaaagaaaccagatttatgagaaacactgggttgtaaaggtctggccaagaaatgattgtcagtgaatcatctgctgatgaccaagaaaatcaggagagttcatttgaacaatatcaggtggcttgaaaatacgrcataatgtcagaatagcttcagatattacatactactaaggaagggatttcagtgaggttccacatagcctggttaaaaaaaccctttt

SEQ ID NO: 445142 - DNA, 563 bp, Homo sapiens
tttatgaagttttaatttttgacaggaaggcgcctagggtagacaatagaacagagctggcctaactctcatggatgtggtaaggactgacttttaacagctatgaaagtactttcaatattaagccttatggaaccactaattacatttattatttaaaaggcataatgggaagaaataaraccaagaaaattttagggaaaatatctagaattagtgcctaataagcagcttttttgatggctaaagagtaggtgaaggctactggtagaaaatctattactgcagtgacttaaaatgggaatacaggaaatgtgctggagcaaagtgaaaatcattagggtgctgcaatttaaacattaggcagtgaccatctggccacccttttggccccttggttcataacctgtcaataaatctcacattaatcgacacttatcgtgctttgcctatagaacgatcgaagcagctgtgttattcttttcacagcccttcttacttaaagtgtatcactgcacttcacctgcaaatggaaggaacactattttgtttgcttatgaccc

SEQ ID NO: 445143 - DNA, 563 bp, Homo sapiens
tttatgaagttttaatttttgacaggaaggcgcctagggtagacaatagaacagagctggcctaactctcatggatgtggtaaggactgacttttaacagctatgaaagtactttcaatattaagccttatggaaccactaattacatttattatttaaaaggcataatgggaagaaataaaaccaagaaaattttagggaaaatatctagaattagtgcctaataagcagcttttttgatggctaaagagtaggtgaaggctactggtagaaaatctattactgcagtgacttaaaatgggaatacaggaaatgtgctggagcaaagtgaaaatcattagggtgctgcaatttaaacattaggcagtgaccatctggccacccttttggccccttggttcataacctgtcaataaatctcacattaatcgacacttatcgtgctttgcctatagaacgatcgaagcagctgtgttattcttttcacagcccttcttacttaaagtgtatcactgcacttcasctgcaaatggaaggaacactattttgtttgcttatgaccc

SEQ ID NO: 445144 - DNA, 352 bp, Homo sapiens
gaataaaaaaaccatctttcttgtttgagggatgatttagggggaaaagcctcacctcatacttgggcatatatcatttgattttacaataataggatwgtaaatcttgaagttttgagacacagtgctgcagctagaggatgaaaatatgttggtgcagtgcccaaatctacagcataacatatgacccgtataagctgcccatcaacacttcctctttccataaactatatttcctgcaatagaaacattcataggagacccaggcttcaaatatttcctggatgtccaaaggcacatctggaggaaatcctataggaggttcctataggtcctaaaagatacagcctga

SEQ ID NO: 445145 - DNA, 352 bp, Homo sapiens
gaataaaaaaaccatctttcttgtttgagggatgatttagggggaaaagcctcacctcatacttgggcatatatcatttgattttacaataataggattgtaaatcttgaagttttgagacacagtgctgcagctagaggatgaaaatatgttggtgcagtgcccaaatctacagcataacatatgacccgtataagctgcccatcaacacttcctctttccataaactatatttcctgcaatagaaacattcataggagacccaggcttcaaatatttcctggatgtccaaagrcacatctggaggaaatcctataggaggttcctataggtcctaaaagatacagcctga

SEQ ID NO: 445146 - DNA, 561 bp, Homo sapiens
tttataaagtgatgttaattgtgctacttccgtcatggggctcctcagaggattgagtgacagaatacatgtaaggtgcttggcccagaactgggctgtattagtttcccgtggttgctgtaacaattaccacaaactttatggttcaacacaacatacatttggtatcttacggttttggaggttggaaatctgaaattccaagccagcagtatatcatcttaaggtctctctatgattcagattctcctgcctccagatagcacttataaaattcttctgattacatcaggcccacccagataatccaagataatctccccatctgaaactcacatcagcagtgtccttttcttcccaggtaagataacatattctcaggttcttgggattaggatgtggttacctttgggagggagccagtattgtacgatcagcacattggcttacattaaaaactcactatatattggccrctattatttttcttgtacctccagccaaatggaaaatcatatataggaaaaggaatgctttctcctttggtctggacaccaccgt

SEQ ID NO: 445147 - DNA, 552 bp, Homo sapiens
ccagccaaaccactggcttagcccatgacttggtgtataattgcacatctgaccatttctgttttcaagagaagtgcacaacctggtgcactgctcaaggttttgcccaccgggaagatatcccttcaccactgtccttaagggatgccccagaaaggggttacagtacttttgcttatggttgatacctgcatattgggcagaaccatctccatgccaggcccaagtttttttttttttttttttttgkcagctgatcatagggaactccgtatgcagccatagatgcaggcagggagagataaggcagtgtagcaggagtggggactgtgggcatttgggccacttcttcatgtagctgatttgtgatttcattgcatgcccagcctaatcatattacttccatctgacaatggagtgctgtcgtgcatgcccaatgccacggcttggtgggtcttaaaatacccagtccatgatgggcggctcaggtagtgtggtcatttgatagcccatgctcatctgttcagtctccactaaggcctggtagtaggt

SEQ ID NO: 445148 - DNA, 540 bp, Homo sapiens
caagctctgcctgcccctccacccactcagcctcccttcctccctctcttcctcctatccttccactcttcctctctttttttctctcttttacaactatagatgaggtgctttgctgagtaaaaccatagtaatttataataaatacttgttggatgaattctctaattatccttaaaaggacaaaaatacagtctagctcattttttcatacaaaggcatcctctaatgtataagtgaattatagctgttagcatttactaaccacatcatcatctactgggtacttgttgctaagcattttacacctatggaatcatttcaccttgtacrtgacctgtgagatggaggatattacacatatgttgaatcttactggaggcagggagtaggcagagaataattcattccagagcacgtactctgggaatggtagagctgaggtctgaacacagcctgcctggctataaaggctgtcctaaacattgtacatgcttcacacagtacccatcagctgaacaaacagtccctatggagggt

SEQ ID NO: 445149 - DNA, 540 bp, Homo sapiens
caagctctgcctgcccctccacccactcagcctcccttcctccctctcttcctcctatccttccactcttcctctctttttttctctcttttacaactatagatgaggtgctttgctgagtaaaaccatagtaatttataataaatacttgttggatgaattctctaattatccttaaaaggacaaaaatacagtctagctcattttttcatacaaaggcatcctctaatgtataagtgaattatagctgttagcatttactaaccacatcatcatctactgggtacttgttgctaagcattttacacctatggaatcatttcaccttgtacgtgacctgtgagatggaggatattacacatatgttgaatcttactggaggcagggagtaggcagagaataattcattccagagcacgtactctgggaatggtagagctgaggtctraacacagcctgcctggctataaaggctgtcctaaacattgtacatgcttcacacagtacccatcagctgaacaaacagtccctatggagggt

SEQ ID NO: 445150 - DNA, 588 bp, Homo sapiens
agctgaactacaggtgcttgccaccaggaccaagtaattcttgtattttttgtagagataggcttcgccatgttgcccaggctggtctcgaactcctgggctcaagtgatcagcctgctttggcttcccgaagtcctagcattacagccatgaaccacaaygcccagcccagaagtgtctttctataggtaaagcataactgactaaaaagcaagtatttagcagttgaccgcaattccatgcctgtggagagcccagctgtatggaccacacagtcagaaccaggccatatcgtctgtgctgttgatagtagttcaccaaaatttgtacatagtgtgaaggaccatatcaagaactcaggcttggtgtcatacccagactcattcattcattctttatttcatctcctccctaattcatttgcattattttgttcatagaacatttaaaaacatgtatgtgcccaccatgtgcgtggcactctgctagactctggtccctgtgctaacaagactagtaatcaattataataaaggagtaaagaccatgtgctttaaacttggattcaaatcttggcttttgccacct

SEQ ID NO: 445151 - DNA, 569 bp, Homo sapiens
aactaatggaattggcaactcttcaggtgtggtgaaagaagagaaaaaaatgtccaagatgacttcaacgttctgaccttgagtggcttgagtgaatggagttacaactgtgcagaaagtgagttttatggaaacaacaaatgcagttttggttttgttgaatttgaggtgctgatgagagaccsatgttccacatagttcattggcaaattgaactgtggagcttagaggatcttattagtaccttatctaaaaggtcccattatatgtgatttatgggacatcagttaggattaataaggagctcaggaattaaaaagtttcagatgggggtctttatttattgagctatttaaaaaatatgtagatgtaagctagaaattagaggatttttgcccccaaggagatctgtttaaaattcttggaagtttatctgaacctttcagtagtgattttactttgccaatgtgtaaaggttgctgaatgctaacaaatcaagccttaaaggtaattgtttgaaaaatcactttgggcacacatgacatcatctcagactcttatgataactc

SEQ ID NO: 445152 - DNA, 569 bp, Homo sapiens
aactaatggaattggcaactcttcaggtgtggtgaaagaagagaaaaaaatgtccaagatgacttcaacgttctgaccttgagtggcttgagtgaatggagttacaactgtgcagaaagtgagttttatggaaacaacaaatgcagttttggttttgttgaatttgaggtgctgatgagagacccatgttccayatagttcattggcaaattgaactgtggagcttagaggatcttattagtaccttatctaaaaggtcccattatatgtgatttatgggacatcagttaggattaataaggagctcaggaattaaaaagtttcagatgggggtctttatttattgagctatttaaaaaatatgtagatgtaagctagaaattagaggatttttgcccccaaggagatctgtttaaaattcttggaagtttatctgaacctttcagtagtgattttactttgccaatgtgtaaaggttgctgaatgctaacaaatcaagccttaaaggtaattgtttgaaaaatcactttgggcacacatgacatcatctcagactcttatgataactc

SEQ ID NO: 445153 - DNA, 565 bp, Homo sapiens
attgtttcagttgaccatattttgtgtttaaaatagaccccaatctccttggctcatatttctttggtatctcaaaataatactctgactgtacaagatgctcaaaaatatcttttaagatgactttaatataaccatcactgaaaagatgcttccttgtgtgtatgggggaagggccctgtattttccattacttgtgtgatctgagccaagtggcatgtacctgcggtcccagctacttggcaggctgaggctagaggatcaattgctgaagtttgacactgcagtgagcctatctcttaaaaacacaattagtccttctcttcccccttactgtgatttcayaggagatggtcataccctagctgcagggtgggcatggggccgtggcctgaggtaagctaaacaatacaaatcaggctcagaacttctgtgcaattttgctgaagaagagatattttctttccataaagatactaaaaacttaaaagccattgttggagctgctggctgccattttgtcaccataaggagaaagtatgcctgagtatggaaccattacaga

SEQ ID NO: 445154 - DNA, 600 bp, Homo sapiens
ttctgtgcaattttgctgaagaagagatattttctttccataaagatactaaaaacttaaaagccattgttggagctgctggctgccattttgtcaccataaggagaaagtatgcctgagtatggaaccattacagaagaaagagaaaaacaataagatgaatcagaagagttcctgtgaacctgtttatagtcatgacgagtgcattggaccattttgaactgtaaactaatcattccatttttaatttagccaaatagagggttttaggggtggggggtttgtctcttataccygaaagaattatgacttaaaacaatatttatcatgcttttggacataatttgttaggtatttgtcttctctatgaggctgaatactacaagaatgtggagtagggcatcacatccgtcttttgaatcttatatccctagcatctaacacgaaacttggcaagtagtagtagctcattaaatattggttgaataaattagtgaaaaaaataaaataaatagaatgcgtgtacccaaggaacttttgtcttagaattaactatctggaatgtaattagatggttgacattgatttccaggaatattt

SEQ ID NO: 445155 - DNA, 600 bp, Homo sapiens
ttctgtgcaattttgctgaagaagagatattttctttccataaagatactaaaaacttaaaagccattgttggagctgctggctgccattttgtcaccataaggagaaagtatgcctgagtatggaaccattacagaagaaagagaaaaacaataagatgaatcagaagagttcctgtgaacctgtttatagtcatgacgagtgcattggaccattttgaactgtaaactaatcattccatttttaatttagccaaatagagggttttaggggtggggggtttgtctcttatacctgaaagaattatgacttaaaacaatatttatcatgcttttggacataatttgttaggtatktgtcttctctatgaggctgaatactacaagaatgtggagtagggcatcacatccgtcttttgaatcttatatccctagcatctaacacgaaacttggcaagtagtagtagctcattaaatattggttgaataaattagtgaaaaaaataaaataaatagaatgcgtgtacccaaggaacttttgtcttagaattaactatctggaatgtaattagatggttgacattgatttccaggaatattt

SEQ ID NO: 445156 - DNA, 605 bp, Homo sapiens
tttgaaacacatttgttgtactcaaattttgttgtactcgaattttgttgttctaaatgttatttgaattaagatgatgggataacagtaattacaaatatttactgtgggctcatcatggcaagccttctagagaagtgagaggcaataatggtgagaagtttcttacgtctttggcctcagactgagagttacatcatcaactcttctgatgttagaagtcagagctatccaatgagtgatatagaattccaggctgtgggtgttgtatgttggggagtattgaaaacttcaaaccgtgaaaatatagcataactggacctgggattttggaaaatggttctgattctgaagggaaagatgctgtattagtcagggttctccagagaaacacagccaataggatatacacagctggccctctatgtccttaagtcctgcatccatggatcaaccagctatsaatcaaaaaaatttttaaacaaaaggatggttgtgcctgtattgaactacttttttcttgccattattccataaacaatacattatagcaactatttatatgacatttacattgtattaggtattataaataaggtagagat

SEQ ID NO: 445157 - DNA, 573 bp, Homo sapiens
ttggtgtttgccttattcaaacatggtttaaacagctggctggctgtgattagccagaaatctgtgattggtacaagagtaggttatagtctgtttacacatccatttattattacgttacagttcactattctatgtgaggctgaatcctttatgtaaggaggcagctttaggctaaacttaatctaacaataaccagaccagagaaaagcccactacaagaattctaatgatggagacaaaggcctgagttagggtggtagccacactaaaacaaacaaaaacaaaaacaaaacaaagcaagacaaaaaaaacagttgtaaaagtgagagacaagacatgtggtgttttaatcttccaggctgccataagaaaggatcaccaagtggctagtgagtagtgggcaaaagttctgtcttaaaacatyagaaatgtattcttttacagttctgagggtagcagttcctaatctaagtgtcagcagagccatgttccctccaagcattctggagaagggtctgctctctcccagctgggtgttgtcagcagtccttggcattccttagttggagc

SEQ ID NO: 445158 - DNA, 564 bp, Homo sapiens
ttccttagtactttccaatctactattaatttaagagtgaattaacttgaaaccacaagaaggtacacagtgaataatcaaacaatgaaaccttacatcctgaacctgaaaaaccagagctttctgtatttccgtagtgcaaaactgtgtagaacaacctacaaataatattagaatatagattatagaaataaagggtatgactttctttcagccaaccaagtctagaagctttgcttctgcttctccaccatgctgtcctgcaaagtccaaggtggagcagcctgactctgcccctaagaatgcagaaagtcaagagaggaagacatataatattgaagattaytttatttccataatgaaaagattagaagaatatatatgacaactctcaacagagatgaatgaatcaaaacaaacatttggtttcttattctttccccaggcacacatagccaagaaatggttgctcattttgcaaactattctgcacaaagtagattattatttatgctctctagattacacggtactcatccttgacttgagtctacctcctcctca

SEQ ID NO: 445159 - DNA, 564 bp, Homo sapiens
ttccttagtactttccaatctactattaatttaagagtgaattaacttgaaaccacaagaaggtacacagtgaataatcaaacaatgaaaccttacatcctgaacctgaaaaaccagagctttctgtatttccgtagtgcaaaactgtgtagaacaacctacaaataatattagaatatagattatagaaataaagggtatgactttctttcagccaaccaagtctagaagctttgcttctgcttctccaccatgctgtcctgcaaagtccaaggtggagcagcctgactctgcccctaagaatgcagaaagtcaagagaggaagacatataatattgaagattactttatttccataatgaaaagattagaagaatatatatgacaactctcaacagagatgaatgaatcaaaacaaacatttggtttcttattctttccccaggcacacakagccaagaaatggttgctcattttgcaaactattctgcacaaagtagattattatttatgctctctagattacacggtactcatccttgacttgagtctacctcctcctca

SEQ ID NO: 445160 - DNA, 625 bp, Homo sapiens
agaatctttccaagtgagtgtttctttaaaaactgataggtctgtaattagactgtgttctcctgcaattaagtggaccacatcttcacaaggatagtgcctgagagtgttctaataattctgtgcttctaaagcgttccttcaagaatagagagaatttcctgtatcagtcctataaacctgtctgagccttggccatgccatggtatgaacagggcatcatagggctgtctgatcttgtacaagagaggagaaggagtttatgggctgtggtccaatttaacccagtatttctcttttggcaggatttaacatagggtatccaatctcattctcttccaggcgtttcttccattgtatatttttatttgagattctggaattctgactagagcagaactttactcagcttcagagaagaaagaggcagaaaagttgccagttgggtttaagaaaggcctcygacttattcaagtctgtagataagatgttccctgctccttggatcagcctagtcctcctcgtttctcctgtgcttaggaatttcccactgctctttatgtctttcaagattttcctgtagctttgcagtcaagttggtggtaattttccactggtttgcagt

SEQ ID NO: 445161 - DNA, 620 bp, Homo sapiens
gaaaagttgccagttgggtttaagaaaggcctccgacttattcaagtctgtagataagatgttccctgctccttggatcagcctagtcctcctcgtttctcctgtgcttaggaatttcccactgctctttatgtctttcaagattttcctgtagctttgcagtcaagttggtggtaattttccactggtttgcagtgaaacttcagatgtgacctatgatctcaatgtcaccataatttagccatcactaatatgcccattctttggaatgcyagcttttattgctatcataattctcacattatttataaataatatagtgccataaatacggaccttcagagctagcacaagatctttctaatcaagcttttgcctggttgaggtaagagtccaagtctttacaacactttattgctgatggctatgttaaactctctaaagatgtctgggacatttagggacatgggtattgcgaagccataaaaatgacattgtaggatctaaaacaagcacagtggaactccactgtgaccctgatgttatatggcaaggaaaagtcctgtcacagaaattttgccctacggcaagagagttgtatacaacagggctatgaatag

SEQ ID NO: 445162 - DNA, 569 bp, Homo sapiens
tgtcaccataatttagccatcactaatatgcccattctttggaatgctagcttttattgctatcataattctcacattatttataaataatatagtgccataaatacggaccttcagagctagcacaagatctttctaatcaagcttttgcctggttraggtaagagtccaagtctttacaacactttattgctgatggctatgttaaactctctaaagatgtctgggacatttagggacatgggtattgcgaagccataaaaatgacattgtaggatctaaaacaagcacagtggaactccactgtgaccctgatgttatatggcaaggaaaagtcctgtcacagaaattttgccctacggcaagagagttgtatacaacagggctatgaataggcacagataatttccaggggtgtcactgatttaaccctccaggggaacaaaatcatgtcatttttaacaaagttctattttgccttatgtttttcctgtggaacaggtgaagttattttttcatttacaacaaaaaatgagcaaaaaagaaactaaggaaaataagcaaacaag

SEQ ID NO: 445163 - DNA, 569 bp, Homo sapiens
tgtcaccataatttagccatcactaatatgcccattctttggaatgctagcttttattgctatcataattctcacattatttataaataatatagtgccataaatacggaccttcagagctagcacaagatctttctaatcaagcttttgcctggttgaggtaagagtccaagtctttacaacactttattgctgatggctatgttaaactctctaaagatgtctgggacatttagggacatgggtattgcgaagccataaaaatgacattgtaggayctaaaacaagcacagtggaactccactgtgaccctgatgttatatggcaaggaaaagtcctgtcacagaaattttgccctacggcaagagagttgtatacaacagggctatgaataggcacagataatttccaggggtgtcactgatttaaccctccaggggaacaaaatcatgtcatttttaacaaagttctattttgccttatgtttttcctgtggaacaggtgaagttattttttcatttacaacaaaaaatgagcaaaaaagaaactaaggaaaataagcaaacaag

SEQ ID NO: 445164 - DNA, 569 bp, Homo sapiens
tgtcaccataatttagccatcactaatatgcccattctttggaatgctagcttttattgctatcataattctcacattatttataaataatatagtgccataaatacggaccttcagagctagcacaagatctttctaatcaagcttttgcctggttgaggtaagagtccaagtctttacaacactttattgctgatggctatgttaaactctctaaagatgtctgggacatttagggacatgggtattgcgaagccataaaaatgacattgtaggatctaaaacaagcacagtggaactccactgtgaccctgatgttatatggcaaggaaaagtcctgtcacagaaattttgccctacggcaagagagttgtatacaacagggctatgaataggcacagataatttccaggggtgtcaytgatttaaccctccaggggaacaaaatcatgtcatttttaacaaagttctattttgccttatgtttttcctgtggaacaggtgaagttattttttcatttacaacaaaaaatgagcaaaaaagaaactaaggaaaataagcaaacaag

SEQ ID NO: 445165 - DNA, 600 bp, Homo sapiens
ctgggtagttttttgagaaaaagaattacttgtgcttcagtcagggtatcagcaagaagcagaattatagagcttcagctaaagaaattttaatggagggctatttgcattaacagtcagcaagttaaggtgaccaacaagggaagctgaggcacccagagattagcaatcatggaaagtcattactttttctatacgtgaagggaaaaaggaaagaaacagtgttactgaagcccagtgagagatagatctgtgsgggtgggactaatatctatattaactgaagaatagaaacatcaccaaaaccacagcatggaacaggaagggagcgggaaataaatgcctcaacttctctgtcctcccactggtgcctttcactggctaaacccagtgagatgagttcaagagagcctggataaagtggtccatgggtcaggcaagagcctacttgacttgtctgccatgtgttctttctcctgtcttcaggactgcattttggttttaggcaatattgaggtctatacaggcatagggcagtggaaaatataaccccatgcttgtcagtggaactgtgtatttgctgcacttccaagtgtactt

SEQ ID NO: 445166 - DNA, 586 bp, Homo sapiens
agtgagagatagatctgtgggggtgggactaatatctatattaactgaagaayagaaacatcaccaaaaccacagcatggaacaggaagggagcgggaaataaatgcctcaacttctctgtcctcccactggtgcctttcactggctaaacccagtgagatgagttcaagagagcctggataaagtggtccatgggtcaggcaagagcctacttgacttgtctgccatgtgttctttctcctgtcttcaggactgcattttggttttaggcaatattgaggtctatacaggcatagggcagtggaaaatataaccccatgcttgtcagtggaactgtgtatttgctgcacttccaagtgtacttagtcttaactaactttgctaaacatgaaatcatgaagcttttctttttcctactaaaaccccctgttatgcctgctcctcatctcactatttctcttcttctctcccccaatacttgcttaaacaaatttatactctgcctttttgtatgcaccaaaatctggtggcattataaaagtatcatccttaccatatatatttgtaatgggcaccaatgtttcaa

SEQ ID NO: 445167 - DNA, 586 bp, Homo sapiens
agtgagagatagatctgtgggggtgggactaatatctatattaactgaagaatagaaacatcaccaaaaccacagcatggaacaggaagggagcgggaaataaatgcctcaacttctctgtcctcccactggtgcctttcactggctaaacccagtgagatgagttcaagagagcctggataaagtggtccatgggtcaggcaagagcctacttgacttgtctgccatgtgttctttctcctgtcttcaggactgcattttggttttaggcaatattgaggtctatacaggcatagggcagtggaaaatataaccccatgcttgtcagtggaactgtgtatttgctgcacttccaagtgtacttagtcttaactaactttgctaaacatgaaatcatgaagcttttctttttcctactaaaaccccctgttatgcctgctcctcatctcactatttctcttcttctctcccccaatacttgcttaamcaaatttatactctgcctttttgtatgcaccaaaatctggtggcattataaaagtatcatccttaccatatatatttgtaatgggcaccaatgtttcaa

SEQ ID NO: 445168 - DNA, 536 bp, Homo sapiens
acagattattatgaatctatgggcttattattttataagtcaatatgaagacaaaatatcattatagataaactcaataaggcaaagttggaagactgagcttaagagctcagccttggaaaagagacagatatacacacatatgcaactgaccacaacaggaggcaatagcttccacttcaaatggtctctgctctcctgtctgcttgccataaacttggcatgggcctctaatactctgtggtgaaacctacagtattctgcctttcttctgtgaccctttcagatgtctaaggttaagcggaggcaggtttcctagttacacagatggaacacttcctaggaaagcccccmacgtttccactgcaaaggtggagacagcatttatccttcaattgaggaactttggtgctgaaataatgctgagggcacaggtgtgagagcatgtaaaacagggtctggcagctggagatcattagtaagcccacagcagctctgtcaagagacaaggttaacaccctgttaatcagattaat

SEQ ID NO: 445169 - DNA, 547 bp, Homo sapiens
gtcatgattaaacctttaaaaaataattagcctgtaacaatgtattctgcaacagtatacccaggaaatataggcaccttcctaattctaggacataaatcatgaaaaatctgctacaactatgataaaggtaatattattctcttttgcctctgattggtttggaggttatcatgtgactacattctggtcaatgagaaatatatcaggaggttctgagagaagtgtacttccctgataaataaagtgaatgagagctagcagaggaaagtaggaaatgcattttctctcttgcccttaratgttgtcttgtgagagcagggtgcttggaaatgcagctgccatcttcaataacactgagggaagctaaagaaaatctcagataagccatctctgagtcctgacatcatttattgaacctctgcattagtcaatcaactcagggactacttctcccagagctattaaattaggtaataattcctcagagtttaatctgtgtcagttggttatttaattacatgcatctataagcattttaacaaat

SEQ ID NO: 445170 - DNA, 317 bp, Homo sapiens
caaactaggctatcaacttctggagcaggggccctagaatattcttaacacacctggcagagtgcctggtgttaaaaggtaaactttgacatattaagattttaaagagtttatttgagtagacagcaattgaygaattaggcagtgccaaatcattagtagtgtaggctctacctaggaggaacaagaggcaaatttttactaggtgttcagggaagaaagacaaagaaaatgtttgattggttaaagtggaaagtccctcgttagaggttaattggcagtttctgattggttaaacttcagtttcattttgctgg

SEQ ID NO: 445171 - DNA, 471 bp, Homo sapiens
gagttttaggtgttaaaaaattttacatcatgttaaaaaaatgagcagaaggaatgaactctttattcctatacaacacaaaaatsttagagaaaattccaattttcctgtaaaacctacagggattttttttttctcatttgtgtgctcttctctcttccaagcccctggtaacaccctaccagggactggcacagggatgtcatggggtgggaaacataagcacctgaggactgtcaatagaaccataaaaaacagtgcgatggtgcagtcagacatggtaaaaggtagatggcaataaggttaatgctgatgatgaaatcagcaagtgtcaagcagacaatgcatggtgaaaccatctgataaatggaaaaggaatgcagaatggtaattagaaaatacttccatggttatcgtagaaaagtctgaaagccttcagcttaaccccatgcagctgagaaaggaaaagcg

SEQ ID NO: 445172 - DNA, 535 bp, Homo sapiens
gattactgtgtagacctggatgtcaattttattaagttataggaatttatatattctggccatgcaggtagcatgactggtacattattttccaccaaattactagtagggattcctttggagcaaagaatcataatagaggagcaaatgcaagaagagctcatcaactgaaaaaagctttggaagctcttttctggcataggaatagccaagccaatgggaatatgacaaatactccttggtacttatagacttaatagttctggtcttgactatttatgactgaccccaaggacctataaatgactggagacatggtgaacacaracacagaagcaaggcagtttttccaaatgtagtatgtgcaccactaatggtatgcagaatgcttgtaaaagataaaaatccatgtgtacataagtgacccaatttaagatttaaatcacccctgcatttaaattataaatacaacatttcagcttatataaagcaaaaggattgaaagcaaaatatgtattaaggataaaggagggaa

SEQ ID NO: 445173 - DNA, 608 bp, Homo sapiens
  misc_feature (1)...(608): n = A,T,C or G
nnnnnnnnnnnnnnnnnnnnnnnntccctggcatatactacttaattgcggggaggccagtttaagaagcaagataactacctgggaaatgtccgtatctgtaggacaaattggtgagatccactaaaattcccatctttaactctttaaatctaattagatttagaatgcttatgagtgggaccagtctgctctgggtcccaaggatggggttttagagttctgattgtttcctcttgtctatattgtcaattcattattgtgacttgttcttccttattattgtcctgaataaatgaagtatctcaagtccagacaacttacatttcactgaccaaaccttgccatttcatgaacaccaatttcttgcctaccctaccccatccttagtgtcatctgcattcacttctagcagtctagttttaaggccatcatcattagataaatttttattgggcacgtaacatatgaaaaaaaaaaaaaacccttcgggtttttttttttttttttttttttttttttacagttttatgttctgtatggacaaaagaacataattttgraatcaggcaggcataggattagattctggttttgttactgtctta

SEQ ID NO: 445174 - DNA, 590 bp, Homo sapiens
ttcaaatggtattttargcacccttggaatctttacttgggcaataaacattatctataattccagggggtggtcctttgtcagtgctgctgaactaattcactcttgcagcccaaacaggcatagatgagcctgtgggctctggaattccacatttcaggatgcctacttgcagaaaaagggcagactgcattgtcatcttataatcaccacaacagctggaggaaaaaaaatagaacatccttgtttcacttccagaaggggtttttatagcaacctctttggaatttgtctatgaatctgctgacttcttcaatcagagaggacattctttctcctctccagattaatttctcatcatttttcctccagtcttgctcacctgattatggccacattgttaatatcacctatagataacaagtgtgctcccacctcaggattgttgcccttaaggttctctctggacacctgctcaggtactctgtgagttactctctcactttatccaggcttttgctcagatgtgacattatcaagaagacttcactaaccatcccacctgaaattccatacacactgcctcatcc

SEQ ID NO: 445175 - DNA, 590 bp, Homo sapiens
ttcaaatggtattttaggcacccttggaatctttacttgggcrataaacattatctataattccagggggtggtcctttgtcagtgctgctgaactaattcactcttgcagcccaaacaggcatagatgagcctgtgggctctggaattccacatttcaggatgcctacttgcagaaaaagggcagactgcattgtcatcttataatcaccacaacagctggaggaaaaaaaatagaacatccttgtttcacttccagaaggggtttttatagcaacctctttggaatttgtctatgaatctgctgacttcttcaatcagagaggacattctttctcctctccagattaatttctcatcatttttcctccagtcttgctcacctgattatggccacattgttaatatcacctatagataacaagtgtgctcccacctcaggattgttgcccttaaggttctctctggacacctgctcaggtactctgtgagttactctctcactttatccaggcttttgctcagatgtgacattatcaagaagacttcactaaccatcccacctgaaattccatacacactgcctcatcc

SEQ ID NO: 445176 - DNA, 590 bp, Homo sapiens
ttcaaatggtattttaggcacccttggaatctttacttgggcaataaacattatctataattccagggggtggtcctttgtcagtgctgctgarctaattcactcttgcagcccaaacaggcatagatgagcctgtgggctctggaattccacatttcaggatgcctacttgcagaaaaagggcagactgcattgtcatcttataatcaccacaacagctggaggaaaaaaaatagaacatccttgtttcacttccagaaggggtttttatagcaacctctttggaatttgtctatgaatctgctgacttcttcaatcagagaggacattctttctcctctccagattaatttctcatcatttttcctccagtcttgctcacctgattatggccacattgttaatatcacctatagataacaagtgtgctcccacctcaggattgttgcccttaaggttctctctggacacctgctcaggtactctgtgagttactctctcactttatccaggcttttgctcagatgtgacattatcaagaagacttcactaaccatcccacctgaaattccatacacactgcctcatcc

SEQ ID NO: 445177 - DNA, 597 bp, Homo sapiens
cccagtggtgcatcagttacactgtggtaatttgctagtaactgcattaactgtgtcctgtatggtttgtcttttcttccactacagcacagctcagctgcactgggaacacctagagatgtagtattaatttttttaagtgtttctgggtgagaaattactagagatcagaagaatacttttccagtgacacaattcaagatcagcaattaattatgcatasaaatgtcacttaaagaaaagtctgtcaaaatcctaacattttttatagatttgttattaacttctaattatagacaaattaccttcttcattatcatagagaatcttgtgtgttgatgcggaatctataaatggtgccaaggagacagtgtggaagcaatatcctcccttatttcctaatgtgttaccctcaccatgtgagtaagggaaaaaagaagtcagtccccatgttactgcaggagcaaagctatcagcttgagaatcctgctgttaaaatgcagtaatggaattttcagcaaccaggaaaatgactccactgaactttctgagttatcttcaaagagaagcttaagttgattgatgagaacaagaaac

SEQ ID NO: 445178 - DNA, 597 bp, Homo sapiens
cccagtggtgcatcagttacactgtggtaatttgctagtaactgcattaactgtgtcctgtatggtttgtcttttcttccactacagcacagctcagctgcactgggaacacctagagatgtagtattaatttttttaagtgtttctgggtgagaaattactagagatcagaagaatacttttccagtgacacaattcaagatcagcaattaattatgcatagaaatgtcacttaaagaaaagtctgtcaaaatcctaacattttttatagatttgttattaacttctaattatagacaaattaccttcttcattatcatagagaatcttgtgtgttgatgcggaatctataaatggtgccaaggagacagtgtggaagcaatatcctcccttatttcctaatgtgttaccctcaccatgtgagtaagggaaaaaagaagtcagtccccatgttactgcaggagcaaagctatcagcttgagaatcctgctgttaaaaygcagtaatggaattttcagcaaccaggaaaatgactccactgaactttctgagttatcttcaaagagaagcttaagttgattgatgagaacaagaaac

SEQ ID NO: 445179 - DNA, 557 bp, Homo sapiens
gttggcctgagtgaatgagtctaacttgcctctttaatgccagtaaataatataatccctactgaagtttaaaagaaaggtgctgagtagggcaaagatttttccaggataaccatatgcaaagatgataaagttgtcacatttcagactgaagttctgtagatcagagcttctctgccttcttgagttgactatgtcagcctacatagacatactcacaagagacattttactggtagaatgctaatgtcttctggaacaacacttgcaagaccctgccctgtgcatcttctccttgttgacaattccctaggaagtcaaattataataagtaccttgcttggtaagcatagagtcagctaaagggatgttagttatctaattcaaatgttcaatggcaccaggttctgagaatcttgtgggtactttacacagagggagtcagayaggtcagccactgaagagtatctgtatgtgcacggtcaatattcgttggtgtgactctctttcactctgtatatgttgctataaaaattgccctgattagaggtagtata

SEQ ID NO: 445180 - DNA, 554 bp, Homo sapiens
ttaattcaagaagcaaatcttcaccagtttggggcttaattaaaagtaaatccataaattgagacatacctaataagtaactcatataaaagattgcaactggtgccccacctatacaatcatgtcagacacccctgggatcctatagagaatcaggagaaatggaagctactctgaggacttgctcaagctgaatcttttttcacatggatycctctagatgtctagatttccttatttacaatgctttcccacgagataagatttcaccattaagaagttcatttaaattaacaacaaaaaagctatcaataaaaatatatttgaaagaattaagatggattggtgagaggaacaaaaagtaatcttgtgtgggggtgagttcacccacaacctggggcacttgacttctgctgttgaggaagctggaccaccaccccaatgggtcctgggggtgggactgctgccccagtgagttcagaaggcagaacataaagccaaagaggattattttcaacctgtaagtgctcatgcagcttgtctttctaggtttt

SEQ ID NO: 445181 - DNA, 567 bp, Homo sapiens
tcactaattcattcagagtactacatattcttctaagtaccagggaaatggcattgaaataagtacacacacatacatgcacacacactctatcatagagcttacattctagtggaggaatatgacaatacataaaatgtgttagtaaaatgtatagttagatggcagaaagtactatgacaaaaatgaagcaggcaagggagtgtggagtgctgtaaagtggggcagtgggtcgtattttaaatagggtgactgtcaaaggctttactgagattgtcaattgaacaaagatgtaaaggagatggagaagagaaaatacaggtrtcttgggaggaacatatcagagagaagaaacagtggttgaggtgaacatgtgccagacatctcaggaacagcaagaaggccagtgttggcaggccaaaatgaatgaagggaagaaaagtaggagatgatgtcaaagaggtgaagggtgtgggacaacactgggaagtctttggctttcaatggtctaagatggaaagctgtttcttcagcccttcaccatccaaatgacagcccagtagatga

SEQ ID NO: 445182 - DNA, 522 bp, Homo sapiens
tttattttaatttatatttcatcaaatattaatgaaactcaatgtatagctttgactctacctctccatgaagctctattagtgttacatgttaattctagtctcctactgatgtccctgccaacttgacacatcattatcacattaaagacagacactttgagatcttctaccatgcccgtcattgtacagaggaaaccaaagcccagggaagtcaagtgatatgctcgagctcaagctgatgctcggtgaaactgaaaaaggtcaatgcattatactcttgctagctactagttactgtcctcagcagatactcttgttcatttttatgtcctctactatgtctaccatartgtagtgagtactaaacaagtgtttcttaaacaaatggattgaaagaaaataagctcttctactctctaatggtaagagatgtattagtaaatgtccctagtgattataatattgaaaccaaaaagacaatactgtttttatttatttcctgtaatataatattcaaac

SEQ ID NO: 445183 - DNA, 522 bp, Homo sapiens
tttattttaatttatatttcatcaaatattaatgaaactcaatgtatagctttgactctacctctccatgaagctctattagtgttacatgttaattctagtctcctactgatgtccctgccaacttgacacatcattatcacattaaagacagacactttgagatcttctaccatgcccgtcattgtacagaggaaaccaaagcccagggaagtcaagtgatatgctcgagctcaagctgatgctcggtgaaactgaaaaaggtcaatgcattatactcttgctagctactagttactgtcctcagcagatactcttgttcatttttatgtcctctactatgtctaccataatgtagtgagtactaaacaagtgtttcttaaacaaatggattgaaagaaaataagctcttctactctctaatggtaagagatgtattagtaaatrtccctagtgattataatattgaaaccaaaaagacaatactgtttttatttatttcctgtaatataatattcaaac

SEQ ID NO: 445184 - DNA, 622 bp, Homo sapiens
tatgagacaccaaatgtttccaccaaaaacattaatttatattagtaatattaayattgttgacattttcctttatgctatttttttaaaaatgtttctaaaagaaatccaaaagaagtacaatatttggaaagcccactgaatatgtttattatttattgttgtaataaaagcaaactgaagtcccatcctcataattaatgttttaaatttgtatttattcttttgataattacactagtatgaaatttagtaaacatttttaaaacctttaaatattggatagaagcattattattttactcttgagtaagggaaagcactgtgagtcattgaccatcaaatgaaaagtgccttatggtaaataatgcttccttttattgttcgtataaaagtcctagctctcacactaccagggtaacctaggaggcatgtgagtggtttcctgtgaaaaaaaaaaaacatgaaactgaatgatcaatgcagagactaaagtgtaacccagactcaaaattgaatggaaatccttatatcatagtttttacggccagactgccaaaagatgtcaaaattaaatgggatatattaagaatgaggacataagggaatacttttggttcag

SEQ ID NO: 445185 - DNA, 643 bp, Homo sapiens
taacctctgactttgtgtttcagttttcttttctgtaaaacagagataatattggccacttaacaaggttgttgtgagacacaaatgaatggaygcatttaaaagcacttggtaaactgcaaagtgtttaaaaaatgatattgtgagctcacaggctgcttttggtcagtaaggggtaccatgcagtcaagcacaataggaactttatttactgccttgccagcctgacctgccactgacaccttatcaattttgaaaagttacatattgccactgaatctcaatctttataaatataacctgaaaatatgcggaatccagtattctatgactccaacaataggtgttgaatgtttagaaatctttgtaataaaggtaacaggcaaatacaccattgctattcatacattaatagtcgctttcaattataaaacgcattctttgtgccaggcagtgtgtaaagcatgttataggtgcatcttagcacagtgtatggatggaaatctcaaattacagtcagatgccatactaagttggactacaccacagtataaaggttgagaatacgttctgtgagcctgaaactctggattcaaatctaggcttcatcccttaaacaaagtcatcactaatagctggttcc

SEQ ID NO: 445186 - DNA, 643 bp, Homo sapiens
taacctctgactttgtgtttcagttttcttttctgtaaaacagagataatattggccacttaacaaggttgttgtgagacacaaatgaatggatgcatttaaaagcacttggtaaactgcaaagtgtttaaaaaatgatattgtgagctcacaggctgcttttggtcagtaaggggtaccatgcagtcaagcacaataggaactttatktactgccttgccagcctgacctgccactgacaccttatcaattttgaaaagttacatattgccactgaatctcaatctttataaatataacctgaaaatatgcggaatccagtattctatgactccaacaataggtgttgaatgtttagaaatctttgtaataaaggtaacaggcaaatacaccattgctattcatacattaatagtcgctttcaattataaaacgcattctttgtgccaggcagtgtgtaaagcatgttataggtgcatcttagcacagtgtatggatggaaatctcaaattacagtcagatgccatactaagttggactacaccacagtataaaggttgagaatacgttctgtgagcctgaaactctggattcaaatctaggcttcatcccttaaacaaagtcatcactaatagctggttcc

SEQ ID NO: 445187 - DNA, 643 bp, Homo sapiens
taacctctgactttgtgtttcagttttcttttctgtaaaacagagataatattggccacttaacaaggttgttgtgagacacaaatgaatggatgcatttaaaagcacttggtaaactgcaaagtgtttaaaaaatgatattgtgagctcacaggctgcttttggtcagtaaggggtaccatgcagtcaagcacaataggaactttatttactgccttgccagcctgacctgccactgacaccttatcaattttgaaaagttacatattgccactgaatctcaatctttataaatataacctgaaaatatgcggaatccagtattctatgactccaacaataggtgttgaatgtttagaaatctttgtaataaaggtaacaggcaaatacaccattgctattcatacattaatagtcgctttcaattataaaacgcattctttgtgccaggcagtgwgtaaagcatgttataggtgcatcttagcacagtgtatggatggaaatctcaaattacagtcagatgccatactaagttggactacaccacagtataaaggttgagaatacgttctgtgagcctgaaactctggattcaaatctaggcttcatcccttaaacaaagtcatcactaatagctggttcc

SEQ ID NO: 445188 - DNA, 473 bp, Homo sapiens
caataatgggcactcagaaaggtgatttggctgttcttgtcaagccatttacttgagtgtttcatgaggggtactattggcatttcaggcaaagaaatctttattgagtagaactgttgtagcattaccaaagacttaktatcctggctgctggatgctctgttgtgataaccaaaaatgcttccttctatttccaaatgccctcaagggtagtaacctcagttgtgaaccaactgtatcagtcaaaataagctaggttatgctgtagtaacaaataactttaaatcccaggaacttaatacaacaaaagtttatttctctctcaccctacatatcaaagcaggtaatgaggagtatctgctcattctaattaccagggaccaaggctgaggaggcttcattgcaatctgaacacctgcaatcactatggcagtggtgatcacatgagggtgtgttggagagaagagacagca

SEQ ID NO: 445189 - DNA, 550 bp, Homo sapiens
taatacaaacaaacttattttatgggggtgggcagagtattgctctgtcactcaggctgaaatgcagtggcacaatcatagctcactgcagcctcaaactcctgggctcaarcaatcctcctacctcaacctcctgagtagctagcactacaggcatgcatcacaatgcccggctaattttttcattttttcatagaaatggggtcctgctgtgtttctcagcctggtcttgaacccctggcttcaagggatactctctccttagcctcccaaagtgctgatatgacaggtgtgaaccatcgtatctgaccaataaaaacaaactcgcaaactactatgaaattgataatattccagagatgtataatttgtaaaaacaaactgctaacagaaaatttaaacagctttccaaaatagaaaggaacctcttcaaataacctgcttgcccccacaaagaataaagtgactgaactagacaatttaacagggaaattctgccaaaacttttaaaaagcagataatgtttaaactgttccagaatccaggaaaa

SEQ ID NO: 445190 - DNA, 550 bp, Homo sapiens
taatacaaacaaacttattttatgggggtgggcagagtattgctctgtcactcaggctgaaatgcagtggcacaatcatagctcactgcagcctcaaactcctgggctcaaacaatcctcctacctcaacctcctgagtagctagcastacaggcatgcatcacaatgcccggctaattttttcattttttcatagaaatggggtcctgctgtgtttctcagcctggtcttgaacccctggcttcaagggatactctctccttagcctcccaaagtgctgatatgacaggtgtgaaccatcgtatctgaccaataaaaacaaactcgcaaactactatgaaattgataatattccagagatgtataatttgtaaaaacaaactgctaacagaaaatttaaacagctttccaaaatagaaaggaacctcttcaaataacctgcttgcccccacaaagaataaagtgactgaactagacaatttaacagggaaattctgccaaaacttttaaaaagcagataatgtttaaactgttccagaatccaggaaaa

SEQ ID NO: 445191 - DNA, 529 bp, Homo sapiens
gtatggcacttagtgcaatgccatctgaagagagattcctaataagtagttggattttcaagtcaggaaaaactgttagagaccaactagtccaaatcttattttacacatgatttacctgaggtccagagaagataaataatattttctatgtcacatgggtggcccacagtaataaagtaaggtatcgaacccaaatctyccaaactcctttgtcttcctactacgtgcacacatgcacatacacacacacacacacacacacacacacacacacacacctttctatagatataaatatacatagagatatgtatatctatatgtctctctctcatatatgtgtgtgtatatataaagatcctccctaattatatgtgccatataacatatatataaatagagagcatctttgaagttaagcagtaggccaacccagtattctcactactttattttatcctcatatatccatatctttattttttcctttttttagccttcctaaaaatcacatcgcatttcagaa

SEQ ID NO: 445192 - DNA, 529 bp, Homo sapiens
gtatggcacttagtgcaatgccatctgaagagagattcctaataagtagttggattttcaagtcaggaaaaactgttagagaccaactagtccaaatcttattttacacatgatttacctgaggtccagagaagataaataatattttctatgtcacatgggtggcccacagtaataaagtaaggtatcgaacccaaatcttccaaactcctttgtcttcctactacgtgcacacatgcacatacacacacacacacacacacacacacacacacacacacctttctatagatataaatatacatagagatatgtatatctatatgtctctctctcatatatgtgtgtgtatatataaagatcctccctaattatatgtgccatataacatatatawaaatagagagcatctttgaagttaagcagtaggccaacccagtattctcactactttattttatcctcatatatccatatctttattttttcctttttttagccttcctaaaaatcacatcgcatttcagaa

SEQ ID NO: 445193 - DNA, 618 bp, Homo sapiens
tcactgcgcctcccggtaccgccgccgcgcccgccaaacctgcgcccccagctacacccggagcgccgacctccccagcagaacaccgcctkttgaagacctgctggagctgtcgcgtgctttctgggttggggctgatgggggcgggcgggtacgtgtactgggtggcacggaagcccatgaagatgggataccccccgagtccatggaccattacgcagatggtcatcggcctcagtgagaatcaaggcacagcacttgggcgggttgggtatctgcggggtagaggaaggaaacggagcagccacgtgggcggggaggcggggaggcggggtgctgccgctggtcaggtggtgggggcacctcaaacaaggtgggagaggaagttgttggaacgcctttctttttttttttttaattttaagttagtatttcttgagaacccttattagactcagcccttttaattctcagaatagctgttagaagtaggtatgattatagtatttactgtggagcaaaccgaggcaacgaggagtattgtgttcatggtcaggaaatgacagtcacttgatcccaggtatatcagatctcaaagcccatactttttctccaggt

SEQ ID NO: 445194 - DNA, 592 bp, Homo sapiens
atgttcctgcttaaaaccattcagtatctttgctgcatacaagatgaatcccaaacactttggcagatcatgaaatgcctttcatcttcagctccataactttctgtcttaattgtcttccactcctcgacatctgttccgtacagccaatgtttctgccacttacttaagccagttctccctaaaatgtcattctttatgcctttacacatgctattccttcaagctggaatatctttttgtccctgcattatatggagaaatcccacttgtccttcaaggcccagactgagtgttgcctttccggtgaagccttccgtgaaatagttccacttcagttactttgattctggtgcarccattaactttctgcagaattctatcactgcacttaaatgtttgcccagtaattgcttatttatgcatctgtccctccccagtgattgtgaactcctcaagaagaggattgtgcttttgtcatcttcatgtttcccatccccagcaccaacatgtgaggctttcagttgatgatactcaataaatatttgatgactgagtgaataaacaactgaacaaatgaatgagaagagaa

SEQ ID NO: 445195 - DNA, 581 bp, Homo sapiens
tcccaccaatggccttctgcctcccagagggctgccatatcagtagtcccttcatgtatgtggcatcccacatttggggtgagaacagcagctagagagccactccctaacatcttgcagcatgggctatggtacccggtggcagaggtgctgcttggatgtgccccagtggaaatgtgggaggcagtgggcgggtctcccgcaaatgtggagaaagcactgaagcagctggaagcacacagcacagagaaggaawgcaccttcgccaggagagttggatgggcatttctgactgcactgcgggaagtacatgctcagtcccacaggtaagagacctcccagtgcaagcttcacacctacgggcccaagtgcacagcttggaacaggacctgaggatgggggatctccaggcacaagcagggcacttggaggcccagataaacagcttggaacaggacttagcaacagctgttggcgtgaccttaagcctgtcctcctggccggacactcttgtttggtctgatgccaaagagaaggaggctcccccactgtgggctcaccctgtgatccatcaaaaggta

SEQ ID NO: 445196 - DNA, 630 bp, Homo sapiens
tagcttcaacatgtaaactgaaaagtatctgagacaggtctcgatcaatttagaagtttatttttccatggataaggacatgcccaggaaaaaagaacacagaaccacaggaacaatctatggtccatgccttttccaaagatgattttgagggcttcaatatttaaagggggaaagcaggctggaagggaaagaggtacagtayagttgcattactgaatccatatcttgtaaggattcaggtaggcagaatagtaaattatgtaagtgaacacagagtagctacctgtggcaatatctggccttttacctttgcctacctgcttaggaacaaaaggaaaggcagttacttgcacggctcagctttcagcttaatttttccttttggcataatgaattggggtctcaagattttattttcctttcacaattaaaaaagtcaccagctacattagcccttaacaagagtcagcctgtcccttgacatcttaaagccgggtatcaacttctcttttctagctatgaaagtcctagatggcatcttcttccagaaggctgttttgtttgtaatgaaaatgtgttgtttagtgtagccaccatcattaatgatcttggctagatcttctggaa

SEQ ID NO: 445197 - DNA, 630 bp, Homo sapiens
tagcttcaacatgtaaactgaaaagtatctgagacaggtctcgatcaatttagaagtttatttttccatggataaggacatgcccaggaaaaaagaacacagaaccacaggaacaatctatggtccatgccttttccaaagatgattttgagggcttcaatatttaaagggggaaagcaggctggaagggaaagaggtacagtacagttgcattactgaatccatatcttgtaaggattcaggtaggcagaatagtaaattatgtaagtgaacacagagtagctacctgtggcaatatctggccttttacctttgcctacctgcttaggaacaaaaggaaaggcagttacttgcayggctcagctttcagcttaatttttccttttggcataatgaattggggtctcaagattttattttcctttcacaattaaaaaagtcaccagctacattagcccttaacaagagtcagcctgtcccttgacatcttaaagccgggtatcaacttctcttttctagctatgaaagtcctagatggcatcttcttccagaaggctgttttgtttgtaatgaaaatgtgttgtttagtgtagccaccatcattaatgatcttggctagatcttctggaa

SEQ ID NO: 445198 - DNA, 448 bp, Homo sapiens
ccggaaagaccaccccagcatgagaacagcccaaacctgctcatgttggtctccccttgtctaagagtttgaagataatgaaattgctttggggtttgygctttccactaagacccctatgcctgaaacagagctgcttaggccactatagctagctgggaagagctcctgctggcccttgcttgctctccctggcttgggggcagccacatctccgtttcggtcatttgtttcaagttttctgaaaatggaaatcttggatccaagatagtgcagaatctccctctttcagatgcgtttttctcacagataagatagctgttacaattgagatgtaaatcacatctccatggcttgcttcttagggaaggcagtggaaacccactaacgtaaatagaacataatgtccagtttgtatcaagttgtcttcacagctttggctggtgga

SEQ ID NO: 445199 - DNA, 587 bp, Homo sapiens
tgatggttgtagtataatgctgtcagtcataattctagttattaccttaaattattttatgttgcaaaaacaaaattttcttgccagttgcactataataaactgtaataagatctttaagccatggccattttaagtcttgtcatctgtagatagttcattgttttattctgttasgttcctgaaagctattacaaacagctgtaagcctaaaatattttatctttcaggggattcacggaaaggactctaacaagtacaggtttctggtaactttaagatcccatcatttgactaggtaagaattctcagaattttaatgaagaaactgattggcacctaaattgctaacccaatatctagtagaacaagaattaattaattgaatgccaagaaaatgctgttgcagattctcgtggttaagtcagccaatactgaaattgttaagatactgtgttagttaattctgcattgctataaaggagtaccttaggttggataattttttttttcttttcttttgagatggagtcttgctctttcacccaggttggagtacagtggcccaatctcagctcactgcaacc

SEQ ID NO: 445200 - DNA, 646 bp, Homo sapiens
aattttgactagccacatttcaagggctcaatagttccatgtggctagttgctaacacattggacagtataggttcaggagaaagtgttttgagtcagaaaatttggtattccaatctacctgctcagtcatccatgtgacatggtaaagctttttaacctttctaaaaacatcatgttttacatcacagtgttttaaaaatattaaatgagacaacatacataaattctttttttcacagtttctgactcttaggaaacatttaataagtgtcagatctcttcctctaaatcattctgaaatttcacattgtgtttgaaaaaagcttttttgtctattcagtatacatcacacatccatccatccatccacaactctttgaaaaagtaaaaacactaatgaaagcatctttattgcagtagttacatgtaacattttatttaactcactcttcttcccccacccccaccatccagaaactcctttttttcctatagcacttatcaacaacaacacactatacaaatttgtgattaataatgcttcataytgactttctttccccctttgctacaatgtcagccacatgatggcagagatccttctctgatttattcaacagatattccaagcacctagaatagtg

SEQ ID NO: 445201 - DNA, 446 bp, Homo sapiens
atagctaaaacctgtatgatatccaaaaataatttaccagtaaaatttggtatatacaaatatgaagactgaagaaagaacatctaagacaacagcaaatggtccaattatgggcattaacaagacaaagacttaaaggtcatatttaccaagtagtttaggaactttgccacaaaattttaattaacactagygagaatttacagttaaccctagggcagtatgtggacattttttccatatgcaagtctatgcatttgagattattttatttttccatgccataggatgtaaagccatataattactccacaggggaaatgtgctttgatgtcactctaaatagttggttctttggcttttataaaaaaaaaaaaaaaaaagttaaaataggctacatctctaaataagggttattttctttcaaaatatagaatagcaaagcc

SEQ ID NO: 445202 - DNA, 446 bp, Homo sapiens
atagctaaaacctgtatgatatccaaaaataatttaccagtaaaatttggtatatacaaatatgaagactgaagaaagaacatctaagacaacagcaaatggtccaattatgggcattaacaagacaaagacttaaaggtcatatttaccaagtagtttaggaactttgccacaaaattttaattaacactagcgagaatttacagttaaccctagggcagtatgtggacattttttccatatgcaagtctatgcatttgagattattttatttttccatgccataggatgtaaagccatataattactccacaggggaaatgtgctttgatgtcactctaaatagttggttctttggcttttataaaaaaaaaaaaaaaaaagttaaaataggctacatctctaaataaggsttattttctttcaaaatatagaatagcaaagcc

SEQ ID NO: 445203 - DNA, 637 bp, Homo sapiens
aaatgggattgtgctctttacttaggtctcagcttgaaccttattagtgtatagaaatgctactattttttgcacattgttgtggatcagttacaggggccttctggaagagtcttttgggctttctcagtatagaaycctatcataagcgaagagagatagtttgacttcttaccctatttggatgccttttatttctttctcttccctcattgctctggctaggactcccagaaaattttctaataaaactggttttttgtttgacttttttttagctttttaatacatgaattttccttgtcatctatcttttttaacttgttgataaattatctttggacagtttttatggtaggcatgtttcaaaagtttttaatttgcaagcaaaagttaacccctagttagacctggtaattctggagagtaaacactgattgctattgagcagtgcaaatatgtagaccaagataatgatttgaaccccagttcttataaaagttgtaatctttgataagtcatttaatgtgatttctaaacgagaataataagaataatcactttctcatacaaagtacagtgtgtttacatctagtgatgccaacaatttagaaccttccatttattcatgccagaa

SEQ ID NO: 445204 - DNA, 637 bp, Homo sapiens
aaatgggattgtgctctttacttaggtctcagcttgaaccttattagtgtatagaaatgctactattttttgcacattgttgtggatcagttacaggggccttctggaagagtcttttgggctttctcagtatagaatcctatcataagcgaagagagatagtttgacttcttaccctatttggatgccttttatttctttctcttccctcattgctctggctaggactcccagaaaattttctaataaaactggttttttgtttgacttttttttagctttttaatacatgaattttccttgtcatctatcttttttaacttgttgataaattatctttggacagtttttatggtaggcatgtttcaaaagtttttaatttgcaagcaaaagtkaacccctagttagacctggtaattctggagagtaaacactgattgctattgagcagtgcaaatatgtagaccaagataatgatttgaaccccagttcttataaaagttgtaatctttgataagtcatttaatgtgatttctaaacgagaataataagaataatcactttctcatacaaagtacagtgtgtttacatctagtgatgccaacaatttagaaccttccatttattcatgccagaa

SEQ ID NO: 445205 - DNA, 583 bp, Homo sapiens
aaaacataaataatactttatattatcatttactttctaaataaagttataaaataatattagcagatgwtattaaaattgataacttacaatgggcttattccttgtaatgacaccagggaacaacattagttggtgaatgaaaaggatggcagaagacattgttcaacagactgtgtcgaaatgtatagtagattaaaaagaaaagctatgccttagagcaaagaatattttgttactaatgagattatagcaaacaaagacttgactatttgataaagagatttttaaaacttggacacttttactcaaatctctttggatgtacattggaaataggataaatttacaaatgtttctatatttataactgtatatgtacttatattttcttattagctgctcaatgacaaagcagaagagtgatcctactcttcacattcatctctttactcatttaaaaaaaatgactgcttaaaacttgacaaaagcaataataaaaaaataacctgactaatgaatgggcaaaggacttaagtaggtatttctccaaagaacatacacaaatgtccaataagcacat

SEQ ID NO: 445206 - DNA, 583 bp, Homo sapiens
aaaacataaataatactttatattatcatttactttctaaataaagttataaaataatattagcagatgttattaaaattgataacttacaatgggcttattccttgtaatgacaccagggaacaacattagttggtgaatgaaaaggatggcagaagacattgttcaacagactgtgtcgaaatgtatrgtagattaaaaagaaaagctatgccttagagcaaagaatattttgttactaatgagattatagcaaacaaagacttgactatttgataaagagatttttaaaacttggacacttttactcaaatctctttggatgtacattggaaataggataaatttacaaatgtttctatatttataactgtatatgtacttatattttcttattagctgctcaatgacaaagcagaagagtgatcctactcttcacattcatctctttactcatttaaaaaaaatgactgcttaaaacttgacaaaagcaataataaaaaaataacctgactaatgaatgggcaaaggacttaagtaggtatttctccaaagaacatacacaaatgtccaataagcacat

SEQ ID NO: 445207 - DNA, 583 bp, Homo sapiens
aaaacataaataatactttatattatcatttactttctaaataaagttataaaataatattagcagatgttattaaaattgataacttacaatgggcttattccttgtaatgacaccagggaacaacattagttggtgaatgaaaaggatggcagaagacattgttcaacagactgtgtcgaaatgtatagtagattaaaaagaaaagctatgccttagagcaaagaatattttgttactaatgagattatagcaaacaaagacttgactatttgataaagagatttttaaaacttggacacttttaytcaaatctctttggatgtacattggaaataggataaatttacaaatgtttctatatttataactgtatatgtacttatattttcttattagctgctcaatgacaaagcagaagagtgatcctactcttcacattcatctctttactcatttaaaaaaaatgactgcttaaaacttgacaaaagcaataataaaaaaataacctgactaatgaatgggcaaaggacttaagtaggtatttctccaaagaacatacacaaatgtccaataagcacat

SEQ ID NO: 445208 - DNA, 583 bp, Homo sapiens
aaaacataaataatactttatattatcatttactttctaaataaagttataaaataatattagcagatgttattaaaattgataacttacaatgggcttattccttgtaatgacaccagggaacaacattagttggtgaatgaaaaggatggcagaagacattgttcaacagactgtgtcgaaatgtatagtagattaaaaagaaaagctatgccttagagcaaagaatattttgttactaatgagattatagcaaacaaagacttgactatttgataaagagatttttaaaacttggacacttttactcaaatctctttggatgtacattggaaataggataaatttacaaatgtttctatatttataactgtatatgtacttatattttcttattagctgctcaatgacaaagcagaagagtgatcctactcttcacattcatctctktactcatttaaaaaaaatgactgcttaaaacttgacaaaagcaataataaaaaaataacctgactaatgaatgggcaaaggacttaagtaggtatttctccaaagaacatacacaaatgtccaataagcacat

SEQ ID NO: 445209 - DNA, 514 bp, Homo sapiens
attgcttgactggtgaattttaccaaattcttcttttaaaaaagattgatgacaatccttctcaaactttcacaaataactgaagaggaggaaatacttccaagttcatttacgagacctccatcactctgatatcaaagccagacaaaaacactacaagaaaagaaaatacaggcaaatattcctgataaacatccatgcraaatcctcagcaaagctctagcaaacagaactcaacagcacactgaaaggatcatataccctgatcaagtgtgatttattcatgagattcaaagttggttcaacgtaggtaaatcaagaaatgtggtacaccacattaactgatgaaggataaaaatcatacagtcatttcaatagatggagaaaaagcatttgacaaatttcaacatcttatgatgaaacttgtcaacaaatttaggtatagaaggaattaactcaacataataaaagccatatgtgaaagctcaatggtgaaaaagaaaaatgtttttcc

SEQ ID NO: 445210 - DNA, 652 bp, Homo sapiens
ggctcctgaaactgacagctgtaacctgaaattagttgtatctgacagatactgaaacaatctgctgagactctaaaactagttttacccatcatgcaccagttagagctttccagctctgcacaactttactagtgccaatgaattttctttcacaayaatatggaacatttcttttttcttccccctcccctcaaaaacttttattttaggttcaggggtacgtgtgcaggtttgctatacaggcaaactcctgtcatggaggtttgatgtacagattattttgtcaaccaggtactaagcatagtaccaaatagttatttttacatttctcttttataaaacctccaatcttctctttgttcttcagatatactgaagaccaccgggtctgtatatatgccccaaattgcaattcttgcttccctcaaaaaaatttttagagatttttatctatattttatttgacttcaacatctctgatgataactatgacatagtttatctcaccaaaacagaggcatattaatctactaaaatatttcccaaaataaaaactagcagaattcgcaacacacgtattttggaatttttagagacaccattattataaattgctctactcggatcacaagatcaagagattgagacc

SEQ ID NO: 445211 - DNA, 652 bp, Homo sapiens
ggctcctgaaactgacagctgtaacctgaaattagttgtatctgacagatactgaaacaatctgctgagactctaaaactagttttacccatcatgcaccagttagagctttccagctctgcacaactttactagtgccaatgaattttctttcacaataatatggaacatttcttttttcttccccctcccctcaaaaacttttattttaggttcaggggtacgtgtgcaggtttgctatacaggcaractcctgtcatggaggtttgatgtacagattattttgtcaaccaggtactaagcatagtaccaaatagttatttttacatttctcttttataaaacctccaatcttctctttgttcttcagatatactgaagaccaccgggtctgtatatatgccccaaattgcaattcttgcttccctcaaaaaaatttttagagatttttatctatattttatttgacttcaacatctctgatgataactatgacatagtttatctcaccaaaacagaggcatattaatctactaaaatatttcccaaaataaaaactagcagaattcgcaacacacgtattttggaatttttagagacaccattattataaattgctctactcggatcacaagatcaagagattgagacc

SEQ ID NO: 445212 - DNA, 652 bp, Homo sapiens
ggctcctgaaactgacagctgtaacctgaaattagttgtatctgacagatactgaaacaatctgctgagactctaaaactagttttacccatcatgcaccagttagagctttccagctctgcacaactttactagtgccaatgaattttctttcacaataatatggaacatttcttttttcttccccctcccctcaaaaacttttattttaggttcaggggtacgtgtgcaggtttgctatacaggcaaactcctgtcatggaggtttgatgtacagattattttgtcaaccaggtactaagcatagtaccaaatagttatttttacatttctcttttataaaacctccaatcttctctttgttcttcagatatactgaagaccaccgggtctgtatatatgccccaaattgcaattcttgcttccctcaaaaaaatttttagagatttttatctatattttatttgacttcaacatctctgatgataactatgacatagtttatctcaccaaaacagaggcatattaatctactaaartatttcccaaaataaaaactagcagaattcgcaacacacgtattttggaatttttagagacaccattattataaattgctctactcggatcacaagatcaagagattgagacc

SEQ ID NO: 445213 - DNA, 283 bp, Homo sapiens
  misc_feature (1)...(283): n = A,T,C or G
ggagacgtactaatttaatacaggagaaaaagtcataaaaataaactactgtaaaagcactctcastcttgctcatgctctgtgtgtgtgtgtgtgtgtgtgtgtgtgtgtctgtgtatgtgtgtgtgtgtgtgtgtgtgttcctaacagagaaactttttaaaaagtgattatgtagtcaattcccaaatttttattccacatatgtcgttacttcacctatttacttaatatcctgatttaaattcattctaaattgtgaaagtgaaaaactgnnnnnnnn

SEQ ID NO: 445214 - DNA, 480 bp, Homo sapiens
aattgtacaaacatattaatagacagatctccttggaagttccatttcatatgtttgaagtgaatatacaactttttcccaaataactagccatttttttaaaccatttaaataatacctctcttttttccaattgacatctttatctatttctagagtttttagtatttaataagggtaaataaatacaagaatgtatttttctgcatttccaactgaggtactgggttcaactcactggggcttgttggacagtgggtgcagcccacagagtgtgagctgaagcagggtggggcatcacctcacacgggaaccacaagcgactggggaattccatttcctagccaagggaagccatgacagacggtacatggaaaatcaggacactcccaygctaatactgcacttttccaatggtcttagcaaatggcacaccaggaaattatatcccacgcctggctcggagggtcccacgcccac

SEQ ID NO: 445215 - DNA, 600 bp, Homo sapiens
atataatccattatgtaatgtggtwtatacataaaatggaatattattcagccttaaaaagccaattctgacacatgttacaacatgtgtgtactttgaggacatttttatatttgaggacatatttatatgtctattgtgcagagtagggtagtgacgaaaagacaaatactccatgattccacttatataagacacctagagaaaaaaaagaaacacagagacagaaagtgaaatggtggtttttaagggttgggggagggaagaaagaagagttagagtgtaatgggtacagaatttcagttttgcaagatgaaaagagctcttgaatagactttaccacaatttaaaataaaaaaatctaaaactcatggcagggacttctaccaaggcatatttaatagcagagaaagacacgttctcaaaaagaaactaccaaaaattgtaaggaaggacttggaatggggcaatttgaggatgtaaagaactgggtctattaagacaaaattatttcagaaaaaaagcttaaatgaataatagaattgagatttctagaagccaaatatgtgatctgaaataagtgaggttatctcaaaatac

SEQ ID NO: 445216 - DNA, 379 bp, Homo sapiens
tgtaagcccatgttaataacaacattatttgcaatagcaaaatatggaagcaatctacatgtgtatccatgaatgaatggatatgtggtacatataatccattatgtaatgtggtatatacataaaatggaatattattcagccttaaaaagccaattctgacacatgttacaacatgtgtgtactttgargacatttttatatttgaggacatatttatatgtctattgtgcagagtagggtagtgacgaaaagacaaatactccatgattccacttatataagacacctagagaaaaaaaagaaacacagagacagaaagtgaaatggtggtttttaagggttgggggagggaagaaagaagagttagagtgtaatg

SEQ ID NO: 445217 - DNA, 600 bp, Homo sapiens
atataatccattatgtaatgtggtatatacataaaatggaatattattcagccttaaaaagccaattctgacacatgttacaacatgtgtgtactttgaggacatttttatatttgaggacatatttatatktctattgtgcagagtagggtagtgacgaaaagacaaatactccatgattccacttatataagacacctagagaaaaaaaagaaacacagagacagaaagtgaaatggtggtttttaagggttgggggagggaagaaagaagagttagagtgtaatgggtacagaatttcagttttgcaagatgaaaagagctcttgaatagactttaccacaatttaaaataaaaaaatctaaaactcatggcagggacttctaccaaggcatatttaatagcagagaaagacacgttctcaaaaagaaactaccaaaaattgtaaggaaggacttggaatggggcaatttgaggatgtaaagaactgggtctattaagacaaaattatttcagaaaaaaagcttaaatgaataatagaattgagatttctagaagccaaatatgtgatctgaaataagtgaggttatctcaaaatac

SEQ ID NO: 445218 - DNA, 519 bp, Homo sapiens
ctgctgtctgctttttatatgtaatcccgtttccaacgaaatcctcaaagctagacaaatatccacttgcagattccacaaaaagagtgtttcaaaactgctctatcaaaagaatgcttcaacactgttagttgarggcgcacatcacaaataagtttctgagaatgcttctgtctagttttcaggggaagatatttccttttaaaccataggcctgaaagcgctccaaatgtccacatccagatactacaaaaagagtgtttcaaacctgctctatgaaagggactgttcaacactgtgacttcaattgaaacatcccaatgaagcttctgagaatgcttctgtgtagagtttatatgaagacaatcccgtttccaacgaaatcctcaaagctatccaaatatcctcttgcagattttacaaaaagagtgtttcaaaactgctctatcaaaagaaagcttcaacactgttagttgagggcgcacatcacaaataagattctgagaattcttctgtcta

SEQ ID NO: 445219 - DNA, 519 bp, Homo sapiens
ctgctgtctgctttttatatgtaatcccgtttccaacgaaatcctcaaagctagacaaatatccacttgcagattccacaaaaagagtgtttcaaaactgctctatcaaaagaatgcttcaacactgttagttgaaggcgcacatcacaaataagtttctgagaatgcttctgtctagttttcaggggaagatatttccttttaaaccataggcctgaaagcgctccaaatgtccacatccagatactacaaaaagagtgtttsaaacctgctctatgaaagggactgttcaacactgtgacttcaattgaaacatcccaatgaagcttctgagaatgcttctgtgtagagtttatatgaagacaatcccgtttccaacgaaatcctcaaagctatccaaatatcctcttgcagattttacaaaaagagtgtttcaaaactgctctatcaaaagaaagcttcaacactgttagttgagggcgcacatcacaaataagattctgagaattcttctgtcta

SEQ ID NO: 445220 - DNA, 526 bp, Homo sapiens
acctccccacttccttcaaatgtttgctcaaagttacattcttaatgaggcccactctgacctccatggttgtaaaaatgaagtcctacccagctttcccaatcctcctacgctactttacttttgatggggtttagatgtttgtcccctccaaatctcatgttgaaatgtgatccccaatgttaaaggtgagcctggtaggaggtgtttgggtcatgggggcaaatccctcatgaatggtttgataccctcttctgagtaataagtgagttcttgctggttgtttaargaagcctggccacatgagctcaacatcactgatcattaaagaaattcaaatcaaaaacacaatgagatatcatctcatgccagtcagaatggcgattattaaaatgtcgagaaacaacagatgctggagaggctggagaaataggaatgcttttacactgttggtaggaatgtaaactagttcagccattgtgtaagacagtatggcgattcctcaaagatccagaaccagaaatac

SEQ ID NO: 445221 - DNA, 526 bp, Homo sapiens
acctccccacttccttcaaatgtttgctcaaagttacattcttaatgaggcccactctgacctccatggttgtaaaaatgaagtcctacccagctttcccaatcctcctacgctactttacttttgatggggtttagatgtttgtcccctccaaatctcatgttgaaatgtgatccccaatgttaaaggtgagcctggtaggaggtgtttgggtcatgggggcaaatccctcatgaatggtttgataccctcttctgagtaataagtgagttcttgctggttgtttaaagaagcctggccacatgagctcaacatcactgaycattaaagaaattcaaatcaaaaacacaatgagatatcatctcatgccagtcagaatggcgattattaaaatgtcgagaaacaacagatgctggagaggctggagaaataggaatgcttttacactgttggtaggaatgtaaactagttcagccattgtgtaagacagtatggcgattcctcaaagatccagaaccagaaatac

SEQ ID NO: 445222 - DNA, 590 bp, Homo sapiens
cttccttcaaatgtttgctcaaagttacattcttaatgaggcccactctgacctccatggttgtaaaaatgaagtcctacccagctttcccaatcctcctacgctactttacttttgatggggtttagatgtttgtcccctccaaatctcatgttgaaatgtgatccccaatgttaaaggtgagcctggtaggaggtgtttgggtcatgggggcaaatccctcatgaatggtttgataccctcttctgagtaataagtgagttcttgctggttgtttaaagaagcctggccacatgagctcaacatcactgatcattaaagaaattcaaatcaaaaacacaatgagatatcatctcatgccagtcagaatggygattattaaaatgtcgagaaacaacagatgctggagaggctggagaaataggaatgcttttacactgttggtaggaatgtaaactagttcagccattgtgtaagacagtatggcgattcctcaaagatccagaaccagaaataccatctgacccagcaatcccattagtgggtatatacccaaaggaatataaatcattctattacaaagatacatg

SEQ ID NO: 445223 - DNA, 423 bp, Homo sapiens
attagtagaatatttagtcatctaggaaagcaatcttgttccacggacaagaaaaagaatttgactctaaatctttaataaattagtgagtttcatattattgtacttgaaacacggtttaaattttcaaataaaagctataagaaatgtttctctstatatatttttgtctaattgtctatatgttatgtatgtgtggtatttttctaccagcttacaggattgccaaaattaaattgtaaaagagttctcttacattggctgaaaaaaatgagcacttgcataaattagatattccttaaactctaagatagaaactaacacaaattattttcaaatttacatgatctgggatagtctttggtaaataaaagctaattaaagtgtgtgagtttgattaaagcaggtacatctccagatttc

SEQ ID NO: 445224 - DNA, 531 bp, Homo sapiens
tttttgcagacataaacaacctttattctaaaatttgtatggaaagtcacatgcactaaaatagctaaaacaatcttgacaatgaagaataaagtgggaagaattactctgtttgattttaaggtttatttcattgctatggtagtcaacccagtgtagtactggcaaaggaacagacacatagatcaatggaacggaagagagatccacagaatagaaacacatccacaccaatatactcaamtggtttttgacaaagcttcaaatgcaactgagtagaagaatgatggtcttttcaccagttggtgctggagcaattggatacctatcaggagaaaaaaaaaatggatctcaatctaatcttcacatcttatgcaaggattaatttgaaaataatcaaagacttaaatgtaaaatgtaaaactgtaatgattttagcaaaaataggtaaaaacctttagcatctagggctagtggtataattcttagccctaacatggaaaacacatgtcaaaaatgcaaaaattgata

SEQ ID NO: 445225 - DNA, 581 bp, Homo sapiens
tttttgtcttttctgttcattgctaaatcctcatgactagaatagtgaatagcacataactggtgttcactatttattgaatacatgattgaaggttttttcttttttggagcagggtggccctatatcagagcttaggagccacagatcattaaagccattgccttaattgagtcttggctctatcacttactgttttttaccttggagtagttactttagctctgtgtgccttaattttctcctctgcaaaataagtattttaasgttgtaaaaattaaatgaattaatagggtaaaaccatttagaacagtatttagtacatagtacatagaagtaggtaccttgaagttggctataaacgttagatattattttgcatatatagctaattctcctatctatgtatgtgattataatctaagaaaatactctgtaaagtcagtaatatggtacattttttgccttttctttcaggaagaaaaattgaggcatggagatagaaagactgtaaattgcgatagccaagggctggatcccactggattagtcaaagtaggacaatatgcttgcattttcct

SEQ ID NO: 445226 - DNA, 582 bp, Homo sapiens
tatttgttagttgtactcctactcatatgcttcagttaattatatatgttgaacaggtaggaagcagtgctgtttttatttattttaatatgttattcatacatttgaagaattatgttctttctgtaggcagctgaattttttttttttttgagacgaagtcttggtattgtcccccttgctggagtgcaatggcatgatctcggctcactgcaacctctgcctcctgggttcaggcaattctcctgcctcagactcctgagtagctgggattacaggcgcctgccaccacgcccggataatttttgtatttttagtagagacagtgtttcactatgttggctgggctggtctcgaactcctgccctcaggtgatccgcctgcctcagcctcccaaagtgctgggattactggcgtgagccactgctgccagccggcagttgaattttaagactgtggagctggctgaggcagtagatgaaacaagatttcttgatgttccttccaggtttattatgcatgtatctttagagmtgatttttttttaaagactgtgtttattgtatttcagatgctgagatg

SEQ ID NO: 445227 - DNA, 646 bp, Homo sapiens
gtcaggcacaacccagattcaatactcaccagtgaacagtcccataaccttatctaaaagaagttatattgcaattagcttacttgctggacagttttggcattataaaactagtatccacttcaatacatccaaccatcttcaataatacactgggggcactctcaagaggacaaagtgaaagataagaaggggcaatataaagagtggtatcaagatttcagatttcaatgtcagaacccctggctattttgagttgtatatgtgtaagaacttcattttagtcttctggaaaactccatgcctttttattcttttaaataagcactgaatgctacacaacactaggtcagaaatcaaacttttgagacagctaaatctagatatctgctcactgttagagaytgaaagtggtccagggaaatggaaggtttgccagaggaagatcaggtgtctagcccatagatcttggaaagattacctgtcagagagccactgtatctcaggtctagttctcttctttagaagtttggatatccaattgctactacaccttgatgtggttgggttcaagtaccgaatcatataaaccaaaccatcaagaatcaaaaatataaaagccataatactgatatattaatttaca

SEQ ID NO: 445228 - DNA, 483 bp, Homo sapiens
tttttcactatttaacaaagatggtgatggaactataacaacaaggaatcaggaactgtaatgaggtctcttgggcagaatcccacagaagcagagttacaggacatgattaatgaagtagatgctgatggtaatggcacagttgacttccctgaatttctaacaatgatggcaagaaaaatgaaagacacagacagtgaagaagaaattagagatgcattctgtgtgtttgataaggatggyaatggctatattagtgcaacagaacttcaccatgtgatgacaaaccttggagagaatttaacagatgacgaggttgatgaaatgatcaggtaaccacatattgatggtgatggtcaaatgatctatgaagagtttgtacaaatgatgacagcaaagtgaacaacttgtacagaatgtgttaaatttcttgtacaaaattgtttatttgccttttctttgtttgtaacttatctgtaaaag

SEQ ID NO: 445229 - DNA, 555 bp, Homo sapiens
aagagaggagagcaggtcccactcacctgagtctgatcagtgagctgtgttgagatgtgtctgtcatctagaaaaaggtccttcaygcagagctactcacagacactgctgtgtgtctctaacttctccataacacagaggccatgggtactcaggaagagtgacattgtggggtggcacaacccaccacaacgggagcctgcttgggtcaacagggctcagagtcagtgttctctatcccctgaactgacatgtgtgtatacaatgtgtttgtgtatgcatgtgtgcctgtgtgtgtgtgtgtgtgcgtatgtgtgtgtttgtcttgcttctctggacaggcctagcttctccactcatgggtgcacccaggtcctcatcactgtcaccttagagcattagagcctctataggtgctccccaatctctgccctccccacccatggtggtcctggggatgcagacagaggagaggcactgcatactgctgagggctgggaccctctctaggtggaacacaggtcatttgtaaagttgtaggtctgcccaacagga

SEQ ID NO: 445230 - DNA, 416 bp, Homo sapiens
  misc_feature (1)...(416): n = A,T,C or G
ctccaatttgttttctgcctcttaggagcttataaaactaaagttcacaattaatggggaagggaggagacagatgatcttcattgccttatctataaacttgctntggtctatggtgatcctgtgttaaactgtgaaatagaatctatcatcctggctctctgaggcccttgacttcacccttttagggcttttcttacttattttcaaaccttcacctctctcacattgaaaagcccaactcttaataccctctctaaaaaactaccccttcccaccaaccaccaccaccgacctcactctatcatctaaatctgtttcaagatataaaaatcttggtaatttakatcttaacacaaattgcatactaccttttcaaaaagcaagttaagcctgattctaattgtgggatgaaa

SEQ ID NO: 445231 - DNA, 416 bp, Homo sapiens
  misc_feature (1)...(416): n = A,T,C or G
ctccaatttgttttctgcctcttaggagcttataaaactaaagttcacaattaatggggaagggaggagacagatgatcttcattgccttatctataaacttgctntggtctatggtgatcctgtgttaaactgtgaaatagaatctatcatcctggctctctgaggcccttgacttcacccttttagggcttttcttacttattttcaaaccttcacctctctcacattgaaaagcccaactcttaataccctctctaaaaaactaccccttcccaccaaccaccaccaccgacctcactctatcatctaaatctgtttcaagatataaaaatcttggtaatttagatcttaacamaaattgcatactaccttttcaaaaagcaagttaagcctgattctaattgtgggatgaaa

SEQ ID NO: 445232 - DNA, 416 bp, Homo sapiens
  misc_feature (1)...(416): n = A,T,C or G
ctccaatttgttttctgcctcttaggagcttataaaactaaagttcacaattaatggggaagggaggagacagatgatcttcattgccttatctataaacttgctntggtctatggtgatcctgtgttaaactgtgaaatagaatctatcatcctggctctctgaggcccttgacttcacccttttagggcttttcttacttattttcaaaccttcacctctctcacattgaaaagcccaactcttaataccctctctaaaaaactaccccttcccaccaaccaccaccaccgacctcactctatcatctaaatctgtttcaagatataaaaatcttggtaatttagatcttaacacaaattrcatactaccttttcaaaaagcaagttaagcctgattctaattgtgggatgaaa

SEQ ID NO: 445233 - DNA, 422 bp, Homo sapiens
gctcctggcacacccttgcagaggaggctgtttgctctttaaggcagcttgaccttgcctggcatgtacaggccccaggtacagacacgctgctcccagtgagcttgttctgccttggaccaaattctaagtggcttagaatttgcccagcatgcacaagcctcagtgtaataactgtgcaacaaatggagccacacagacgaaatgagcagcaggctcagaagcarggtatgccctgcctttgggcctccagtcgatgcctcagggctcctatggcactgcgggtctcttggttgcctagctgcagaccacaggctgtattgaggaggactttatgttcaagtgcagaaagtagtcaggattaccatccaggggactctgccttctgtggtcctctccagacttagaatttggcccaaggc

SEQ ID NO: 445234 - DNA, 390 bp, Homo sapiens
aactgagtgaagaaaaaacctgtagaataggagaaaatattgtcaagctattcacctaataagggactaatatacaaaatatacaaaaaaactcaaacaacttcacagtaataaaaatctgagttcaaatttgggcaaaatatataactatacwtttttttagaaaaagaaatacaaataaccaataaataaattttaaaatgctcagtatcactaatcctcagggaaatacaaatcaaatctacaatgtgatataatcttgcttcaatttgaataaattgctgtcattgaaaagacaaaaaaaataacaaatgctcgtgaggctccagagaacagtaaactcttacatgctgttggtgggaaggtaaattagtgcagccactatagaga

SEQ ID NO: 445235 - DNA, 475 bp, Homo sapiens
tattttaattcattctaagattccttaaaattctgtaattctatgtcctcttgattctgtctatagaaaaacttggaatacataggcagcagagtttgaaaaaaataatagaacaaaagaaacaccaagaaaaacagagaagaaagttttaaaaaatgaagacaagrttatataaaagtcatggaaaaagcaacaagagtaaaaaatgtattatggaagtaagcagaaatacttgcctaaatggaaaaccaaactgggaagtcaaataatttgtctctaagacttgcctaaacttgctttggtaaaacttacagtcctatggccaaagctaagtcagatctgccctagagcctttgaaggtaaaaataagatactggttaccactgaaatcgtcaaatttattaggactaaccacattctaacaataaacttaaatgagagttcaaggtatttaaactctcattaatttagaagt

SEQ ID NO: 445236 - DNA, 475 bp, Homo sapiens
tattttaattcattctaagattccttaaaattctgtaattctatgtcctcttgattctgtctatagaaaaacttggaatacataggcagcagagtttgaaaaaaataatagaacaaaagaaacaccaagaaaaacagagaagaaagttttaaaaaatgaagacaaggttatataaaagtcatggaaaaagcaacaagastaaaaaatgtattatggaagtaagcagaaatacttgcctaaatggaaaaccaaactgggaagtcaaataatttgtctctaagacttgcctaaacttgctttggtaaaacttacagtcctatggccaaagctaagtcagatctgccctagagcctttgaaggtaaaaataagatactggttaccactgaaatcgtcaaatttattaggactaaccacattctaacaataaacttaaatgagagttcaaggtatttaaactctcattaatttagaagt

SEQ ID NO: 445237 - DNA, 530 bp, Homo sapiens
tttggtaaaacttacagtcctatggccaaagctaagtcagatctgccctagagcctttgaaggtaaaaataagatactggttaccactgaaatcgtcaaatttattaggactaaccacattctaacaataaacttaaatgagagttcaaggtatttaaactctcattaatttagaagttaatcaaattaatgaatcygattgatctgattcagacctatactttgatccaagggctgcacagatatctatcaatctatgctgaggagcaagagaaaggatttggaaggcaggtaggctgatggtcaaactgcaggccagctactttgttaactatgggatcatgaggcaattaatcagctctaatccatagttgtttatttaacagtaggttataggaacacagatgttatgatggctttatgagatgataaatgcatagaacatattaggatgtctagcccagaatacaacactcaacagatattagtttcttccatctatattttcttagttaacataattttttaaa

SEQ ID NO: 445238 - DNA, 608 bp, Homo sapiens
agaattaacattcattatacgtattggtaggtaattaatgcagtaagaactcttccctctgtrtttattagatgcaaagaagaataaatttattaaaatttggtatctacaagtgaactgcagtatacaagtcatcctagccaaagcctatgagattgagtaaaaatggtattgttagcagaacaggtgtgatgagtcaacagtgtcaaagagcatgatttctggaccaaaatatgaggggccattacaacagagtatacactagtaccccttatccactatatgcgcagaaagacatacttgacacgtttttctctgctgtcacaccacagcaacaatcatcaacaaagaaggcttctgtgaccaaatgtgtggagagtttttccccaccaacaaacaagcaatcattcctgctgatgacacaattcaattctcacaccctatctacagataacatcagatttaatttaatttataaattaaactttctcatagatatgtatgtatagggaaaaacagcttgtgattcagtactattcatggtttcatgcatccactgggggtcttggaatgtatctcccacagttaagggggagctactgcactta

SEQ ID NO: 445239 - DNA, 608 bp, Homo sapiens
agaattaacattcattatacgtattggtaggtaattaatgcagtaagaactcttccctctgtatttattagatgcaaagaagaataaatttattaaaatttggtatctacaagtgaactgcagtatacaagtcatcctagccaaagcctatgagattgagtaaaaatggtattgttagcagaacaggtgtgatgagtcaacagtgtcaaagagcatgatttctggaccaaaatatgaggggycattacaacagagtatacactagtaccccttatccactatatgcgcagaaagacatacttgacacgtttttctctgctgtcacaccacagcaacaatcatcaacaaagaaggcttctgtgaccaaatgtgtggagagtttttccccaccaacaaacaagcaatcattcctgctgatgacacaattcaattctcacaccctatctacagataacatcagatttaatttaatttataaattaaactttctcatagatatgtatgtatagggaaaaacagcttgtgattcagtactattcatggtttcatgcatccactgggggtcttggaatgtatctcccacagttaagggggagctactgcactta

SEQ ID NO: 445240 - DNA, 608 bp, Homo sapiens
agaattaacattcattatacgtattggtaggtaattaatgcagtaagaactcttccctctgtatttattagatgcaaagaagaataaatttattaaaatttggtatctacaagtgaactgcagtatacaagtcatcctagccaaagcctatgagattgagtaaaaatggtattgttagcagaacaggtgtgatgagtcaacagtgtcaaagagcatgatttctggaccaaaatatgaggggccattacaacagagtatacactagtaccccttatccactatatgcgcagaaagacatacttgacacgtttttctctgctgtcacaccacagcaacaatcatcaacaaagaaggcttctgtgaccaaatgtgtggagagtttttccccaccaacaaacaagcaatcattcctgctgatgacacaattcaattctcacaccctatctacagataacatcagatttaatttaatttataaattaaactttctcatagatatgtatgtatagggaaaaacagcttgtgattcagtactattcatggtttcatgcatscactgggggtcttggaatgtatctcccacagttaagggggagctactgcactta

SEQ ID NO: 445241 - DNA, 633 bp, Homo sapiens
tttcatatgttccttaggcatatttttcctgtctggaaattcaacttaggtacttttatatcttccttgtttcttcttaacgtaatgtgtaagtctatatrtaagtactatatacacatataagttctaaatgtatgctcatagaaatacaaatactgtatgtaagtatatataatactatgtataactgctatacttattataagtactacttaaatatagtttccttaccccatttttaacagtcattgattaaccaattgaagattatcctatagtttatttttttcattaccttcaatgtaatgatgccattctagttttataaaaccaggtgacaatattacattctctaaaatttctttagacaaatactgaatggggacaaatactgaatggggaaaaactgaaagcttttcctctaagatctggaacactacaaggatgcccactgtcaccactgttattcaacatagtattggaagtcctagctagagcaatcagacaagaggagaaataaaggacatctaaattggaaagaaagaagttaaattatccttgtttgcagatgacatgattttataattggaaaaacctaaacactccaccaaaaaaactactagaactgataaa

SEQ ID NO: 445242 - DNA, 633 bp, Homo sapiens
tttcatatgttccttaggcatatttttcctgtctggaaattcaacttaggtacttttatatcttccttgtttcttcttaacgtaatgtgtaagtctatatgtaagtactatatacacatataagttctaaatgtatgctcatagaaatacaaatactgtatgtaagtatatataatactatgtataactgctatayttattataagtactacttaaatatagtttccttaccccatttttaacagtcattgattaaccaattgaagattatcctatagtttatttttttcattaccttcaatgtaatgatgccattctagttttataaaaccaggtgacaatattacattctctaaaatttctttagacaaatactgaatggggacaaatactgaatggggaaaaactgaaagcttttcctctaagatctggaacactacaaggatgcccactgtcaccactgttattcaacatagtattggaagtcctagctagagcaatcagacaagaggagaaataaaggacatctaaattggaaagaaagaagttaaattatccttgtttgcagatgacatgattttataattggaaaaacctaaacactccaccaaaaaaactactagaactgataaa

SEQ ID NO: 445243 - DNA, 633 bp, Homo sapiens
tttcatatgttccttaggcatatttttcctgtctggaaattcaacttaggtacttttatatcttccttgtttcttcttaacgtaatgtgtaagtctatatgtaagtactatatacacatataagttctaaatgtatgctcatagaaatacaaatactgtatgtaagtatatataatactatgtataactgctatacttattataagtactacttaaatatagtttccttaccccatttttaacagtcattgattaaccaattgaagattatcctatagtttatttttttcattaccttcaatgtmatgatgccattctagttttataaaaccaggtgacaatattacattctctaaaatttctttagacaaatactgaatggggacaaatactgaatggggaaaaactgaaagcttttcctctaagatctggaacactacaaggatgcccactgtcaccactgttattcaacatagtattggaagtcctagctagagcaatcagacaagaggagaaataaaggacatctaaattggaaagaaagaagttaaattatccttgtttgcagatgacatgattttataattggaaaaacctaaacactccaccaaaaaaactactagaactgataaa

SEQ ID NO: 445244 - DNA, 497 bp, Homo sapiens
tttagtattatcaccagagtgtgcctcaagaaagactatttgtgtaacatattcaagatgttacagaaaggcacccttgtgaaatagggaataattatcacaggaatttaaagaagtgtaattcacaaagcggttaaaaaataacaccttgttcagcctgaagcgttgtgtggaaggcagaaagaacatgccccacctccagggccttggtcacagtgttgggggctaattgccttcagagatgctttagttctttttgatcaccaaccagacaatctagttctcccctaggagttgttgctctgaattattcctcagtgccaaatgtktaattggtcctagataatgggtgaaatgtacaagagtgaaaactaaaactggtttactaaacacaagtattcctagatttttttttgttcattttagttttcttcacctacattaaggagtacaacatgatgttttgatataattatttctagtgaagtggttcttct

SEQ ID NO: 445245 - DNA, 584 bp, Homo sapiens
tggaaggcagaaagaacatgccccacctccagggccttggtcacagtgttgggggctaattgccttcagagatgctttagttctttttgatcaccaaccagacaatctagttctcccctaggagttgttgctctgaattattcctcagtgccaaatgtgtaattggtcctagataatgggtgaaatgtacaagagtgaaawctaaaactggtttactaaacacaagtattcctagatttttttttgttcattttagttttcttcacctacattaaggagtacaacatgatgttttgatataattatttctagtgaagtggttcttctaatcaagcaaatcaacatattcattttcccacattattaccctttaaatacaagtatttctaatggaatcttcagaatcttacaagtagagccattttagaaggcaggaagttttacctgttgagccatacatcactgatagccatttctcttccctgtctactttgtttgaactgcttgttcagtagaaatcaccttagaaacaatggtgcttctttagaatgattttaaaattataattccttacaacaggtatg

SEQ ID NO: 445246 - DNA, 584 bp, Homo sapiens
tggaaggcagaaagaacatgccccacctccagggccttggtcacagtgttgggggctaattgccttcagagatgctttagttctttttgatcaccaaccagacaatctagttctcccctaggagttgttgctctgaattattcctcagtgccaaatgtgtaattggtcctagataatgggtgaaatgtacaagagtgaaaactaawactggtttactaaacacaagtattcctagatttttttttgttcattttagttttcttcacctacattaaggagtacaacatgatgttttgatataattatttctagtgaagtggttcttctaatcaagcaaatcaacatattcattttcccacattattaccctttaaatacaagtatttctaatggaatcttcagaatcttacaagtagagccattttagaaggcaggaagttttacctgttgagccatacatcactgatagccatttctcttccctgtctactttgtttgaactgcttgttcagtagaaatcaccttagaaacaatggtgcttctttagaatgattttaaaattataattccttacaacaggtatg

SEQ ID NO: 445247 - DNA, 506 bp, Homo sapiens
gtaattggtcctagataatgggtgaaatgtacaagagtgaaaactaaaactggtttactaaacacaagtattcctagatttttttttgttcattttagttttcttcacctacattaaggagtacaacatgatgttttgatataattatttctagtgaagtggttcttmtaatcaagcaaatcaacatattcattttcccacattattaccctttaaatacaagtatttctaatggaatcttcagaatcttacaagtagagccattttagaaggcaggaagttttacctgttgagccatacatcactgatagccatttctcttccctgtctactttgtttgaactgcttgttcagtagaaatcaccttagaaacaatggtgcttctttagaatgattttaaaattataattccttacaacaggtatgctcttacacatcttctgtgtgaaaacactatttagtgggtaatttggtttactctcagggtaagtttttaaaaactgcaa

SEQ ID NO: 445248 - DNA, 506 bp, Homo sapiens
gtaattggtcctagataatgggtgaaatgtacaagagtgaaaactaaaactggtttactaaacacaagtattcctagatttttttttgttcattttagttttcttcacctacattaaggagtacaacatgatgttttgatataattatttctagtgaagtggttcttctaatcaagcaaatcaacatattcattttcccacattattaccctttaaatacaagtatttctaatggaatcttcagaatcttacaagtagagccattttagaagrcaggaagttttacctgttgagccatacatcactgatagccatttctcttccctgtctactttgtttgaactgcttgttcagtagaaatcaccttagaaacaatggtgcttctttagaatgattttaaaattataattccttacaacaggtatgctcttacacatcttctgtgtgaaaacactatttagtgggtaatttggtttactctcagggtaagtttttaaaaactgcaa

SEQ ID NO: 445249 - DNA, 506 bp, Homo sapiens
gtaattggtcctagataatgggtgaaatgtacaagagtgaaaactaaaactggtttactaaacacaagtattcctagatttttttttgttcattttagttttcttcacctacattaaggagtacaacatgatgttttgatataattatttctagtgaagtggttcttctaatcaagcaaatcaacatattcattttcccacattattaccctttaaatacaagtatttctaatggaatcttcagaatcttacaagtagagccattttagaaggcaggaagttttacctgttgagccatacatcactgatagccatttctcttccctgtctactttgtttgaactgcttgttcagtagaaatcaccttagaaacaatggtgcttctttagaaygattttaaaattataattccttacaacaggtatgctcttacacatcttctgtgtgaaaacactatttagtgggtaatttggtttactctcagggtaagtttttaaaaactgcaa

SEQ ID NO: 445250 - DNA, 289 bp, Homo sapiens
tcatttaaggaaaaatgaaataytaagcatttgtctttgctatctttacagatcgaataagaaaatagcaatgatcagtatcagctctttatggagaaagagcaggtgaaatattttctcagcactcttcctgcaaggcgaggtcgagagtcaccttgtgttgaaaatcttactagtataggactcaacgaaaatatattccccaaatgcccataagaattcctacttcaagcctcagacttcaaataattgccagaactacttgactgaggttagttatatgaccgtt

SEQ ID NO: 445251 - DNA, 492 bp, Homo sapiens
gtaaggtgagtagtggacataatgggatttkgtttagaaatcttaggaacaccgaggacagatgttgcatcttttctgcttagtgatttttttttaattatactttaagttttagggtacatgtgcacaatgtgcaggttagtgacatacgtatacatgtgccatgctggtgtgcatcaccctgcttagtgatttttaatcctgtagaggttgcaaatgtaattctacaaaaactcttactcagcaattttatcagaacaataagcgtttttccaaatatgaaaaaatatgttattttacttcaaaatgttattttgtataaactgaaatttgtaatttgaactctatatatattcaaattttcaaattacaatatagtttacagcacaggttttcaaactcttggcttccctgggccacattggaagaagatttgtcttgggacacacttaaaattataaaatacacaaacagtaatgatagccgatgagc

SEQ ID NO: 445252 - DNA, 599 bp, Homo sapiens
gatgctactgtgttgcttattactttttactgtattaatggcatgtcatatttttacttatgtktgaataattgtgtgaaaatgattgctcatcagtagcatataaattcagagtcagaaatgatggtcagtgacgtcaaacagccacagattttccacatggaagctgagatagtgacacctttgctttctgatggttccatgtacacaaactttgtttcattcacaaaattatttgaaatattatataaaattacctttaggctatgtgtataagatatatgaaacataagtgaatttcacgtttagacttgggtctcatccccaagatatctcacgtagatgcaaatattataaaatccaaaaaaaaattccgaaaccctaaacacttctggttccaaacatttcagataagggatactcaatctgcatatataaaatatttatgtatcacatacatagtatgtatataatatgaatttccattcctctacaggttactattctggtacattcccgttatattctgtttatcagactgcaactaaaactttcatgggttcagctttatgttgaacagaatttgcagaattatgagt

SEQ ID NO: 445253 - DNA, 599 bp, Homo sapiens
gatgctactgtgttgcttattactttttactgtattaatggcatgtcatatttttacttatgtttgaataattgtgtgaaaatgattgctcatcagtagcatataaattcagagtcagaaatgatggtcagtgacgtcaaacagccacagattttccacatggaagctgagatagtgacacctttgctttctgatggttccatgtacacaaactttgtttcattcacaaaattatttgaaatattatataaaattacctttaggctatgtgtataagatatatgaaacataagtgaatttcacgtttagacttgggtctcatccccaagatatctcacgtagatgcaaatattataaaatccaaaaaaaaattccgaaaccctaaacacttctggttccaaacatttcagataagggatactcaatctgcatatataaaatatttatgtatcacatacatagtatgtatawaatatgaatttccattcctctacaggttactattctggtacattcccgttatattctgtttatcagactgcaactaaaactttcatgggttcagctttatgttgaacagaatttgcagaattatgagt

SEQ ID NO: 445254 - DNA, 414 bp, Homo sapiens
ttctgtccctgaccccacaaatctcatgtccttctcacattgcaaaatacagtcatgccttgccagcagtctcccaaagtcttaactcayttcagcattaactcaaagttacaaagtccaaagtctcatctgggtcaaggctacattctcttttgcctacgagtctctgaaataaaaggcaagttcactgcgtctaaggtacaatgatggtacaggcattgtgtaagctttccatatccaaaaaggagacattttccagaaagcttcttatttttatctgaggccccctcagcctggccttcactgtccatgtttttgtcagcattcttgtcacagccatttaaccagtctctaagatggtccaaaaatgttctcatctgtctgtcttctttggagccctccaaactcttccaa

SEQ ID NO: 445255 - DNA, 414 bp, Homo sapiens
ttctgtccctgaccccacaaatctcatgtccttctcacattgcaaaatacagtcatgccttgccagcagtctcccaaagtcttaactcacttcagcattaactcaaagttacaaagtccaaagtctcatctgggtcaaggctacattctcttttgcctacgagtctctgaaataaaargcaagttcactgcgtctaaggtacaatgatggtacaggcattgtgtaagctttccatatccaaaaaggagacattttccagaaagcttcttatttttatctgaggccccctcagcctggccttcactgtccatgtttttgtcagcattcttgtcacagccatttaaccagtctctaagatggtccaaaaatgttctcatctgtctgtcttctttggagccctccaaactcttccaa

SEQ ID NO: 445256 - DNA, 622 bp, Homo sapiens
ggttgcttttcagggtgatgaaaatgctgtgaatatactaatagatactcagttgtacattttaaatggttgaactctctcaaatgtgaatgatatctcagtgaaactgtttttaaaatccaaaggcaggatcaagataattttctcaactctcaatttttgacttacatgctatatcaaatctaaatatttttagagttttatagtatattttaaattaaagataaagaaaatgcctaaattttcaaatagtttgtaaattaacctaaaacatgcacatttcaaagaatagtataatggcctttctgtacaagttaacctgcartctgtgaaataaatagacacagattctgtgtccattcacgaaagtgaagaaataagacaactttctggaactttccatgaaatattctcctctgatttaatctggcctgcctcatcagaacaatacaaaaattacttaaaaatactgtttttacaggaaaaaagtcagttttctatgaggaatgatatataattctccacttttccaagggtacatattgtaacagaaaaggtatgtaatggtttttcaaaatggtagaatgaaagtcacaatataaaaaaataagtacattataaa

SEQ ID NO: 445257 - DNA, 594 bp, Homo sapiens
ttttaaattaaagataaagaaaatgcctaaattttcaaatagtttgtaaattaacctaaaacatgcacatttcaaagaatagtataatggcctttctgtacaagttaacctgcagtctgtgaaataaatagacacagattctgtgtccattcacgaaagtgaagaaataagacaactttctggaactttccatgaaatattctcctctgatttaatctggcctgcctcatcagaacaatacaaaaattacttaaaaatactgtttttacaggaaaaaagtcagttttctatgaggaatgatatataattctccacttttccaagggtacatattgtaacagaaaaggtatgyaatggtttttcaaaatggtagaatgaaagtcacaatataaaaaaataagtacattataaagatagtaaaatgtaaataattcattgtaatgaaactaaaaaatcaagcttctgccaaaattagtatcctaaaacacgttatataaactcaactagctacagaataagagttgacatgttaaattccatacacacttgacttttcacttgaaataatttcttctttggggcctgtgtctcatc

SEQ ID NO: 445258 - DNA, 531 bp, Homo sapiens
gaaatattctcctctgatttaatctggcctgcctcatcagaacaatacaaaaattacttaaaaatactgtttttacaggaaaaaagtcagttttctatgaggaatgatatataattctccacttttccaagggtacatattgtaacagaaaaggtatgtaatggtttttcaaaatggtagaatgaaagtcacaatataaaaaaataagtacattataaagatagtaaaatgkaaataattcattgtaatgaaactaaaaaatcaagcttctgccaaaattagtatcctaaaacacgttatataaactcaactagctacagaataagagttgacatgttaaattccatacacacttgacttttcacttgaaataatttcttctttggggcctgtgtctcatccaaattaatgtgataatgtgacataccttccagtggagactctaacgtagttaatttttttaggctgtcagccgcttcttgttgaagttgtctcacaaccacctgagaaaatatttttgcccctgacttt

SEQ ID NO: 445259 - DNA, 523 bp, Homo sapiens
ggctacattctcttttgcctacgagtctctgaaataaaaggcaagttcactgcgtctaaggtacaatgatggtacaggcattgtgtaagctttccatatccaaaaaggagacattttccagaaagcttcttatttttatctgaggccccctcagcctggccttcactgtccatgtttttgtcagcattcttgtcacagccatttaaccagtctctaagatggtccaaaaatgttctcatytgtctgtcttctttggagccctccaaactcttccaacctctacccattacccagttccgaagttgcttccacattttcaggtatctttatagcaatgctccagtcctcatttgccatttttggtaagatttgttttgaaaaagaggtctaattggctcatggttctgcagagtggacaggaagcttagtgcttctgctcctggggggcctcagaaatctttcaatcattgtgcaaggtaatgaaagagtgaattgtctcacatggcaagaggaaaccacggag

SEQ ID NO: 445260 - DNA, 602 bp, Homo sapiens
gcatgtttctaagctgatatagtaaacacatttttcctttttttattaaaacagctttgttgaaatataatttacatactatagaatgtatctgttttaacttaaagttaaaagatttttagtccatttactgagttgtgcagccatctctacaatccaactttacagcatttccatcactgcaagatccctcatgcccattagcagtcactaccagcttctagtcccagcyctttgcaaatattaatctactttttgtccctatacgtttatcttttctggatgcttcacgtacatggaattatacagtatggtaaacacactttttatctattgatttttatattcaactaagttcaacatgtatccagaaccaaatgtttaaattttctttctagaagtttgaaaatatttatcttccttgatacttactactctttctgctttctctctctcatatgaaagagactttcttttaaatgatcacattcattcattaccttctaatttttctcttctagcatgaggtctttccactctcaataaagcttctttggatattagttattatctctttatgatactctttctgatgaacatca

SEQ ID NO: 445261 - DNA, 523 bp, Homo sapiens
ggctacattctcttttgcctacgagtctctgaaataaaaggcaagttcactgcgtctaaggtacaatgatggtacaggcattgtgtaagctttccatatccaaaaaggagacattttccagaaagcttcttatttttatctgaggccccctcagcctggccttcactgtccatgtttttgtcagcattcttgtcacagccatttaaccagtctctaagatggtccaaaaatgttctcatctgtctgtcttctttggagccctccaaactcttccaacctctacccattacccagttccgaagttgcttccacattttcaggtatctttatagcaatgctccagtcctcatttgccatttttggtaagatttgttttgaaaaagaggtctaattggctcatggttctgcagagtggacaggaagcttagtgcttctgctcctggggggcctcagaaatctttcaatcattgtgcaaggtaatgaaagagtgaatkgtctcacatggcaagaggaaaccacggag

SEQ ID NO: 445262 - DNA, 573 bp, Homo sapiens
cagtaatcaatatgaaataggggaaagtacaaggaacaattttactgggaacagaatctttatcaataggttatcactaagtatatactatggcatattattgttttcaaaagctctttgttataaaataatatcttatgtggatgccaagatttataataaatattaataattgtacctgtaagtggcatcattcattttttaaaaatgagataacatttctggtttgttttagayctaaatattatatattaaatcaagagaatattagaagaaactttcatacaatagtttaaaatatagaatttttaccaaagattgatttatctgatttggagtatttcttgcagtctttgttttcatctctagtgattgaacagttggttcaagttgctttgcttcaacttctttcttatgttgtttctctttcctttctaattcttctctatttttttgtacagcatattaacatttgttttttctttattttcttatcttaagatgcatctgcagataaagacatttatcttaaaactcattttgttaaaaaataaagagttcatcctgtgatct

SEQ ID NO: 445263 - DNA, 430 bp, Homo sapiens
ctttgttttcatctctagtgattgaacagttggttcaagttgctttgcttcaacttctttcttatgttgtttctctttcctttctaattcttctctatttttttgtacagcatattaacatttgttttttctttattttcttatcttaagatgcatctgcagataaagacatttatcttaaaactcattttgttaaaaaataaagagttcatcctgtgatctacctctgcagatgctctttatcatcctaataaaatttctgtgttctgrattatttttcctttttagttctcagatatttaatctctcacttcaacatcttcaaaagaatgcatatacttgaaaagtagtaaggaaagaatattctgctgaagtttttgttactagtcactctagcatatattataaaaaaggatactggagataattc

SEQ ID NO: 445264 - DNA, 571 bp, Homo sapiens
tctctcacacaaactatatctgcagatgattgtcaactaaaactaggctaaagggtctaacatctgttaccccacactttttataattctttcttaatacttccaaattcaccttcttattacatatattttatgtatttattaagctattgttcattatgtgtaatatataattaatgcccttaataagtgtatgtttacacaagttatgttttcctgtgaaatctagtcccagaagtggagttgttgagttaaagggatgtcaggttatttgaaattttgatacacagcactaagttacccttcagaaataatttaccaatttcatataccaacagtgtatgagaatgcctttttcctcacatttgccaatggtagtaattactttttcaataccagcrtgactttacaaaatatatcttattttatgttaatttgcacttttctgattaccaggcagggctaaatatctctggtgaaaatataaaacttgttaatcataaggaatattagtccaattttgaattagtttatagcacaatgacaattgtctgctgcgaaatactgctat

SEQ ID NO: 445265 - DNA, 571 bp, Homo sapiens
tctctcacacaaactatatctgcagatgattgtcaactaaaactaggctaaagggtctaacatctgttaccccacactttttataattctttcttaatacttccaaattcaccttcttattacatatattttatgtatttattaagctattgttcattatgtgtaatatataattaatgcccttaataagtgtatgtttacacaagttatgttttcctgtgaaatctagtcccagaagtggagttgttgagttaaagggatgtcaggttatttgaaattttgatacacagcactaagttacccttcagaaataatttaccaatttcatataccaacagtgtatgagaatgcctttttcctcacatttgccaatggtagtaattactttttcaataccagcatgactttacaaaatatatcttattttatgttaatttgcacttttctgattaccaggcagggctaaatatctctggtraaaatataaaacttgttaatcataaggaatattagtccaattttgaattagtttatagcacaatgacaattgtctgctgcgaaatactgctat

SEQ ID NO: 445266 - DNA, 570 bp, Homo sapiens
tataccaacagtgtatgagaatgcctttttcctcacatttgccaatggtagtaattactttttcaataccagcatgactttacaaaatatatcttattttatgttaatttgcacttttctgattaccaggcagggctaaatatctctggtgaaaatataaaacttgttaatcataaggaatattagtccaattttgaattagtttatagcacaatgacaattgtctgctgcgaaatactgctataggtggccaggcacggtggctcactcctgtaaacccakcactttgggaggccgagatgggcagaacgcctgaggtcaggagttcgagaccagcctggataacatggtgaaacctcatttctactaaaaatacaaaaagttagctgggcatggtggtacacgcctgtaatctcagctgctagggaggctgagtcaggagaatcacttgaatgcagtaggcataggttgcagtgaggtgagaacacaccattgcactccagcttgggcaagaagagagaaactccacctcaaaaaataaataaataaataaataaataaataaacact

SEQ ID NO: 445267 - DNA, 570 bp, Homo sapiens
tataccaacagtgtatgagaatgcctttttcctcacatttgccaatggtagtaattactttttcaataccagcatgactttacaaaatatatcttattttatgttaatttgcacttttctgattaccaggcagggctaaatatctctggtgaaaatataaaacttgttaatcataaggaatattagtccaattttgaattagtttatagcacaatgacaattgtctgctgcgaaatactgctataggtggccaggcacggtggctcactcctgtaaacccagcactttgggaggccgagatgggcagaacgcctgaggtcaggagttcgagaccagcctggataacatggtgaaacctcatttctactaaaaatacaaaaagttagctgggcatggtggtacacgcctgtaatctcagctgctagggaggctgagtsaggagaatcacttgaatgcagtaggcataggttgcagtgaggtgagaacacaccattgcactccagcttgggcaagaagagagaaactccacctcaaaaaataaataaataaataaataaataaataaacact

SEQ ID NO: 445268 - DNA, 608 bp, Homo sapiens
  misc_feature (1)...(608): n = A,T,C or G
cattgcactccagcttgggcaagaagagagaaactccacctcaaaaaataaataaataaataaataaataaataaacactgctataggcttacttacctatgatgctcttccttcagcttcttggtaaaaggctgaggataggttttccccatatttctttgttgggttaatctgtcagcagcagcagcagatgtacwatgacatacatttttctgatagctnnnnnnnnnnnnnnnnnnnnnnnnnnnnnnnnnnnnnnnnnnnnnnnnnnnnnnnnnnnnnnnnnnnnnnnnnnnnnnnnnnnnnnnnnnnnnnnnnnnnaataaaagaagtttttccctgattttttcacttgattcaggctaactatcaccgttttaatgataaaaatattttgtgcttactttaattctatcattatacataattattataattataagatactcatcattttatcattgaaatttttgtcaagtctgctcatttctgtttgagtgaatagaagaattttccaaaatttcaaaaaggactcttctccattttgtgcttttattcccatccactctttgctatctgatataaatatttatgttatctgactggc

SEQ ID NO: 445269 - DNA, 608 bp, Homo sapiens
  misc_feature (1)...(608): n = A,T,C or G
cattgcactccagcttgggcaagaagagagaaactccacctcaaaaaataaataaataaataaataaataaataaacactgctataggcttacttacctatgatgctcttccttcagcttcttggtaaaaggctgaggataggttttccccatatttctttgttgggttaatctgtcagcagcagcagcagatgtactatgacatacatttttctgatagctnnnnnnnnnnnnnnnnnnnnnnnnnnnnnnnnnnnnnnnnnnnnnnnnnnnnnnnnnnnnnnnnnnnnnnnnnnnnnnnnnnnnnnnnnnnnnnnnnnnnaataaaagaagtttttccctgattttttcacttgattcaggctaactatcaccgttttaatgataaaaatattttgtgcttactttaattctatcattrtacataattattataattataagatactcatcattttatcattgaaatttttgtcaagtctgctcatttctgtttgagtgaatagaagaattttccaaaatttcaaaaaggactcttctccattttgtgcttttattcccatccactctttgctatctgatataaatatttatgttatctgactggc

SEQ ID NO: 445270 - DNA, 631 bp, Homo sapiens
tcccttttctacactgagctattcttttccccactgccttttatctcttttttttttaattctgggatatcaaaaaagtgaaagttctccctgaactatgggaaccaaagtttgccacaacacaagaagcagagtgaaactgctgwgtttccagtgcagaattctggaaaacgacatgcttcccagatttcacattcaattatcagaaaagtttataggtggaaaacatacggtacagttatctactttagccccattatctactgaaaatgggagtcaaactaacaaagacatatgaaatgtttcatcgagagctcttgaggtggcattctctagcatttcatggcaccaaataacatgatacaattccatattgctgaattacataaattaccaaataaatttatcgaattagtcagatatattaaaagtgtaagttgagcaaagcaatttaacgcctcagagggtggaaaaaggcctcatctgcttttactttgaagaagaaaatctctagattttgtctatctttaggacacaatgtacagaactcaactttctactaaagaatcaaaggataaatttttatctaagaaattatgcttcttacatgataaaaatcacacatgccaaa

SEQ ID NO: 445271 - DNA, 625 bp, Homo sapiens
cattatctactgaaaatgggagtcaaactaacaaagacatatgaaatgtttcatcgagagctcttgaggtggcattctctagcatttcatggcaccaaataacatgatacaattccatattgctgaattacataaattaccaaataaatttatcgaattagtcagatatattaaaagtgtaagttgagcaaagcaatttaacgcctcagagggtggaaaaaggcctcatctgcttttactttgaagaagaaaatctctagattttgtctatctttaggacacaatgtacagaactcaactttctactaaagaatcaaaggataaatttttatctaagaaattatgcttcttacatgataaaaatcacacatgccaaaacttatgatactttattaaacaacataatgtaaggactgattcaacagaaatattggagtggtgattttttaaaatatgtggaagtatatatttgttttcaaaatattggaaataaccatgatggaactataagttcaaacagtttgagctaagcagatgaacttgcatgcatgaaaatacattaaacagactcatttggctgggaatattcatwgcaactctcaaggctagacgtgtttttgtggct

SEQ ID NO: 445272 - DNA, 563 bp, Homo sapiens
aaaaccccgctgtaactgtacacatgagattttcttgaatagaaaatttgactaaatcatataattgataaagagaaaaaagaagcagcaagtgaacctctgtctttttgaarttggactttctgtttctccaaagccaggagctctacttgtaacatgcctacctcattctttttactattattatactttaagttctggtacatgtgcacaatgtgcaggtttgttacatatgtatatatgtgatatcttggtgaccttgaaatatcttgctgtaagtcttctagctatatttttgatgttctctcactatgtggcaaagaataacccgcattttatagttcaagattcatggttttgtagttattaacactgggattgtcatacagcggcttctggaataagcactgtgttggttttctgtttttataagtatctgtagcagcagaaatactgtgactttctatctgaatcatatgcttcatttctttggggtgggtaaaccacaaatcaaaaaggctttctggatctctagactgagaccaatgcctaatttccaatta

SEQ ID NO: 445273 - DNA, 563 bp, Homo sapiens
aaaaccccgctgtaactgtacacatgagattttcttgaatagaaaatttgactaaatcatataattgataaagagaaaaaagaagcagcaagtgaacctctgtctttttgaagttggactttctgtttctccaaagccaggagctctacttgtaacatgcctacctcattctttttactattattatactttaagttctggtacatgtgcacaatgtgcaggtttgttacatatgtatatatgtgatatcttggtgaccttgaaatatcttgctgtaagtcttctagytatatttttgatgttctctcactatgtggcaaagaataacccgcattttatagttcaagattcatggttttgtagttattaacactgggattgtcatacagcggcttctggaataagcactgtgttggttttctgtttttataagtatctgtagcagcagaaatactgtgactttctatctgaatcatatgcttcatttctttggggtgggtaaaccacaaatcaaaaaggctttctggatctctagactgagaccaatgcctaatttccaatta

SEQ ID NO: 445274 - DNA, 574 bp, Homo sapiens
taggattctcttaataggcaactgcattgacttttatgaccccwttcactccctgaacacagacacagaagtcaactggtgaccacaaaacagaataaatctttaacctcggcactggtgaccagcaatataaaactgcaacatttgaagcactggcaatgatgactcctttaacactagtttaactcagtggccattgttgttaaactgttcataatttatattcctcagtaatatgacccaatacttcatgttaccttgtgtattatgagtaaggttatataaataaaacagcaagataattctgaaaatttcttgcctcaattctaagggtaaatacagctatgaattactagagatactaagaattactagaataactaatagttactagagatagtaagaatatcttaagtttcataactggttaagatgttttaaaaattaaatataaaattatgatctattggattctaaaggtatagtctgaaaggtcatgtcatttggactatgctttgttagtaaagcaaaaaaaacccctaatattaaacaagaacttaaattttcatatacc

SEQ ID NO: 445275 - DNA, 559 bp, Homo sapiens
atgtccacctgggttgattccatgtctttactattgtgaatagtgctgcagtgaacatacaaatgcawgtatctttataatagaataatttatattcccatgtatggtaattttaaatcagttttggtattaaaaatcatgcattttggaaaatattgataatggaaaaacccaaattctgccaaaatatgttgagaaaatagagggtaaatatatcttttcaaactttaaatgcctcaggctcttagttaatcttccccagatctgggaagacctagaaggggagagattgggctaccttaatgagggccatttcaatctcttgtcctgcagcagccatttcaaaatacgtcaaaaaatatatttgggggtaaaatattttgatttccttcagcctcttctctctgtgatgctgcaccagaatcagattagaaaggaagccacattataagtgttaataaaacccatctgatgagatttgatagtttgaagggtgtgtttcccagaccctttagatagaatgtggggccaaagaaaacaaggtcttattcctctatat

SEQ ID NO: 445276 - DNA, 559 bp, Homo sapiens
atgtccacctgggttgattccatgtctttactattgtgaatagtgctgcagtgaacatacaaatgcatgtatctttataatagaataatttatattccmatgtatggtaattttaaatcagttttggtattaaaaatcatgcattttggaaaatattgataatggaaaaacccaaattctgccaaaatatgttgagaaaatagagggtaaatatatcttttcaaactttaaatgcctcaggctcttagttaatcttccccagatctgggaagacctagaaggggagagattgggctaccttaatgagggccatttcaatctcttgtcctgcagcagccatttcaaaatacgtcaaaaaatatatttgggggtaaaatattttgatttccttcagcctcttctctctgtgatgctgcaccagaatcagattagaaaggaagccacattataagtgttaataaaacccatctgatgagatttgatagtttgaagggtgtgtttcccagaccctttagatagaatgtggggccaaagaaaacaaggtcttattcctctatat

SEQ ID NO: 445277 - DNA, 559 bp, Homo sapiens
atgtccacctgggttgattccatgtctttactattgtgaatagtgctgcagtgaacatacaaatgcatgtatctttataatagaataatttatattcccatgtatggtaattttaaatcagttttggtattaaaaatcatgcattttggaaaatattgataatggaaaaacccaaattctgccaaaatatgttgakaaaatagagggtaaatatatcttttcaaactttaaatgcctcaggctcttagttaatcttccccagatctgggaagacctagaaggggagagattgggctaccttaatgagggccatttcaatctcttgtcctgcagcagccatttcaaaatacgtcaaaaaatatatttgggggtaaaatattttgatttccttcagcctcttctctctgtgatgctgcaccagaatcagattagaaaggaagccacattataagtgttaataaaacccatctgatgagatttgatagtttgaagggtgtgtttcccagaccctttagatagaatgtggggccaaagaaaacaaggtcttattcctctatat

SEQ ID NO: 445278 - DNA, 559 bp, Homo sapiens
atgtccacctgggttgattccatgtctttactattgtgaatagtgctgcagtgaacatacaaatgcatgtatctttataatagaataatttatattcccatgtatggtaattttaaatcagttttggtattaaaaatcatgcattttggaaaatattgataatggaaaaacccaaattctgccaaaatatgttgagaaaatagagggtaaatatatcttttcaaactttaaatgcctcaggctcttagttaatcttccccagatctgggaagacctagaaggggagagattgggctaccttaatgagggccatttcaatctcttgkcctgcagcagccatttcaaaatacgtcaaaaaatatatttgggggtaaaatattttgatttccttcagcctcttctctctgtgatgctgcaccagaatcagattagaaaggaagccacattataagtgttaataaaacccatctgatgagatttgatagtttgaagggtgtgtttcccagaccctttagatagaatgtggggccaaagaaaacaaggtcttattcctctatat

SEQ ID NO: 445279 - DNA, 633 bp, Homo sapiens
cacagtagttttcaattttgaagtccattgaatccatttttcctttggagtcatagctaagaaaacactggcaaatgctgtcacaaagatttatgccagtgttttcttctgagggttttatagttttagcttttacagttaactattttattttgagttaatttttaaataagatatttggtcgaactttatttaytttttcttatggatacccagttgtcccagcaccatttgttgaaaagactattcttttcccattgtattctttcgttaagtttgtataaaatcaattgactgtaaaagtgcaagcttatttttagattgtcaattcttagcttctttatgtctattcttatgtcaaagcccaatcgaattgaatgagaagtttttttcaatcatgttgcatattaccagttgtcttatgtcataataaaaattaaatttagtggaatatctgtaacttcaccttttgtgtcacaaaggagtctctggccagcttataccttacttcgtctaagacatgatcagacgccaggcttacaagacacatttaatttctttttttctccattcaagcctttagtctcttttccattgcctcccgctatagttatattttcagtaagttttggt

SEQ ID NO: 445280 - DNA, 633 bp, Homo sapiens
cacagtagttttcaattttgaagtccattgaatccatttttcctttggagtcatagctaagaaaacactggcaaatgctgtcacaaagatttatgccagtgttttcttctgagggttttatagttttagcttttacagttaactattttattttgagttaatttttaaataagatatttggtcgaactttatttactttttcttatggatacccagttgtcccagcaccatttgttgaaaagactattcttttcccattgtrttctttcgttaagtttgtataaaatcaattgactgtaaaagtgcaagcttatttttagattgtcaattcttagcttctttatgtctattcttatgtcaaagcccaatcgaattgaatgagaagtttttttcaatcatgttgcatattaccagttgtcttatgtcataataaaaattaaatttagtggaatatctgtaacttcaccttttgtgtcacaaaggagtctctggccagcttataccttacttcgtctaagacatgatcagacgccaggcttacaagacacatttaatttctttttttctccattcaagcctttagtctcttttccattgcctcccgctatagttatattttcagtaagttttggt

SEQ ID NO: 445281 - DNA, 633 bp, Homo sapiens
cacagtagttttcaattttgaagtccattgaatccatttttcctttggagtcatagctaagaaaacactggcaaatgctgtcacaaagatttatgccagtgttttcttctgagggttttatagttttagcttttacagttaactattttattttgagttaatttttaaataagatatttggtcgaactttatttactttttcttatggatacccagttgtcccagcaccatttgttgaaaagactattcttttcccattgtattctttcgttaagtttgtataaaatcaattgaytgtaaaagtgcaagcttatttttagattgtcaattcttagcttctttatgtctattcttatgtcaaagcccaatcgaattgaatgagaagtttttttcaatcatgttgcatattaccagttgtcttatgtcataataaaaattaaatttagtggaatatctgtaacttcaccttttgtgtcacaaaggagtctctggccagcttataccttacttcgtctaagacatgatcagacgccaggcttacaagacacatttaatttctttttttctccattcaagcctttagtctcttttccattgcctcccgctatagttatattttcagtaagttttggt

SEQ ID NO: 445282 - DNA, 633 bp, Homo sapiens
cacagtagttttcaattttgaagtccattgaatccatttttcctttggagtcatagctaagaaaacactggcaaatgctgtcacaaagatttatgccagtgttttcttctgagggttttatagttttagcttttacagttaactattttattttgagttaatttttaaataagatatttggtcgaactttatttactttttcttatggatacccagttgtcccagcaccatttgttgaaaagactattcttttcccattgtattctttcgttaagtttgtataaaatcaattgactgtaaaagtgcaagcttatttttagattgtcaattcttagcttctttatgtctattcttatgtcaargcccaatcgaattgaatgagaagtttttttcaatcatgttgcatattaccagttgtcttatgtcataataaaaattaaatttagtggaatatctgtaacttcaccttttgtgtcacaaaggagtctctggccagcttataccttacttcgtctaagacatgatcagacgccaggcttacaagacacatttaatttctttttttctccattcaagcctttagtctcttttccattgcctcccgctatagttatattttcagtaagttttggt

SEQ ID NO: 445283 - DNA, 419 bp, Homo sapiens
tttctttttttctccattcaagcctttagtctcttttccattgcctcccgctatagttatattttcagtaarttttggtcgcaggatctgctgacatagtctaatatttagtgcattatgttttactaactcattataattcatagaaccttccatagatgtttaccatcgaggaaggagaagtttaagtctgaaccaccagctttcctcagtggaaatcaagtgaagtcatcatcttgcagtttacagaccctctttcctcctggtagctggttctcttgggtagtactgtagctaatccttttcttagtgcagatcttgcattctcagagaccacagttccctgtattgacctccctttactgaaacagagatgcacagctctgctttctagctcagtagaggattcttggaataca

SEQ ID NO: 445284 - DNA, 419 bp, Homo sapiens
tttctttttttctccattcaagcctttagtctcttttccattgcctcccgctatagttatattttcagtaagttttggtcgcaggatctgctgacatagtctaayatttagtgcattatgttttactaactcattataattcatagaaccttccatagatgtttaccatcgaggaaggagaagtttaagtctgaaccaccagctttcctcagtggaaatcaagtgaagtcatcatcttgcagtttacagaccctctttcctcctggtagctggttctcttgggtagtactgtagctaatccttttcttagtgcagatcttgcattctcagagaccacagttccctgtattgacctccctttactgaaacagagatgcacagctctgctttctagctcagtagaggattcttggaataca

SEQ ID NO: 445285 - DNA, 542 bp, Homo sapiens
ggtgaaaaaatattgcataatttattactgttgacctcatcatatgactgattaagggcactgaatttaacttggatgtgaagtagacctcatattagctgcagttaatcagtagaccaggcgtcctagcagaattaaatttgatgctcctgtgttatctttaaatgacacagcttttctgaaaacccttactcatagtgcrtgattatccattaagaaaaggtgatggaatatgtgaatacagctgaggagacaccacaaggcaaatgctcagtggttcccattaatattgggaaaatcaacactataaaacagaaagccatagacattatttaatatttggttttgggaggtatttttagtgacactgcatacagttgtacctaataattgctaaattagagacgtaaaagtaaaacaaaggcacattgtgtttgagtaggaaatctatagacatctagctggttttcccatccagccacaaaattctaaatataatcatggtacctgtactcaaatttatgttaaataccaacctcaat

SEQ ID NO: 445286 - DNA, 542 bp, Homo sapiens
ggtgaaaaaatattgcataatttattactgttgacctcatcatatgactgattaagggcactgaatttaacttggatgtgaagtagacctcatattagctgcagttaatcagtagaccaggcgtcctagcagaattaaatttgatgctcctgtgttatctttaaatgacacagcttttctgaaaacccttactcatagtgcgtgattatccattaagaaaaggtgatggaatatgtgaatacagctgaggagacaccacaaggcaaatgctmagtggttcccattaatattgggaaaatcaacactataaaacagaaagccatagacattatttaatatttggttttgggaggtatttttagtgacactgcatacagttgtacctaataattgctaaattagagacgtaaaagtaaaacaaaggcacattgtgtttgagtaggaaatctatagacatctagctggttttcccatccagccacaaaattctaaatataatcatggtacctgtactcaaatttatgttaaataccaacctcaat

SEQ ID NO: 445287 - DNA, 542 bp, Homo sapiens
ggtgaaaaaatattgcataatttattactgttgacctcatcatatgactgattaagggcactgaatttaacttggatgtgaagtagacctcatattagctgcagttaatcagtagaccaggcgtcctagcagaattaaatttgatgctcctgtgttatctttaaatgacacagcttttctgaaaacccttactcatagtgcgtgattatccattaagaaaaggtgatggaatatgtgaatacagctgaggagacaccacaaggcaaatgctcagtggttcccattaatattgsgaaaatcaacactataaaacagaaagccatagacattatttaatatttggttttgggaggtatttttagtgacactgcatacagttgtacctaataattgctaaattagagacgtaaaagtaaaacaaaggcacattgtgtttgagtaggaaatctatagacatctagctggttttcccatccagccacaaaattctaaatataatcatggtacctgtactcaaatttatgttaaataccaacctcaat

SEQ ID NO: 445288 - DNA, 542 bp, Homo sapiens
ggtgaaaaaatattgcataatttattactgttgacctcatcatatgactgattaagggcactgaatttaacttggatgtgaagtagacctcatattagctgcagttaatcagtagaccaggcgtcctagcagaattaaatttgatgctcctgtgttatctttaaatgacacagcttttctgaaaacccttactcatagtgcgtgattatccattaagaaaaggtgatggaatatgtgaatacagctgaggagacaccacaaggcaaatgctcagtggttcccattaatattggraaaatcaacactataaaacagaaagccatagacattatttaatatttggttttgggaggtatttttagtgacactgcatacagttgtacctaataattgctaaattagagacgtaaaagtaaaacaaaggcacattgtgtttgagtaggaaatctatagacatctagctggttttcccatccagccacaaaattctaaatataatcatggtacctgtactcaaatttatgttaaataccaacctcaat

SEQ ID NO: 445289 - DNA, 576 bp, Homo sapiens
cctaagagtctcaaaattcactgctttgaatccctgacaagtataaaaattttatactgaaaacttcatgctattcaaaacattaaaacagaaacatctgacttaaagcttacatttttaaaatcttttttatgcttctaaatttgtttttattcaaatatggataccaacaataacatttatgtcaatgccttctgttcaatattgaacaaatagaattaggaataagaataatatgagtacatccaatcattgamtgtactttatttccagtattccatcaaatgtacctgctctcaatgtctgtactttctttctttgtactgctcctttcacagcaggatcttccacttcagtgctaggctgaatgggttttaaaagaaaacgattcataaatcatatatattttatacaacatggagttagtgattcaaaaatatacataattaattatcttcaaggaaggatgttttgcagaaggccctacaaagcaaaggggatatgtcatcaattatatgtaagtatgacaggaccaaccaaacattcatgcagtgttactgtcgagctgaattctca

SEQ ID NO: 445290 - DNA, 576 bp, Homo sapiens
cctaagagtctcaaaattcactgctttgaatccctgacaagtataaaaattttatactgaaaacttcatgctattcaaaacattaaaacagaaacatctgacttaaagcttacatttttaaaatcttttttatgcttctaaatttgtttttattcaaatatggataccaacaataacatttatgtcaatgccttctgttcaatattgaacaaatagaattaggaataagaataatatgagtacatccaatcattgactgtactttatttccagtattmcatcaaatgtacctgctctcaatgtctgtactttctttctttgtactgctcctttcacagcaggatcttccacttcagtgctaggctgaatgggttttaaaagaaaacgattcataaatcatatatattttatacaacatggagttagtgattcaaaaatatacataattaattatcttcaaggaaggatgttttgcagaaggccctacaaagcaaaggggatatgtcatcaattatatgtaagtatgacaggaccaaccaaacattcatgcagtgttactgtcgagctgaattctca

SEQ ID NO: 445291 - DNA, 338 bp, Homo sapiens
gctgaattctcaggcctggctataaaaatatttacttaaggttttgagggttcttcttggcttcgtcttttyattgcctaggacagcaacatgacagaaccacaatgaggaaaataggaatataggattcccaaaatgcacagtttacatttcagtagtgagattatgtttcaaatgcctatacttaaaatagaaaagcattgatataaccgtgaacacgtggactaatgaggagaaaagggaccattaaacagaggggcaaatcaaacctgagagaatcaatgtcaaagctgatggtgaatgtacagagtattttaactccacacaccagaggcatt

SEQ ID NO: 445292 - DNA, 612 bp, Homo sapiens
gatccactcatgcaaggtggtccataaaacacatcaaataaaccatgtcgaataagcttctgatatcaaawtatttatcaaaaaagaaaacattgaatgaccacagacttgctggatattaatacatatttatatttcaaaatcagtgcagtatttattgaaaatgataattttggttttcatggaatgaattttatgattacttctaaaattaactaagtttggtatattatcttacactgtaaaggacttttataaaacagctatcatatcaaagaactggctgtctcaaaaaaatttcgccaaagcatctatatgcaacttaatcatatcttattcactcatgtcagtgaaacttctctccctgaggcctgacagttatcaagtgaaatgagctgctgtggtttaccccaactctagcactccctcctgtctccagtactctccacagcaataacctcttttgtgagactgggcatatgctgaagcaactggaagtgagttgtctcaagtttacttggctttaactcccaagaccccagcaaatgtctttctttcctccttttgtgtccattcaccatccctcttcctttgaaaaaatgattatcagaa

SEQ ID NO: 445293 - DNA, 612 bp, Homo sapiens
gatccactcatgcaaggtggtccataaaacacatcaaataaaccatgtcgaataagcttctgatatcaaattatttatcaaaaaagaaaacattgaatgaccacagacttgctggatattaatacatatttatatttcaaaatcagtgcagtatttattraaaatgataattttggttttcatggaatgaattttatgattacttctaaaattaactaagtttggtatattatcttacactgtaaaggacttttataaaacagctatcatatcaaagaactggctgtctcaaaaaaatttcgccaaagcatctatatgcaacttaatcatatcttattcactcatgtcagtgaaacttctctccctgaggcctgacagttatcaagtgaaatgagctgctgtggtttaccccaactctagcactccctcctgtctccagtactctccacagcaataacctcttttgtgagactgggcatatgctgaagcaactggaagtgagttgtctcaagtttacttggctttaactcccaagaccccagcaaatgtctttctttcctccttttgtgtccattcaccatccctcttcctttgaaaaaatgattatcagaa

SEQ ID NO: 445294 - DNA, 588 bp, Homo sapiens
ctttccagaagctcctcaacgaattcatgacaatttgaatgccctgttctacactggtgtgcttccatattggtttaccctaattggcctttttggcctagcctcaacttctttcctattatgtccctgaatttaatactacgttataagccataatgtttctaatgaacttttaatcaggcaaagcttctctaattaatttcttcccaataaatcacccaacactattcttttcattttctataaaaacaaattatagccatacatggctgaccatttayggtgatgttcatctatggtagataaaacacaggtctgcatggtaaagtacctcaatccttaatgcctccccagtagcaagaatgacagcaagagaaggaaaatgttactgtaattatatgacacattttggtactggaagctcactttatcttccttcctatttctaacaccctgttcttccttcttctacagatcaatttgactttactaccctccattacatacatccacttttttttatttattccatgtacactctgccctcctcattctttctttctcttttattcatttcttcttccctct

SEQ ID NO: 445295 - DNA, 560 bp, Homo sapiens
catacatggctgaccatttacggtgatgttcatctatggtagataaaacacaggtctgcatggtaaagtacctcaatccttaatgcctccccagtagcragaatgacagcaagagaaggaaaatgttactgtaattatatgacacattttggtactggaagctcactttatcttccttcctatttctaacaccctgttcttccttcttctacagatcaatttgactttactaccctccattacatacatccacttttttttatttattccatgtacactctgccctcctcattctttctttctcttttattcatttcttcttccctctctcctgacttgcctcaggtcttagagtatgttaaaatggaactcataactcagctcctttagtggtacttccaatagaatcaactgctgacccttggttagagacaccacttatcaccatttcatttctcttttacttatgatacagttaataggacattttctttagctattaaactctattagtgctcatattttaaaagaaacattccatcaatgactttttttttttt

SEQ ID NO: 445296 - DNA, 560 bp, Homo sapiens
catacatggctgaccatttacggtgatgttcatctatggtagataaaacacaggtctgcatggtaaagtacctcaatccttaatgcctccccagtagcaasaatgacagcaagagaaggaaaatgttactgtaattatatgacacattttggtactggaagctcactttatcttccttcctatttctaacaccctgttcttccttcttctacagatcaatttgactttactaccctccattacatacatccacttttttttatttattccatgtacactctgccctcctcattctttctttctcttttattcatttcttcttccctctctcctgacttgcctcaggtcttagagtatgttaaaatggaactcataactcagctcctttagtggtacttccaatagaatcaactgctgacccttggttagagacaccacttatcaccatttcatttctcttttacttatgatacagttaataggacattttctttagctattaaactctattagtgctcatattttaaaagaaacattccatcaatgactttttttttttt

SEQ ID NO: 445297 - DNA, 560 bp, Homo sapiens
catacatggctgaccatttacggtgatgttcatctatggtagataaaacacaggtctgcatggtaaagtacctcaatccttaatgcctccccagtagcaagaatgacagcaagagaaggaaaatgttactgtaaytatatgacacattttggtactggaagctcactttatcttccttcctatttctaacaccctgttcttccttcttctacagatcaatttgactttactaccctccattacatacatccacttttttttatttattccatgtacactctgccctcctcattctttctttctcttttattcatttcttcttccctctctcctgacttgcctcaggtcttagagtatgttaaaatggaactcataactcagctcctttagtggtacttccaatagaatcaactgctgacccttggttagagacaccacttatcaccatttcatttctcttttacttatgatacagttaataggacattttctttagctattaaactctattagtgctcatattttaaaagaaacattccatcaatgactttttttttttt

SEQ ID NO: 445298 - DNA, 513 bp, Homo sapiens
ttactgtaattatatgacacattttggtactggaagctcactttatcttccttcctatttctaacaccctgttcttccttcttctacagatcaatttgactttactaccctccattacrtacatccacttttttttatttattccatgtacactctgccctcctcattctttctttctcttttattcatttcttcttccctctctcctgacttgcctcaggtcttagagtatgttaaaatggaactcataactcagctcctttagtggtacttccaatagaatcaactgctgacccttggttagagacaccacttatcaccatttcatttctcttttacttatgatacagttaataggacattttctttagctattaaactctattagtgctcatattttaaaagaaacattccatcaatgactttttttttttttgagatggagtctcactctgtcacccaggctggagtgcagtggcacgatctccgctcactgcaagctccacctcccag

SEQ ID NO: 445299 - DNA, 560 bp, Homo sapiens
catacatggctgaccatttacggtgatgttcatctatggtagataaaacacaggtctgcatggtaaagtacctcaatccttaatgcctccccagtagcaagaatgacagcaagagaaggaaaatgttactgtaattatatgacacattttggtactggaagctcactttatcttccttcctatttctaacaccctgttcttccttcttctacagatcaatttgactttactaccctccattacatacatccacttttttttatttattccatgtacactctgccctcctcattctttctttctcttttattcatttcytcttccctctctcctgacttgcctcaggtcttagagtatgttaaaatggaactcataactcagctcctttagtggtacttccaatagaatcaactgctgacccttggttagagacaccacttatcaccatttcatttctcttttacttatgatacagttaataggacattttctttagctattaaactctattagtgctcatattttaaaagaaacattccatcaatgactttttttttttt

SEQ ID NO: 445300 - DNA, 513 bp, Homo sapiens
ttactgtaattatatgacacattttggtactggaagctcactttatcttccttcctatttctaacaccctgttcttccttcttctacagatcaatttgactttactaccctccattacatacatccacttttttttatttattccatgtacactctgccctcctcattctttctttctcttttattcatttcttcttccctctctcctgacttgcctcaggtcttagagtatgttaaaatggaactcataactcagctcctttagtggtacttccaatagaatcaactgctgacccttggttagagacaccacttatcaccatttcatttctcttttacttatgatacagttaataggacattttctttagctattaaactctattagtgctcatattttaaaagaaacattccatcaatgmctttttttttttttgagatggagtctcactctgtcacccaggctggagtgcagtggcacgatctccgctcactgcaagctccacctcccag

SEQ ID NO: 445301 - DNA, 488 bp, Homo sapiens
agtttccattaaaattataatgagttgcatcaagagtttcttatcaatctctttttatgaaactgggtctcactctgtcaacccagggctagaatgcaggggccatgattatggctcactgtggtctcaactcctgacctcaagcaatcttcccacctcaacttcctgaatagctggaactacaggtgcataccatcatgtcatgctaatgtttttattgttatctttgtagagacaaggcctcattatacctcccaggctggtctcaagctcctgggctcaagcaaatcttccacttctgcctcccaaaatgttgagataagcaktgtgcaccaccacacccagccctaatcaatttctttaaatcaatctcaatgttgcccaggcacggtggctcacacctgtaatctcagccctttgcaaggccaaggtgggtggattgcttgagttcaggagttggagaccagcctgggcaacataatgaggac

SEQ ID NO: 445302 - DNA, 340 bp, Homo sapiens
agcagtgagccaagatcatgccactacactgcagcatggacaacagagctagaycctgcctccccaaaaatttcaatttaaaatgtgagaacaaagagagatacaaacaaaaaacaagcctaattagtcaatgaaatatgagcttaagccaagaaagaaaacgaaaaacatgaagtacaataaagtacatggggaaatagatctataacagagccttcggtctttcataactctgataatactaattaatatttatgctgcaattagttttttgtaagtacttctgtgatagtgtttcttactataagacattcaattagctaaatatggtcatctacca

SEQ ID NO: 445303 - DNA, 340 bp, Homo sapiens
agcagtgagccaagatcatgccactacactgcagcatggacaacagagctagaccctgcctccccaaaaatttcaatttaaaatgtgagaacaaagagagatacaaacaaaaaacaagcctaattagtcaatgaaatatgagcttaagccaagaaagaaaaygaaaaacatgaagtacaataaagtacatggggaaatagatctataacagagccttcggtctttcataactctgataatactaattaatatttatgctgcaattagttttttgtaagtacttctgtgatagtgtttcttactataagacattcaattagctaaatatggtcatctacca

SEQ ID NO: 445304 - DNA, 479 bp, Homo sapiens
cgttgtgcacatgtaccctagaacttaaagtataataataataataaagagtaatgtatggcttgaaayggtatatttaatggaacatgagttgggtctaataaaaagcttaagaaatgttaatctaaaatctcaatgttaagattccagttgaatgatactagaaaatattttgtaaccctctttgctaccgatgacctatttctcttttatttcctttttaattatggcataatttctcaacataacatgtcaaaacttatacacccttaaatattaaaaaataatacaatgtaagcaatattttaaatacaatatttaatgattagatacattaggtttattatattacttataacattccattatataaaaattcatttgtttatttattcagattaaacaactattaaggctgaatgtctcatgtctgtaaccccagcactttgagaggctgaggcgagcagaacacttgagcc

SEQ ID NO: 445305 - DNA, 404 bp, Homo sapiens
ataatttctcaacataacatgtcaaaacttatacaccsttaaatattaaaaaataatacaatgtaagcaatattttaaatacaatatttaatgattagatacattaggtttattatattacttataacattccattatataaaaattcatttgtttatttattcagattaaacaactattaaggctgaatgtctcatgtctgtaaccccagcactttgagaggctgaggcgagcagaacacttgagcccaacagttaaagaagagcctgggcaacaaggcaaaaccctatctctacaaaactcagcccagcatggtgacacaggtctatggtgacatagctctattgtttcaactacttggatggctgaggtgtgaggatcacctgagcctaggaaatggagat

SEQ ID NO: 445306 - DNA, 568 bp, Homo sapiens
atgacaggtaaaccactgctaaatttgaaaagtaaatactatgcaaaactacactcagagtgagaagattaattttacaagagaccactttaccttagtagcaacactcaagtcttcatcatccaatgtaggcaatgaatccacacacagttcatgcaaaatgcttgagagcaaaaatacacaatgaaaatgagcaagttgatttctttayaatttttttaactgccagtttatatccagcttccccctcaaaaaaaggaaaacataatctggggaaaggtcagtgatctatatattaaattatgattcttgatataattaaaatatgtcctctgttctaaaaatagattttagttacctatttctgcctccacctgtctaaatctataaaatattcaatgaaaactaaccttgaggtttataacaaatagtgacagtcaatatattggcagagcctgacaataatgtgccctcacaaattatctgtcctgaagctgaacttaaaattcaattaatggatgacataaattttgttccctaaactggaataaaactgatgacctaaaac

SEQ ID NO: 445307 - DNA, 568 bp, Homo sapiens
atgacaggtaaaccactgctaaatttgaaaagtaaatactatgcaaaactacactcagagtgagaagattaattttacaagagaccactttaccttagtagcaacactcaagtcttcatcatccaatgtaggcaatgaatccacacacagttcatgcaaaatgcttgagagcaaaaatacacaatgaaaatgagcaagttgatttctttacaattttttyaactgccagtttatatccagcttccccctcaaaaaaaggaaaacataatctggggaaaggtcagtgatctatatattaaattatgattcttgatataattaaaatatgtcctctgttctaaaaatagattttagttacctatttctgcctccacctgtctaaatctataaaatattcaatgaaaactaaccttgaggtttataacaaatagtgacagtcaatatattggcagagcctgacaataatgtgccctcacaaattatctgtcctgaagctgaacttaaaattcaattaatggatgacataaattttgttccctaaactggaataaaactgatgacctaaaac

SEQ ID NO: 445308 - DNA, 590 bp, Homo sapiens
aatgaatccacacacagttcatgcaaaatgcttgagagcaaaaatacacaatgaaaatgagcaagttgatttctttacaatttttttaactgccagtttatatccagcttccccctcaaaaaaaggaaaacataatctggggaaaggtcagtgatctatatattaaattatgattcttgatataattaaaatatgtcctctgttctaaaaatagattttagttacctatttctgcctccacctgtctaaatctataaaatattcaatgaaaactwaccttgaggtttataacaaatagtgacagtcaatatattggcagagcctgacaataatgtgccctcacaaattatctgtcctgaagctgaacttaaaattcaattaatggatgacataaattttgttccctaaactggaataaaactgatgacctaaaacaaggtagaaagatccactgtctcttttccgtgatttgtctctggataaaagactaatctacatcacttcaaaatggtagtcttgattcctcagcatggatccaacttaggaaggtcctattgctttcctttaccctaaattggtacaggaaagcc

SEQ ID NO: 445309 - DNA, 590 bp, Homo sapiens
aatgaatccacacacagttcatgcaaaatgcttgagagcaaaaatacacaatgaaaatgagcaagttgatttctttacaatttttttaactgccagtttatatccagcttccccctcaaaaaaaggaaaacataatctggggaaaggtcagtgatctatatattaaattatgattcttgatataattaaaatatgtcctctgttctaaaaatagattttagttacctatttctgcctccacctgtctaaatctataaaatattcaatgaaaactaaccttgaggtttataacaaatagtgacagtcaatatattggcagagcctgacaataatgtgccctcacaaattatctgtcctgaagctgaacttaaaattcaattaatggatgacataaattttgttccctaaactggaataaaactgatgacctaaaacaaggtagaaagatccactgtctcttttcygtgatttgtctctggataaaagactaatctacatcacttcaaaatggtagtcttgattcctcagcatggatccaacttaggaaggtcctattgctttcctttaccctaaattggtacaggaaagcc

SEQ ID NO: 445310 - DNA, 424 bp, Homo sapiens
tttataacaaatagtgacagtcaatatattggcagagcctgacaataatgtgccctcacaaattatctgtcctgaagctgaacttaaaattcaattaatggatgacataaattttgttccctaaactggaataaaactgatgacctaaaacaaggtagaaagatccactgtctcttttccgtgatytgtctctggataaaagactaatctacatcacttcaaaatggtagtcttgattcctcagcatggatccaacttaggaaggtcctattgctttcctttaccctaaattggtacaggaaagcccccacaatatttgaaatgtatgaaagctaaatgtacagaagtcaaatagcaaaggtgtatgttcttattgagaatacttttcccagaaagattaaaatattaacaattataaaatccc

SEQ ID NO: 445311 - DNA, 393 bp, Homo sapiens
caggagtctgaggtttcagtgagtctcaatcatgccattgcactccaatcctgggtgatagagtgagaacttgtctccaaaaagaggaaraaaaaaaggctcagaatgctatgtgaaatcttccttgattctaggtatctttctccacacacacaggtgtctgcttcgttggggtcccttagtaccttgtcaatttttctagtgtcactttaccacctgacctgcacatcatgtctttacatgttgacccctttgctgctagactgtagaggataatcttttgaatcatctttgtataagcagtcttaattttgctaaataattacttattgagttcctgctaagtgttaggcactggggaataaggaaggaaaatagaagctgtcagggatg

SEQ ID NO: 445312 - DNA, 393 bp, Homo sapiens
caggagtctgaggtttcagtgagtctcaatcatgccattgcactccaatcctgggtgatagagtgagaacttgtctccaaaaagaggaaaaaaaaaaggctcagaatgctatgtgaaatcttccttgattctagstatctttctccacacacacaggtgtctgcttcgttggggtcccttagtaccttgtcaatttttctagtgtcactttaccacctgacctgcacatcatgtctttacatgttgacccctttgctgctagactgtagaggataatcttttgaatcatctttgtataagcagtcttaattttgctaaataattacttattgagttcctgctaagtgttaggcactggggaataaggaaggaaaatagaagctgtcagggatg

SEQ ID NO: 445313 - DNA, 554 bp, Homo sapiens
ctcagaatgctatgtgaaatcttccttgattctaggtatctttctccacacacacaggtgtctgcttcgttggggtcccttagtaccttgtcaatttttctagtgtcactttaccacctgacctgcacatcatgtctttacatgttgacccctttgctgctagactgtagaggayaatcttttgaatcatctttgtataagcagtcttaattttgctaaataattacttattgagttcctgctaagtgttaggcactggggaataaggaaggaaaatagaagctgtcagggatggctttcctaaagatcatccatgagctgagacttagagagtgagggtagccagatttagcgaagcaaaaggcaagaaagggtgagcacatgcctagccagcaccaagagaagaagagaagccttcaagaacgtatgtatttctctgcaaagaagaatggtgagggggccattaccagcagctcaataattccagagaaaaaggcagatggggaaagggataccgatggagatttgggcagaaatcagtttccttttctttt

SEQ ID NO: 445314 - DNA, 554 bp, Homo sapiens
ctcagaatgctatgtgaaatcttccttgattctaggtatctttctccacacacacaggtgtctgcttcgttggggtcccttagtaccttgtcaatttttctagtgtcactttaccacctgacctgcacatcatgtctttacatgttgacccctttgctgctagactgtagaggataatcttttgaatcatctttgtataarcagtcttaattttgctaaataattacttattgagttcctgctaagtgttaggcactggggaataaggaaggaaaatagaagctgtcagggatggctttcctaaagatcatccatgagctgagacttagagagtgagggtagccagatttagcgaagcaaaaggcaagaaagggtgagcacatgcctagccagcaccaagagaagaagagaagccttcaagaacgtatgtatttctctgcaaagaagaatggtgagggggccattaccagcagctcaataattccagagaaaaaggcagatggggaaagggataccgatggagatttgggcagaaatcagtttccttttctttt

SEQ ID NO: 445315 - DNA, 628 bp, Homo sapiens
agcagtcttaattttgctaaataattacttattgagttcctgctaagtgttaggcactggggaataaggaaggaaaatagaagctgtcagggatggctttcctaaagatcatccatgagctgagacttagagagtgagggtagccagatttagcgaagcaaaaggcaagaaagggtgagcacatgcctagccagcaccaagagaagaagagaagccttcaagaacgtatgtatttctctgcaaagaagaatggtgagggggccattaccagcagctcaataattccagagaaaaaggcagatggggaaagggataccgatggagatttgggcagaaatcagtttccttttcttttcttttttgggacaagggtatactctgtcttccagattgaagggcagtggcatgatctcagctcactgcaaccgggctccaaggttcaagtaattctcgtacctcagccttctgagtrgctgagattcacggggggtgccactaccacctgctaattttagtattttattagagatggggtttcaccttgttggccaggctggtcttgaactcctgatctcaaatgatccacttgcctcagcctcccaaagtgctgggatcacagacatgagcc

SEQ ID NO: 445316 - DNA, 277 bp, Homo sapiens
atcaatgaacaaagataaaatataaggcaatgttgcaaagatgatgcaggcctgaggagatgttttcagaaatatttaggatataggtatcagtggccattataagaatgaatttctattgaataaataaatgtatatatctsggtccctggagaaatacactctgctcattactttacaaattttatcaatcaaatgagaagtaaagtaatatacataaactctttcagttacttgtatttactttaccctttttctgtttcagttttactgtgcc

SEQ ID NO: 445317 - DNA, 388 bp, Homo sapiens
gtattcaggagtgattcacggatctatttgcattagggataattcactctaaatactgtgaggagcataaaattctgaggcatataaatcaatgaacaaagataaaatataaggcaatgttgcaaagatgatgcaggcctgaggagatgttttcagaaatatttaggatataggtatcagtggccattataagaatgaatttctattgaataaataaatgtatatatctcggtccctgragaaatacactctgctcattactttacaaattttatcaatcaaatgagaagtaaagtaatatacataaactctttcagttacttgtatttactttaccctttttctgtttcagttttactgtgccaaggaaatgcatttgggttttgtg

SEQ ID NO: 445318 - DNA, 388 bp, Homo sapiens
gtattcaggagtgattcacggatctatttgcattagggataattcactctaaatactgtgaggagcataaaattctgaggcatataaatcaatgaacaaagataaaatataaggcaatgttgcaaagatgatgcaggcctgaggagatgttttcagaaatatttaggatataggtatcagtggccattataagaatgaatttctattgaataaataaatgtatatatctcggtccctggagaaatacactctgctcattactttacaaattttatcaatmaaatgagaagtaaagtaatatacataaactctttcagttacttgtatttactttaccctttttctgtttcagttttactgtgccaaggaaatgcatttgggttttgtg

SEQ ID NO: 445319 - DNA, 277 bp, Homo sapiens
atcaatgaacaaagataaaatataaggcaatgttgcaaagatgatgcaggcctgaggagatgttttcagaaatatttaggatataggtatcagtggccattataagaatgaatttctattgaataaataaatgtatatatctcggtccctggagaaatacactctgctcattactttacaaattttatcaatcaaatgagaagtaaartaatatacataaactctttcagttacttgtatttactttaccctttttctgtttcagttttactgtgcc

SEQ ID NO: 445320 - DNA, 558 bp, Homo sapiens
ccaactcttctgacctctgtcttttacccacttctgaacctggttctacattgtcagctatctttatcacagcctggcaatgtggtaaaacagaaaagtccattttcagggggataattcatgaaggattcagatatttgcatgaaaagaagctgagtgttggttgccaagacaaaggggaaagggcctkgaaggcatttcatggctccacttcatagtactaatcttctgtatgatcatagagaaaagaggtttaattggttcatggttcagcaggctgtaaaggaaacacagtggcttctgcttctgggaggatcagatcaggaagccttccaatcataccagaagaccaaggggcaatgagatgtttcaaatggcagaggtggaagcaagactgatagaggaaagaggtgccacaccctgttatataaccagatctcatgagaacacactttcatgaggacagcatcaagaagatgttgcctaaccattggtgaaggatctgcctcccacccccacctcccactgtttccaggctgaagcctgctgcagatgaat

SEQ ID NO: 445321 - DNA, 558 bp, Homo sapiens
ccaactcttctgacctctgtcttttacccacttctgaacctggttctacattgtcagctatctttatcacagcctggcaatgtggtaaaacagaaaagtccattttcagggggataattcatgaaggattcagatatttgcatgaaaagaagctgagtgttggttgccaagacaaaggggaaagggccttgaaggcatttcatggctccacttcatagtactaatcttctgtatgatcatagagaaaagaggtttaattggttcatggttcagcaggctgtaaaggaaacacagtggcttctgcttctgggaggatcagatcaggaagccttccaatcataccagaagrccaaggggcaatgagatgtttcaaatggcagaggtggaagcaagactgatagaggaaagaggtgccacaccctgttatataaccagatctcatgagaacacactttcatgaggacagcatcaagaagatgttgcctaaccattggtgaaggatctgcctcccacccccacctcccactgtttccaggctgaagcctgctgcagatgaat

SEQ ID NO: 445322 - DNA, 581 bp, Homo sapiens
ctgtcttttacccacttctgaacctggttctacattgtcagctatctttatcacagcctggcaatgtggtaaaacagaaaagtccattttcagggggataattcatgaaggattcagatatttgcatgaaaagaagctgagtgttggttgccaagacaaaggggaaagggccttgaaggcatttcatggctccacttcatagtactaatcttctgtatgatcatagagaaaagaggtttaattggttcatggttcagcaggctgtaaaggaaacacagtggcttctgcttctgggaggatcagatcaggaagccttccaatcataccagaagaccaaggggcaatgagatgwttcaaatggcagaggtggaagcaagactgatagaggaaagaggtgccacaccctgttatataaccagatctcatgagaacacactttcatgaggacagcatcaagaagatgttgcctaaccattggtgaaggatctgcctcccacccccacctcccactgtttccaggctgaagcctgctgcagatgaatcattcttgggaaacctctactagggcagtgcagaaggaa

SEQ ID NO: 445323 - DNA, 581 bp, Homo sapiens
ctgtcttttacccacttctgaacctggttctacattgtcagctatctttatcacagcctggcaatgtggtaaaacagaaaagtccattttcagggggataattcatgaaggattcagatatttgcatgaaaagaagctgagtgttggttgccaagacaaaggggaaagggccttgaaggcatttcatggctccacttcatagtactaatcttctgtatgatcatagagaaaagaggtttaattggttcatggttcagcaggctgtaaaggaaacacagtggcttctgcttctgggaggatcagatcaggaagccttccaatcataccagaagaccaaggggcaatgagatgtttcaaatggcagaggtggaagcaagactgakagaggaaagaggtgccacaccctgttatataaccagatctcatgagaacacactttcatgaggacagcatcaagaagatgttgcctaaccattggtgaaggatctgcctcccacccccacctcccactgtttccaggctgaagcctgctgcagatgaatcattcttgggaaacctctactagggcagtgcagaaggaa

SEQ ID NO: 445324 - DNA, 189 bp, Homo sapiens
agcctgggcaacaagagcaaaactctgtctcaaaaaaaataagtaaataaaatwaaacataaagatattcactgaacctgttactatgatatatttaagcaagacacggtgaccctaaaaattagagatcattgaagaccaaagtaacaacatgtggtcattatttctcaaattgaagtatataaaata

SEQ ID NO: 445325 - DNA, 189 bp, Homo sapiens
agcctgggcaacaagagcaaaactctgtctcaaaaaaaataagtaaataaaataaaamataaagatattcactgaacctgttactatgatatatttaagcaagacacggtgaccctaaaaattagagatcattgaagaccaaagtaacaacatgtggtcattatttctcaaattgaagtatataaaata

SEQ ID NO: 445326 - DNA, 207 bp, Homo sapiens
ctatcaattcctgggtgactttttgaaaaagtagtatctcttgttgcaagaaatgctscatctgtgagtccatgtctctcactggaattggatggaagtggtgaatttcagccaaagtggccaaagaaatcctgttcctgtgattctgacgtcatcagcctctgcacctctgtcttcccttctgccacatgttgcctgttctccgtg

SEQ ID NO: 445327 - DNA, 488 bp, Homo sapiens
tcaatagatgaatgatttaaaaagatgtggcttatacatacaatgaaatattctttagcatcaaatgaaaatatcttgtcagatgctacaataaggataaatcttaaagccattattttaagtgagataagacaccaacaaagtgacagtgtatgattccatgtatataagatattttaaatagtaaactcctggaaaacggaagtagaaaggtgcttgcctatggttagggttgtgaaacctcagtggtgccaaagatcaaaaagggttatttgggaaaagcaggccctcacccaggtggccaactcaagggcccacagacawggctacagacaaggaaatggggcaccgagcttggtcttactgaagattacaaagcagttctgcaacctctctcaaactccttcagctatagtccaaaagtggtccttcccatcaagtgacctgcagggaaacacacccagccatggccctggaggcaggcctgc

SEQ ID NO: 445328 - DNA, 488 bp, Homo sapiens
tcaatagatgaatgatttaaaaagatgtggcttatacatacaatgaaatattctttagcatcaaatgaaaatatcttgtcagatgctacaataaggataaatcttaaagccattattttaagtgagataagacaccaacaaagtgacagtgtatgattccatgtatataagatattttaaatagtaaactcctggaaaacggaagtagaaaggtgcttgcctatggttagggttgtgaaacctcagtggtgccaaagatcaaaaagggttatttgggaaaagcaggccctcacccaggtggccaactcaagggcccacagacatggctacagacaaggaaatggggcaccgagcttggtcttactgaagattacaaagcagttctgcaacctctctcaaactccttcagctatagtccaaaagtggtccttcccatcaagtgacytgcagggaaacacacccagccatggccctggaggcaggcctgc

SEQ ID NO: 445329 - DNA, 488 bp, Homo sapiens
tcaatagatgaatgatttaaaaagatgtggcttatacatacaatgaaatattctttagcatcaaatgaaaatatcttgtcagatgctacaataaggataaatcttaaagccattattttaagtgagataagacaccaacaaagtgacagtgtatgattccatgtatataagatattttaaatagtaaactcctggaaaacggaagtagaaaggtgcttgcctatggttagggttgtgaaacctcagtggtgccaaagatcaaaaagggttatttgggaaaagcaggccctcacccaggtggccaactcaagggcccacagacatggctacagacaaggaaatggggcaccgagcttggtcttactgaagattacaaagcagttctgcaacctctctcaaactccttcagctatagtccaaaagtggtccttcccatcaagtgacctgcagggaaacacamccagccatggccctggaggcaggcctgc

SEQ ID NO: 445330 - DNA, 628 bp, Homo sapiens
tactctctgttattacacccccttcccttttgaaactcttaataaaaaacttgctggtttgaggctcaggtgggcatcactgtcctaccgatatgtgatgtcacccctggcggcccagctgtaaaattcctctctttggactctttctctttatttctcagccggccaacacttatggaaaatagaaagaacctacattgaaatattgggggcaggttcctctgataaaatcagggaaaaaagatttttttttttaaatgatcgtatggtactttggttatatttcttttctggtgcatcttattcaatttttccttaaatttttaattgtctttttgtattgtctttcatattctcattttttcaagtatgccatgatatcaagtgctcttatataattttatattaaattatcccaccccacacatattttgctgtttttggagataattctggagctttgtgtccattatcttttgtctccgttggttgctctctagacctgctatgtgacttagccatgagacttcccataamtgcttttatggattggatactattgtcctggatatcatttctttctctttcttgaattaattttcattttgctgaggcatattatcaagta

SEQ ID NO: 445331 - DNA, 608 bp, Homo sapiens
ccatataaccttgaacgagctgtataacctctttctcatttctctcatctctaaaatggtatgaaaatgccctatttaatttgattctgagctgcatacatttttttcacattctaagggctctgaaatcaggatacatgtttgtgattgctgtattttactatcagtcatgtgacagtagacatgaagttatatgaaaattsttaatttataccttttggtatggtcactgcatctgatcatccgaatggagttgatgatagtacatacctcgaaggacttttgtgagtatcaaatcaatttatatatataaggtagttagaacagttccttccatctagtaaatgctatttgtgttagctatttttaatattagaaatataacagtgattggctgatttatttataattttaagattatataataccctttgtctgtggaccacaaagcatgttttattggacattttgaaaaagaaaggtaaattccttgttgttatagatatataataaatacaaagtagagaagattactggttagaagaggtaattgagggtggtaaaagtagaatgtcttctgtatttaatgtaagatgtaagtttctgct

SEQ ID NO: 445332 - DNA, 472 bp, Homo sapiens
cggtcagaccaggctctggctggggatggagcggggccgggcagggctgggcttgggggcgtcgccgccaggggccgccccctctgaccggctcccgccgccgccgcctcagaagctccgagtgcccgttccctcagcctgaggaggggtagggggcggtggccccgggttctagcccgcctgtcctcggcccccacttctggaatgagcctgccygccccctgactctcaggccacagctccggccacagctctggctcctgctccgcggcggatcccacaaacccggcagccacggcggtggcggtggcggtggcggtggcggtggcggcggcggcggcggcggcagcggcaggcggcatcccagggtgataggctgaagcaatcgagggccgagagcccggccgcgtgtgcactcgagtaacgaagccggggagggactgcgccgcaggcaggaaaagtcggacaccga

SEQ ID NO: 445333 - DNA, 472 bp, Homo sapiens
cggtcagaccaggctctggctggggatggagcggggccgggcagggctgggcttgggggcgtcgccgccaggggccgccccctctgaccggctcccgccgccgccgcctcagaagctccgagtgcccgttccctcagcctgaggaggggtagggggcggtggccccgggttctagcccgcctgtcctcggcccccacttctggaatgagcctgcccgccccctgactctcaggccacagctccggccacagctctggctcctgctccgcggcggatcccacaaacccggcagccacggcggtggcggtggcggtggcggtggcggyggcggcggcggcggcggcggcagcggcaggcggcatcccagggtgataggctgaagcaatcgagggccgagagcccggccgcgtgtgcactcgagtaacgaagccggggagggactgcgccgcaggcaggaaaagtcggacaccga

SEQ ID NO: 445334 - DNA, 506 bp, Homo sapiens
ataatgtaattctatgattaacatttttttgttttttgagatgcagtttcgttcttgttgcccaggctggaatgcagtggtgcgatcttggcttactgcaacctctaccttctgggtgcaagcgagtctcctgcctcagcctcctgagtagctgggattataggcgccccgccaccacgcctggctaatttttgtacttttattagagacagcgtttcaccatgttggtcaggctggtcttgaactcctgacctcagggtgatccacctgcctcagcctcccagagtgctgggattacaggtgtgagccatcgtgcatggcctgattgattttttttttttttttataaagagaggggtcttgctctatactccaggctgtagtacagtggcaccatcatggctcactgcagccttgaactcctgggctccagcaatcctcccatctcagccttctaagtagctgggactataacyatgcatcaccacatttagctaatttttaaa

SEQ ID NO: 445335 - DNA, 565 bp, Homo sapiens
atgtaataatggtaagcagggattgacaaggttcttgctctcaaggagcctgaagtttaggttaaacagacaaatgcataaatataaactagtaagtactgtaaaggaaagaaacatgcttctaatagaaaaaatatattaaaaaggaacagtaccttcactgggaaatacaggaagacttctctgaggaattgatctytgagttgggattaaagtggaaaaagcactggaagaacattccattttgagggaatagcatgggaaggtccccatggaatgaagaaggatgatgtattagaaaaactgaaggaaggggataatgctgagccaggaaagtaaggagcctaggcagtgtaagatgattccagagaggcaggcaaggggtagacctacaactatagtataaataactaacttaaatgactatagaacatgataattctgaaacgttctgtaaatagtttttgtaattaataatggataatgccctacattacaattatgttttagactagaaaagcatttcccctcttgataaagtttcaaactattcagtggagaaact

SEQ ID NO: 445336 - DNA, 523 bp, Homo sapiens
ggtgatccacctgcctcagcctcccaaagtgctgggattgtgagccactgtgcccagctgagatttctttatatatacttgatactagaaccttatcagatacatgatttgaaaaacatttcctcccttttgcagatttttacactttctttgttttttattttccaagaaagagtcttgctctgttgcccaggctggagtgcggtggtgtgatctcggctcactgaaacctctgcctcctggtttcaggcaattctcctgcctcagyctcccgagtagctgggcttacaggcgcacaccatgcctggctaatttttatatttttagtagagatggggtttcaccatgttggccaggctagtcttgaactcctgacctcattatctgcctgcctcagcctcccaaaatgctgggattacaggcatgagcccctgtgtctttctttacactttcttgatgatagtttttgaaggatatattttaaatttttatgatgtccagtttttcttttttcttacctgtg

SEQ ID NO: 445337 - DNA, 595 bp, Homo sapiens
aatattttcttattataagatacatgcagtatctgtaaaatgatacagtgttatttgaaactagacttgaattaatcgtaaatgtatattgcaaactcaaaagcaaacaatttaaaaagttaaaaaaagataactgacatgctaagaaacaaaagaaaatggagtgaaacaaaatgctcaattaaaccagaaaatgtagaaaatgggtggaagacatataaggaaaaaagaacaaaggcaatgaatacaaataggaagtaatatggtagatattaataatccaaatatatcaataatcacttttacacatcgataatctaaatccaatttaaaaatagagacygttagaataaatcacaaaacaaaacctaactatacgttatctacaagaaatacattttaaatataaagacacacatagattaaaagtaaatggagaaagctatactgtgctaacacaaatcaaaagctggaatcactatattaacttcagcacagcagactagagaaataaaaattatcaggggtaaagaaaggataaaggagtcaattctccaagaaaatttaacaatccttaatgtgtatgcacttaaca

SEQ ID NO: 445338 - DNA, 567 bp, Homo sapiens
tttttccttgtacctaaacacttagattgcctcataatacatgaaacttaaacataatttaccacgagtacttgacacaaagaattttttttggtgaatataaaacatttaattttaaaatgttgacactataatgtatgaaatagctagctattacaaatgcacatggtgtattttgtagataccaactaaacttttttgttttaggaagctttaagttacactgtggttaagacatatcttcacccttgaaaaagcccrcattctatcactgtgatgtatggtcaaactgaggcccaatcgttaaacacttggatcaaatcataactaagtttattgccaaaggacttgtacacatttatttgtcaattttagtgccttaaaatctacccagcagctcattaacatatagaaacatacatcatgagaacaagaactatcacccatcccttctgtatattagcaacttatcactcctgagcaacatctcattactgaggcctgtgaacagtcacttttcacatttgagtgaaatatggaatgacttaagtataaatgcagctatta

SEQ ID NO: 445339 - DNA, 558 bp, Homo sapiens
ttttaaagttagattaaggataaagcttagagaaataactaacgtgagtgatattaggctttygttaataatagaacataattttgagcacttgtcaaattaaattttagctagccgtgacagatctgagtcttcacctttatttctttgattcttgcttgtgtagtgtgtcttcctcagtccatggttctttctgccttctaattgtatttgattttgtttctgttatttaatattttccatctccatatttctgaattaaatagggaagcttatggtaaaaaaaattgtgggccgggtgcggtggcttatgcctgtaatcccagcactttaggacgccgaggcaggtggttcacgagttcaggagttcaagactagcctggccaagatggtgaaaccccgtctctacttaaaatacaaaaaaaattagccgggtgtggtggcgggtgcctgtaaccccagctacttgggaggctggggcagagaattgcttgaactggggaggcggaggttgcaatgagccaagcgtgccactgcactcctgggtaacagagcgag

SEQ ID NO: 445340 - DNA, 492 bp, Homo sapiens
aattgtaagattctctaatttgatatgtttttgagaaagccaaatacttcatttctttaatatacaaatatgtagatttagagactatataaacaaatcaaaatgcagttattggttgatgataatagtgataaatagaacattgtaatatgtttaaaggaataggtatgttggttttcgttacgatttcgaccrtaataagaaaaagacttagtgtgagacctgtttttcattgtaaaacattctacaaataagtggatagtttttttagtttgccagatgaaatcatttttaaaacaacttgcagagtgactttgattgcactgttatatctgttttattggtagtctgaagtctgtgaggctttccatttgaaacccctattttcaggggtttatgagcaggcagttgaaaagaacttaaccagcaaaaacttggcattcatgatcttggttcagtataaggtacttgctttaacaaattttaagtagt

SEQ ID NO: 445341 - DNA, 562 bp, Homo sapiens
aaacttttgttccatttacaaaatggaggttattagtcctgactcttgattcttaaggcagataagaattttggtttaggatttgcttcagggggagttttgttctaattgttgttggagtgcacacgrtactagtgatccacctcccaatttgttagcttactgggaggaagagggtaagggtggttggtaagcccattttttccaacctgtatgagataataagcagaaagatatcttcaaatactcagataaaagaacaaacagtaaatgtgttaagaaatgtagctcaccacacattatataagtactgtaactcacatgaaatacaatgagtgatataagttgggaggccgcagagcacagtgaatgagagggcccatgctggagccagactcccttggttcaaattttacctctcctggagcttattattcaatgtctctgtaaatcaggacccacagtcataaagtggagatgacagtaataataacaccaaacccatagagttaataacactaaatgacttaagattttaggacaatatctggcacattgtaat

SEQ ID NO: 445342 - DNA, 547 bp, Homo sapiens
ttcagtctgctcccaaaacaattgttgcataagttctgaaagccaggcccacaaagcttcgctttgttctggaaagttccctaaatagagttaggtaacaacggcattagcactaagactgaggagtcatggcatccaatcacacacagctctctgtttttctttctctcarcgtctctttttcttttcctcttctcttccccttctttttcaatttcttcctcctcctctcttctcctttgtttccttctcccacaaaaagtgtttgcttttccccgcaaacgcttctgagccttggaccaggctctgatttcaccagctttgcttaagcaagacttgctgcttcacctaaggacaaaggtgtttccaggtttaactaaaaactggatgggacattacataacagagtgaagtgaggctcccattgccaaagtgctacaaaaacactttttctcacaatgtttcagaacttttgcaacagggtatctacgagaattaaaacatgggttaaaaatatgtaagatctcatgccaaataattgaaaaca

SEQ ID NO: 445343 - DNA, 480 bp, Homo sapiens
gcaagtgaacaacagcaacaaaaccagtataatataatgttataaaagagatacacacacaattccgtggtgcaaagacagcaagtgctattcttggtagagttggagaagatttgcaaatgagagggacatctgaatggcattttamatcagcagttttgaaagaccagggaaataaaggcatctcaagtatggggagtggcttgtgtccaggtgtggaaactctaaaggacctgatgatttaaggaactgcaataattcagcatggcttgagtttggggtggttgtggggaagtattatactaaagaccattaacttgactctaagtaacagttgaagattttaaagcaagaaagagatatggttacatttatgtattagaaagaccattactgaagtattgtttccaatttaaggaatggaatgggtggggaggaggaacagtcatgtataaatttatttcctctaaatttctttct

SEQ ID NO: 445344 - DNA, 616 bp, Homo sapiens
aacatagctagtaagtttcctacctctatgcttttcttacagtgttaattccaaatgtagtgttcttcatcctttatctatctcttgaatttcttctatctcagactgagcttatataacatcccttctatgaaattaccctgaagcatcctttaatgaagacacattttctttctttaaattacaacagcactctatctgaacttctcttccagctataattacttctcccttctgatgtatttgtatacatacttgtctttttttcccttcccgcacccaccaccccaccaccccaacccgcagactgtaagctttctttcacaaggctgaattttattcatcttgatgygcttcgcagctcttagcttcatgcctgggacctcagagacactcagtgatactcagttaaagtctgtttaatagatgttgaatcagtttctaattttctctgttgggctgtataattctgtactaagtcctttcctcttacaatattctactcttctgtcacctacttcctcttcttctctggtcctttttagttctgactttacaatagatcttgtgctttaagttactaataaaaaaggagtataagtgaattaggaaatgt

SEQ ID NO: 445345 - DNA, 561 bp, Homo sapiens
ctctactggtgcaagactatgtgtctcagttttggcttcagatattgtgtttggtatgataaacaayccctatgctttgtttctttcttgttcattagtacttggggtcctgagtgaagcaaggaaaggtgttgatatttcaaaataaaacagtaactggctttgctggtatatattcattttggtagtcttgtctttccatctgaagaaaaataactgagaattgactaaccaaccagcacttactgagcatctactctgtacctagccatgtgctaacttagaaagaccttaagggataaaactaaatcttatttgtccttgtaatcactctctccccttcaatgggccaagtttaatctactcgttaaaacatgtattgaccctgtgctatgaaccaggcacagtgtttagacactggtatgggaagataaatatgtctggtatctgctttcaaggaacctataataaaggaggagaaacagtcaatgaagcaaaatgattacaatatagcatggcaggttctgcatcaaatatttcttaaggatgtgatagaagcac

SEQ ID NO: 445346 - DNA, 561 bp, Homo sapiens
ctctactggtgcaagactatgtgtctcagttttggcttcagatattgtgtttggtatgataaacaacccctatgctttgtttctttcttgttcattagtacttggggtcctgagtgaagcaaggaaaggtgttgatatttcaaaataaaacagtaactggctttgctggtatatattcattttggtagtcttgtctttccatctgaagaaaaataactgagaattgactaaccaaccagcacttactgagcatctactctgtacctagccatgtgctaacttagaaagaccttaagggataaaactaaatcttatttgtccttgtaatcactctctcccctycaatgggccaagtttaatctactcgttaaaacatgtattgaccctgtgctatgaaccaggcacagtgtttagacactggtatgggaagataaatatgtctggtatctgctttcaaggaacctataataaaggaggagaaacagtcaatgaagcaaaatgattacaatatagcatggcaggttctgcatcaaatatttcttaaggatgtgatagaagcac

SEQ ID NO: 445347 - DNA, 537 bp, Homo sapiens
tagtcataggaaaccacacataatttcagataaacagaaaaagggaatgaatttgagttgtgagtttaactttatgaaatgggtgttgagaaagagattttcagaactctgcaatttcatcttttatgttgcaacaatgagtaggatagatcagaaaagaagaaaaccrctgtatttgtagaaactgcaatggtctagagcaagagtgaatgagggtctgacctgagcagagaagagtgagactaaataggatgcagcagagagtctcttcatgcatttactatatgcaccgtgcccagctttatataaggcacaatggagactctacaaagagcagagaatatacttcctacctcaaaggagctcacaagctggctggaaaagcaaagatatatagcaaagactggagtattgaaaacaatatcaaactaggggtcaggcccagatttctaatccctgcctgccattaactcaatatcagatgatgcatcaggcaatttgctttgtcatctgcacctcagcttctttatttgacca

SEQ ID NO: 445348 - DNA, 570 bp, Homo sapiens
attgattcgttatctataaaatggtaagagaatcacttaacttttaggattctagttattattaaatgacataatttaaaagtgtgcaatattatagttagcctatgttcagtaatcaataaataatcgttatttttatttcctctggaatrgaagcagagaaaatagaagaggagaaaagagaaaaaaagaagaaaacaatgaaaataaagaaggaaagcaatagcaacagaaaggctagtgctcaggtggaggctgctgaggaatttcttatatggacattgctacagtgtgaatatgatgtgtcctcaccaaatgtcatgttgaggcttggcccccaatgtcatggtgttgggaggtgatgcctttaagaggtaattaggtccttaagttggattaatgtctttattttgagaccgggttagttctcatgggaatggagtagctcccttgagaatgggctgttatttggccaggctgcctctcctgtttgttctctttcacatgcttgtttcccctttcacttctccaccatgctatgatgcagcatgaggctctcattagaagcca

SEQ ID NO: 445349 - DNA, 611 bp, Homo sapiens
tctaaataatggagttgagcccaaggcaactttgccaaagggtcttgatcttttaatgcctgaaagtgacttatgttcattaaaaactgcttgttggccgggtgtggtggctcatgcctgtaatcccagaacttwgagaggctgaggtgggtggatcacctgaagtcaggagttcaagactagcgtggtcaacatggtgaaaccccgtctctattaaaaatacaaaaaatagccaggtgtggtggcgtgtgcctgtaatcccagctactctggaggccgaggtaggagaattgcttgagccctggaggcagaggttgcaatgagccgagattgtgccattgcactccagcctggacaacaagagcaaaactcatctcaaaaaaaaaacaaaaacaaaaaaaactgtcttgtttccaccgtattgcttggtgctttgttaatataaactgatctccggagagactgatgcccattgtctctgagagaagccatgtgcctccaccccagcccactctaccatgtccaagactttcctttccagactatttgagagctgagcattagtgaacctctttaagctgagaggagatttgaaggttatcaacttaagc

SEQ ID NO: 445350 - DNA, 513 bp, Homo sapiens
catgtgcctccaccccagcccactctaccatgtccaagactttcctttccagactatttgagagctgagcattagtgaacctctttaagctgagaggagatttgaaggttatcaacttaagccctactccattgcatgagccaaaccatgtagcaagtaagagactcaggttggctgataacatttcctctgaaagtctcatattttttcttcttcaaattttagctcagagtttcaggaccccagattttcacggaataggccgagtgrcattggagagactacctgtgaatgaccatttagtaaatgggaaaaacagtgatgccatttgggggcttcttgtgttgatgatggctgagcatcagagactctgggattggtgaaggggatgattggccagcctgctggcttttggaatgaactatgaaatggtatgaaagtgtcaagaaccccattgctttcaccatctgtacagtattacgatatatgcatttgctttgtgtgtactatttg

SEQ ID NO: 445351 - DNA, 528 bp, Homo sapiens
cactgaccatattgaacatacacttttgatctatccatctatctaaccatgtctaccatttatagaataccaagcagtgtgctgagatcttcatatgcattgtgttatattagccagtcttacaacaaccccgttagatcagtcctactattagccccattttacatgtgaaggaattgaaggctcagaaggattaagttaacttgcactaagttaacttgaagcaaycaaggagtacaaatgagatcccaatccagatctgactccattactctatataacacactgatatttctaaagaaggacactaaaagctgttacctgagtatgagggcagagaaaggggattggatttggtttaacataatcaagtagcttgggtgattgaggagtagaaccaaaaactcatctcccttgtctttggtctgggctttgcttttgaccctctagagtgtaggaagcaggggactgttatccctgtgcctggagttgagtctccaggtcatcttgcagagctggacaaaatca

SEQ ID NO: 445352 - DNA, 528 bp, Homo sapiens
cactgaccatattgaacatacacttttgatctatccatctatctaaccatgtctaccatttatagaataccaagcagtgtgctgagatcttcatatgcattgtgttatattagccagtcttacaacaaccccgttagatcagtcctactattagccccattttacatgtgaaggaattgaaggctcagaaggattaagttaacttgcactaagttaacttgaagcaaccaaggagtacaaatgagatcccaatccagatctgactccattactctatataacacactgatatttctaaagaaggacactaaaagctgttacctgagtatgagggcagagaaaggggattggatttggtttaacataatcaagtagcttgggtgattgaggagyagaaccaaaaactcatctcccttgtctttggtctgggctttgcttttgaccctctagagtgtaggaagcaggggactgttatccctgtgcctggagttgagtctccaggtcatcttgcagagctggacaaaatca

SEQ ID NO: 445353 - DNA, 587 bp, Homo sapiens
aattatgctaggcctaaaaataaatgagctgcaagtaaaacacaatttaataatgtctaatttataaattccccctgcttttacaaagacacccagctcttacatgtggaagttctgtgttttagtgaagggaagtgaattacaaggattttattcctcaaagaagctgcccctgccagacaacctttctgtgagctcattgcacaggcagtctgcccttgtgcacttggcatcttgctcgtctcttaatttaaatggtccaggtgggcaagcagagctccttgaggccctccttgctctctgccactgaggcaagagaacagccttactgcagttcccctctctcagctcccactcctgacaagataagcggaaaaaataaaagcataaatttggttttggtgagcatcttcatgtggcaaccagccttgcarggagcctgagtaaatgttctgcttcctcctgcacatgagctaacaggcttgaaagcctggaagaaataattcccaggttgcaagagaacagtaggatgacaggtgatcttgttcctcatttggttctaacagagatcgtgagtccagccaaag

SEQ ID NO: 445354 - DNA, 628 bp, Homo sapiens
gaaataattcccaggttgcaagagaacagtaggatgacaggtgatcttgttcctcatttggttctaacagagatcgtgagtccagccaaagcatttgaagtctttgtcaccctttgaatggaagcagcaggtcccttgaaatggtgtaatatcaatgttttggattggaatagaaaattgagatgcaagaggacatgattatctggatgtgctaaaggcacctcatcatttccctacaaaaacattcccttgcccacatcttttatcagtgaatgggtccatcacatacctaggcacccacgttggcaccctacattcttcttttcaacctcatcttccagtaagtcttgttgtttttctcctgaatgtctcttttctctatcttcttcttttcacgttgtcaactgtccaaatcctcttaattaatctccccgtcccrcacccatcctccgcactgctaccagagtgatgcttgtaatcaaggaataataattatcattacagctaacattttatctgggcttactaggtgccaggcgccatgctaataactttgcctctatccttttatttactttgataacatcacatcctgctctgcagtttttaatgattccttttaccagaa

SEQ ID NO: 445355 - DNA, 646 bp, Homo sapiens
ggctctttgcctgttttgtttcatgctttcttcccactttctaggactaaacctggcayattttaggcacttgaatatttgttttgttgatatgaagagacacgtttttggctataacaaacatttggatatgtacacttaatttttccccatgttttatttttcatttttgatgatgatgagagtgtaaacatttctaaaaaaaagcaatttagcaatatgtatcaagaccctaaaataatgtgtatcctttgtggcagagactgcaaactgcctacccaatatctatttcccttttctttactaagagaaagaagtacttctttactacagaaaacctttatttattgagatgaaaaggtgtccagctaaacttctacatttcccagcctccttgcacctaggtgtggccatgtaactaagtttctatggctagcaagatgtaagtgaaattctgtgggaggcttccaggaagtctccttagaaggtggacagaacactgatgaaatcccctttgcttccctgtccttcctgaagtctaaaactaaggttagactgcagaatcttctacagccatcttagactcattgagtcaaacagggtttattagaggctgttggaaatatacagaatttctaaatggtcc

SEQ ID NO: 445356 - DNA, 646 bp, Homo sapiens
ggctctttgcctgttttgtttcatgctttcttcccactttctaggactaaacctggcacattttaggcacttgaatatttgttttgttgatatgaagagacacgtttttggctataacaaacatttggatatgtacacttaatttttccccatgttttatttttcatttttgatgatgatgagagtgtaaacatttctaaaaaaaagcaatttagcaatatgtatcaagaccctaaaataatgtgtatcctttgtggcagagactgcaaactgcctacccaatatctatttcccttttctttactaagagaaagaagtacttctttactacagaaaayctttatttattgagatgaaaaggtgtccagctaaacttctacatttcccagcctccttgcacctaggtgtggccatgtaactaagtttctatggctagcaagatgtaagtgaaattctgtgggaggcttccaggaagtctccttagaaggtggacagaacactgatgaaatcccctttgcttccctgtccttcctgaagtctaaaactaaggttagactgcagaatcttctacagccatcttagactcattgagtcaaacagggtttattagaggctgttggaaatatacagaatttctaaatggtcc

SEQ ID NO: 445357 - DNA, 472 bp, Homo sapiens
tgtatcctttgtggcagagactgcaaactgcctacccaatatctatttcccttttctttactaagagaaagaagtacttctttactacagaaaacctttatttattgagatgaaaaggtgtccagctaaacttctacatttcccagcctccttgcacctaggtgtggccatgtaactaagtttctatggctagcaagatgtaagtgaaattctgtgggaggcttccaggaagtctccttagaaggtggacagaacactgatgaaatcccctttgcttccctgtccttcctgaagtctaaaactaaggttagactgcagaatcttctacagccatcttagactcattgagtcaaacagggtttattagaggctgttggaaatatacagaatttctaaatggtccatggaamttaccaagctggggagtactggccaaggacagcatccaggggaaatgatgttctgaggcaca

SEQ ID NO: 445358 - DNA, 556 bp, Homo sapiens
catcatacccactaaaccaacttgtaggtgttattctcaacacttaccatatattgtcttatatagcaatgtccagtactgtactgtcctggttagagcatataggacaggagacaaggkttagagactattgagagtaagcgaggcctgggctcctgcgcttggacatgttacttaatctttatgcaccttagtctctttcactgtaaaatgagagtaagactgttaactctaaggattcattgaaataatatatgagtataatctagaataatgcctggcatatagtagctattattaccgctattatttatcatcaatgttaaaatacatatcactatttgttcaaagttttctgaacaataagacaagtctgttccatgtttgtaaatctgtttgagtcttcatcctatgcctgagatgctataaaattgcttctcaaagtgcatccaaagggccatctgcatcagaatgtcctgaaagcttgttaaaaggaaatgtcttgagtgtctccccaaagcaaatggatcatgatctctggcagtgacccaaaatt

SEQ ID NO: 445359 - DNA, 556 bp, Homo sapiens
catcatacccactaaaccaacttgtaggtgttattctcaacacttaccatatattgtcttatatagcaatgtccagtactgtactgtcctggttagagcatataggacaggagacaagggttagagactattgagagtaagcgaggcctgsgctcctgcgcttggacatgttacttaatctttatgcaccttagtctctttcactgtaaaatgagagtaagactgttaactctaaggattcattgaaataatatatgagtataatctagaataatgcctggcatatagtagctattattaccgctattatttatcatcaatgttaaaatacatatcactatttgttcaaagttttctgaacaataagacaagtctgttccatgtttgtaaatctgtttgagtcttcatcctatgcctgagatgctataaaattgcttctcaaagtgcatccaaagggccatctgcatcagaatgtcctgaaagcttgttaaaaggaaatgtcttgagtgtctccccaaagcaaatggatcatgatctctggcagtgacccaaaatt

SEQ ID NO: 445360 - DNA, 585 bp, Homo sapiens
aagtgtaacttttcctttaatggattaaataaccagaaagtttgtaaagtggaaaaagtaagtatgaattctattttccctaagatcagaagtaaaacaatttaatctttttgaagagatcagataatttggttttggcatttaaaattctctgtctcttttctgagaaaggatcacttgattttataaattctttcctccatcaattaaaaatactctgattcttcctagtgattgaggtaaaaaacaaggtttcatatagatgtttttcttctagtggccacaaaagtagggtttaacatttagggaatgtgtatctcatcttttctgaagttttatttattarcaatgtgtcatttttatattttatgaagaatgcttcccaagacagtgtggctgaatatctcaactccagttggatgggagtaaaaaggcctttataattacagggtggaaaagtaatgcaagcttcatttagacaaagagttctttgccctagacaacttcaaaaagtgaccgagggagggtctggaatttcatttaaatgaacatggtgcctgtcattatacttgacacctgggttta

SEQ ID NO: 445361 - DNA, 556 bp, Homo sapiens
acaaagattcaaatgcaagcagtatgtaagggtcaaactggaaaaattgataaaaaactataggagtgagacagaagagaagcagcaaacacaagtcagatattaagacaacgaccactgtggataacagaaacttaatcttaccaggggaatctttggaaaacggtgtagaaaacaagcctcagactcctccrcccaagtattcagctcctaccagccattggttaagaactgcaggtggcagagggtacagtagttatttctctggtactgcttgtctaccatgtatacaaagagacctttatccaagtcttggaggaaaagcccaaggagaatgcataagatactgacagctgaagctcgctgcctgaatgacatggttaaggcccagggatatgcacagggcattgatagcacctgctacaaacatcagtatctttggcgcaggctttgtgatattctctattattctaccctctttgaagtgtatgagtatgcagatcattgtctctcaaacttccgagtgcataaggagcacttgggaagcttgttagca

SEQ ID NO: 445362 - DNA, 556 bp, Homo sapiens
acaaagattcaaatgcaagcagtatgtaagggtcaaactggaaaaattgataaaaaactataggagtgagacagaagagaagcagcaaacacaagtcagatattaagacaacgaccactgtggataacagaaacttaatcttaccaggggaatctttggaaaacggtgtagaaaacaagcctcagactcctccgcccaagtattcagctcctaccagcsattggttaagaactgcaggtggcagagggtacagtagttatttctctggtactgcttgtctaccatgtatacaaagagacctttatccaagtcttggaggaaaagcccaaggagaatgcataagatactgacagctgaagctcgctgcctgaatgacatggttaaggcccagggatatgcacagggcattgatagcacctgctacaaacatcagtatctttggcgcaggctttgtgatattctctattattctaccctctttgaagtgtatgagtatgcagatcattgtctctcaaacttccgagtgcataaggagcacttgggaagcttgttagca

SEQ ID NO: 445363 - DNA, 556 bp, Homo sapiens
acaaagattcaaatgcaagcagtatgtaagggtcaaactggaaaaattgataaaaaactataggagtgagacagaagagaagcagcaaacacaagtcagatattaagacaacgaccactgtggataacagaaacttaatcttaccaggggaatctttggaaaacggtgtagaaaacaagcctcagactcctccgcccaagtattcagctcctaccagccattggttaagaactgcaggtggcagagggtacagtagttatttctctggtactgcttgtctaccatgtatacaaagagacctttatccaagtcttggaggaaaagcccaaggagaatgcataagatactgacagctgaagctsgctgcctgaatgacatggttaaggcccagggatatgcacagggcattgatagcacctgctacaaacatcagtatctttggcgcaggctttgtgatattctctattattctaccctctttgaagtgtatgagtatgcagatcattgtctctcaaacttccgagtgcataaggagcacttgggaagcttgttagca

SEQ ID NO: 445364 - DNA, 529 bp, Homo sapiens
tataaagatatcttagtctttcctttagcacagttgattgaaatttactttttattactcatagtttagatgaccaaaactgtggcttactatggagacttatttgctgtttttctctactgctccaagtttgtggtctatcaaataggaattttgatagttctagtatttcttagcaatggtttaggttcagaaacacatgctgagaaaatgagttgttgattgtatgtatggatagagaaaaacctgggataggaaaacctgggatagttcttgattgtatgtrtggatagagaaaaacctgggataggaaaacctgggatagttcttgattgtatgtattgataaagcaaaacctgggtagattagggtactgcgttttggggcatgctgtactttcaggaatccttcactgtagagattaatgtaggtaagcagtacaggggaaaaagtgcccctgacacacacacacacacacacacacacacacagctgggtctgagtcctttccttccgtgagtaccctttc

SEQ ID NO: 445365 - DNA, 587 bp, Homo sapiens
agactaactggctgtttttttaccaaattttttctttctgagatggcattgctgacatttacttctatcccctgtgtacaggcaaaagtttcagcttcacagcctccwactcaggacactccagtctcatctatctctacatatatgtacctagaaaccatactgagctattcactgttctttctgggagggcaagaatcagtttatattaattattttaattctcttttccttcttaccatgtctgtagcagtgcttggggcacagaacagactctgaatatattgatgaaattgaattctgttctgcagagcacatttccccagccttttcaggacttgtaattggggggaaacagcactatggagtattttcagacttgctaaacactttatataatttatctcacttaatccttaacaaccctgcaaatcattatttttcccatgttataaatggagaaacaggtctgaaagaatttacataactagtctaaagtcacaaagctagtaaatgcagagctgtgattgaaacttagaacctgtttttcctatgggctatggcttaatttattggtggcaataatg

SEQ ID NO: 445366 - DNA, 593 bp, Homo sapiens
tgaaaacagtgagatggcttaccaaggtcactgagcaggtggtcatgacactcagtgcagcatggctatctatcctgtaactgctcaaccttgaaaacctatgccttgccaccaaaacaatggtaccaagctttattttgcattagacttttttttttttttcaaattaaaagtactagcctcttctgggtaaaataataattcaccctttaggagagatgaaactttctgataactttaactccttcattttataaatgaggaatctaaaattccaaagtatactcaatggtatcttcaaagatacagtgcaactgaaagcaaagctggtcccaraagccctgaggcttagctctctcctctaatgcaagtccctacctcagataaacctttaaatctccccatacatcttagtgtagatctgaatcttcactctaacacccagagagcttgatagtgcttctgtacaggtagaaaggccctatggcctaagggtgttcagccagaaaattataatgacgttaagaagagttggcctagtaagaaagaaagatcttgggagagcatggactgagggaaaacatgcatcctga

SEQ ID NO: 445367 - DNA, 460 bp, Homo sapiens
ttactacctggacagcacatgaactttcagccaagtgctaaagaccataggcagaagttctggcagctggagccccagaggatgaaagtgggaaactgaaaggagatggagtctagtgcatcctttgtcccagatacaaagacccaagtatgagccctgtggaaagaaagatcactagcgaaagctgaaggagcctctcttcttagacattcagyggcataaggcaactcagtgtagctttagagcacaggagatgagatgtggtatatattacattaaaaggtcactgttttcctttttgtggtgctttttcacagagtggacccctgacctacagttgcatcttgaggcttggtgacttagggggtactaggagatggtactctcagctcaggtaccagtgtcctcataatgaacaatggcagagatgacagttgtcaggttttcaagagttctgagg

SEQ ID NO: 445368 - DNA, 552 bp, Homo sapiens
agatggtactctcagctcaggtaccagtgtcctcataatgaacaatggcagagatgacagttgtcaggttttcaagagttctgaggatgtatgaatatcagctatttataaatgggcatgagaaagggagaatagaagaggtgcagaattgaactgtggctgacagacatcagatcttttattcatactccaaattgacataatatttaatagagatcaaatttcttcttctgcttcccagaaaaatatttcttagaaagatgaaaagaacttaggatttagccatagaactgaattcaaatcctggcttttcagactatgaattgyctttttttttttttttattaaaacccacctcctacacaagaattaatagtctttgaacaagccatttgatcctttggagacttagtttcctcatctgtaacatgtggaaaatattgacttcatagaggtagtacaaggattaaatatgccttataagtctgttacaaaatcgtttgtgttactagtcatatggtcactattttctaagagcctatagttattgtg

SEQ ID NO: 445369 - DNA, 622 bp, Homo sapiens
attctctgttgggtttttctcagaaaatgacctattttccttctctttctctgaagcattgggtatctgccaattcattcagattctgcaggcatctggtaaagctctgacttgattgccttggtcagattggatagaagcagacccaggtgttgctcttctaggcatggtttccatactaccttgaagttgatctactctgtaagttcaatcaccttgaaaattaccctctagttttccatcaatcacattgcctcagttagtcagttttttagctacttggattttgcgtgaaatatttattaaattaaattacaccaatggactctgagattcacaaatatgttgtagatacacttatagttactcatctgaccgaattttttcctgaggaaaaaaaaaatagtcaaaggactaccttctatgagtggtcttctagactgcaaaaatccagatcttgtcaggattccataatttaattaacagagttctgactgactttgatttggggtgaagagscttaaagagtagtattagtccttggttgccaaaatgtcaagtgtaacttcagcatctttttattgttaagactaagcataaacagaggtatttttggagttaa

SEQ ID NO: 445370 - DNA, 547 bp, Homo sapiens
aacacccttcgactcaaaaactcccaaaaatgtgagaattcactgatggtaacaaagcccaataaggagttttaaagtaagcaaaggggcataaaattatgaaatcttaccaatagcttayaagcagaagtgtggttacctaaataccatccatttacacacactcctcatagaaattcctgcaggctcttgaaaaggaaaagaacaactttcatgctgtagaaacacaagagatggaggcagtagtaatgctataggacatcaggtggaggtctaacaggtgtacaagcctcaaaacttccttgaaacagaaggctttcagaaaaatagaaacctatgcagtttctttctacctctactggctcatattggattgattctcactttcacaattgcctgatactggttgcatgagtaggagccctagcctaggaaggaatgtggtagaggtagaaaagtatcacttagttagcagtatgttatattctgttttgtttgtttacagttttctgtgttattatggtctcaccaactagaatgtgtatca

SEQ ID NO: 445371 - DNA, 547 bp, Homo sapiens
aacacccttcgactcaaaaactcccaaaaatgtgagaattcactgatggtaacaaagcccaataaggagttttaaagtaagcaaaggggcataaaattatgaaatcttaccaatagcttacaagcagaagtgtggttacctaaataccatccatttacacacactcctcatagaaattcctgcaggctcttgaaaaggaaaagaacaactttcatgctgtagaaacacaagagatggaggcagtagtaatgctataggacatcaggtggaggtctaacaggtgtacaagcctcaaaacttccttgaaacagaaggctttcagaaaaatagaaacctatgcagtttctttctacctctactggctcatattggattgattctcactttcacaattgcctgatactggttgcmtgagtaggagccctagcctaggaaggaatgtggtagaggtagaaaagtatcacttagttagcagtatgttatattctgttttgtttgtttacagttttctgtgttattatggtctcaccaactagaatgtgtatca

SEQ ID NO: 445372 - DNA, 607 bp, Homo sapiens
tttttagaccagagtttctcaacatcagtatattgacattttgggcctgataaatttttgttgttcttgagctggcacatgcattgtcgtatgttagcagtatccctatccctggcttctctgcactagattccagtagtacttgtgtcaacaaaaactttttccagatgttgccaaaggactcttgaggagagacaaaatgattaccagttgagaatcacagttctagaaagtgtatagtgagaaaaamaggaagagaaaagaaccaaatcagagaggaagaaataaaattgtctattttcagtgcattattgtcaatgaagaaaattctgagaaatctcaaagaaaaggcacaagatctaatacatgagtttagtgaagttgaaagatacaaagaaatatacagaaatcagtagtatttctatatctgacaataaacaatgaaaagttgaaatttaaaattaccattacaaaagcataaaaaatatggaaatacttaggatacctttaacaaggtatttgaaatacatgtacattgaaaactcaatatattgtgaagacagatttttaaaaacctaaataaatgaagagatataccattttaata

SEQ ID NO: 445373 - DNA, 609 bp, Homo sapiens
ggttttgatttttgtttccctgatgattagtaatgttgagtattttgtcatatacctgttggtcatttatgtcttcacttgagaaatgtctattcaggtccttagcccactttttaatggggctaatagttgaaaaactatttttttttttactgttgaactgtttgaattccttgtataatctggatgttagtcccttgttggatgagtaatttgcaaatatttcctcccatccagcaggtcatctcttcactctattgactgtgtcctttgctgtgcagaagcttttaggttaatatagttttatttgtctaatttcattatatttgtctgtgctttagccacgaaatctttccckagactgacatcttgaaatattttttaagttcttttttttcctggcaattttatagtttcaggttttgtatttaagtcttcaatccatctgatataatttttgtatgtggaggagatataggtccagtttcattcttctgcatataggtattcaattttcccaaccccatttaatgcaaagggtatcttttctcagtgtatgttcttgatgccttaactgaaaatcagatggctgtaaatacatatatttat

SEQ ID NO: 445374 - DNA, 544 bp, Homo sapiens
ttttaaaacatatatatatatatatattcatcaggataaataccagcaatatttatattgttgcctcaggaggtaacaagtttacccttttttacccaagtgttcaaatatatgttaataatataggggctcttaaagtttttttttgtttgtttgagacaggctggaatacaggctggaatacagtagcgtgatcttggctcacagcaacctctgcttcccaggctcaagtgattctcctgcctcagactcccaagtakctgggattacaggtgcacaccgctaccgcctgactaatttttgtatttctagtacagagggggtttcaccacattggccaggcttttcctgaactcctgacctcaaatgatccacctgcctcggcctcccaaagtgctggcattacaggcgtgagccactgcacctggctaaagttttttaaaatataagttttgctgacctctgttaattaacatattttacacacctcaaatactaagaaggattctgatgtaacagtggaaaattctggaagccagaagat

SEQ ID NO: 445375 - DNA, 616 bp, Homo sapiens
aaatgtagatcaggagaagtttggaacgaagtccaaggttgtagcagggcctttggtttcatcgacatatgatgcgagagagtagcagactgagtgaaaaaccaaattaccaacatttcaatagaaggacaggaagatatcatctagtttgtttcctggaaattggaataaaaagaaagagaaatggaaaatatggaaaaataagagatttaaaagatcaattcagaagatccaacatccaacaaataatagatttgggaagagagaatagaagaagcagaaaaataatcagaccaataaaacaatacactttgcccataccaaagaacaaatacaaaatggatggttctataaaatgcaaagtaatataaatgaacaaagacccaaacttaggaaaatcattctaaaaatttaaaacataaaaaataaaaagcagatcataaaagtctccagagagaaatacagacatcttgtcagtaaaactatatagtactagagaacaagctcttcgagttcaaggatcaaatttttaaatayagaatctcatagctagccaaattatgtatcagtatgaggagcagaataaatatattttaagaaaggaaaagactccaaa

SEQ ID NO: 445376 - DNA, 437 bp, Homo sapiens
tgctgcacacagcacttctatcggggaatgttgtaatatctaacagagtgaaatgatagggtataactttcttgagctaaagtaaaattcaagacttcctatgggaagaattattcaagtaattagaatcaaataaatagaaacttgaccaaatatatattcctgtgaaattttaggtatttactaaataaatcctaaaagtattaccccagaggaagrgagagggacacaaaaaatgtggcaaggcaatggagaaacaaacacagagtttaaagggaagaggttttaatcaaataatgagtaactccaaggcaatgattcaaatttttaaataatcaaaattttaaaaaattcataaaatagatatgataaaaaacagaataattgtttcaatagtaatccccaatatgtctacaaaactatgtaaatattaatca

SEQ ID NO: 445377 - DNA, 522 bp, Homo sapiens
gggacattttctggtgaaagaatcaaaggatccagttgtcgtcttgtgagtaggatagtagtttctgaaaagtgaaggacatcatgtgacgtaaagagatgttaagtcatccaacaaataattttttttagtgttttaccttrcacttaactctaagatctacaaaatgtccctcctcttcctagtacttataccaagaaagctcaaatgctcagaaagtgaactcacgaggaatcaaatacttgtggattgtaaactctgagagtgtctcaaaaatttacctaaggtggatgcagcgaaaaaaaaacacttctatactgctggtagggatgtgaactagtataaccactacggaaaacagtgtggagattccccaaagaactcaaagtagaactaccatttgatccaggaattccattcctgggtatctacccagaggaaaagatgtcattatccaaaaaaaaaaaaaaaaaaagatactggcacagcatgtaatagcaacacaattccaagttgcaaaaa

SEQ ID NO: 445378 - DNA, 615 bp, Homo sapiens
  misc_feature (1)...(615): n = A,T,C or G
aactattcagaaataagtggtcataagaatgcattatacttaaactaagggaattcagccaatgtttatccaataaaagacgcagctcttttaatttattataaatgaataaaaataatgtacaattcaagatgcttaggaaccaaaccagtaaacctacagaaactatgaaactaattaataataaagacattaatgagttacaaaacaatgggncttgaaaaatatgcaacttcatttccttgaaacagaatacataaaagtataaaccaaaatgtaaacactttgcaaaaactaattaagaaacacataaaatttatgaaaacrtagtcacatttcaggaatataatgtttgctatgactgtatatatagtacgtgtgtgtttgtacatattcaaatatatatatacctatttgctaatttgttatattaataatatgaaagaggaagaataataccaaaaaagtatatgaagtggaaaaaattttaaatgacacattataaggaaaataaaaattgaagacaataatttcagtaaatggtaagagatttctatgtacaaacgtagtctaaaatgtggacaatgctttggatactttatgagataatatgaa

SEQ ID NO: 445379 - DNA, 525 bp, Homo sapiens
atgataatgaagaagaaaaagatagagatgatggtgataagaataataacaatgttagaagtcttacaatgtaccaagcacaaggaaattttgtttcaagaaggacaaaacaaacctcacaattttttgggaaaggtggtggcagcggcagagagaatatcctaagagacaagaaagtgtaagaaatcaagtgtggtccaagtttactgaggaggttttagaatagacagaaagatctgtgtaacagaaaatgtctttcactcatactcctctcccagtatgtctccattaatcctatcctgaaagaagatctttccatgaaatgcaagtcaaattgagaactctgtatcactatgtgatgtattgtgtattcatgtaatatttggtygcaaataatcaacaaggagcttaatcacacagggtaaagcaatggaatggtgcatggttaggaaacacagttagacctcaggagggacagaaaccagaaattttaatgtgaagaatgtgttattatctccttatttt

SEQ ID NO: 445380 - DNA, 605 bp, Homo sapiens
taaaagtcaaaaagattaaagatctttaaagtgaaaaaaattataagttgactaaggacttctgctctctataaaacatcattaacaaaataaaagataagcttcatattggaagaaaatgtttcatattttatatatataataaataacctattttcagattaaaaatcttaaaactcaatagtaaacatataaactacctgaccttaacaaaggcaatacaaatggtgaaattatttaaacagactttttaccrgaaaatatatataaaaagaaaattaggatttgcaaaagtgttcagcatgattagtgataagggaaaggtatacaaaaactacaatgagattgcactatatacctattagaatgttcaaaataaagacattctcatcattatcattattcagttgacaataccaagttctagagagggtgcagagcaactttcaatctcataaattgctggtgagaaagcaaaatgacacaggtaattaaaccaaccacttgtcagttttaaaataatattctctgcatgtgttccagtaaccacactcctgtttttaccccaaagtgaaaatacatctcttttaaatgactatttacaa

SEQ ID NO: 445381 - DNA, 630 bp, Homo sapiens
ttgggtttgtttacaagagatagtccaatgacaaatatagaaagctcaggattcagggtgctttgatttacactatcacctagtaactgagtgatcttgggcaagttgctgctctaagattgatttcctcatgggtaaaacgagcatacctgtctcaaagggttgatgatcaactgagataatacatttaaagtactkagcacggtgcctagtgaacagaattctatacctgagtcaatgtttgtcattgctgctcctgctgctatttctataatatattgtttaaatcactttattgtgaaatagataataatcataattagaagcccttgtaaaaaacaaaacaaaacaaaaaaacgaacaaaaagctatgtggtgcccttcgtgcagcaaaacaaaaacaaacaaaaactgaacaacaacagactttctatcacttacaatggtttctttctctttcttgttctgaaaatttcaccagctagaaatccttttgaatagcaagtcttcgcttttcaaataagatatctttctgaatggagagattattggccttcaatactcctataaattaaatcaatcagctttctttcctttgcagtcttgttgagattaacatcactgagaaat

SEQ ID NO: 445382 - DNA, 523 bp, Homo sapiens
tgtgttagactgattttctcaatgaaagtggagaaaatatcagaggaagcataggagatttggggatcaaagaaaagacatgaaataatcaaattaggtagtaattgccaaaccttttctgtaagggaccagatggcaaatgttttcagttttgcgggccatgcaatctctgttgcaactcctcaactctgccattgtagggtgtgattaattttatgtcaactttactgggctaagagattcccaggcagctggtaaaacattatttctgggtgtctttgtgaggatgtttccagaagagattagcatttrgattagtgagatgattaaagcagatggccctccacagtgtgagaaagcccaaatagataaaaatgcagaagtgataactcagtggggttttaatttgcatatctctgatgattagatttttaagcgtttctttatgtaccttttggccatttctttatcttcttctgagaaatgcctattcagatctttcacctatttttcaattgggtta

SEQ ID NO: 445383 - DNA, 523 bp, Homo sapiens
tgtgttagactgattttctcaatgaaagtggagaaaatatcagaggaagcataggagatttggggatcaaagaaaagacatgaaataatcaaattaggtagtaattgccaaaccttttctgtaagggaccagatggcaaatgttttcagttttgcgggccatgcaatctctgttgcaactcctcaactctgccattgtagggtgtgattaattttatgtcaactttactgggctaagagattcccaggcagctggtaaaacattatttctgggtgtctttgtgaggatgtttccagaagagattagcatttagattagtgagatgattaaagcagatggccctccacagtgtgagaaagcccaaatagataaaaatgcagaagtgataactcagtggggttttaatttgcatatctctgatgattagwtttttaagcgtttctttatgtaccttttggccatttctttatcttcttctgagaaatgcctattcagatctttcacctatttttcaattgggtta

SEQ ID NO: 445384 - DNA, 523 bp, Homo sapiens
tgtgttagactgattttctcaatgaaagtggagaaaatatcagaggaagcataggagatttggggatcaaagaaaagacatgaaataatcaaattaggtagtaattgccaaaccttttctgtaagggaccagatggcaaatgttttcagttttgcgggccatgcaatctctgttgcaactcctcaactctgccattgtagggtgtgattaattttatgtcaactttactgggctaagagattcccaggcagctggtaaaacattatttctgggtgtctttgtgaggatgtttccagaagagattagcatttagattagtgagatgattaaagcagatggccctccacagtgtgagaaagcccaaatagataaaaatgcagaagtgataactcagtggggttttaatttgcatatctctgatgattagatttttaagcrtttctttatgtaccttttggccatttctttatcttcttctgagaaatgcctattcagatctttcacctatttttcaattgggtta

SEQ ID NO: 445385 - DNA, 500 bp, Homo sapiens
ttaattgcatggcttttatttgaatgggagtgaagccatcttcatgggaaatttaatatcttgtcttattttcattaaaaaatttatcaggaagattttattatgccattaaaagttatttgagggccaagtgtggtggctcatgcatgtaatcccagcacttggggaggccaaggcaggaggatcattcragctcaggagttcaagaccatcctgggcatatgcctctagtcccagttactagggagactgaggcaggaggatcttttgagtctggaagatcaaggctgcagtgagctgtgatcacaccactgtagtccggccagggtgacagagcaagactctgtctcaaaaataaataaataaataaataaataaatgtcacctgagacttctggtttcagctctcagtaaagacttctcacatgtaaaagagtctcacatgtaaaaagtccactccccacaataaaaatctggacaaactaaaaatgaactgaaaa

SEQ ID NO: 445386 - DNA, 560 bp, Homo sapiens
tcacgggcttgtgaaagaactttckggcctttcaaattcaatctctttctctgtcatttttctcagctagtgaaagtaaatgcttttttttatttaaaaaatttgtgggtacatattaggtgtatatatttatgaagtatgtgagatattttgatacaggcatgcaatatttaatagtcacatcagggtaaatggtgtaaccatcacctcaagcatttatcctttttgttacaaacaattcagtaaactctttaagttatcttaaagtgtacatttaaatgatttctatagtcgtcctgtcttgctagcaaaaattcagtattattcattctttctaacaatcttctgtacccattaatcaccctacttctccttcaccctcccacccactacctttctcagcatctggtaaccatccttctactatcttcatgagttcaattgttttgatttttagataccacatgtaagtgagaatatacgaggtttgtcttctgtatctggcttatttcacttaacatgacaacctccagttctatccatgctattgcaaatggcag

SEQ ID NO: 445387 - DNA, 609 bp, Homo sapiens
tctggtgttgatgacagcttttgtttttctggaaaagcctttattactcattcatgtttgaaggatatgtttgccaaatatactattctaaggtaaaaaggttttttccttcacacttttattatgtcatgacactctcttctggactgtaaaaattccactgaaaagtctgcacccagacataatggaactttattggatggtgttttttcttttctctttctgcttgtaggatcctttctttatctttgatctttgggagtttgcttattaaagtgccttgaggtaggcttctttgtgttaaagtgtcttgatattctataaccgtcttgtacttgaatgctgatatctttctctrggtttgggaagttctctgatattatctctttgaataaattttctacccctatctctttctctacctcctctctatggccaataattcttagatgttctccgtcaaggaatttcaggtatttgaaaggacttgggtgttgtgatctaagctgtacctgcatcagtgggcaatccaagcccacgagtcttgcagactcatggaggtactgccttaatggtcttgcttaagtctggaagaattccatggattac

SEQ ID NO: 445388 - DNA, 593 bp, Homo sapiens
tagtaagcatattataactgtgattccagaattaatgaaatctgttagctgcttctgcaatagaatttgtattttaaaatctctttaaaatgcagcagtgatgttcaatggtgttgacaggatcctgcagcttctgtaacatcatagctaaacttgataaaacataaaacataattatagtcttatttttcactctgcctattattcaggcttatatgctttcctgaactaagagtttaatgttttttcatatatatattttatatatatatagacagagagagagagagagagacagagtctcgctctgtaacacaggctggagtcactcaggctggagtgcagtggcgtgatcttggctcactgcagcccccacctcctgggttcaagcaactctcctgggtcagcctcccgagcagytgggactacaggcatgcaccaccacgcctggctaatttttgtatttttagtaaagacggggtttcaccaagttggccaggatggtcttgatctgacttcgtgatctgcccgccttggcctcccaaagtgctgggattacaggcatgagccatcgtgcccaggcttaaaataaa

SEQ ID NO: 445389 - DNA, 574 bp, Homo sapiens
tatatgataaaataatgagctatgtgttaatatgcaaaaaacccttaagatattattaaagaggaaagattcagaggaatgtgcatagaatattctcatttatgcagtaaattgatrtaagtggatattcttgtgcacttaaaaatctaaaaaaatacagtaaatagtaatagtggttatatcgcaaaaaggataccagatgacaaccgaaatgtatttttaatttacatctttattattgtgggaataggtattattataagcagatattttaaaaataaaagcatatatatgacatattctcatagtgatataagcaatatgtattatatattatgtaacataaatcatttaataaaatatataatatttatagtatctattccatttacttttttggaatacatgcataagctttattttttggacaaatttatcaaattatagctttgagttaagtatggcctaatatttgctaaaagttaaatgtattgaatgtctaaagtccactgaacactgtatatacatgccactagaaaccatctctctaataatcactgttatttgtcagaat

SEQ ID NO: 445390 - DNA, 574 bp, Homo sapiens
tatatgataaaataatgagctatgtgttaatatgcaaaaaacccttaagatattattaaagaggaaagattcagaggaatgtgcatagaatattctcatttatgcagtaaattgatataagtggatattcttgtgcacttaaaaatctaaaaaaatacagtaaatagtaatagtggtyatatcgcaaaaaggataccagatgacaaccgaaatgtatttttaatttacatctttattattgtgggaataggtattattataagcagatattttaaaaataaaagcatatatatgacatattctcatagtgatataagcaatatgtattatatattatgtaacataaatcatttaataaaatatataatatttatagtatctattccatttacttttttggaatacatgcataagctttattttttggacaaatttatcaaattatagctttgagttaagtatggcctaatatttgctaaaagttaaatgtattgaatgtctaaagtccactgaacactgtatatacatgccactagaaaccatctctctaataatcactgttatttgtcagaat

SEQ ID NO: 445391 - DNA, 574 bp, Homo sapiens
tatatgataaaataatgagctatgtgttaatatgcaaaaaacccttaagatattattaaagaggaaagattcagaggaatgtgcatagaatattctcatttatgcagtaaattgatataagtggatattcttgtgcacttaaaaatctaaaaaaatacagtaaatagtaatagtggttatatcgcaaaaaggataccagatgacaaccraaatgtatttttaatttacatctttattattgtgggaataggtattattataagcagatattttaaaaataaaagcatatatatgacatattctcatagtgatataagcaatatgtattatatattatgtaacataaatcatttaataaaatatataatatttatagtatctattccatttacttttttggaatacatgcataagctttattttttggacaaatttatcaaattatagctttgagttaagtatggcctaatatttgctaaaagttaaatgtattgaatgtctaaagtccactgaacactgtatatacatgccactagaaaccatctctctaataatcactgttatttgtcagaat

SEQ ID NO: 445392 - DNA, 574 bp, Homo sapiens
tatatgataaaataatgagctatgtgttaatatgcaaaaaacccttaagatattattaaagaggaaagattcagaggaatgtgcatagaatattctcatttatgcagtaaattgatataagtggatattcttgtgcacttaaaaatctaaaaaaatacagtaaatagtaatagtggttatatcgcaaaaaggataccagatgacaaccgaaatgtatttttaatttacatctttattattgtgggaataggtattattataagcagatattttaaaaataaaagcatatatatgacatattctcatagtgatataagcaatatgtattatatattatgtaacataaatcatttaataaaatatataatatttatagtatctattccatttacttttttggaatacatgcataagctttattttttggacaaatttatcaaattatagctttgagttaagyatggcctaatatttgctaaaagttaaatgtattgaatgtctaaagtccactgaacactgtatatacatgccactagaaaccatctctctaataatcactgttatttgtcagaat

SEQ ID NO: 445393 - DNA, 397 bp, Homo sapiens
acacttcgcttcaattttcagattttattgtcttctcataagaaataatagtatagttgtttccccttatctatggagaaaatgttccagccccccagtgaatgcctgaacttgcatatagcaccaaattctatatatactatattttttcatcaaccgtacatatctatgataaagtttcacttttcacttaaggtggtgaccacaccactgcactccagcctaggagtcagagcaagacctggtctcaaataaataaataaataaataaataaataaataaataaawagccagcagctttttacagaaacttggcaattttacagaaacttttgcaaattcaaattgccagcatcactactcttgcacttggggcccttattaagtaaaataaga

SEQ ID NO: 445394 - DNA, 539 bp, Homo sapiens
actttttggcaagtgtttagaactcttgcctttaatgataagacgaatataaacttcctttaatyttcattttaaacttggcttttgagtgtttcattaagcagcttctgtatttgtagaagacagcatacaaattggattattgggaacataatttgaaattaaagactgaattgtgccctcccctactgttagctggagccctgagcctggtatcttagaatttgactgtctttggaggtagagtctttaaagcggtaactgagttaaaatgagattattagggtgcggtccaatgcaatctgatggctgtcctataagaaaagattaggatataccatgtgaggacacaggtaggaagcaagtggtcatctgtaaaccaaagaaagaggtcttaggaaaaaccaaacctgccaacaccttgactttgcacctgaagtttccagaactgtgagaaataaatttctggtttttaagccacctagtctatagtatttgttatggtagccttagcaaactaacatacttcggttcaaatc

SEQ ID NO: 445395 - DNA, 493 bp, Homo sapiens
aatactcagagtattttgttttacaagaacgcgattactatgactggtatcccatgtgatgtgacttcagacccagtttcttaatggcatcacatatttagtgaaaattagaagaaaaatgggtgaatatataaagtattagacaatcataaaatgtaatagcataaaaccatttaaattatataaaggagatatagccctagatgttcagaatatattttccaataagaccactgttataaaactgtacatgaaattttatttcataatacctatgtgtatatgaatatgtatgtgcctatgcatgcatacataggcacaaattttttgtgcgtgcatatatacgtatacatatatgtggatatatttatgaatatgggtttatacctacatgtgaatgtgtgcayatgtgcatgtcccaaagtgtacagcgtatgtacattcatgtgcattcacacataaataggcttacatgaaaaacttatccaccaca

SEQ ID NO: 445396 - DNA, 616 bp, Homo sapiens
atatacatataaaaaaatgatggcgatgatagtgaacatatttaaatgaaatttttgtttcactcaaaagttttgatttcaaaattttatttttaaacaaattaagcttttctgcccttaagttttaaaattatgtttaaatggaaagttatattaatgtaatttttgatattactgagtcatcctttggtattcatttttctatggctcttattcatataatagatgctatagctttccacaccctttcaatatttacctttggcactaatatttgtgttaaaaagttcttttcttcttactcaaaagttgatctagaaataagtatacttctccatagtctcctgactcttttattattattattattattatgttactttaagttttagggtacatgtgcacaatgtgcaggttagttacatatgtatacatgtgccrtgctggtgtgctgcacccaccaactcgtcatttagcattaggtatatctcctgactcttaagcagttttcttaaattttgtgactgctatttctcttctctcagcatgagacaaagccagacatttgatatatgtatataaatatatcaaactaaattcaaagacgatatttact

SEQ ID NO: 445397 - DNA, 576 bp, Homo sapiens
aataaaaacatattccacatacatagatgtacagtagaattgaaaggaatataagtaagatgttgcaggcagaataatggcccccaaagacatctgtgtactaatccttacaggtcaatccttgtatgttaccttgtaaagctaaaatgacttggaaggtattattaaaataagggttttgaggtaaagacattgttctgggctacctgagtgagcacagtttaatcacaaaaatccttataagtaaaagatagagacatgaggaaggtcagagtctgagagagatttargctttgaacatggaagaaagggccatgagccaagaaaagttgatggcctctagaagctggcaacgggagggaaacagatttgtctttaaagccttcagaaggaactcagctctactaacaccctgatagtgcattgactcatgtcattgtaatgtaattcagcagcaataggtgtgtgtatatgtagctttaatttgatgagtgaataaaaataaagtactattcataatgcttgaaaacaagacaaataaccctactgataaaaagactaatttatgatgacatt

SEQ ID NO: 445398 - DNA, 456 bp, Homo sapiens
agtcaacctaaacataattctgaccagtgtatcaaattagtttgtcatatctggagaaaaaaaataaactgtagaaatgtcctcccgctattcaacattggtcttacattctccctagcagtcaaattatatgatctaatataattcatagtgcctagaccaacaaaatataatacattattttatacaagattgcctttttttaagaaagatgatwtttcctcattctacttctctaatatagtaggaaatgttatttcaagaaactttaagtgacgtcagtaaatgaaaaaggtaataatacatacagttctgaaatttaagtaataaaagagacttcaaataactgctgatttttaaatatccatttatagcactaccccttatgtacgctcacgactcatataaagaaataaaagaattgcaatggcctgtgtatcagacaccactaatgta

SEQ ID NO: 445399 - DNA, 601 bp, Homo sapiens
gtccctcacttctggtgagggtttctgtgctgcattgtaacatgacagataaggtcagagaagtgaacaaatgtaaagaaagaggaccgaacagaaggaggaatcttgctttttaacaatgcacttttatggaaattaatctgctcctaagagaactaatcttttctctccagagtaagaactcacttactgtaagaacacaccaagccactcatgcaggattcacctccatgattcaaataccttccactaggccccacctcccaacaccaccaggttgggaattaaatttgaacatgagctttggygtggcaaactcaaaccacagcagatgagataggaagaaaactctgctagagtgtttgtaagtttgataaaattacagctactatagtataacccaaatgaggtgaacggaattgttctttgttcgtgatctcagttgatgagccaataatcacaaaaagaaaatatttctgatgtgtagggtagagttataagcatagggatcatatgaggtctctagacagttttaatttctgaaaattaataggatatggctctaattttgctaagcaaaaaaagaaaaaaactttgtgaa

SEQ ID NO: 445400 - DNA, 405 bp, Homo sapiens
tggtgagggcagcagatcagtagatgattgctattaaaaagacagtttattacagttcccaagaggaaggtaagcaaggtatggtcacaggggagaacaccaaactsagttgcaggcagagagggaaagctaggcaaactgcttgaaagtcttatgatttttgtgggaagaaatgggggaggcagtgtaaacaggataatgaggtttaagattggatagtttaaataatttcaccagtatctcaggtataagggatgcctctaggtgtctgatgcctagggaagggatctgatgtcaaggaagggaactagtgtcacaagtgtaatagcccaataaagctagtgggtggggagtatgggctctgaattcgttagtttgcatatgaagcacaggcacacaggagaa

SEQ ID NO: 445401 - DNA, 462 bp, Homo sapiens
gcaatgtagcttcacgatttcagcatacctctttgatgttctcacttcttcaaaacctttgcctctgtgttcctcatttcatgagctttctaatgccttaaaatagacttttgttttatattttataaatccaaaattgttatgtttagcagcagtgttttcagcattttatgtggaagatcatatgtagatgcagcagttctaatttattttttttctagccaatcataatgattagattttctaaagacaatcataagtaygagaattcaatacagagaagaaggggctggggaatctttagatctgagaataggttttatattcactttccccagctctctaatggatgccccccaaccttctctctttctcataaatgcttagagtaatgcccattatttccatttattcttttattctggaaaagtgtttctgggttctgcttatatttgttattct

SEQ ID NO: 445402 - DNA, 536 bp, Homo sapiens
gtcagtgggctggggaaggcagatccacccttaatctggtgggtacagtctaatagcttccagcaaacataaaccaggcagaaaaacgtgaaaaggagagacaggcctagccttccagcctatgtctttctcccatgctggatgcttcctgccctggaatatcagactccaagttcttagacttctagacttggactggctctccttgctcctcagcttgcaggcagcctattataggacctattgatcatgtaagttaatacttaataaattccyatatatatatatatatatatatatatatatatatatatatatatatgagttctgtccttctaagagaaacctgactaatacacacgatttctactttacatttttcccacaaaatatcacatttttcactcatgtctgcattagaagctttattcccttatttattgagttatgttatttcttcatattctatattgattgtgaagcatatgatagatatttcattcttataaaggattaattgcaaattaaggtatatt

SEQ ID NO: 445403 - DNA, 535 bp, Homo sapiens
gtgtaagaaattataaaagtattaatttggggaactgataaatgtccatgaaatcttcacaatttatgttcttctgctgcagttctggccgtttcctccattcggggtccctgacttcccacaacacctgttggtttggacttcactcaaagaattctgataagtaatttagctaatataaatgattaaataaaatgcycaaatgaggcacacactgtcttcaatacacagagcccaataagattctgggtctcctttttggtggtggaggcaaaaacactgcaatacttttgttgactactgaaaagattgggtattatgaatctgcccatataatgccaagaaattttacttggttagtagtcatctgaatttggctggggtttatcaaccattctttctagtgcagctatgttaacactgcagccagttccactgagactgaaacttcttaattgctaacccagtgaatagtattcctatagtaaacactttgcatgtcaacaggcagaagcactcgtgttaagtcctaaca

SEQ ID NO: 445404 - DNA, 627 bp, Homo sapiens
acatacaacggaatttgtacagtgactgaaatacatctgagcaatgttctgactaaagctgcacgaaattacaaagatttaagtatggtcaatgaagaacttggaaacaaaacctgcaaaagtaatttaaaattatctgtcattaaatctgttgaaattcataatctcaagtaatatcccttgatttactttcttttatatatgtgtttgccattgtaattcaagacttttactcaaaaattgtagaaagaaattctactcagtatgtcttccacacatcatctaaaatctgtcaaaaaatctaggaatagtagtgtctgaacttgtgatgacttgaatgtagaaaatgtgtcagagtcacacagtacttttgcgtatgttatctgatatgatactcgcagtaaccttataaagtagctactattgtcatcatttttgcacttcaggaatattaagctgcattactttcattttctaaatyaaaaagtaattataaaaatcaagctaatgaagacctataaaatcaggtcatataagttttagataaaggactaatacaattctgcgaacagaaacaaaagtaatatttaacacttggccacagtttgtcaacaacctacataatta

SEQ ID NO: 445405 - DNA, 637 bp, Homo sapiens
attaaaatgaaatcttcacaatttatgttcctctgccatggctccagctggtccctccatttgagatccctgacttcccgcaacaattcttaacattcttaatattgctgatagatttctgtgtcactattgatagatgtttatcagtattattcattttttaagaacgtataatttgatttgattgatttttctagtgtatatctattttcaatgtattaattactaatctgcacattatgactaacttcccatctgcttgcttcaggcttagttatagtaccttaaggtgaagtttagaatacttatttaaactactttttttgtaatacaagattttttaaaattttattttaggctcagggtttgatatgcaggtttgttatatagataaacttgtgtcatgggggtttgtagtatacmttacttcattaccaaggtacgaagccttgtaactcaaaagttattttgtctgctcctctctatcctcccaccttctgccctcaggtaggcctccatgtctgttgttcctctttgtgtgtatatgtgtttgtgtgtgtgtgtgtgtcctcatcatttagcttccacttacaaatgggaacatgcagtatttgattttctgtttctgcattagttt

SEQ ID NO: 445406 - DNA, 537 bp, Homo sapiens
ccaacaacataataatgcaaaggattatttgacactaccatgaacaactctatgctcacaaactagaaaatctagaggaactgaataaatttctggtaacatatgcacacacacagcttgaatcaggaagaaacaaattctgaacaaaccaataataatcagtgagactgaattcataattaaaaaaagaaaactgccaagaacaamaaaaaaaaaatctcggggctagagagattccagattcacagttgaattctacaaaacattcaaagaatagttggtatcaattccagtaaaactattccaaaagattgagaagaatcttaaatatcctccctaagttattttacaaagccattattaccctgatatcaaagccaggaaagggcataaaaaatgaaaactacagacaaatattcctgatgaattatagatgcaaaaatcctgaaaaaatactaccaaacctaatccaacagtatatcaaaaagataattctccatgataaattgggtttcatcccagggatgcaggaatgtt

SEQ ID NO: 445407 - DNA, 537 bp, Homo sapiens
ccaacaacataataatgcaaaggattatttgacactaccatgaacaactctatgctcacaaactagaaaatctagaggaactgaataaatttctggtaacatatgcacacacacagcttgaatcaggaagaaacaaattctgaacaaaccaataataatcagtgagactgaattcataattaaaaaaagaaaactgccaagaacaacaaaaaaaaaatctcggggctagagagattccagattcacagttgaattctacaaaacattcaaagaatagttggtatcaattccagtaaaactattccaaaagattgagaagaatcttaaatatcctccctaagttattttacaaagccattattaccctgataycaaagccaggaaagggcataaaaaatgaaaactacagacaaatattcctgatgaattatagatgcaaaaatcctgaaaaaatactaccaaacctaatccaacagtatatcaaaaagataattctccatgataaattgggtttcatcccagggatgcaggaatgtt

SEQ ID NO: 445408 - DNA, 482 bp, Homo sapiens
aaacaatttaagaaagttgattattaagctaatcaatgaggcaccagagaaaggtgacatccaatttaaaaaaataaaaataaaaagatacaacaagggcaggtgtggtagcttataactgtaatcccaacactttgggaggccaaggtgggcagatcacctgaggtcaggagttcgagaccagcctggccaacatggtgaaaccctgtctctactaaaaatgcacataaaaaaaaaaaatcgccaggcatggtcgtgggtgcctgtagtcccagctactcaggaggctgaggcaagagaattgcttgaacyggggagcaaaggttgcaatgagccgagatcatgtcactgcactctggcctgggtgacaaagtgagactgtgtcaaaaaaaaaaaaaaaaagatacaacatatgaggggagaaatcttcagtgaaatagatagcataaataaaaataatgacaacttcaggaaataaagga

SEQ ID NO: 445409 - DNA, 561 bp, Homo sapiens
ctgtgcagcattaacaaaaaagcagagcactggcagaggcagggcttactggctctgtgccagccaaggctaagtctgcaatagcagtaggctgggatgggggaagtagtgcactcctgcatgctgaaggggcaaggaaagcaaaacctgccatgcagacatgcaccagaaaaacgacttggggatttgccatgggctcatgagaagctgcactatggcaagggaatgtgcaggctggtgcacacctgtaggggccaccttgctggagctttccatggggcaggcatggtccactggtgcagaagctatggtgtgggctcgcagsgcacctgagactgtcttataagcaggcatggccaggatggggccccaggaggccagcagaccaaggagtgctcaggtgggactagccccatctgatgtgcaaggctgccctgcagagatcaggtccaatggtttccctagggctaaagcctcttgtgggagcaagttgagcctagaggaatgaccatctctggccctgctccacgacagatgctcttgcactaaaccccctgggct

SEQ ID NO: 445410 - DNA, 605 bp, Homo sapiens
aagctcctgagtctcgtgcatgcctgagtggatgctttgccaagactccatgtagctctctgtgtcagactgaaggcccacgtggagtgggttcacaaggggaccacctgacccaaagtttgcaaagctccatagaagaagtgtggtttcctgtggtcacatgttcactcaccacttccctgggtgagagagkttcccttggctctgtgtcactcccgagtgggccatcgtcctgccttgcttttctctgttctccatggatcaagttgtttgaatagtcccaatgcgagtacctgaatattttaattgaaggtgctgtatttacctgcccctttggttcctctccgtgagaggcacacacattagcaacttctagatggccatcttggccactcctaattccacattttctttatccagtctaccattggtgggtatttggtttgattccatgtctttgctattgtgaatagtcctgcaatgaacacatgtgtgcatgcgtgtttatgatagaatgatttatgtacttttgggtatatacccagtaatgggatggctgagtggaatggtattgctgtttttaggtttttgagcaatcaccacac

SEQ ID NO: 445411 - DNA, 593 bp, Homo sapiens
ctacaatttgtaatccaaatatacagttttaaaatttagttaaaattggatgggcatgttatagtaaaaataaatatcccrttagctgaatggcaaactgattggatctgcatagttatctgaattactatatcagagctgaaattttataggtctagggtactggaagaacaagttacgtgaagaattgtttgatttagatagatacataaaaacaaaaatacaaggcatttgttttagccatttttgttgaaacttatattgtatatgctaaagtaaaatttgttattaattgatataaatatccccagtgtgtatgtattagaaaataattgatacctgacccttcttttcatccaacaacttccagtctatatgttaattacaactaaaaggcagtactgcaaggaactatgactcatcctatatctatcattttctgtcttttcaagtttcttgaatatatttgacttgaaatataccctccttccaattcatatgttgaattcctaacccttaagatcacattatgactgtatttggagaaaatccttaaatggataaaatgaagtcagaatggttcctaagccaat

SEQ ID NO: 445412 - DNA, 539 bp, Homo sapiens
acaattgccaatcctaaactaagattacattagtacagtgtttgaaaatgggtcaggaaatttagagtggtaacaggccttagattttgaaatttgctgtttagcttctgtattcagcttctcctgccaccacctggaatgaagtagtcccttttatatccaaaagaagtgaaggaataaagttcaaccagacttcattgaaaaattgcatacatatgcctatgaaattcagagacagatgaagtttctcaaacactgtctccggcaatcttggcaaataagagtaaagaaaaagaacatattccacttggaaacctaaggtgtaacataaacatccayctgcctaaagtagtttatagaatgcctctgccaatggaatggtcaaggtaaccttggtgtttattctagttcaatagtttctggctcttcagcaaaacagaagatgaggcagggatcaaaattcagaatgctgaggcaaacattccatgaggcttactctgaattctccctggagaaacaccacctgtccatgtctgaat

SEQ ID NO: 445413 - DNA, 565 bp, Homo sapiens
ggttggtgtcctgtgcctgtgatttttccattctgatgttgcaagctgctagtggctgtaacrtgctgggatctaacaggtagtggccttgttcctacagattcactagacagtagtctagtgggaactccatgtgagggctccaactcacatttcccctcagcattgccctaggagcagctttagaaggttctccatccctgcagcaggcttctgcctggccacagaggcttttctatatagcctgtgaattcttagtggaaactatcaagccttcttcactcttgcattttatgtatctgcaggcttaacatcatatggaaacttccaaggctcattgcttgtgccctgtggagtggtggcccaagatatatctgggctcctttgagcaaaggctggagatggagtggtcagtgtgcagagaacagtgtcctgaggatgcacagagaagtggagccctggagtggctccccaaatcatttagtgcttctagtcctctgagcctgtgatgagaggggctgcctcaaagatttctaaaatgcctttgaggtatttttcccattgt

SEQ ID NO: 445414 - DNA, 524 bp, Homo sapiens
acaggtcacctatgtgcttgttaaatggtaggtattttttaaaataaaatagataaaaatatttttaaggaaatcaatagcagattcatttgttaagtaacatttttgaaccctagcacaagaattgaaacaatgagtaaaagaaaaaaggagggaatgtttgtgttaatataagaaaaacctcaatcactttcaagatggagctgtgtattcataagggtttttgagtcattaccacttcaattatttaagtatagttggaattgtatgtatagtccaagggcttaaatatctgtggaacaaattccatataagtacttagataacctttcataatattaattttatatacagcttgaaagtaacttgtaaatcagagttaaagctagggtaagacaaagatataacaagtttattatattcgttactggttttaaatacacaaagtaattgcttataytgaaaagaattgatttgatttctatagcagaatttcttgtgctttttaaagattacgttttgta

SEQ ID NO: 445415 - DNA, 591 bp, Homo sapiens
ggctgtatgagggtttgttaaaataatgtgcataatacagaatattttagcaactttcacttggtatgtacttaaaatttttctaaatataaaacaaataagttatcagaaatatgcaaatcagatttaggtagccaacatgaaaccatcatttagtgactaacagttatgatttggagttatgatacacaacaaacagttacgaattactaagtacrtgtttacactcttcatgcagacttaaggcaccctcaccattagtgaagttccttcatccttaaaagtggaggttttttattagggtatttaacactagacaaatcttgtacttagtattcattgataaattacttaattaaggaacatgagaatgctagatccatgagggaaaagttgagaagaaagaatacataaccatgactataactcacaacagcttcggtttctctataataaaatacaatcaaaatctcagggacttaaaacaataaaaatttaatcaggctacatatctattaagagttggaatgttgcaaagaggaaattaatcaaaacccaacccaatgaagtctgtagtccaataatatgtca

SEQ ID NO: 445416 - DNA, 563 bp, Homo sapiens
cagtagcagtctggttgaaagaggcrtattgaagtaatgtttgcttagctctttacataagcctgagaaaatgccagctgtctagatcaaaaaacaggatgcagattgtgaagaggttaaatctcccccagccccttggcatgttggggaaactaaactccctgggatgctctgccctcaggactctccatgtctcgctccctacctggggcacttggtttatgaggaccacattctctaagatggactcactctccctccctacttcttgcccagtgttttcttgtcatgaaaaagaggtgcttgtacgagtgaggctacctcaaaatgcagtgtccatgcagtaaaaagatgattcctagtgttttattcttactcttctgaaagacccaatgtctcttagctaaaattagatggtgtggggaagattaaagtgccttccaaccttccataattaccacagatttgttctgttccaagcaacaaagccagacaccaaatacgtttctcgattcttctccattggctgtatagtaagtagaaaatgtcttgatattttggac

SEQ ID NO: 445417 - DNA, 563 bp, Homo sapiens
cagtagcagtctggttgaaagaggcatattgaagtaatgtttgcttagctctttacataagcctgagaaaatgccagctgtctagatcaaaaaacaggatgcagattgtgaagaggttaaatctcccccagccccttggcatgttggggaaactaaactccctgggatgctctgccctcaggactctccatgtctcgctccctacctggggcacttggtttatgaggaccacattctctaagatggactcactctccctccctacttcttgcccagtgttttcttgtcatgaaaaagaggtgcttgtacgagtgaggctacctcaaaatgcagtgtccatgcagtaaaaagatgattcctagtgttttattcttactcttctgaaagacccaatgtctcttagctaaaattagatggtgtggggaagattaaagtgccttccaaccttccataattaccacagatttgttctgttccaagcaacaaagccagacaccaaatacgtttctcgattcttctccattggcygtatagtaagtagaaaatgtcttgatattttggac

SEQ ID NO: 445418 - DNA, 571 bp, Homo sapiens
tttcagtttttaaaatccttttgatactaatttcttattcagttgcattatgctaaaaatgacctgtacaattttatagaatattttagaagtttttattttatattgttctgtagaactttttcttccttttctgggccagacatggtggctcatgcctcggcactttgggaggccgaggtgggcggatcacctgaggtcgggagtttgagaccagcctgaccaacatggagaaaccccgtctctactaaaaatacaaaattagctgggcatgatggtgcatgcctgtaatcgcaggagactgaggcaggagaatcgctcgaactcgggaggcagaggttgcagtgagttgagatcacgccattgcactccagcctggrcaacaagagtgaaactcgcttttctttcttttcaatattaggtcggtttttttaaagtttactagatatttttaaaggtgtgtattctctgtaccttgatacagtccatatatgtctattaaatcatgtttattaaatttatgatttgattccgctataaatccatactcatttttgccttgacctatcag

SEQ ID NO: 445419 - DNA, 624 bp, Homo sapiens
tttacattgtgttatgcagtataactagtctagaaatgatttaaagtttataggacgatatacataggttataggcaaatactataccattttatattaagaacttcagaatatgcagatgttgttacccctgggggagatggtggaatgaaacctccatggttactgaggaacaactgtatatatatatttttttttttgagacagagtttcactcttatggcccaggctggagtgcagtggcatgatcttggctcactacaaccttcacctcctgggttcaagcgattctcctgcctcagcctcccgagtagctgggattacaggcacccgccaccaagcctggctaattttttgtagagacagagtttcgccatgttgggtacgctggtctcaaactcctgacctcaggtgatctgcccccctcggcctcccaaagtgctgggattacaggcatgagccaccgtgcctggccaacaactgtattcttagcatggattttgagcagacaaggacaatcttaattctcaggctgctgatcttgaactacaagttggcttaacattgtagactaagctaaggctgactgagacaaatttamgtattagttggcagctgtaatcg

SEQ ID NO: 445420 - DNA, 565 bp, Homo sapiens
aggtcaaaaaacctaattttctgatgaaattttctatatgaaaccacttacagtttttatcctgatgattaaccagaaagtagcaaataggttaagacccatttctagtaatagttgcatgtgttggtcaaactgcattactaaggtccctggaggaaattagggagttagagtcagaaatgtttttgagtcaatttttgagaaggctgctctaatgcttagcaaatttaaataattgtgaatgatgcagcctgtgaaaaaaacatcaartcttttgataattttgagtgcttatgagttaaaaggcacaccattggcagtttggaaatggtaatggagatcaaaaacataacacagtttagtattaaggccataaaggtggagttaacttatcagaatggaaaaagaacactaacttgaagtttcaaaatattggtgtaacaccactgacagcctcaagagggagtcaaagttttaggcagtcaatcttccgtgaaggagcacagctcataccccatgttatggggcctccttattaagagatgaacaactcaaattcagcaga

SEQ ID NO: 445421 - DNA, 616 bp, Homo sapiens
ctcggggagtcagacattttttttttttttacaagcgcccagtagcaagctcatagctatttataaaacacagtttacatggtaatcatgctagagaaatgaaaggtctaaaacccaaagaaccaccttaggtggagtatatcttcctttgccagaggatccaatcagcaaaatcattaatcacacaggcttataactcaaggtgtcatcagggttgcatgtccccaacattagactccacagctttctggatattttccagtgaaacctgttgatttggaccccactcaataaatactgatttgtgaattaacaaatatccaaaaaaatccaaggatgcccaagtgatgcacttagtgtcttcaatacttgagttccatatggttctgggcctccctttttacctgtggggagttgaggggatggcagtttttccttgactgccagaggratagagcattgtaaggcttcccacataatccaaagaaaatttatttggtgaacaggcccctgaatttttgtcagaaactataacctacctctgctggcagaggtttgataacaaactaatcagggttgatgaaactgaggcttctgacttggcaattagtaggtc

SEQ ID NO: 445422 - DNA, 422 bp, Homo sapiens
ctcaatatataatttgatggttagaatttatctggagatgacaaagaaaagcccacatacatacagtcttactatagtyctgaatgcagagtttattaacaatgttaattgcagatggtaagaagacaaaaatatttttcactgtattcaaatactcactgtaaatcagatgtcaataaatacaggcatgtctcaaaggttacaattggaatgaagaagttccaaaagttttcactcactcatgaagtgaatgaagttaatggggatttgcatttaaaaacataataaatgagatgtttattattctctcaaataacatttgaaaaaattatttctacccaatataaatttggtgtaatatataaaacaacaacggatggaaaataattgtagtaacagtttgtgcttaagtaaggtgaatt

SEQ ID NO: 445423 - DNA, 623 bp, Homo sapiens
gaaaaaatttcagaacattttcagtaagttaaccagagggccttgatggtttctttttaagaacatctctactccaaggcacacacgcatcccacagtcattgactttataatggttttttttgacacctaccatatctttcacctagatagtatagattaacattagatttcagttgtagagtttatatataagcattttaatttttcatgtttttacctggtttctttttagagtatgtcaaatttgataaatatacattttgtccatgtttaaaatacactggcaaggcttagacatacgaaatttctttatcactttacaarttctgtcatgtgtttgtttttctatttgtagtttatctggggagatacggataacatttatgatctttacttgctcatatgagaattgctgctgttaaaataccctgaaaacagcatttcaaattaagccaaaaatgatttgccccatgctgttgtcatcttgtgtgagacttaaacaagaaacaactgtgaaataaaagctactaggaatgcccagaaaactgaagtgcaacataaagaaactcaaccatgactggatagtacattttctttccccatgcttctattaaatgaaaa

SEQ ID NO: 445424 - DNA, 613 bp, Homo sapiens
tcaaagatgctaatttttagaacaatatttttccaaatgtttgactactgcagtagccattttcttttctttttttttctttttttctttttttctttytttttttttagagacggagtctcgctctgtcacccaggctggagtggcatgatctcagctcattgcaacctctgcctcatgggttctagcaaattctcctgcctcagcctcctgagtagctgggactacaggtgcacactgccacatcaggctaattttttgtattttagtagagacaggatttcttcatgttgcccaggttggtctcaaactcctgagctcagacaatccacccgcctcccaaagtgctaggattacaggtgtgagccaccactcaccaccagtagctattttcttgacaagttttgctccattttttaggttttgcagcttctgccctgggatattattaatgtagcacctgatggggtagaaaaacaccgaacatatttcaaatcaaccacaatcaatttcaaagtatgagttatctgaagcagtacaaaaaccattattttgtgtaaagtgatttgttccatttccaaaaattttatatttaatagactcaaacaaagtt

SEQ ID NO: 445425 - DNA, 613 bp, Homo sapiens
tcaaagatgctaatttttagaacaatatttttccaaatgtttgactactgcagtagccattttcttttctttttttttctttttttctttttttctttctttttttttagagacggagtctcgctctgtcacccaggctggagtggcatgatctcagctcattgcaacctctgcctcatgggttctagcaaattctcctgcctcagcctcctgagtagctgggactacaggtgcacactgccacatcaggctaattttttgtattttagtagagacaggatttcttcatgttgcccaggttggtctcaaactcctgagctcagacaatccacccgcctcccaaagtgctaggattacaggtgtgagccaccactcaccaccagtagctattttcttgacaagttttgctccattttttaggttttgcagcttctgccctgggatattattaatgtagcacctgatggggtagaaaaacaccgaacatatttcaaatcaaccacaatcaatttcaaagtatgagttatctgaagcagtacaaaaaccattattttgtgtaaartgatttgttccatttccaaaaattttatatttaatagactcaaacaaagtt

SEQ ID NO: 445426 - DNA, 534 bp, Homo sapiens
tattgttttgttgttttctttttcagcctcccactcccctttccacttttcaaattgtgtaattactacttaggcattctaatatatctcttccctgactactcggactgayttaggtactcaaagtgtcccttttcatttcattttatttgttgttagagacagggtcttgctttgtcacccaggttggagtgcagtggtgtgaccacagatcaccacagtcttgaactcctgggctccagtgattcttccacctcagcctcccaattagctaggaatacaggtgcacactactagccttgctattttttaatattattattttttggtagagattgaatcttgctatgttgcccaggaaggtcttgaacacctggtgtcaagcaatgctcaagcctaggcctcccaaagcacagggattacaggggtgaaccactatgtcctgccttattattcttttgtgtttaaaaattattagcactctatgcactcatattgccaacactggatttttagtattggcttaagtatctc

SEQ ID NO: 445427 - DNA, 601 bp, Homo sapiens
tgcacactactagccttgctattttttaatattattattttttggtagagattgaatcttgctatgttgcccaggaaggtcttgaacacctggtgtcaagcaatgctcaagcctaggcctcccaaagcacagggattacaggggtgaaccactatgtcctgccttattattcttttgtgtttaaaaattattagcactctatgcactcatattgccaacactggatttttagtattggcttaagtatctctctccwgacagactgtataggcataaaaataaagacaagataattgctttcttattttttgatgttcaggatttgcttactataaactaggcattcaacaatttattgttttattaagtggaacacatttagttttactattttataattaatatactaatatgcatttatcacataatatgtgctagttatagttatatatgccattaaactttgacaatatcctttgaaataggaacaatattccaattttagaagatgggaaaactggatgtctttagtcaatttctccagaaggagattctgagatgaggtttgttgcaaaaagatttagctagaaagtgcccaaag

SEQ ID NO: 445428 - DNA, 560 bp, Homo sapiens
ctgtttgcagctcaaaggtgcaaatctcctatggctcatgaacacttgctgatagttggaattactgaaatttttaagaaggacatttttaagttttcaatgcaaacttgattattttaccaatcaagagggatttctgagtacagttgtctgccatgacatttttgacctcataaacagggttcaagagatagttccacattctcaatgagacagcccccaaatcacaaaccctagaaggattaaaaaatgaagcccatgttctgggactaagtccacacctacacagtctttccatcttctcatagaaatgggtcaagagggagcctgcttgcccatagtaacgtggcaacttctcagaatgctgctgccatctataaaacttggacatacccaatctccaatattccattattagtcaaactgtgtccaatccaaatccccagactcatagtgatycctaatatctcacaaactaatcatcagacagatttgtatgtcccttttctttttctgtttttctgtctctgtctgaaatcaaggtccatcataaaaatatt

SEQ ID NO: 445429 - DNA, 609 bp, Homo sapiens
ctgatacccattctttgtcactttgaggacacttcctccttttatcttaaaacctccaagcattgactcatgtttattactgrtaactgcacaacattcataactgaatgccatgctcagccctctgtctaccacctccttctagtgctcgattgctcacttctaacaacccacggtagacgttgatcctactgacttgtactgttattcatccccttaatatattatcttccatttctaccaagaataaatgttatggtcaatcattgtactcttgcatacataatgttggtgaggatgtagaaagattggaaccattgtacactattggcaggaaggtaaaatggtgcagcagctatggaaaacagtatgcaggattctcaaaaaattaaatatagaactagcatacaatccagaaatctcatttctgagcatatatttaaaaagttgaaatcaggattttaatgaaatatctgtacttccatgttaattgcagcagtatcaaagtagccaagacaaagaaacaacctaaatgcccttcaacagagtaacggattttaaaaatgttgtatatacatgaaatggaatattatttaacctttaaaaatt

SEQ ID NO: 445430 - DNA, 547 bp, Homo sapiens
tggtaaataaagtgaataaaatgatggacttatttgattagatattaattaattcaaaggattatgactttgaggatcccagagcacatgagcaggaataatagatgatggctctccaaaagtgagatatttgaaatggagactttggagatggtattgttatcagtgatcatgaattctgtggctcttcaaaagtgagatatttgaaatagagactttggaggtggtatcgttaatagtgatcatgaattctgtagcttgtcctttggcatggtagtcaagagagtgtagaggaaatgttggaactgaaaaaaacaaactcttgtatgaatcctcaacattaatgttgaagacactgagaatgatatcataggtttagtggagaagaggatgaatacataagagattctcaagttttcaatataaakattacaatgaatcagaaggtatgcatattacagcagtgaggagagggcatggaaatggagtttgaaagcatgagcttcaagtatcacaattttacagaatcaaggtgaagaataactga

SEQ ID NO: 445431 - DNA, 562 bp, Homo sapiens
tgtttgcatggctcaaattgttgaacatagtttaccatatgatataccaaatgagtaaaattgttgcaacaattttacttctatgtattttcttgtcagcagagaattttatgcatgcagtattttgactcctgcttggccacataagaatggattttsggcctgaaatacttccttaccaagatagatagtccacacagattgtgctgagtttatcatcttgtgtgggaatatcttttcctgtttcagactcagtgtgtacttctttgtcctgtttatgtccacctgtcaatggccttcaggcacatccccagattttcatatctcagaccacatgggagagtggtctatttccttctacttcatcacaaagtaggatgtgtgtagctgtgcttcctgtgtaggctgaagagtcagtctactgaccctgggggcccaacagcctgcaaagagtcggatcttgtacactctctctcctctcttactctaagccatgttgtctattatcagtgaccataaatcatgtactggtttctacccagagtggcagttatctgccttt

SEQ ID NO: 445432 - DNA, 562 bp, Homo sapiens
tgtttgcatggctcaaattgttgaacatagtttaccatatgatataccaaatgagtaaaattgttgcaacaattttacttctatgtattttcttgtcagcagagaattttatgcatgcagtattttgactcctgcttggccacataagaatggattttcggcctgaaatacttccttaccaagatagatagtccacacagattgtgctgagtttatcatcttgtgtgggaatatcttttcctgtttcagactcagtgtgtacttctttgtcctgtttatgtccacctgtcaatggccttcaggcacatcmccagattttcatatctcagaccacatgggagagtggtctatttccttctacttcatcacaaagtaggatgtgtgtagctgtgcttcctgtgtaggctgaagagtcagtctactgaccctgggggcccaacagcctgcaaagagtcggatcttgtacactctctctcctctcttactctaagccatgttgtctattatcagtgaccataaatcatgtactggtttctacccagagtggcagttatctgccttt

SEQ ID NO: 445433 - DNA, 562 bp, Homo sapiens
tgtttgcatggctcaaattgttgaacatagtttaccatatgatataccaaatgagtaaaattgttgcaacaattttacttctatgtattttcttgtcagcagagaattttatgcatgcagtattttgactcctgcttggccacataagaatggattttcggcctgaaatacttccttaccaagatagatagtccacacagattgtgctgagtttatcatcttgtgtgggaatatcttttcctgtttcagactcagtgtgtacttctttgtcctgtttatgtccacctgtcaatggccttcaggcacatccccagattttcatatctcagaccacatgggagagtggtctatttccttctacttcatcacaaagtargatgtgtgtagctgtgcttcctgtgtaggctgaagagtcagtctactgaccctgggggcccaacagcctgcaaagagtcggatcttgtacactctctctcctctcttactctaagccatgttgtctattatcagtgaccataaatcatgtactggtttctacccagagtggcagttatctgccttt

SEQ ID NO: 445434 - DNA, 567 bp, Homo sapiens
tcctgtgtaggctgaagagtcagtctactgaccctgggggcccaacagcctgcaaagagtcggatcttgtacactctctctcctctcttactctaagccatgttgtctattatcagtgaccataaatcatgtactggtttctacccagagtggcagttatctgccttttaactatggctgcactcatgttatactttatccttcagcacarcctgaccactcggtgagcagtaaaacaattcccaagacaaaggaaaacatgtctcacaaaacttgtaggtgagtgttcgtagcagcattgctcataacagccacgtaatataaatgtatcaattccccatcaagtgatgaatgggtaaataatattgtgaatatacatccaataggatatctttcaacaataaaaataaataaagtattgatacatactacaatagggatgagcactcaatacattatgatacataaaagaagccagtcacagaatatttcatatggtgcaatttaatttatattaaatatccagagtagaaaaatctatatagagaaaaaatagataaataatta

SEQ ID NO: 445435 - DNA, 630 bp, Homo sapiens
tggttaatagtgctcttacaattggttaggtgagaaattagggttacttaggctatgaagatagaagtggagggagagaaccggatgtattaaagagttgatgagaaatttgacatgaacatccttctgactataagccagttctttatgagctaatttcaacacccaaactcatattaatttccatgaagaagtgaatcattttcagataattcccatgttacaaatcttataaaagttatataatgtgcatttcaatgtcattttatacttggagttgcaaagtatttttatggtcaaatcataaaataagagctagcagcattattctagtggcatatagtgaaataataagtatactttggtatccattagtaaaagatttattcttctcaggatctttgatgggcatatttaaaaagcaaataawgtctcatacattttcaaatatactaaggataaaatttaatagatagaatcaaccaaacagatcacatatttggagaataatatatttcagcttttatattctatctcctgtcttactatcttttttgctaatgtacattattcacagagatgcaaaaataagtgctacttaaagaaaatggaaaatgaattttaaagttg

SEQ ID NO: 445436 - DNA, 588 bp, Homo sapiens
tatcagtaagaatggtggctttccccccctagatttttaaattttttactaatttatttttaataagcaaataattgttgtatatatttatggggtaccatgtgatgtttgatctacatatacattttagaaagattccatcaagcaaattaacatatccaccaacttatttttttcatgatgagcagcattaaaaatctattattttagtaattttgaaatatacaatacattattatatatctgggtcactgtgcagtgctataccccaaaattttaactactgccccaaagagcagtcaacaagagggggagctctgcagccagagaactagagtgtgcatcctgtcctcagttcctattaactgtgtraccttaaataaatatttgatatattggtgcagcagattccttatatgtaaatgaagatgtttttctgcaataaattattttgaaatatattttttcaaatgcatttagagacaaaaatttagtatttctgaagactttatatttattaattttaccccaactttaatttggttttaaagaaaaccggagaaatatatgaagtgaatatagtttaat

SEQ ID NO: 445437 - DNA, 588 bp, Homo sapiens
tatcagtaagaatggtggctttccccccctagatttttaaattttttactaatttatttttaataagcaaataattgttgtatatatttatggggtaccatgtgatgtttgatctacatatacattttagaaagattccatcaagcaaattaacatatccaccaacttatttttttcatgatgagcagcattaaaaatctattattttagtaattttgaaatatacaatacattattatatatctgggtcactgtgcagtgctataccccaaaattttaactactgccccaaagagcagtcaacaagagggggagctctgcagccagagaactagagtgtgcatcctgtcctcagttcctattaactgtgtgaccttaaataaatatttgatatattggtgcagcagattccttatatgtaaatgaagatgtttttctgcaataaattmttttgaaatatattttttcaaatgcatttagagacaaaaatttagtatttctgaagactttatatttattaattttaccccaactttaatttggttttaaagaaaaccggagaaatatatgaagtgaatatagtttaat

SEQ ID NO: 445438 - DNA, 588 bp, Homo sapiens
tatcagtaagaatggtggctttccccccctagatttttaaattttttactaatttatttttaataagcaaataattgttgtatatatttatggggtaccatgtgatgtttgatctacatatacattttagaaagattccatcaagcaaattaacatatccaccaacttatttttttcatgatgagcagcattaaaaatctattattttagtaattttgaaatatacaatacattattatatatctgggtcactgtgcagtgctataccccaaaattttaactactgccccaaagagcagtcaacaagagggggagctctgcagccagagaactagagtgtgcatcctgtcctcagttcctattaactgtgtgaccttaaataaatatttgatatattggtgcagcagattccttatatgtaaatgaagatgtttttctgcaataaattattttgaaatatattttttcaaatgcatttagagacaaaaatttagyatttctgaagactttatatttattaattttaccccaactttaatttggttttaaagaaaaccggagaaatatatgaagtgaatatagtttaat

SEQ ID NO: 445439 - DNA, 584 bp, Homo sapiens
ttcatcactgactgatgaaaataggtttgagagacattatggatttggtctcaatagtttttcttgactgcgggtactaagtactgcagtcagaacattatctgaattggctgggcaatgccatatcctgaaaccacttactaagtaaacagataatgggcccagaaactgcagatgctgcttactgcatgggttgaatgatggctgagaaacttctcactcgtgggaaatattcaaatggatgatatttagctgttagtagtgactttatatttgaaaatatgaattatgaatggataggtgcctctgtgggtgatctcagtgtagagatgtctgtagattatattcatgaatttgtctggagcagctcagctaattaaagcaatgcacttaggaagccaygtcttcaggttcatttcttgtgagggctttatacatctgcagactatacaacacgtactaggaccttaataaatattgttcattagatgaataaatgcagaaataatccacagggcaaagaggggtgtgtgtctataaaggcattaccactgtctaggcctttaagcataatcatcatgttt

SEQ ID NO: 445440 - DNA, 484 bp, Homo sapiens
taatgtagctttcttataattttttatcttaagaattatataacaccaccaaatgggatttatctgagataatcaaggctagttcaacattcagcatcaatcaatacaaaattgggcacattgccacaagcctatagtcccagaaatttggtaggctgaggtgggaggatctattgagcccaggaattcaagaccagctcaggcaacataggaaaatctcatcttaaaaaaaaaaatacaaacaaaaagaatcaatcaatcaatacaataatataccacattaaaggacgaaaaggataaagaagggaaatcagatgattataacaaccacggtaaaaaaggtatatgacrtagtccaacaccattcatgttaaaaaaaaaataatctcagcaaacaagaaatagaggacaactttatcaagttggtaaataatgtttaaaacaacttatagctaacatcataattgtgagacactgggctctt

SEQ ID NO: 445441 - DNA, 410 bp, Homo sapiens
atatatactatattatatatattttgtaaatgcatatattatatatacacttggaatattttggaaatgtatatattgtataagtactatatataatacatattttatatataaagtataatactctctctatatatatatctcttatatttttctacatatgggtttttttttttttttgagacagagtctcactctatcacccaggctggagtgcastggcaagatctcagctcactgcaacctctacctcctgggttcaagcagttcttctgtctcagcctccagagtagctgggactacaggcgctcgccaccacacccagctaatttttgtatttttaatggagacggggtttcaccatattggtcaggcttgtctcaaactcctgatctcaggtgatccgcccg

SEQ ID NO: 445442 - DNA, 342 bp, Homo sapiens
taacttttagcataatatgtaattatgtatttataatattttcatctattttcaatgrctaaaacatatgattcatacaatctatggcctttgtatgttcactgaagaacaggaattcttactgatttttctggtgtgcagcacaatcttcagcacacaaagaggtgctcaataaatatatgttgaatagatggtacatagtaattcttttgagtgactcgtgtccctagtgtatatctttcttcactgattaccaacagttttaaaataacactgaaatagtttaccaacaaggcaaaatcaagtttattagttcactgcactaaggaaaaacagcctctt

SEQ ID NO: 445443 - DNA, 624 bp, Homo sapiens
tttacattgtgttatgcagtataactagtctagaaatgatttaaagtttataggacgatatacataggttataggcaaatactataccattttatattaagaacttcagaatatgcagatgttgttacccctgggggagatggtggaatgaaacctccatggttactgaggaacaactgtatatatatatttttttttttgagacagagtttcactcttatggcccaggctggagtgcagtggcatgatcttggctcactacaaccttcacctcctgggttcaagcgattctcctgcctcagcctcccgagtagctgggattacaggcacccgccaccaagcctggctaattttttgtagagacagagtttmgccatgttgggtacgctggtctcaaactcctgacctcaggtgatctgcccccctcggcctcccaaagtgctgggattacaggcatgagccaccgtgcctggccaacaactgtattcttagcatggattttgagcagacaaggacaatcttaattctcaggctgctgatcttgaactacaagttggcttaacattgtagactaagctaaggctgactgagacaaatttacgtattagttggcagctgtaatcg

SEQ ID NO: 445444 - DNA, 578 bp, Homo sapiens
ggaggcacctgcatttctagtcacttcagttctggccaaactgttatcaactctagtttctgagggaccgccagcccaggattcctattggggtcacctttgtgcctccctatcttaagagcacacttgggcgggtcggggcgggacgtgctgggtgtaggtgactcaacaccggacagttttgcttccagaggctgacacgctcctgcgcggtagttgttaaagggttgggacacgaagatactcttcgcctattcgggatctcccattgtgggaaggaggctcagtggtcccggccaccgggtgaagggagaacgggaacacagcgctgtcatcgccggagagctgcgagccccgactttctcgccaggctctccagtacattccgaggctccaccccggtaacgccacgctgacgtccgcgcgtcggaggccgccataggtgcgcgtcggcgcccaggaggacgtgtggcgcgtggactrcatcaggtccagccctgcgggaccccagccagcgcttccgggcaaggttctgtgcacctgttttctccttctacgcgagtatctttcccctccgg

SEQ ID NO: 445445 - DNA, 582 bp, Homo sapiens
tgctgtagtttctgcagttgccataagtcaaatcagttttctgcagccgttgacaactgtttgagcagtgaacagaaaggcatgcagcaaacatgtaaaccaatgtgtaatgtatagaggttgtggagtggttttcttattacagaaaagtgtactttcatatacaccttgtgaaggtgagcgtattattcatagttgaagttattctatcctaccatatcccattttcaaattgtaaacacttattcaatcactgcttcagaaatgcttcccagttattttggaacttatttctgatttcaaggtaatgcactcagtattgtttcagttcattctttactaaatcatccaaatgtttcagtagagaattttgtttaccaagaagcctcrgaccctgtgtaagttattttttaataatcgctttagtttcctctccaaaggcacaaatgacagaatgcttagaattataaaatatggtttctctctctctttctcttatttttaattttttagagagagggtagtcatgagttttttacctaaacagtagcaagtctgccccaatcttgtgaataggcaata

SEQ ID NO: 445446 - DNA, 591 bp, Homo sapiens
tttctttttgtcactcaggtctttggcatagactctgttagctttattaaacattaagtattgctttcaggktgaggtagaagagcataagcaagaaaagctttataggctaataaaaatgtaaatgagatgttcatcagcttgctgccctggaaaatgatggaagaaacattacctgaaaaattagattcaacgattattgctaaccaaatcaacctgatatgagaaatccctttgtaaccatttgtgttaatttgcatccttatgtcaatctttctatgcactgaatttgcttccaacatcctaggtcctctgtacatatatatgtagataatgtatatacacatttttatatatacatagaaatatatacacatatttgtataattcatgttattaattaacatgtattagctaaacagaaatatttctgttacatatttgcagcagttggtaagaaacgcctatatattttaattcgtctgcacttagccttctttttgcacaccatactccttacaaggaatttgaagactgagttgtaaatcagaatttctatagcttgttaaagtcacatcctcagagtttgga

SEQ ID NO: 445447 - DNA, 591 bp, Homo sapiens
tttctttttgtcactcaggtctttggcatagactctgttagctttattaaacattaagtattgctttcaggttgaggtagaagagcataagcaagaaaagctttataggctaataaaaatgtaaatgagatgttcatcagcttgctgccctggaaaatgatggaagaaacattacctgaaaaattagattcaacrattattgctaaccaaatcaacctgatatgagaaatccctttgtaaccatttgtgttaatttgcatccttatgtcaatctttctatgcactgaatttgcttccaacatcctaggtcctctgtacatatatatgtagataatgtatatacacatttttatatatacatagaaatatatacacatatttgtataattcatgttattaattaacatgtattagctaaacagaaatatttctgttacatatttgcagcagttggtaagaaacgcctatatattttaattcgtctgcacttagccttctttttgcacaccatactccttacaaggaatttgaagactgagttgtaaatcagaatttctatagcttgttaaagtcacatcctcagagtttgga

SEQ ID NO: 445448 - DNA, 591 bp, Homo sapiens
tttctttttgtcactcaggtctttggcatagactctgttagctttattaaacattaagtattgctttcaggttgaggtagaagagcataagcaagaaaagctttataggctaataaaaatgtaaatgagatgttcatcagcttgctgccctggaaaatgatggaagaaacattacctgaaaaattagattcaacgattattgctaaccaaatcaacctgatatgagaaatccctttgtaaccatttgtgttaatttgcatccttatgtcaatctttctatgcactgaatttgcttccaacatcctaggtcctctrtacatatatatgtagataatgtatatacacatttttatatatacatagaaatatatacacatatttgtataattcatgttattaattaacatgtattagctaaacagaaatatttctgttacatatttgcagcagttggtaagaaacgcctatatattttaattcgtctgcacttagccttctttttgcacaccatactccttacaaggaatttgaagactgagttgtaaatcagaatttctatagcttgttaaagtcacatcctcagagtttgga

SEQ ID NO: 445449 - DNA, 612 bp, Homo sapiens
caacatgccaacctatttaccaagtgcctattggtaaatgtgcaagaaatgaacttccatagcataccttgtttcactgcactttgctgtattgtgctttacagatgttgcatttttataaattgaaggttagtggcagctctgcatcagtccagtctgtcggcatcatatttctaaaagcctgtactcatttcatgtccctgtgtcacattttgataattcccacaatatttcaaactttgtcartattatatctgtgatggtgatgtgttgcaattgttttggggagccataaacagtgcccagacaaaacggtgaacttaatacaaattttatgtattcagactaatccactgacaggccattttcccatctctctttctctccttgggcctacctattccctgagacacaataatattgaaatcatgttaattaataactctacaatggcttctaagtgttcaagtgaaaggaaaaatcacatgtctctcactttaaatcaaaagctagaataattaaggtcagtgagaaagatatgtcaaaagctgagataggccaaaaggtaggcctcttatgccaaacagccaagttgtgaatgcaaaggaaaaa

SEQ ID NO: 445450 - DNA, 488 bp, Homo sapiens
gtgagttcattagttacagtagctagtattaccctattttagttattaattataataatatggtaatgagatataatggaatttaaaataagctaaagtaggatatcagatatctattcttgttggactttgagtaagaaaaagaggcatagggagaggagttacaagtaggaaagggatgtagagaaggtggggaccatattcatgtattgtgttttggtcaawttgacaattttgatgttgattatcaggcaggctgcaagtagtgaggggttctctaagagccaggttgaagtgaccgcactgtagaagcctacttcaggactcatttgaagctgactcacacagacattaggatcaggaggtttttggaacatgctttcaggatcaatacccatgaagaaaaataaggaaccagtactgagctgggaagaatttgggttgtgatgcagcctcaatgaaagcccagtcaatcccatgaagagctc

SEQ ID NO: 445451 - DNA, 727 bp, Homo sapiens
atatatatctcagtattattcttatatatgtatttcagtagtagcatttaatatatatatctcartattttatatattgagtatatataatatatatctcagtagtagttttttaatatatatatatcagtggtattattatatattactattatattaatagtattattatatgtcaaatatgtcttttatatatcagtactattattattaaatataatcatatatttatataaatatatattctatacatttaataatattaaacacatatttaataataatattaagatgtatatttatgtcagttatataaatctaagtatgatacaatttatatccttaaagtgtttaaagatttatatccttaaagtatattaagatagctgtcataaaatctgtttctagtttaaaattttactagttatttttttctgagaaaaaaaatcatgaccatatagtctcacaaaaaaattcaaaataacagaatatataccatgcaaaaatgttaataatatatttaaaactccaataacaggtcttggaatatagcaaacacttgagatttgctgaaggttaatttgaaatcaattatcaataaatgtttgatgaattgaattatttaaaaattctatcatataattaagtcctaattattaatgtttatattaccttatgcctggtggcatatataccttccaaatttgtactttaactgtactggaaa

SEQ ID NO: 445452 - DNA, 607 bp, Homo sapiens
ttatgtcagttatataaatctaagtatgatacaatttatatccttaaagtgtttaaagatttatatccttaaagtatattaagatagctgtcataaaatctgtttctagtttaaaattttactagttatttttttctgagaaaaaaaatcatgaccatatagtctcacaaaaaaattcaaaataacagaatatataccatgcaaaaatgttaataatatatttaaaactccaataacaggtcttggaatatagcaaacacttgagatttgctgaaggttaatttgaaatcaattatcaataaatgtttgatgaattgaattatttaaaaattctatcatataattaagtcctaattattaatgtttatattaccttatgcctggtggcatatataccttccaaatttgtactttaactgtactggaaatacatccartttaacaattattggatgcctattacctacctaccatagtagggaacaaaatagattcagtctgtgacttcacaagagtttcatgtagtggaaagagtgtgaagttgatttaccaactttttcaggttctgaagcagatgaatcatgagtaaaataacttgataggtata

SEQ ID NO: 445453 - DNA, 549 bp, Homo sapiens
catttaactttgtcgtattttccttcctccaatactagtgtgccaaattctgtaacatagtagcatttttcatgctcccatttatctgtatatacagaaacttctgcttaggtttttttttatatataaagaaagtctagtcataccagtttggttgaagaatactaattctgtccctggaagagctgtctacgtgagccacaacaaaccaaacttgccacatcattcaaacttgccaatttggccgtagtttagtagatgacaactttgggtcaggttaatatttggggaaatggaataataaaagctgctgattttcctactgtattgctacttggaggattggaggtgtagagggaagatgcctgtaaatgagtcactgttatcacctacctgcacatcagcttgattgttgacacttatgtctaaagatgttcatcccragagtattattgtgcatgcaagtaactgattgatactaacgagttaacattttattttgggctgcttggacaaaaagtcttatctttttgaagcctctggctgcag

SEQ ID NO: 445454 - DNA, 613 bp, Homo sapiens
ctgtgtgacagaaatattagttgccttacaagaatcttccttcttttttattaatagaatattggttttgtttaggaagtaaatgtgtccacttaaaaatactcatcaaaccagattccattctacctagtggtagtcatgtgaggcagttccagtcrtagaagtctatcaagtaagacatttgcaggagctattatttcctaatataaaatgaacggacttcactggcatgtgatttttgttctcatcaatcccttttttctgccctaagcacattcttggatgtgaagttcattgcctatgagaggtagggggactgttcacttgctaaaggtggcagagcaggaagctagaataaacttggtccttcatgatttccttgagcaactacaaggaaggacttcctatatcctaactttctgtaacatgatgaaaataaaatccttgtttagatggatttctattacatgtaaacaaaacgcaatactggctgatagcactggtttcttgcccatatcactctgatctttaaaaagttacatatatacaacaatcaaaatataaatatatatccttctatgatatgattttagataactaagcacttcaaatt

SEQ ID NO: 445455 - DNA, 579 bp, Homo sapiens
agagtaaataactttgtaactttacttcttcctctccatttacatatggcatacaccaagtaaccagtggaaatctctagagggtatttaaacccccacaaattctgtaacggtgtccttgagcccctatgctcaggcccaytcccacactgtagagtgtactttcattttgaataaagttcttcattctttctttgctttgtgtgttttgtccagttctttgttcaaaatgccaagaacctggtcactctccaccagtaacaggattagataatgactgtgggttggatttcctgaaaaccagaatctgagatgtactttagaatgcaaaatatttttaaggagggcctgtgggattaatacttgtacaaggaaggggagagagcaaaacagagtagaagaaagtgaagctgagatgcaatcccaaagacagccttaattggctaatcccaagaggagctctggatattagaatagcacttcagtgtttcccaagttgaacctgattggccaggatttataccacacatcaattatcttttctcaggtgcccaattgataaggaagacaatggacaag

SEQ ID NO: 445456 - DNA, 551 bp, Homo sapiens
acctggctccaagatggcacctctggacctgcacaggaccyggagaatcttgccatcctgaaaagtaggacacaaacctgattggctttcccctcctcctgctgattatagagcccagagccttgagtgaacataggcggtagccaggtagaggttatagtggatcttgagtgagacccagtgtgaagccccagtggtggtggccacagggatgcttgtgtcatcccacttccagtttcagtcagctcaggacagagagaaagattttgttagtttgtgagaaagtaagggaagagaacaagagtctctgcctaaaaattcagagaattattccagatcttatccaagactatcaaggtaatacctccacaagtctccaacagttatagcattaataggcttggggtgcccctgaatacagatgtggcttagacaacaacacccaagtactttggaatacctggaaagtcttcccaagaagaacaaatacgaacaagcccagacagcaaagattacaataaacaccttactcttcaatgcccaaagatgaa

SEQ ID NO: 445457 - DNA, 486 bp, Homo sapiens
tttcttcaattataaaatgagtaaaataatatatgtgacaatatgcatgactttgtcctgttgtgtccggaattggtgggttcttggtctcactgacttcaagaatgaagccgcggaccctcgcagtgagtgttcagttcttaaagatggtgtgtccggggtttgttccttctgatgtttggacgtgttccgagtttcttccttctggtgggtttgtggtctgctggcttcaggagtgaagccgccgaccttcgcagtgagtgttacagctcttaccgcggcgcatctggagttgtttgttcctcccgtccggagttgttcattcctcccagtgggtttgtgatcttgctggcttcaggagtgaagctgcaggccttcatggtgagtgttacagctyataaaggcagtgcggacccaaagagtgagaagcagcaagatttattgcaaaaagcgaaagaacaaagctcccacggtatgaaaggggac

SEQ ID NO: 445458 - DNA, 486 bp, Homo sapiens
tttcttcaattataaaatgagtaaaataatatatgtgacaatatgcatgactttgtcctgttgtgtccggaattggtgggttcttggtctcactgacttcaagaatgaagccgcggaccctcgcagtgagtgttcagttcttaaagatggtgtgtccggggtttgttccttctgatgtttggacgtgttccgagtttcttccttctggtgggtttgtggtctgctggcttcaggagtgaagccgccgaccttcgcagtgagtgttacagctcttaccgcggcgcatctggagttgtttgttcctcccgtccggagttgttcattcctcccagtgggtttgtgatcttgctggcttcaggagtgaagctgcaggccttcatggtgagtgttacagcttataaaggcmgtgcggacccaaagagtgagaagcagcaagatttattgcaaaaagcgaaagaacaaagctcccacggtatgaaaggggac

SEQ ID NO: 445459 - DNA, 605 bp, Homo sapiens
ttataaaattaaaaagaacattgagatgatattaacattgataagatatgataatctatagttcaaattcaagttttatcaattgtcccaattgtgtcatttatagattatattttcttgtccaggataggattcaatccacaatcatgcattttcagttttcttatttctgtaatctcccttactctgaaagaatttctcacccgatccttgtatttttttatcttaatatttttcatgcataccagttatttatacatatttctttgaatttttttggtattgcaatcgaattttattttgttcataacactcacaaaatgaataatgtaactctcccatccttttgttcactacatcaaatagctctttcaattatacaccctggcatgctgggcctgactcattgttagaggaaaggggtcccgatccaggcctcargagagggttcttggatctcgcgcaagaaagaattcagggcgagtccacagtgcaaagtaaaagcaagtttattatgaaagtaaagtggtgaaaggacagctactccatagacagggtaggatgttcctgaaagtaagaggaggagcacatccaccctaggtaca

SEQ ID NO: 445460 - DNA, 639 bp, Homo sapiens
accaccattcaccttttagcaataaatcaggtgatcttttctagatcttccagaatctttctctgtgcttgtgcagcccagctcaacaatacataatggatctccatgcagatttctgcagtgccctctctgtgcagcttcttcttctcggttaccctgctccacaaatacagccccttcataatatcagaactctcatttacactcttaactcagtgagacttcctattatgctttgtggcagaaaagtatttcaggcagaaaaccatggcaatcatgggatattgtgtgacttgctttatatctttctcttaaaggacacagctgtttgctcatgctcttcagtgcttgagaacagttatgtcatatattttgttccattttgtagattttatttgccagtagagaaagtctatataagttgttctgtcatgcccatatctacttttgcattgcttccaaaatgatcwgaatgaaacaaaaatctatgatatcattgctcactttaacacttactattgtcatccattgcctatataatgacattcaaactcctaaatatgagactcaagatcccttaatttataacttttctggaatcactttccatactcttttcctgtagtctctgcctgttca

SEQ ID NO: 445461 - DNA, 581 bp, Homo sapiens
aaatacatgggaatatagaagtggatatactgtggatcacggagcaataaacccaactcataaaatggagaaaatcaaacctcttggtgggaaggtgtgttcataaaaaatttgaaaaagccccaaaagtgattatgaatttccttctcttctcacttataaacactatcttagtcctaatcatatgcaaaagtgtgcataaatgagggcaaggttaggtcgctgtttctcttggccagtcaaccagttctattcatactttttttttttccagtcaatgaaagggacactttattgaggctccagggccatggggcctgggcaggaggctgccctccgaggaaggaagagccttatttgaccttcttggggtgcaggttgttggtgtggccacacttcttcttgcggcaattgacagcataggggtgcaggagagcatagcgcttatggcagatcatcttgtttcagytgtatttctaggtgagctggaagagtgaaggctcaataatgccacctcgcaggtgcagcaccaggtgcggggtgggctgtttctggacgttgtagtctgagagagtgcggcc

SEQ ID NO: 445462 - DNA, 538 bp, Homo sapiens
tctgcctatttaatgtttaatatttaatatagcaagagaattcattttaggtccaatttgtgtagtatagtattgtattattataggtacatataaaatattgtttaataaatacaccttctgatttatgagcattttgaagagcttggaccacaatcttgaacaatttactttatggtggaattttatagtgctatatcttcacttttatagcatactgctaagtctatatgtataaacatagtttttggtgaagaatatgacccccaaggttaactttagactttaagtgatctactttttgaccttcattgtggcaaaaagcatgagcarcctatgcattccaccacttcctccatcagcaccacagctgccaccagtacaactactgttcccccagcctgttttgcttcctaagcattgatgtttagaaaaaaaaaattgactagtttagtgaagctaaactatttgtacatttgctgagataatactatgcatttccattaataatgaatacttgtgccaaaagcaaactata

SEQ ID NO: 445463 - DNA, 600 bp, Homo sapiens
atctgccaccatcacatccaaatttttgtaaaatagtcaggtgtgaaatctgagctgactaaaaataaagtacaaatactaaaacatcttgtcgtgttagttatagctgacctaggcraaaaaaagcttgacttccactgttccttctttcctgcccttttgcctcatatttatctgatactcatggctaaaatttgttgtgaggataaaataaaattaaatgacatacgtaaagtcctcaataaataatagctcttattaccattgctatggttactatcactatttctgtattttcttttgccattcctcatgcttgaatatgaatctcatgggtagagtttcccaaagcatgatatgtgtagtactactaaaggcaagattttgggtgcatacagacaaaaaaataatttagtagtaacatatttatattaaagtatatttaaaaatttttaactagcacatcaacctagtgatgtaacagctactgttattactaaacaaatttaattaagttgaaaatcatagtatattttcagaagcataatagtataggtggtatgtgaatagcataatcatgaagatggcacataaataact

SEQ ID NO: 445464 - DNA, 600 bp, Homo sapiens
atctgccaccatcacatccaaatttttgtaaaatagtcaggtgtgaaatctgagctgactaaaaataaagtacaaatactaaaacatcttgtcgtgttagttatagctgacctaggcgaaaaaaagcttgacttccactgttccttctttcctgcccttttgcctcatatttatctgataytcatggctaaaatttgttgtgaggataaaataaaattaaatgacatacgtaaagtcctcaataaataatagctcttattaccattgctatggttactatcactatttctgtattttcttttgccattcctcatgcttgaatatgaatctcatgggtagagtttcccaaagcatgatatgtgtagtactactaaaggcaagattttgggtgcatacagacaaaaaaataatttagtagtaacatatttatattaaagtatatttaaaaatttttaactagcacatcaacctagtgatgtaacagctactgttattactaaacaaatttaattaagttgaaaatcatagtatattttcagaagcataatagtataggtggtatgtgaatagcataatcatgaagatggcacataaataact

SEQ ID NO: 445465 - DNA, 600 bp, Homo sapiens
atctgccaccatcacatccaaatttttgtaaaatagtcaggtgtgaaatctgagctgactaaaaataaagtacaaatactaaaacatcttgtcgtgttagttatagctgacctaggcgaaaaaaagcttgacttccactgttccttctttcctgcccttttgcctcatatttatctgatactcatggctaaaatttgttgtgaggataaaataaaattaaatgacatacgtaaagtcctcaataaataatagctcttattaccattgctatggttactatcactatttctgtattttcttttgccattcctcatgcttgaatatgaatctcatgggtagagtttcccaaagcatgatatgtgtagtactactaaaggcaagattttgggtgcatacagacaaaaaaataatttagtagtarcatatttatattaaagtatatttaaaaatttttaactagcacatcaacctagtgatgtaacagctactgttattactaaacaaatttaattaagttgaaaatcatagtatattttcagaagcataatagtataggtggtatgtgaatagcataatcatgaagatggcacataaataact

SEQ ID NO: 445466 - DNA, 578 bp, Homo sapiens
tcttgagtatttcagtttccacatttatataattaagatgctaacactgactgacagaaatgtcagtaagatgaaatcagactgcatgggagttttatgttacattaatttgtaaattgtrtatctctgtattcatgtgagtgtggctatcatgatgttagacatccagctacaaaggaggcattcgtgcacacacacagtctccaatcttctgtttaccttctgtttactcctgcctaaactggactaactcaggaatatcaaggagttcattcctcagaagatggaatccatacacatgaacaatctgaccatctctactgtaccttgcacagctgcttggcttcataaaacttctcccagtctgcttcactgacagtctgatgttggttatgatctccttctcaacccaccacccacatctccactatagtctggttgtttgtgaacatctggattgaactagaattgagtagagtaatgatgttttggagtcaaattgatttgtgttcaaacactggcactataatgaaatagccatgacaccttgaacttgtcatttaatttctatgaggctc

SEQ ID NO: 445467 - DNA, 587 bp, Homo sapiens
ggtctagttttccaggtctcccttgactcgacaataaagtaaccactagactttgagaattgcagttttacattgtctagagtcttctagactttcatgaagataggcaaatatgattctaaccaagatgtattaatacctcctacttcctttgaaatgtaactgagactgtacttgagacgttacaatttcttggaaggggaaaggaagcttctgctattgaacraactttttgttaaggtagctcccaagcaggttcagtagctttgttctattatcacttttctactgacagtgatttttttcctttgaaggcctgggacatggagactgcttttctgcagaaaccacatcccttggagtaatgagctacacctacctcaattattcagtgcagtacaacactccaggtcagctattaagaggtgcacacattatttttagaaaatgtgagtcagtcttggggaaaacaaatctatgctatatgttctttttactcacttgatttacaacatactgtgatgtattctttttctattcagcatctttttgtacccgtagctctttgttctgagcataaatgtgac

SEQ ID NO: 445468 - DNA, 587 bp, Homo sapiens
ggtctagttttccaggtctcccttgactcgacaataaagtaaccactagactttgagaattgcagttttacattgtctagagtcttctagactttcatgaagataggcaaatatgattctaaccaagatgtattaatacctcctacttcctttgaaatgtaactgagactgtacttgagacgttacaatttcttggaaggggaaaggaagcttctgctattgaacgaactttttgttaaggtagctcccaagcaggttcagtagctttgttctattatcacttttctactgacagtgatttttttcctttsaaggcctgggacatggagactgcttttctgcagaaaccacatcccttggagtaatgagctacacctacctcaattattcagtgcagtacaacactccaggtcagctattaagaggtgcacacattatttttagaaaatgtgagtcagtcttggggaaaacaaatctatgctatatgttctttttactcacttgatttacaacatactgtgatgtattctttttctattcagcatctttttgtacccgtagctctttgttctgagcataaatgtgac

SEQ ID NO: 445469 - DNA, 633 bp, Homo sapiens
gttcgtggaaatctgccctccaaaataacctgttttgcagcacccttagttttatttgatatgaagaaactgcctgctgttttgacccatttagctactaggaactctatttactaccctaactgcctaaatccctatggataaattaggcagtatctgtttattttagtttagatttatttttaaaaccagtgttcctttgactgttcttactatttctatttgagagttggttgaaataagatcatgtaaataaaaatacaatgtagtctagatctaaagtcactgtacatacctagataattttttttttttttgagacaggatcttgctctgtctcccaggctggagagcagtgttatgatcacagcttactgcaacctctggctcccagattcaggtgattctcccacctcagcctccctagtagttkggactacaggtgtgtgccaccacacctggctaatttttgtatttttgtagagatggggttttgccatgttgcccaggctggtctcgaactcctaggctcaagtgatctgctcatcttggcctcccaaatgagaaggattacaggtgtgaaccactgtgcttggcacctagaggatttcaataaaatttgaggtcctataa

SEQ ID NO: 445470 - DNA, 635 bp, Homo sapiens
tcccatctaaatcacatttaatagattcccatttttctcatgagaaaattgcatcatacagagatgaactaacttgctcaaggctatagacctggtaattagcaaagcagggatttgaatttagatgtatttttctctgaaggctgggtttagataaatggatctggaagcactgggaaggatgaattaatgggatggagtgcaggggatgcagagtgcccacttatggaatgatttcattcaagagagacaggagggtcagaggtaagaatgytaccgctgggacagagaggaaggtacagatatgagatatggtaagaaggtatactacaacagtggctcccaaatctcaatgagtagccagttctcatggaggttttgtttttatttttgaatgaagattcccatggcataccttgaatattctgaatcagaatctctggaatacaacttggtattcttataaagcaccctaggtgatgctgaagctctgccaggttcaagaaccacagctcgatcagcctatatttagatgtttggggtggagaatgagagaaagaaaagattttagggtggcatccaggtttctgaattttgtgactcagtgaagtttttggagggtaggtaagatgctg

SEQ ID NO: 445471 - DNA, 378 bp, Homo sapiens
atatttagtgaaaaaacaccagcactcagaacagaatgttgataatgtagatggaatatctttctctctctgtctctgtgtgtgtgtgtgtgtgtgtgtgtgtgtatttatatatgtgtgtatttatattatatatgtgtatatttatatatgtgtgtgtatacatttatatgtgtatatgtatttatagtaaatatatcacatgtatttatatatagtaaaaaagaggggactataatatatctttatatgttagcatttattttaaaaagaaaacacaggaatatctaaaasaaactattacttataggggttatgggaaatgccatgggcaagaattttttttttttttatcaccatgctttctgaaacaacacg

SEQ ID NO: 445472 - DNA, 417 bp, Homo sapiens
agaaataattaaatttataagattaaagttataaaaagcatagagcctataataataacagcaataagataaactccacatttgcttttaaaacaatttatttgagtagacagccaaccccctgtattgtactcctttaaaaaatattttaggctttttaaatgctgaggcaaggggacataccaaacactaacrggcacattggggttttctggctattgaaataaaaatgtccttacataacactgatgtactggaatagcactgcgttccagtgacggttattgcaactcagccagcatatctgtagcttgtgagcttttcttatcagaattttatctataaatatacatatacgtaaattctattgtgaaataaaaataaaatgtagaatcttctcatctttcttattagtca

SEQ ID NO: 445473 - DNA, 592 bp, Homo sapiens
gtactagtactaatttggagagttgttaaagattaaataatatatgtaaatgccttggcataagggactggcacaaagtaggcacttcatatataaaagctgtgattattgatgaaccagtagtgaggtacataactggggaaggagaaggggccagtttgtgggaawgcttttttagttattaatagtaaggtggtaaaataataatagtaataataaccaaaagttactgaaaactaaatacagtgctaaactctttaaaaggagtatctaattggatcttaacaacaaagctatgaagcaggactaatgttatctcattttataaatgaggaaatgtaagatcaaacaggttaagaaactttcccaagttgatcagtagcaaagacaggattcgaaccaaggtaattgtcctatcagaaactgtactaggatagtctgcatttcatggtaaagactatcagatgccactaaaactttttaaaaagggaagtcttgtggtcaaatttgctctttagaaggcagtatggagtgcagatcagatgctggcagcagggagatcagttagaagatggttgctctaattcagttg

SEQ ID NO: 445474 - DNA, 586 bp, Homo sapiens
actatgctatcatttttcatttgtttttgctctgttacattaggaaagttatgtagaattttgtgcctcagtttcctcattcaatatgggtrtaataactgtgcctgtcttgtaggattattgtgaggcccaagtgcaataatatatagtacactgtgtctggcatctagtaagcattcattaagatgacatgaagataacacagatatatcttaacatgtaattatgattttgcttattcaaggccaagcattccaatttaatggagttaggcaaacacagtaaattcattgctctttcctttttatgctacttcctttgaagaggcagtcaagttccatttgactgattcggaactttttagcaatgtatattatgctgacttcactcttatgcgctcttggggctataattcatcaagttaggcgagcaaagaagtgtgttggtgaaagagaaatgaggaagaacaaggaagaaaaaaagggtcatgagcttattcactgccaatatttattatatggaacaatgaccatccttcagaagtgtttgttctctattatactgtaggtgtggaagaattatcatt

SEQ ID NO: 445475 - DNA, 438 bp, Homo sapiens
taggcattggagtcaggctgctggagtatgaatcactatgctatcatttttcatttgtttttgctctgttacattaggaaagttatgtagaattttgtgcctcagtttcctcattcaatatgggtgtaataactgtgcctgtcttgtaggattattgtgaggcccaagtgcaataatatatagtacactgtgyctggcatctagtaagcattcattaagatgacatgaagataacacagatatatcttaacatgtaattatgattttgcttattcaaggccaagcattccaatttaatggagttaggcaaacacagtaaattcattgctctttcctttttatgctacttcctttgaagaggcagtcaagttccatttgactgattcggaactttttagcaatgtatattatgctgacttcactcttatgcgctcttgg

SEQ ID NO: 445476 - DNA, 410 bp, Homo sapiens
tagatagatgtgtaagcagacgctgaataaccatttactgaaaatataaataaaaacaaagcaaattgcaggcaataaatattgtattagttctcattttgtaaaacttatacaggtatcatatgcatagacaaatacaccaaactgatgaatatttgccttgtataatctttttgtagtttttttatgaacatatattactcaaacaatttagaacawttggcaatatatatatatttcatttataaaaggttaggaagattaattacactttctgaggtcgcaactaaaagccaagattttaatccatttctatttgatgtaaagtctggtcttttttcagcaaaccacaatcccacattttaagggcattaagaaagggatgggtagacaaaatgtagaggtagtag

SEQ ID NO: 445477 - DNA, 606 bp, Homo sapiens
caatttagaacatttggcaatatatatatatttcatttataaaaggttaggaagattaattacactttctgaggtcgcaactaaaagccaagattttaatccatttctatttgatgtaaagtctggtcttttttcagcaaaccacaatcccacattttaagggcattaagaaagggatgggtagacaaaatgtagaggtagtaggtacagaatacaaagtttcaagaaattaaaagcttctaaactaacaaacagccaatttgtggagtgtcactggaaagtgacaaagaggacagttaagttagttggaactgaactgaggccagacagggctgtgggacaagtcagggtgtggtcattccggtaagcagcgatgcagaatcaagacagagtwgtttctccttctctctctctctttaattgtaacgccttttataacaaacaaatattatgcttatttctgtctttaaattttttgtagtaatttctcatcacttaacctctattttttaaaaaactaacttttctcttgtttttctagttgagctatcattcatatttattatgtggaactagaggtagtcctggctacttgggaacagcgtg

SEQ ID NO: 445478 - DNA, 588 bp, Homo sapiens
cgcacacgtgtgcacacacacatatgctcacatcattttaagatacatctcatttttaaccaaaaccattttatcttgcttgataaccaattttatttgttagatgacttggctataaatgcctttggctatcaggaaaatcaaatcaaaattaaaagacactgttactactgaagaagtaaaaaaagaatgggctgctgactctgaagatcatacccgaagtagagctgcaaagatatttggaatattggtaatatccaataaagaatgaccttcatgctattttgaggagatgtttmaatgtcgaattattgaaatatttataaaatacaaataaactaactctgcttcatattccaacttgtgtatgacacttcttaggctatcatttcattccaaatttatggtcactaccctactgtcattcctcatactaaccatatgatcaacagttgaaaagcagccactcgcagaggtaagcaagatatatggtaaatactgtgttgacaaaagtatgcagaagcagtcacatttatacagtagtgaaggaaatgtaaattggacaaactttttggaagataagttgag

SEQ ID NO: 445479 - DNA, 588 bp, Homo sapiens
cgcacacgtgtgcacacacacatatgctcacatcattttaagatacatctcatttttaaccaaaaccattttatcttgcttgataaccaattttatttgttagatgacttggctataaatgcctttggctatcaggaaaatcaaatcaaaattaaaagacactgttactactgaagaagtaaaaaaagaatgggctgctgactctgaagatcatacccgaagtagagctgcaaagatatttggaatattggtaatatccaataaagaatgaccttcatgctattttgaggagatgtttaaatgtcgaattattgaaatatttataaaatacaaataaactaactctgcttcatattccaacttgtgtatgacacttcttaggctatcatttcattccaaatttatggtcactaccctactgtcattcctcatactaaccatatgatcaacagttsaaaagcagccactcgcagaggtaagcaagatatatggtaaatactgtgttgacaaaagtatgcagaagcagtcacatttatacagtagtgaaggaaatgtaaattggacaaactttttggaagataagttgag

SEQ ID NO: 445480 - DNA, 503 bp, Homo sapiens
ttgttcaacaaattacagtatatctaaaaaaagaataatatataacaactgaaaaaataaaatagttgatataagcagatattccaagatctgccagacatattgttaaaygaaaaatctagatacaaaattgtttatagttctctttcatactatagccaaagaaaattcagaaaaaactacttacagttgatccttgaataatgcagcaggtaggggcaccagcttcctgcgcagtcaagaattgcatataacttttgactcccccaaaactttgctaatagcctactgttgactggaagccttatcaacaacatcaacagttgattaacactggaaaaggaggggttggtcttactgtctcaagggtggcaaaggcggaagaaaagccacctataagtgaacccttgaagttccaacctatgtttttccagggcaatcatacatccatgtccatattcatgatgaatatgtgaaagggtacataagaaaatgtgatagtc

SEQ ID NO: 445481 - DNA, 423 bp, Homo sapiens
aaatgcctaaataggaactgtcatatatagttatatttagggttgattcatattttgaaatatattctagaatataaaaactactatattttacaattactttaccaagctctctaataatacctgtttacctttaaaatcttggtctttcccacagaggacaagttattatatttttaattgttaagccttctgatcatatgaattcttttcatatttcattgaaattatataaaacattttacttcaaaggaaaaatgttatgaatttataatgcttttagaatttaaaaatctgtttcctattttgttgattaagacagagaagcattgcttgtgaataaatagcatgctatgttgaaaagaaaattaaggatcctgatgtttctctgccagwtaggacaaaaactaaggacgccacagg

SEQ ID NO: 445482 - DNA, 549 bp, Homo sapiens
gtaactgaggaagcttgtggaatttccttctctagaagtcttttaaaaatagggcagtgtctcatctgcctgaaggatggactctatttgacctctcaaattgtctactgaactcagaaggtgaaccacaccttagataagaaagagagcctgaatgatcctgggtagcttgagtaataaaagtagggtgaacaagtcatatttattttgatttatatatgtcatatatgtaaattatgtctgctataattcctttttttctttcaattgaatgttttcatttttaaggcctagagattagagttcaagtaaagatattataggaaagcaaggaagaactcttttatcttactgtagaacaaatttttagaggaataaaaggagaaaaggatatattggacatatttgattttgatttcactccctattctaaataaaaaaaaatacactgccctttctgttagctttagtattttmagggtaaatttcaaaaagttaatttagtgtaagtgtttctcacggtgtttttggcagaaccggtatcccaaa

SEQ ID NO: 445483 - DNA, 659 bp, Homo sapiens
taggatgtatcttcaagaggaaattactttcttgtcattaagtacaatgaaatataagctaaagagccacttggaatgcgaaatgcagaaaaattctagagagtcaaatataaattaaatgatatatatttgattctagaaagtcaaatataaattaagtgttgatgatggtggtgtgtggtgtgtgtgtgctgcgggtggagtgggggcaaagtgttggaaggtcacyaataatcccaaataacccataaacataaccagagtagcttagtatcatctgggggcaagttagctactgttgggggtcttggagaagacttagaccctaatcatctcccaatgcactacatgagtagggaggttaagaagcagctattatgaaagggggaagagagaccatgtcttcaccaggaccgggagaatgatggcatgggagagggtgagaagtgaagtaagggaaggagctgagcgggtggctgcctagataaagctgcaactggggaggagttgtatgtcaaaacaaaaacactgcatatttgatccttaataaggaaataatttttatgatttttaccgcatagtttcctaatttatttgtgtgtatatacatgtatactaaaatgtgatattagatgtatagatgtgtttttaactcaacc

SEQ ID NO: 445484 - DNA, 630 bp, Homo sapiens
tgctcacgattcctcattatacaagtgactcagaggtggtcattgatgaaaggcacagagtaataatgttaggttttactctattccttgcttcagtcaaattgatcacctagaattgaagttaattgcaaaaaygtttaatgcagagtgctcaaaagctaaaaagatctttcgtgtgtttcttaagcccctttggtgtatttgacaggttacataatacccatttttttctaaaagctggcatctttactccggaaattactgaaaaagacatggcaaacattttcagcgctttcccagtgaatatgaatttatttttaatttttcccacagttatcagacattatcaacatttctgttttttaaaaattaaaaatacactgctttataccttacaagaattcctcagcaacctctcacctacatttgtaccttacaggaaactcatgatatagatattattttctccattttgtggtggagaagacagaatcagagaagttaagtactttttctaagaacacagagtcagtaaagaaataaaaccagcttttgaatctttgtacacttaccccagaatctctcctctctctcctagagcatacagcttttgtatagatgctgacaaaa

SEQ ID NO: 445485 - DNA, 525 bp, Homo sapiens
accaaaaaaaaaaaaacaacagttcttctaagtagacttataaatccaaaaaaccttatttctatttcaggagtttttttgttttgttttgttttttgagacggagtctcgctctgttgccaggctggagtgcagtggcgtgatcttggctcactgcawtatccacctcccgggctcaagtgattctcttgcctcagcctcccaagtagctgggattacaggcatgggccaccacacccaactaatttttgtatttttagtagagatggggtttcaccatgttggccaggatggtctcgatctcttgacctcaatgatccgcccgcctcggcctcccaaattatttcaggagttcttaatctttttgtgcacggacctcattggcagtttggtgaagcctatggtccctttctcagatttcttttaagtgcataattaaatacatgtgattacaagggaaaccaattatatggaaatattagcaaaacaacaaactaatatggtcataatatatgtacagcctta

SEQ ID NO: 445486 - DNA, 591 bp, Homo sapiens
tcctgtggatagcatgacttcaattaattatgaaaagtatgtaggcaaagctaaagactactgataaaccttaactaatctgatacgatttctaaaaactgaaataccatcagtaaacatgaagagaaagactttcccaagtacttaaacatatgttccaaaacactsagcaataacaaaggctaatgaaatattagatttaagagaaagctccaatacgagaaattctctttacctataggtaatcgattctttttatttgctggagtggttgctggagatagctgaggtgtattgtagggagtcatttctaaactgctactttttcctggcttggccgggggtaggtttgccaataaattgtcaagagccattctatcttctctcagttgatctccagacatcacactcttcataaaattcacctggcaaaagcaaagaacattagctaatgaaatcactttttcaaatacaatatgtatttcccacacaatgtactcatgtatgtttttgctcacgcttagctaaaagactttcgagaaattctcttaaacaatgaagccattaccagagtaataagctgactgtagg

SEQ ID NO: 445487 - DNA, 561 bp, Homo sapiens
aaaagatggtttttgaaaagatacataacattgacaaatccttagccagactaattaataagaaaagagagaagacacaaataaaatcaaagatgaaaaaggagacattacaaccaataccacagaaattcaaaggattattagcagctactatgagcaactatacgccgataaattggaaaatctagaacaaataaattccttgacacatacaacctaccaaaattgaatcatgaagaaatccaaaacctgaacagaccagtaacaagtaataagattgaagccataacaaaaaaagtcttccagcacagaagagcccagcacccaatggcttaaatgctgaattctaccaaacatttaaagaactaataccaatcatatttaaagtagttggaaaaacaggaagagaayacttccaaattcattcaacaaggctagtcttaccctgataccaaaaccagacaaagacacatcaaataaaggaaaccactggccaatacccctgatgaacattgatgcaaaaatcctcaacaaaatactaccaaaccaaattcaacaaca

SEQ ID NO: 445488 - DNA, 578 bp, Homo sapiens
gatcaagcagaagaactagttagattgaagacrggttgtttgaaaatacacagttagaggagacaaaagaaaaatgaggaaaaagaatgaagcacacacacaagattgagaaaataaagtgaaagggcaaatctaacaattacttgccttaaagagaggtagagagaggtcaggctagaaaatatattcaaagggataatatcagagaacatcccaaacctagggaaagatatcaatatccaagaacaaaaaggttatagaccatgaagtagatgtaacccaaagaaaactacctcaaggtatttaataatcaaaatcccaaagtccaaggataaagaaaggatactgacagcagaaaaaaaaaaaaaacacaaataacatacaatggacctctaacacatctggcagcagactgcacagtggaaactttacaggccaggagagagtgtcatgacatatttaaagtgctgaaggaaaaaaaaaaacttttaacatagaatagtatatccatcaaaaatatccttcaaacaaaagactttcccagacaaacaaaagctggattacatcaataccaaatc

SEQ ID NO: 445489 - DNA, 578 bp, Homo sapiens
gatcaagcagaagaactagttagattgaagacgggttgtttgaaaatacacagttagaggagacaaaagaaaaatgagkaaaaagaatgaagcacacacacaagattgagaaaataaagtgaaagggcaaatctaacaattacttgccttaaagagaggtagagagaggtcaggctagaaaatatattcaaagggataatatcagagaacatcccaaacctagggaaagatatcaatatccaagaacaaaaaggttatagaccatgaagtagatgtaacccaaagaaaactacctcaaggtatttaataatcaaaatcccaaagtccaaggataaagaaaggatactgacagcagaaaaaaaaaaaaaacacaaataacatacaatggacctctaacacatctggcagcagactgcacagtggaaactttacaggccaggagagagtgtcatgacatatttaaagtgctgaaggaaaaaaaaaaacttttaacatagaatagtatatccatcaaaaatatccttcaaacaaaagactttcccagacaaacaaaagctggattacatcaataccaaatc

SEQ ID NO: 445490 - DNA, 529 bp, Homo sapiens
tgcacacctacaattacctgatccttaacaaagctgacaaaaacatgaaatggggaaaagaccccctattcaataaatggtgctgagataactggctagccaaatgcggaagattgaaactggaccccttccttacaccatactcaagatggattaaagacttaaatatgaaaacaaaagctawaaaaacctttgaagaccacctaggcaataccattctggacacaggaactggcaaagattttatgatgaagacatcaaaagcaactgcaacaaaaattgacaaatgggatctaattaaactaaagagcttctgcatagctaaagagcttctgcatagcaagagaaactatcaaagagtaaacagtcaacatacagaatgggagaaaattttcacaaattatgcatctaacagggttctaacatccaggtttaacatccagaaaccataagaaacttaagtcaacaagcaaaaaaacaaatgatcccattaaaaagtgggcaaagaacataaacagacacttgtcaa

SEQ ID NO: 445491 - DNA, 534 bp, Homo sapiens
ctcctcaaaattcatatattgaggccctaataaccaatgtcatagtatttggaggtaggcctatgaaaggcaattagggtcatgaggattactccttcatgaatgggagtagcaccttaatgagaggggacactagagagaagatctctcggtgtcatatgaggatacaacaaaaaggcagccatttacaaagagccctcaccagaaaccacattggctrgcattttaattttgtacttcctggaaccatgagaataaatgtttgttatttaagccacccaggattctgttttagcagtcagaactgactaagacacaagatctcaagcgattctgatgcacactaaagtgtgagagtcaccaaaataacaataacacacttcccagtagattaatctgagtgacataatattgaaaaaatgggtcataagtgccatataaaataaaaacttcaaaaatatacctgaatggtatatcttataaccaaaaacctccaaaattgactaatatgttataattttgaaattgaaagat

SEQ ID NO: 445492 - DNA, 552 bp, Homo sapiens
gaggtttttggatttgtagattcatatctttcatcacattttggaagttttgggccatcatttattcaaatagtatttctaccattttcttggtcccttctcctgttgggattcccataatatrtgtgttggtctgcttggtggtgtcccactgatcactttttttcttttttctctctttatgctctttagactcaatgattttaattgttctatcttgtagttatctaattactttttgtgctgaaatctgctgctgaaccctctagtgaaaattttatttcagttgtatttttcagctcctgaattacttttgtgtgtgtattttgttcctttttttccctttcattgatatgtaataatctacctatttatgggctatatgtgagtgtttgttacatgcatataatttgtaatgatgaagtcagggtatttggggtctccgtcaccttgagtttttatcagttgtatgtgttggtatcatttatagtctctttcagttgcttcgaaatacatgtgacgttgttcccaagtataggaacctgagtgtgc

SEQ ID NO: 445493 - DNA, 552 bp, Homo sapiens
gaggtttttggatttgtagattcatatctttcatcacattttggaagttttgggccatcatttattcaaatagtatttctaccattttcttggtcccttctcctgttgggattcccataatatgtrtgttggtctgcttggtggtgtcccactgatcactttttttcttttttctctctttatgctctttagactcaatgattttaattgttctatcttgtagttatctaattactttttgtgctgaaatctgctgctgaaccctctagtgaaaattttatttcagttgtatttttcagctcctgaattacttttgtgtgtgtattttgttcctttttttccctttcattgatatgtaataatctacctatttatgggctatatgtgagtgtttgttacatgcatataatttgtaatgatgaagtcagggtatttggggtctccgtcaccttgagtttttatcagttgtatgtgttggtatcatttatagtctctttcagttgcttcgaaatacatgtgacgttgttcccaagtataggaacctgagtgtgc

SEQ ID NO: 445494 - DNA, 557 bp, Homo sapiens
ttgctaatattagagacagtccaaatattaaaggaggtccytgaacactggcatctctaccatgtctttaagatcctcagcatccatttgagaggtggaagtttctcccctcctcaaaaacctgcagtgagttccaccaaattttagcatagagagtatccagacttcttaccttggctttcagagttctttatgacgcctaacttcacctccactattcttatcacattccgggagtgcctgctacaatgagcttctcatatgccaaaaagagtggcatatgctctgtaaggctgaggagagagttttttgggaaagagagcatttcaggatcaaacatgtcataccacacctgcacctacccacttgcttgagcccagccctctcagttctatttcacccagaccccagggagcttaatgcttgagtaaggagttggtggactaggtgacctttggggttccatctggactaaaaatagaacagcaggctttctatgttcacttctgcccatgtctgtggacagtcctggatggagtaaggatcgctttctttat

SEQ ID NO: 445495 - DNA, 557 bp, Homo sapiens
ttgctaatattagagacagtccaaatattaaaggaggtccctgaacactggcatctctaccatgtctttaagatcctcagcatccatttgagaggtggaagtttctcccctcctcaaaaacctgcagtgagttccaccaaattttagcatagagagtatccagayttcttaccttggctttcagagttctttatgacgcctaacttcacctccactattcttatcacattccgggagtgcctgctacaatgagcttctcatatgccaaaaagagtggcatatgctctgtaaggctgaggagagagttttttgggaaagagagcatttcaggatcaaacatgtcataccacacctgcacctacccacttgcttgagcccagccctctcagttctatttcacccagaccccagggagcttaatgcttgagtaaggagttggtggactaggtgacctttggggttccatctggactaaaaatagaacagcaggctttctatgttcacttctgcccatgtctgtggacagtcctggatggagtaaggatcgctttctttat

SEQ ID NO: 445496 - DNA, 557 bp, Homo sapiens
ttgctaatattagagacagtccaaatattaaaggaggtccctgaacactggcatctctaccatgtctttaagatcctcagcatccatttgagaggtggaagtttctcccctcctcaaaaacctgcagtgagttccaccaaattttagcatagagagtatccagacttcttaccttggctttcagagttctttatgacgcctaacttcacctccactattcttatcacattccgggagtgcctgctacaatgagcttctcatatgccaaaaagagtggcatatgctctgtaaggctgaggagagagttttttgggaaagagagcatttcaggatcaaacrtgtcataccacacctgcacctacccacttgcttgagcccagccctctcagttctatttcacccagaccccagggagcttaatgcttgagtaaggagttggtggactaggtgacctttggggttccatctggactaaaaatagaacagcaggctttctatgttcacttctgcccatgtctgtggacagtcctggatggagtaaggatcgctttctttat

SEQ ID NO: 445497 - DNA, 521 bp, Homo sapiens
tacaccagggttgtcaagtcatttacaatttttaataaagttctaaacacatccctgtttatcttgcctgacttggattrtgctaatagaatcatcaaaattacattctaacttctcaattctttggtcagtcaaaggtgtgttctgcataagcatcaacaatcggggtcaatatcaagattatataacttttctcatcaccaattcctatccatagagtatacacaggcacacttgattctctcctatggctttcagaggtttttttttttggtgggggggcaatcagaagtctatgataaatgcatttgaaaattcctgcatggcctcttcttgtttctgctttacatgtttcttctctgtcaagcaaggcaccaggagagtaaatcctgtatttgctagagcagcgtgtgaataaaatcattttaaggtaatggcaattcattcagaggagataagaggacaaacctgtcctttgaggcattcaaggtttaaaaggatctttgatagtaacagctcaa

SEQ ID NO: 445498 - DNA, 521 bp, Homo sapiens
tacaccagggttgtcaagtcatttacaatttttaataaagttctaaacacatccctgtttatcttgcctgacttggattatgctaatagaatcatcaaaattacattctaacttctcaattctttggtcagtcaaaggtgtgttctgcataagcatcaacaatcggggtcaatatcaagattatataacttttctcatcaccaattcctatccatagagtatacacaggcacacttgattctctcctatggctttcagaggtttttttttttggtgggggggcaatcagaagtctaygataaatgcatttgaaaattcctgcatggcctcttcttgtttctgctttacatgtttcttctctgtcaagcaaggcaccaggagagtaaatcctgtatttgctagagcagcgtgtgaataaaatcattttaaggtaatggcaattcattcagaggagataagaggacaaacctgtcctttgaggcattcaaggtttaaaaggatctttgatagtaacagctcaa

SEQ ID NO: 445499 - DNA, 552 bp, Homo sapiens
cttaacttcctcagcataatcataaggccagatgggctccagagaagctatgcaaagataagtaatggagaaaatgtatattttttgctcagaccatggcaaaagtggctaaccagaatataaagtagacaatttaggtagaaacgcaagtcaagttctcctgagatttattccatgtactgctgtttattaccgctgtattctgaggaaagtaaggctggcaatatctttttttccatttaggttaatcaatctatctstgaaagaattgtctatgggaatccactcattccctaaaagcttgaaacaagagctcatggaattcctgccaatcctagtgtttagatctccagcgatgttatttgaacctggaaaataaataccaattatcatcaaattgtgtgtctgagcagacagggtagtgtgaagggtaaaacagagtcttcatgctgtcaggaaaatcagtcaaggccagaagaacagttccccatgctgtgagcagaagccagctgagatgaggggggctcatccactgttaatacattttttttt

SEQ ID NO: 445500 - DNA, 552 bp, Homo sapiens
cttaacttcctcagcataatcataaggccagatgggctccagagaagctatgcaaagataagtaatggagaaaatgtatattttttgctcagaccatggcaaaagtggctaaccagaatataaagtagacaatttaggtagaaacgcaagtcaagttctcctgagatttattccatgtactgctgtttattaccgctgtattctgaggaaagtaaggctggcaatatctttttttccatttaggttaatcaatctatctgtgaaagaattgtctatgggaatccactcattcyctaaaagcttgaaacaagagctcatggaattcctgccaatcctagtgtttagatctccagcgatgttatttgaacctggaaaataaataccaattatcatcaaattgtgtgtctgagcagacagggtagtgtgaagggtaaaacagagtcttcatgctgtcaggaaaatcagtcaaggccagaagaacagttccccatgctgtgagcagaagccagctgagatgaggggggctcatccactgttaatacattttttttt

SEQ ID NO: 445501 - DNA, 573 bp, Homo sapiens
catagtttagtcttcttaaaataactattgtagaatctcagtatttataacatagaagacaaattgtaatgattttgagatgagaatcccttagatcatttatttatttcccatcyctttaaaaaaatgacaaaattcagactgataaaaaggttgaaaaaatattatgaaaaatttctaaatccttttcacccagatttccaaaatattaacattttacttcatttgtttattctctggctctctcatttgacagtaattagtaatttgattgatgccctttcccctaagaatgttagtgtatatttctacaaacaaatgcattctcttatataactactttacaatgatcaaaaccaggaaattaacacttatgcaatataattaacaatctatgtactttattcagattccaccaattacctctttaatattctttatagcaaaaggaaatttctagtcacgcattgccttcaactgtcacttttgtctcctttagtctggaacacttcctgaatttttcttgccattgatattcttgaagagtaaggtcagttcttttttagaatgttt

SEQ ID NO: 445502 - DNA, 533 bp, Homo sapiens
cccacctcagcttcccaaatggctgggattacaggtgtgagccaccatggcgagcytgatcgaggttcttgaagcctctatccaaccttaaccacttctaagcttgattaaattcaagagtagattacatggtgctgttagtacaggtcaaaaaaaagacagggatggaattagaaatccgcaggttctaccagctcaagcccattggaggaaactaaagagcaaagttgatccctaacctccatgttgagttgtggaaggtagccacagttaagtgcagtttggtcacgcaggtttcctggaaactgatattggtggctttttgcatagaaccatgagtcatgcatctaagagtcatagactttgactgtgggaggggtgtcggttcctctagatggtagttggaaggggtgggaggcttaatcactgcccagtaacagtgaaaaggggaaggggaaacggagcagcattctctctggggcccttatggcatgtggcaaaagtagtgacaatcttcaccaggtgagaagatt

SEQ ID NO: 445503 - DNA, 533 bp, Homo sapiens
cccacctcagcttcccaaatggctgggattacaggtgtgagccaccatggcgagcctgatcgaggttcttgaagcctctatccaacyttaaccacttctaagcttgattaaattcaagagtagattacatggtgctgttagtacaggtcaaaaaaaagacagggatggaattagaaatccgcaggttctaccagctcaagcccattggaggaaactaaagagcaaagttgatccctaacctccatgttgagttgtggaaggtagccacagttaagtgcagtttggtcacgcaggtttcctggaaactgatattggtggctttttgcatagaaccatgagtcatgcatctaagagtcatagactttgactgtgggaggggtgtcggttcctctagatggtagttggaaggggtgggaggcttaatcactgcccagtaacagtgaaaaggggaaggggaaacggagcagcattctctctggggcccttatggcatgtggcaaaagtagtgacaatcttcaccaggtgagaagatt

SEQ ID NO: 445504 - DNA, 590 bp, Homo sapiens
atagatgccatgatctctcctttgagctccactctctcccaggcacctcaaatccaatatccaacttcagtttgattaacttggcatccccacactcaagcctgctcctcccaccatgtccaccatccaggaaaggcctgactggcctttcagccacgttcatgagaaaccaggtgtcctcttaagctactctctctcccacaccaccacctattatcagccaccaagtcctgtcagttatgcttttgcctaaatatttctcaaaccagaccacctctctccaaccccatagaaattacattagtctttatcttttacctgtgttacaggatcccagtgtccttcaagaccaccttggatgtttcttcagtctgtcctcaggaagaagggaggagagccttctaaaatgcaaatttaatcacatgactccccagcttaaaactctcagcyggctatttcttccccggccccacccccaagatctcctcacactgggtaacactggatatggaattccttttagttgcttaaacaaatcaatctagttctgtctcacgagctctctctagaatatcctctcacctgttcac

SEQ ID NO: 445505 - DNA, 521 bp, Homo sapiens
gggtgttgcagtttcccactaatattgtgtggttacctaagtctctttgcaggtctctaagaacttgctatatgaatctgggtatcctgtgttgggtgcatatatatttacgatagctatgtcttcttgtttaattgaaccctttaccattatgtaatgctcttctttgttgyttttgatctttgttggtttaaagtctgttttgtctgaaattagactagtaactcctacttttttctgttttctgtttgcttgatagatttttctccacttatttactttgagtctgtgggtgtcattgcatgtcagatggtcctcttgaagactacatacagttggatcttgcttctttatccaacttgctactctgtgccttttaattgaggcattttgtctgtttacattcaagattaatattgatatgtgaagatatgatcctgttgtcatgttgttagctggttatacagactcgtttgtgtggttgctttatagtgtcaatggtctctgtgcttaaatgtgtt

SEQ ID NO: 445506 - DNA, 672 bp, Homo sapiens
tgaaattaatgaaaatttaaaactttcctgcatcaaggcatatcatcaagaaagtgaaaagacaactcacaaaataggagaaaatatttgcagccatatatctgataaggtctggtaatcagaatatgtaaagaactcttacaagtcaacaacaaaaagacaacctaatttaaagctgggcaaaggacttgaatagacatttctccaaagaagatatataaaaggccaataagcacatgaaaatatattcaatatcaccagtcacagggattgcaaatcaaaaccacagttttatactactttacacccactaggatggctataataataattttaaaaaggaaaataaatgttggtgagaatgtagagaagttggaatcctcatactgataatgcaaaatggtacagttgctgtcaaaaagaaataagcagtttctcaatatgttaaacatakaattattatattatccagcaatttcggataattgaaaacaggtgtttgaacaaaaacttgtacatgaatactcacagcaacattattcataatagtcaaaaaattaaagcaacccaaatttacaacaattgatgaatggataaataaattgtggcatttccaaatcatgatatatccatacagtggaatattattcaaccataaaaataatgaagtac

SEQ ID NO: 445507 - DNA, 610 bp, Homo sapiens
ctagaggatttcaagagcccagctcagatttggggcttatgtctctgatgcttacgtctctgatgctcttggaaccaggccaagaagacgtggtcatttctacctcttaccaccagagggcagcgcttcaccacagagacccttgagccgccaaacacctcaccgtgtgcgtggagaatcctccccaaggcctggacgcagttcttcctattccgtttccccgaggtttggcctaggatcttggacagcactttataattacagacattctgcctgcttaggcctctcaccccagkctgtgcccccgcaggtgttcagacatttctgttgcctgatgaggagaaaatgggctgagggaagggggcggaggaacagcgccatcggccgggcaggacccaggctggattcactcccgtcgcccctgcgaattgggcgtgagcatttgatacaaaggacggggaaggaaagcgacccaaggtgaggggctgctcctctctgcagcgctagagcttcacgttttagacctcctcaaagcctgcgctcaagctgagggcccgcttcacggaggatttcgttgtagaatttgggacagtccttcattcgctggcat

SEQ ID NO: 445508 - DNA, 610 bp, Homo sapiens
ctagaggatttcaagagcccagctcagatttggggcttatgtctctgatgcttacgtctctgatgctcttggaaccaggccaagaagacgtggtcatttctacctcttaccaccagagggcagcgcttcaccacagagacccttgagccgccaaacacctcaccgtgtgcgtggagaatcctccccaaggcctggacgcagttcttcctattccgtttccccgaggtttggcctaggatcttggacagcactttataattacagacattctgcctgcttaggcctctcaccccagtctgtgcccccgcaggtgttcagacatttctgttgcctratgaggagaaaatgggctgagggaagggggcggaggaacagcgccatcggccgggcaggacccaggctggattcactcccgtcgcccctgcgaattgggcgtgagcatttgatacaaaggacggggaaggaaagcgacccaaggtgaggggctgctcctctctgcagcgctagagcttcacgttttagacctcctcaaagcctgcgctcaagctgagggcccgcttcacggaggatttcgttgtagaatttgggacagtccttcattcgctggcat

SEQ ID NO: 445509 - DNA, 663 bp, Homo sapiens
tgcctatagtaactttaggcacagagaggttcagaaactcgcccaaggtcayacactcaggaaggggcagcagcgggcagtgaacccaggtggtgcaactctagagcccgtgctttaactactgtgctgttgtgtggcacaccaagatccctgcactcctactcacccaatctggcaaacacaagtgcctgcttgcagatgacaacacagatcatcatgcctactcagctgcttgccagacagttggtcagggtctcccattgctggtcagtgggtagagagaaaaggaaagccatgagtcaatttggcttctctaaggcgccacagactgtgttgctgtgttcctccataaatgtaaatttacaacacatccttttatcacagtctggtttgctttaggctgccttatttctgaagctgaaggacacagtggtatttggacacatccaggaaaggcctggcaaatggtgactgcttttgaccccaaagaatcccacagtaatttggctccacagtgaaaagtgacccaggctgggtactctcaaacatccctccacccagcatattaattattcataatgtccttaaatactcttctgtgatgaaatgttaagtgacacattaaatattcatcatgatgcatctaacacagggccaagggta

SEQ ID NO: 445510 - DNA, 663 bp, Homo sapiens
tgcctatagtaactttaggcacagagaggttcagaaactcgcccaaggtcatacactcaggaaggggcagcagcgggcagtgaacccaggtgrtgcaactctagagcccgtgctttaactactgtgctgttgtgtggcacaccaagatccctgcactcctactcacccaatctggcaaacacaagtgcctgcttgcagatgacaacacagatcatcatgcctactcagctgcttgccagacagttggtcagggtctcccattgctggtcagtgggtagagagaaaaggaaagccatgagtcaatttggcttctctaaggcgccacagactgtgttgctgtgttcctccataaatgtaaatttacaacacatccttttatcacagtctggtttgctttaggctgccttatttctgaagctgaaggacacagtggtatttggacacatccaggaaaggcctggcaaatggtgactgcttttgaccccaaagaatcccacagtaatttggctccacagtgaaaagtgacccaggctgggtactctcaaacatccctccacccagcatattaattattcataatgtccttaaatactcttctgtgatgaaatgttaagtgacacattaaatattcatcatgatgcatctaacacagggccaagggta

SEQ ID NO: 445511 - DNA, 663 bp, Homo sapiens
tgcctatagtaactttaggcacagagaggttcagaaactcgcccaaggtcatacactcaggaaggggcagcagcgggcagtgaacccaggtggtgcaactctagagcccgtgctttaactactgtgctgttgtgtggcacaccaagatccctgcactcctactcacccaatctggcaaacacaagtgcctgcttgcagatgacaacacagatcatcatgcctactcagctgcttgccagacagttggtcagggtctcccattgctggtcagtgggtagagagaaaaggaaagccatgagtcaayttggcttctctaaggcgccacagactgtgttgctgtgttcctccataaatgtaaatttacaacacatccttttatcacagtctggtttgctttaggctgccttatttctgaagctgaaggacacagtggtatttggacacatccaggaaaggcctggcaaatggtgactgcttttgaccccaaagaatcccacagtaatttggctccacagtgaaaagtgacccaggctgggtactctcaaacatccctccacccagcatattaattattcataatgtccttaaatactcttctgtgatgaaatgttaagtgacacattaaatattcatcatgatgcatctaacacagggccaagggta

SEQ ID NO: 445512 - DNA, 551 bp, Homo sapiens
tgcctcccaaagtgctgagattacaggcatgagccaccacgcctggccactttttaattttaattaaatcaaatttaaatagccgcatgtgrccagtagctgttgtattgaatagagcaattctaggtctttatgctcaactataaaataaagtgttcatgctagaatcaatctctaagcttcctgacatagttcccagtgcagtggcacatattaggcactcaataaatatttgttgaatagatgtttgtagaatgaaagttagccaaatgaataaagatgtgaacaaatgattaatgtgtcatcatggactatcataaatagaattaatttaggataacttcttggaaaaccaagagttttggaggctgaaaagaaactctggcactggctgcaagtgggtgggaactcttggcagtcattcatgtgggaacagaaccaggtagaatccagatcacacttgcctttccacttcctctatacttggaaaagcagcttcctctttgggagtattttcataacccaagtctcccagtgggaaggactctcag

SEQ ID NO: 445513 - DNA, 551 bp, Homo sapiens
tgcctcccaaagtgctgagattacaggcatgagccaccacgcctggccactttttaattttaattaaatcaaatttaaatagccgcatgtggccagtagctrttgtattgaatagagcaattctaggtctttatgctcaactataaaataaagtgttcatgctagaatcaatctctaagcttcctgacatagttcccagtgcagtggcacatattaggcactcaataaatatttgttgaatagatgtttgtagaatgaaagttagccaaatgaataaagatgtgaacaaatgattaatgtgtcatcatggactatcataaatagaattaatttaggataacttcttggaaaaccaagagttttggaggctgaaaagaaactctggcactggctgcaagtgggtgggaactcttggcagtcattcatgtgggaacagaaccaggtagaatccagatcacacttgcctttccacttcctctatacttggaaaagcagcttcctctttgggagtattttcataacccaagtctcccagtgggaaggactctcag

SEQ ID NO: 445514 - DNA, 530 bp, Homo sapiens
  misc_feature (1)...(530): n = A,T,C or G
gcttcataagcaggcaaaatcctagaatatagtgtcttttaggaggttcgtgaaaggatgaaaaggaccctgaaaagcacttttgaattcaggtttctgatgactttagaatcatatcatttggactgaataagaattcctggaactttaataaaaagactgactggtttataaaactgctaatccaagtagaacaaaaattatttgaaaaccaagagaatactttgtcagattttcatgctggatcagccaatactgaaattgtttaaatatacaatttgaatgaattccatggtctaagtcaaattacttatgataacccatcagctatcagtgctatgtccctaaattggagaaacaactagtattcaagaagatataagtccagttaagcatggactcatggagaactgggaygtctgccttgtcctttctgagtccttaaagcttttgttattaaaagctcttcattctatgactcattatggaaaagataaaatgatccaaattaaatacatattggtgcggnn

SEQ ID NO: 445515 - DNA, 547 bp, Homo sapiens
caccccccaaaaaatggacgcttttctcctttcgggtcttcaggttgaggatacaaattgatcagtccatgtgggtgagttaggaagggtttggataaaatgcttcctttccccttgccctgtatgcctctggctattttaagggctatctgaaagggaagtagagatggcatgtttctctatcaggattcccgagtcctaacagtccaagcacacacgcagttgaagtacaatcagccaaagcaatacacatgctttcgaaatttcctakagtgcttcacccctacaggaaaggaattcacagaaacaccaagccttgagtcaatatgatttattgttttctcttctgccattaacattctagctactgggtaagttgttctccatccttgggatctcatggttgggaggagaggtctgggttccctcccacaaaactctcaacgatagaatagaagcacagctgcctcagttatctcacggctgctgctgtaaccaacatgagttccatatccactccaatcaaaaccagaaaaatctccacact

SEQ ID NO: 445516 - DNA, 630 bp, Homo sapiens
ctggacctcagctctgaggtctaggctcctcgttcacccatatctgcatctaggagtgtttctaaagctcccttcaggcaccaactgccaacccccactgctctcagatctctagtgctacctgcaccatcatccctgaagccctggagaaagcgggagcacagaaggacagtagctgccacagtcccaggtggctgagatcctctctggggtactggattggctctatctgctggacagtggggttccgggccatgcagcrgagagatgtttcccaggagttgggccttgatagggaggaataaggttgaggagaaaaggatatccagataaacgccaccttgcccatggtcacctaaccgcgtccaggtccccagtgaaacctcagtaataaagccagcatatatgataaccaaggcaggatacatagaaagaagctccagaagttctctccatccctaggaaattgctaggtggcttctcatcaggggattttcctggatccctctgtgggttttatccacaccatacagggaacaaactcattatatacttggcatttcttaggaaaatgtgagggcaagagaaatgtagtttgagcccagagctatttgagaccggggctagaat

SEQ ID NO: 445517 - DNA, 560 bp, Homo sapiens
caattatccccattttagagatgagaaaactgagatttaggaaagtaacatcactgaaatgacctcctttgaagttgtgaccataggaggacacagccttataatacacaaaatccaatttaagtattatcatttaagtatagtaaaacctaaattaatataaattttggtatgatgcatttgttaagtgtgccctgtcctcacatggggagggctaatattctcatcaggacagggaggcaaaggcactagcattgggaatcagggagcaacatccagtgatgytggccccggcgtctccagtgttgtccttctcagtatacttcaaccaccccagcaagtgggtgtgactgactggaaaatttttgaaatccctgctactgtccttggagtcccgccagctacaggcccagaatcacccctgtcaactgggcattgcctccaggtagcatcagactccagcctgggttgagatttgggtctggcagccacaaccacatactcagctgtgttgcttcaccaccagcccccaaccaacacttcattcactgtgcaattaa

SEQ ID NO: 445518 - DNA, 573 bp, Homo sapiens
taaactacatgtgattaaagtggtgacactaaaaacaggaactggtagtaggctgacatttacgcatgcatagtccgtcatctgctgccatgtgacaagcagttctgcaggtgcactttatggcccattctctaccatggttgttgctcctccttggtcttttcataggtaagtccacccctccactgcctcccaggctcgtctatttgctgcgtacactggtttactctaggratgtgcaattttcattgaggtgctgcctctatgggagccaggctctgtgtgtgcgtgtgtgtgtgtgtgtatgtgtgcgcacgtgcgcgtgggtgcgtaagtctgtgcgcatgtgctataacctcaggtcacgcagctctagacggtgtccttgtgaccctcacatctctttgactaatgtatcacaaggagcctgagcatttccagagaggctgaattgtggaggcatgagatggaggatcagccacagtcagttccaagacgcatgtagtctgcagcatgtcatttcagtcatgtttccagagatgtccaggtttttaaagacctgtggtgatgtag

SEQ ID NO: 445519 - DNA, 564 bp, Homo sapiens
tgtggtattttgttatataaaacctagaaagttaccatacgtgccctgaaattaatgtctactaagggagaaaagaaagaaactgaccacaaactaagggataaaaaccaacacagaacagacctatgggagatcygaatgttgaagttagaaaacatatcttgaattaattgtcattaatatgccagaaattaaatgaaaaaaatttaaaatctcataagagaagtgaaaagagtaagaaaaagaatagacactctagaaatttttaaatacaataattaaaattaaggtgactttaatagaacatgagacacagctgcagagagaatttgtgggctggaagattaattagaaaaaaatatccatactgatgcaaagatcatagtgcaaaaatctaacacacacgtaactggagctgcagaaggagaaaagggagaaaaaattggtaagaagtagtaattgagaaacaatggctgataatattttccaaaactgatgaaaaacatcagaccagagaattcagaacctgtacaaaccataagcaagataagatgatgaaaagcc

SEQ ID NO: 445520 - DNA, 564 bp, Homo sapiens
tgtggtattttgttatataaaacctagaaagttaccatacgtgccctgaaattaatgtctactaagggagaaaagaaagaaactgaccacaaactaagggataaaaaccaacacagaacagacctatgggagatctgaatgttgaagttagaaaacatatcttgaattaattgtcattaatatgccagaaattaaatgaaaaaaawttaaaatctcataagagaagtgaaaagagtaagaaaaagaatagacactctagaaatttttaaatacaataattaaaattaaggtgactttaatagaacatgagacacagctgcagagagaatttgtgggctggaagattaattagaaaaaaatatccatactgatgcaaagatcatagtgcaaaaatctaacacacacgtaactggagctgcagaaggagaaaagggagaaaaaattggtaagaagtagtaattgagaaacaatggctgataatattttccaaaactgatgaaaaacatcagaccagagaattcagaacctgtacaaaccataagcaagataagatgatgaaaagcc

SEQ ID NO: 445521 - DNA, 564 bp, Homo sapiens
tgtggtattttgttatataaaacctagaaagttaccatacgtgccctgaaattaatgtctactaagggagaaaagaaagaaactgaccacaaactaagggataaaaaccaacacagaacagacctatgggagatctgaatgttgaagttagaaaacatatcttgaattaattgtcattaatatgccagaaattaaatgaaaaaaatttaaaatctcmtaagagaagtgaaaagagtaagaaaaagaatagacactctagaaatttttaaatacaataattaaaattaaggtgactttaatagaacatgagacacagctgcagagagaatttgtgggctggaagattaattagaaaaaaatatccatactgatgcaaagatcatagtgcaaaaatctaacacacacgtaactggagctgcagaaggagaaaagggagaaaaaattggtaagaagtagtaattgagaaacaatggctgataatattttccaaaactgatgaaaaacatcagaccagagaattcagaacctgtacaaaccataagcaagataagatgatgaaaagcc

SEQ ID NO: 445522 - DNA, 564 bp, Homo sapiens
tgtggtattttgttatataaaacctagaaagttaccatacgtgccctgaaattaatgtctactaagggagaaaagaaagaaactgaccacaaactaagggataaaaaccaacacagaacagacctatgggagatctgaatgttgaagttagaaaacatatcttgaattaattgtcattaatatgccagaaattaaatgaaaaaaatttaaaatctcataagagaagtgaaaagagtaagaaaaagaatagacactctagaaatttttaaatacaataattaaaattaaggtgactttaatagaacatgagacacagctgcagagagaatttgtgggctggaagattaattagaaaaaaatatccatactgatgcaaagatcatagtgcaaaaatctaacacacacgtaactggagctgcagaaggagaaaagggagaaaaaattggtaagaagtagtaattgagaaacaatggctgataatattttccaaarctgatgaaaaacatcagaccagagaattcagaacctgtacaaaccataagcaagataagatgatgaaaagcc

SEQ ID NO: 445523 - DNA, 458 bp, Homo sapiens
tgagcatctcaactcttcaacctgttagtgtgtgacttcaggcaggttatttacttgttctgtgcctaagttttcttttttgtgaaatgggggcagtaacagtatctgccacccaggcttgagatgaggagtaatgaggtaatgttcctaagagcataagaaatttctctgctcttcccatagtaaaccctrtcgcttccctcattggttttgagcaacaattatttcccatccttcttcaatgccatcttctcttcagtttgagagcacttctaagtgtcccataccctaaaatggtcagtgctttcactctacctatctctttagtttttatctaactctaactcttattgtgaacttaatcttgtctcacccttgttcttccaattattacataaatccactgactccaagatgctatgactctatgagtaaaaatgtaaggtagaattgattcc

SEQ ID NO: 445524 - DNA, 552 bp, Homo sapiens
aaaaattaaatatgtacagaaggctaccttttattgacattcacaatttcttacaaatcttatagatttactggcacttgtggtagtagcaggaatagtctcccagtaaactcctcaatgctaactgtcagggtaacatttgctgaatcctctgaagccttttagagcatggtggcacacatactgggatgtagcatgtagcatgagaaagaacttaggctctgggatcagacagacctgagtttcagtcccagatctgccacttagtggctggtgataccttgggcaagttaggtaactctctagatgctaggttttctcatctgtagcaggggtcatatgggaatatccctgtgttktgagactattaaatggaacactctatatatagtctagcatagcacctgaggtataataggtgttcaataagtgttggtttaaacaaaatcaaataaaaattctacatgtatcagactcctaaagaatcttggaaaaataatgaacaggactttgggtataatgttcaagattaatgcactgaaaaaagcaaac

SEQ ID NO: 445525 - DNA, 576 bp, Homo sapiens
taataaactccatatatatggagttatataaataagttaatacttaataaactccatagatagatagatagataaatagataggtatctcctattagttctgtccctctagggaacmctaatacaggagccaaggcaaatttcatttattctgtggtaaagatttttaaaactttttattcctttcttaaaatttttacataagctaataattcttataggtcacatctggatgagactaaatccaacagccaaaaatttgaaaatgccatgaaaccagttattcattacatataataacaaaacctaactggttttgctgaattcagtcaaatgtatttgcatgtgtggatacaaccatattatgggacaaatgtgcaaaaggtattaagagttattatgtcctaaaatggcttgccccagaaggcaactgacttagtaaacaagacactttataaaaaaatagagcttagcagtccaggaattgctgctgaaacatggaacaacccatccgcagaaaaaatataaaacacagtgcccgggataggagactttggttggttacagaaggtgtttc

SEQ ID NO: 445526 - DNA, 576 bp, Homo sapiens
taataaactccatatatatggagttatataaataagttaatacttaataaactccatagatagatagatagataaatagataggtatctcctattagttctgtccctctagggaacactaatacaggagccaaggcaaatttcatttattctgtggtaaagatttttaaaactttttattcctttcttaaaatttttacataagctaataattcttataggtcacatctggatgagactaaatccaacagccaaaaatttgaaaatgccatgaaaccagttattcattacatataataacaaaacctaactggttttgctgaattcagtcaaatgtatttgcatgtgtggatacaaccatattatgggacaaatrtgcaaaaggtattaagagttattatgtcctaaaatggcttgccccagaaggcaactgacttagtaaacaagacactttataaaaaaatagagcttagcagtccaggaattgctgctgaaacatggaacaacccatccgcagaaaaaatataaaacacagtgcccgggataggagactttggttggttacagaaggtgtttc

SEQ ID NO: 445527 - DNA, 585 bp, Homo sapiens
tgtgacattgggcaaaccacttcatccctctggacttcagttttcatgcagtaaaatgtgaataacaaggccaggtgcggtggctcatgtctgtaatcccagcactttgggaggcgaaggcaggcaagtcacttgaggtcaggagttcgagaccagcctggccaacatggtgaaaccccatctctaccaaataatataaaaagyaggtggctgtggtggtgcgcaactgtaattccagctacttgggaggctgaggcaggagaattgcttgaacccaggaagtggaggttagagtgagctgagatctcgccactgtgatccagcctggacaatgcagcaagattccatctcaaaaaataaaaataaaaatgtgagtaacgagctctacctcacaggactgttgtgaggagtgaaatgacaagagcaaaatgagaatgtacatgaatatgtgaaaggtgtgattatcattaagaaagattatctcaaaaacctggatttctctttactaccactgccatcagcagctcacctcagctgggaagccccaaactcaatcaacaggtgtgtatagcacccatattttat

SEQ ID NO: 445528 - DNA, 570 bp, Homo sapiens
tggttatatgcggtttgttgattcacatggttctttgagacyacaaaacattagaaacaatgactaagctaagtaactgaagagatgctcacatgtactagtcagtttattcccaggatgcctgttttccatttgtagctgaagccttctgaaaagtcttaccaacagaggtgtttcttcagaggatgtttaaactgacctgatttaatccagctaatcaaagaaatttgtatgaacaactccctagacatttgtgcatggaccacttagcttcctttattagttattcatttgaaaattaatgacaagaatcaagcaaacctggtaaatttactcagcagctggtttggcttctgcctgtagaaacacttgcctctctgtccccagtcacatagtaccacgggcttcttctcatggcatttcctacatacacctcctgcaacttgtacttttctgtttcctgtattggtatgctcgtgcctgaaaagaatgagtcaggcctcatagtctttgtagcccagttcttaacagtgcttggcatatcataagtgctcaatcagagcttgtaag

SEQ ID NO: 445529 - DNA, 570 bp, Homo sapiens
tggttatatgcggtttgttgattcacatggttctttgagaccacaaaacattagaaacaatgactaakctaagtaactgaagagatgctcacatgtactagtcagtttattcccaggatgcctgttttccatttgtagctgaagccttctgaaaagtcttaccaacagaggtgtttcttcagaggatgtttaaactgacctgatttaatccagctaatcaaagaaatttgtatgaacaactccctagacatttgtgcatggaccacttagcttcctttattagttattcatttgaaaattaatgacaagaatcaagcaaacctggtaaatttactcagcagctggtttggcttctgcctgtagaaacacttgcctctctgtccccagtcacatagtaccacgggcttcttctcatggcatttcctacatacacctcctgcaacttgtacttttctgtttcctgtattggtatgctcgtgcctgaaaagaatgagtcaggcctcatagtctttgtagcccagttcttaacagtgcttggcatatcataagtgctcaatcagagcttgtaag

SEQ ID NO: 445530 - DNA, 642 bp, Homo sapiens
ttttaaaaatgcatatgatggctaggcatgatggctcacacttgtagtcccaccactttgggagactgaggcaggtggatcgcctgagcccgggagttcaagaccaccctgggcaacatggggaaaccctgtatctacaaaaaaaaaaaaaaaaattagccaggcatggtggcacagacctctagttccagctaccagggaggctgaggtgggaggatggcttgagcctgcgaggtcgaggctacagtgagccgtgagcatgccactgcactccagtctgggtgamagaaccagatcctctcttgaaaaataataataggccgggcacagtggctcacacctggtatcccagcacttttgagaggcggaggtgggtggatcacttgaggtcaggagtttaagaccagcctggccaacatggtgaaaccctgtctccaccaaaaatacaaaaattagccaggcttggtggcatgcatctgtagtcccagctactcgggaggctgaggcaggacaatcacttgaacccgggggagcagaagttgcagtgagccgagattggaccactgtactccagcccaggccacagagcgagactccatctctaaaaaataataataatgattgatataaaataaataaaaa

SEQ ID NO: 445531 - DNA, 642 bp, Homo sapiens
ttttaaaaatgcatatgatggctaggcatgatggctcacacttgtagtcccaccactttgggagactgaggcaggtggatcgcctgagcccgggagttcaagaccaccctgggcaacatggggaaaccctgtatctacaaaaaaaaaaaaaaaaattagccaggcatggtggcacagacctctagttccagctaccagggaggctgaggtgggaggatggcttgagcctgcgaggtcgaggctacagtgagccgtgagcatgccactgcactccagtctgggtgaaagaaccagatcctctcttgaaaartaataataggccgggcacagtggctcacacctggtatcccagcacttttgagaggcggaggtgggtggatcacttgaggtcaggagtttaagaccagcctggccaacatggtgaaaccctgtctccaccaaaaatacaaaaattagccaggcttggtggcatgcatctgtagtcccagctactcgggaggctgaggcaggacaatcacttgaacccgggggagcagaagttgcagtgagccgagattggaccactgtactccagcccaggccacagagcgagactccatctctaaaaaataataataatgattgatataaaataaataaaaa

SEQ ID NO: 445532 - DNA, 642 bp, Homo sapiens
ttttaaaaatgcatatgatggctaggcatgatggctcacacttgtagtcccaccactttgggagactgaggcaggtggatcgcctgagcccgggagttcaagaccaccctgggcaacatggggaaaccctgtatctacaaaaaaaaaaaaaaaaattagccaggcatggtggcacagacctctagttccagctaccagggaggctgaggtgggaggatggcttgagcctgcgaggtcgaggctacagtgagccgtgagcatgccactgcactccagtctgggtgaaagaaccagatcctctcttgaaaaataataataggccgggcacagtggctcacacctggtatcccagcacttttgagaggcggaggtgggtggatcacttgaggtcaggagtttaagaccagcctggccaacatggtgaaaccctgtctccaccaaaaatacaaaaattagccaggcttggtggcatgcatctgtagtcccagctactygggaggctgaggcaggacaatcacttgaacccgggggagcagaagttgcagtgagccgagattggaccactgtactccagcccaggccacagagcgagactccatctctaaaaaataataataatgattgatataaaataaataaaaa

SEQ ID NO: 445533 - DNA, 536 bp, Homo sapiens
tgttgtccgccagtgctaggccatttccctgggacttgtggaggcttctctgccctcacacaatcccgtgctacccctccctgccagcawcttatttcttctcagagcaatgggggaggggtgtcagttgggactctttactcacaaataatagaagcccagttcaaactggcttagacagaaaaaaaaaggcatgtgggagcagggagagtgatttattattttttcacttaaataatcaatctgtggggaaggcagggatagagctggcataatggagaaatgtcaccagaggctcaaaagtcatcagagctctccacctttcatctctactgtgtattttgagtcagcttaactcttcctactgcagcccgctgagggaaggggtgggagcgaggggaggagtgtaccacaacacaacagctggcagctccagacccacacatactaacagctccgacaccagacagggaagaaaatgtgcttccctctaactccaatttaaagaatgtcagaaatagctctgattggcccaa

SEQ ID NO: 445534 - DNA, 536 bp, Homo sapiens
tgttgtccgccagtgctaggccatttccctgggacttgtggaggcttctctgccctcacacaatcccgtgctacccctccctgccagcatcttatttcttctcagagcaatgggggaggggtgtcagttgggactctttactyacaaataatagaagcccagttcaaactggcttagacagaaaaaaaaaggcatgtgggagcagggagagtgatttattattttttcacttaaataatcaatctgtggggaaggcagggatagagctggcataatggagaaatgtcaccagaggctcaaaagtcatcagagctctccacctttcatctctactgtgtattttgagtcagcttaactcttcctactgcagcccgctgagggaaggggtgggagcgaggggaggagtgtaccacaacacaacagctggcagctccagacccacacatactaacagctccgacaccagacagggaagaaaatgtgcttccctctaactccaatttaaagaatgtcagaaatagctctgattggcccaa

SEQ ID NO: 445535 - DNA, 536 bp, Homo sapiens
tgttgtccgccagtgctaggccatttccctgggacttgtggaggcttctctgccctcacacaatcccgtgctacccctccctgccagcatcttatttcttctcagagcaatgggggaggggtgtcagttgggactctttactcacaaataatagaagcccagttcaaactggcttagacagaaaaaaaaaggcatgtgggagcagggagagtgatttattattttttcacttaaataatcaatctgtggggaaggcagggatagagctggcataatggagaaatgtcaccagaggctcaaaagtcatcagagctctccacctttcatctctactgtgtattttgagtcagcttaactcttcctactgcagccmgctgagggaaggggtgggagcgaggggaggagtgtaccacaacacaacagctggcagctccagacccacacatactaacagctccgacaccagacagggaagaaaatgtgcttccctctaactccaatttaaagaatgtcagaaatagctctgattggcccaa

SEQ ID NO: 445536 - DNA, 564 bp, Homo sapiens
tggtgaatgctggagtctccactgagtaaaaatcagggttttatataaggcaaggggttaagatttggataatcaacatttatagaaactttaacagtcactttttaatttttacatttctatgaacaccttgaaactttcataaaacttgacaataatattatggaccaaaatatacatcattaatatttaacaatcatgagcagttttctatatctttttcattttttttcctacggggtctcaacacaactttctccatatctttacrttttacagataccaaggtacagtacccagagatttgaattcagttggtcttatctgagacacagtcaataatgcatttttttaagttccacagttaattctggtgtttaactagagtgtacaaggaatatcagggaatttttatttgtatgaacagattattagacatgaattaagaagacctaggttatagtatggaataatatttctattaaaaatttattatattacactttccaacaagtcactttacatctttgtgactgcaatttctttagatgtaagaaaaaaata

SEQ ID NO: 445537 - DNA, 544 bp, Homo sapiens
accttgatctcagacttccagcctcaagaactgtgagaaaataaatttctgttgtttaagccattcagcttgtggaacttttatatgatgactctggcaaactaatatggcattacacacaggggataagaaaataatccaaataagtatatgtatcaactaccataagagcagattgagttcctatcctaaaggaaaatactactattagataaattttagaaatktatctaataaagctataacaatcggtaaagctcataaattttcttactgtgaacttatatatgaatttaaaatggaaaggtattatgtactaattcttgtcccgatcagaaggtttacctgtacccctcaaataactatcaccagaatgaaggcagcagttacatgaagaagcacaaagaaccaccactaaagatctaatggtacccaaatcccttttaaagtatgtctgtgtctatattggttaaccttttcttatctgaaatacaaatgccacatgatctcacttataagtggaagctaaacattgagtacagat

SEQ ID NO: 445538 - DNA, 609 bp, Homo sapiens
tagaacctctgaaacatttctttaagcaatctcagtggtgaaaagtagtcacagaattttaacatagatttttttttataccagacactgtactatatgctttacttttatcactgctttttttttcctctaaaaaatactcttttggggagaagagcckgcatgccccaaggtttcctaagttagtcccaagtgaccagcaacactggtaaaatatcacatctgaaaaaaatctatgaccattccataacataatataatcatatatgaaatttaaaataccatttagattatttaatacctaaaccttaaaataagttaaaataagtttcagtaagatcaataatatttatattgtggctttccaatataaattgtttaccatcacaaacatcctggttcaccactccatatctccatagccataaagagtaatatttcacaaattcctctaatatttagaacaattccaatatgtcagtgtcattagtcccatttaatgcatgagaaaaataagtcttaaaaaacaagtcattttccaaagtcatatgcaaatagggcttataaaatctatgatttcaaccattgtccatttgaccttaaagccca

SEQ ID NO: 445539 - DNA, 493 bp, Homo sapiens
ttagttctggggcatgtcttttcatctagaatatattactaactcctaaattagtaaaatgaatgaccagagctcagtgggatatgtttcttctcgctaggctaggctgagattccaacacgcttcagccctgaataactttctatcaacattagcttctcagtcatgcaacaattagaatctactgggcctcagagagtctccccgtgcatgtgcagcctagtctcgtctgaagaaccataatgaacctccacaaaaattgttgatcacctgctctgctcagctcttttttctttaggaaactgatccygaaatccaactttggaagaaacctgcttcctcaggctactgcgagctgaaagttctgcttatctttatctcactgtgctatgaaaggagatttttctcagacagaaggcagagaaaatgtagatttctttatatatttacccttttcaaggatgagggtcttgcattgtttatcatacagtac

SEQ ID NO: 445540 - DNA, 512 bp, Homo sapiens
catgtattcaaaacataaagttgtttgtgtattttcctgggattttttgtagcttaccttaagcgtcttgtttatatttcttactgttggagaagtgacaacccggatgtgaactcttattatattaccgctaacgttggacacatgcaggtttaaccattgtgtcactcaaaggtacaagagaaaatattttgtacaattttcccttgatactttaggtataacttctgcctaagaatcctatcaataaagtttaactttgaactaaaatgagtttacaaagcaatatcacttataacagcttccaaatcatttcagatcccaaaccggaaaaagyaggctgctcccaggtcaaaaattttattactgagtggacagtatatagttttattttttttaaaaaaagctgtaaaatataatactacttagaagactgttctgattaatgctctacttttcatttttatttttttgatatttatatgtgtgatactttcataataatacaaaaa

SEQ ID NO: 445541 - DNA, 546 bp, Homo sapiens
tttggtggagaaagtttaatatagtcaaatataaaaggaacatcactgaaacattaaaaaatgaaaaatgtaggagagtgtaaaaaaatccctaagatagacaagaaaagaacaaagggattaatgtacaaaataatttaaaataaagatgataaaagataaaaaaaattttacttacagttaatttttcttatgagagagccaaacaaatattatgcatgcagtgaataagatagaataaaaagaaaaataagataaaggaaattttatctctcagtcaarggtcagcacataaaattaaagaaaggggatattttataatgaaatactctattttaaaagcaaaaaaaatcatctaagtaaaattaaagcttactgcaaaggtacttgtcttactctagatgttgtaacaaaatatcataaacttggtaacttataaaatatatgaatctatttctcatgtttctaggggctgggaatccaagactaaggcagattcagtgtctgattagagtccactttctcacaaatggcaccttcttgctt

SEQ ID NO: 445542 - DNA, 551 bp, Homo sapiens
attcttgtaataaagataaagcctctaagtaggcacaattgaaagaaagcccacaattctattgtatatgtgttaattttctagttatagtgggacatcagtagtagttgataaattcataatgtatacctatttacagaatgtttatgatttctcaaatatttgtatgttttttgcatatgttacagaatttaatttttacaacagtcttccattttataatagctatatatgtatacacacacacacatttatatacatatgttgtttttcaagtatrgcatttttttcaacttagggttgttttatttttttttacctattgtttcttatgccaaaaaagcttctcttccacatattctcatgatttgctccctcactttattcaagtcattgttcaaatatgacttcctcagagagcttttcttgattacccacctacaacatgtccaatgctatttcttacatgatatttcttgcaatgatttgttgtatgatatttcttgtatgatgcaatgagaatataatattaaatacctgaggagtgaaac

SEQ ID NO: 445543 - DNA, 639 bp, Homo sapiens
ttgatttacaaagaattgctatcttaaaaacattaaatctctctcccatgaacatgagatgtattttgattaatttatatattcttcagtttctttcaaagttttgtggttttaagtgtatatgtcttgcaattattctgttaaatttattccaaaatattttattcatatttatacaataagtgtgtgtgcttcttgatttcttaagattttaaaaatatagggctatgtaactgcaaacaaatatagttttattcatttgtccagtckaaatgtcattgattctattcctggctaattgccttggatagaaccaccagtactatgttaaatgaaatggtgagagtagacattcttgtctttttatcttgtgaaaaaaagctttttttttcaccattttttgcaaggagtggttaactagcataattctttgtgttatttttatctttattctgacccttaaaagatgttaagaaagcataagaaaaatatgagatcccttgcatgtcagagagtgtattttttataggtcacaatttcaattgataacataatttgctattacattctatgtcaaaattaatattttcagaatgtctggtgttttctacagtctaatattgttgagaaaatatacac

SEQ ID NO: 445544 - DNA, 277 bp, Homo sapiens
actctttagaagcctttagaaattaaaaaaaaagaattgcaatttttccagaactgaaagaaggaaaatacttttaaagctaatggacacaataaggtgcccattaatgaaaaaataaaatatgagtataatcaaccatgtttcatatacagraatatatatgacaaaataattatatgtgatatatatatgtttaatagcttttatcatatatgtgtgtatagagtatgcgctcatatcacacacactcataggcacacatatttatatatggaga

SEQ ID NO: 445545 - DNA, 317 bp, Homo sapiens
gtgtatatatttgtatagcatttttagtggtttctcaaggtattatattttaaatataccacttaccatagtctagtggagtcatgtttttatcagttcaagtgaagcagagaaatctcaccacagttkatatccatttgccttgtaaatttataatataatgttcttaacatttttctatatacttttggaacactataatcagacagggttacaattttggcttcaaatgtcaaatataattcagaaaatttaagaaagaaagccttttttatttaattacatttttcttaccatcttatttcctcctttataat

SEQ ID NO: 445546 - DNA, 327 bp, Homo sapiens
tgctatcacatgctgagtttttgccaatctgaaaagttaaaaatgacacagtaatgcatctattttgcatttcccctactgtgaacaaaattggccaaattacatcatataattatgagataattatacttcttcactagataattatttatttrccacttttgaatgcccttctactttcatttcaatttggaaaagcactttgtcccataaatgtcagttttttgtccttgagttacgaatatttcttgttacacagttctggttgctggaagtccaaaatcaagtgtaaggcccaaaatagggccataccctctctgaaaccag

SEQ ID NO: 445547 - DNA, 554 bp, Homo sapiens
tattaaggaatttattgtgaactggagcaaggattacccttgttacaccttagcaaagaacttgtatgcattctgtctataccctacagatttgttggacttaacaatgatgacttaggttatytggcagaagaaacttctaagcagcaaagcattcaagaagtaatgtagctgcttctaacaacctataatgacatatgggagcaaaagaatgacttaacattggaacttataattaaaagggaggcagaacataagcatttgggaaatacacagcccagccttctggcagagaaggaaaaaggatttttcaggggaaaaatccaaaggagatgaatcaaagcaacttgtggagcaatcacttgctagagagactagcatgagtaaaaaaagaaccaggtgttaatatcgaagacaatagaaaaaaaaaattcctggaaggtctttcagaaatcttccagaccacgcctccaattacaagctcaagggcctagagggaatgaatggtttggggggccaggcctgacacaccaccctttgccaccttgggatgc

SEQ ID NO: 445548 - DNA, 627 bp, Homo sapiens
tggtttatttaaaacaacctggtaattcttcctctctctttgctctctctcctgtcaggtgacatgcctgttttctcttcaacttctgccataattataagcttcctgaggttttcaccaaaagcatactctggtactatgcttcttctatagtcttcagaaccawtaaccaaattaagcctcttttctttacaaattattcactctcaggtatttctttatagcaatgcagaagagactaatacacgggattagatactaaaggtgttataccaaggatgataaacataagactaaataccaatggtgctataccaagaaggagacatataagaatcaaaaggattactttattaatataaaagggctttctagaaattgaaattttaccatttcggctcaaacctagaaaatagttttaataagctgctagagagaaaatcaatctggagtccatcatggcctacagttaatgagcttaaaatatcacttctcctggcacacaataaaggaagacttgatggctcaaaaggatgagaatgttggaatagatctaccctgtagaactttcttagccaccatctaaaagtactgtctaaagagcttttcacagatttattaaccaat

SEQ ID NO: 445549 - DNA, 578 bp, Homo sapiens
ctcagaggtataccatgaatcttccctgaaatccctcctcaggaagctctgctttcaattactgaaataaaaattcactgggaagaggaatatacccagatatcctaggagttattatatcctggctctgaactgatagtaatccctggtgatatgaaattctatcgtggtcaaccagaaaaagtgggtatttctgtgcatcactttataaacggtatatactttattctgtcttacattgggtgccttgagacattggataaatcctttgaatatttatcttgttcaagtgtgtataggagaaataaataaatatagtaacacacaatttctctacaagggtttcctaacatgtacagcaaagaatgayatgaaaggaaaaaccaagcacagctcatggaaccattcacctcaagatttattaagagagtaaacacagaacagtagcaaatccatggagaaattgtagacattagtgataacaggaaatattttaaaaatgcatgtttggtgatttctccacattctcccttgaaatcacccatctgactgaggcaaagacagatgggtcattgata

SEQ ID NO: 445550 - DNA, 278 bp, Homo sapiens
ttatctaattattttcatgtttagagacaaagaggggkcagtctccataaaacaacaggttttaattattatttgatatagacccattaatttttttaagaaaattaatataaatgtgcttcccaaatacagttaaacaaaactttatcaatttttaaattgcaaataataaatatagtttaaaatctcacacaatttatgtgtgatgtttgccatcaaatgcttgagtttaaaggtagaaaattgccacgattattttctcccaggaatcaggttct

SEQ ID NO: 445551 - DNA, 208 bp, Homo sapiens
tgtaagaagacacaagcagctggtcrtcaagagcacgctgacactctggcaggccatcgacctgccggacaaggcagagtttggccggagcagtgtgaggaaagccggggctgccgagtggcccaactccaggtgaaaatcatctcccttctgagtccctcattggaggagagttacttccactcaataaaacttcgcactaattctc

SEQ ID NO: 445552 - DNA, 208 bp, Homo sapiens
tgtaagaagacacaagcagctggtcatcargagcacgctgacactctggcaggccatcgacctgccggacaaggcagagtttggccggagcagtgtgaggaaagccggggctgccgagtggcccaactccaggtgaaaatcatctcccttctgagtccctcattggaggagagttacttccactcaataaaacttcgcactaattctc

SEQ ID NO: 445553 - DNA, 498 bp, Homo sapiens
tttcttggttgttgggctatttattactgattcaaattcagagctcgttattggtctgttcatgraatcagtttctttctggttcagtcttggaagggtgtatgtgtccaggaatttattcatctcttctagattttctagtttgtgtgcatagaggtgttcatagtagtttttgatggttgtttttatttctgtggggtcagtagtaacattctcttgtcatttctaattgtgtttatttggatagtctcttttcctcctttattactctagttagtggcctattttattagttttttcaaaaaaccaacttttggatttattgattttctgaactttttttggtgtctcaatttccttcagttcaattctgatttttgattatttctcatcttccgctagcttttgggttgatttattcttgcttctctaattctttcagttgtgatgttaagttgttaatctgagatctttctaactttgtgatgtgagcattta

SEQ ID NO: 445554 - DNA, 401 bp, Homo sapiens
tgggttattttcctcctaaatgttagtactattttcaactcaataaacataaaacaaacaccattagggtaagattatctggatcacagattaaaagaccctattttgatcttactgaaattcctgwttcagtttgtgaggccagcatcttcaaagtaatatcatatattcaaaaaccgagtctaactgatgtgttttacaatttagagctgtcatatagttgacaaataagaaaaatcacaccaactacaacatatccccatgatcacaatgatacacactggaggtcaaagtctttctacaagatgttgtcatatgctgagacattttacttgacatatgacttatccttcaaaatggagggcattcactctgcttattctgttgaaattttgtgagat

SEQ ID NO: 445555 - DNA, 606 bp, Homo sapiens
ggtctagcagttaacaggaaaagcacaacggtgggaaatggagggaccctactcatcattaaccacattgggcaaacaatttgcctgaattccatagtgaagaccatcaaccctggcttgatgagtacaaattctgttttgttttataacttttttttttttttacaatgtygtgatgcacctggctcttttctcctcttcctaacattctggctttagcccctaatcttctctgactgaatttatagcaagtcacctttttttctgaaacaatgggagataatatttggaaaatattaaaacaaaaagaaatgaaaataagagtcacccatattctcagcatacagaattggtattctaatctatttgcttctagtgttctaatatttccatgtataaactttttcaatacacaatatatgagtgaattctttaaaaaattgaagattgcaaataaaacaaaaagtttttttgtaatacaaagataaaactgaagtctcctttgaccatcattccaatatcagttccaaacctaatttccaaagcgtaagtttgatacatatcccttctagtccatctttatacttttatattaaatacattgaa

SEQ ID NO: 445556 - DNA, 575 bp, Homo sapiens
gtaaatatgtgacttaattatgatttttttgtcggtctcagtggctcaagcgtgtaatcccagcatttgggaggccgaggcgggcggatcacgaggtcaggggatcaagaccatcctggctaacacggtgaaaccccgtctctactaaacaaaatacaaaaaattagccgggcatggtggcgggagcctgcagtcccagctagtcgggaggctgaggcaggagaayggcgtgaacccgggaggcggaggttgagtgagccaagatcgcgccactacactccagcctgggcgatagagcgagactctgtctccaaaaaaaaaaaaaaaaaaaaaataataataataataatgagtttgtattgttcttattttgcaaaagaatgcaagatctgggtagagaaaaggcaagagggaggacttcccagattgaatcaataatattaacagtatcaatctgccactaataattatttaagaaaagtatttttctgctttcagttttatttattaaatagtttctgctagcctaatgttaaagtctgccaactagttccttcaagttaatcacattcact

SEQ ID NO: 445557 - DNA, 575 bp, Homo sapiens
gtaaatatgtgacttaattatgatttttttgtcggtctcagtggctcaagcgtgtaatcccagcatttgggaggccgaggcgggcggatcacgaggtcaggggatcaagaccatcctggctaacacggtgaaaccccgtctctactaaacaaaatacaaaaaattagccgggcatggtggcgggagcctgcagtcccagctagtcgggaggctgaggcaggagaatggcgtgaacccgggaggcggaggttgagtgagccaagatcgcgccactacactccagcctgggcgatagagcgagactctgtctccaaaaaaaaaaaaaaaaaaaaaataataataataataatgagtttgtattgttcttattttgcaaaagaatgcaagatctgggtagagaaaaggcaagagggaggacttcccagattgaatcaataatattaacagtatcaatctgccactaataattatttaagaaaagtatttttctgctttcagttttatttattaaatagtttctrctagcctaatgttaaagtctgccaactagttccttcaagttaatcacattcact

SEQ ID NO: 445558 - DNA, 527 bp, Homo sapiens
ggaaaccaaaagcccctctgaatcctacccaccgaggttctccccagccaaggcgaggcggccscagtgcgagatccacaccgcagcctcggaagacaagcgggcagaaatcccatgaggggcagttgaggtttgaggaaggcgaggtgaggcacctgtggcagaaaaaaaaaaaaaccgcaccacggagaagcagagcctgggtccccaacggacaaaagtgtcttcccattagcccttgcgctgggcccaggtgaccctggcattcctggttcgagaccagggtgcgcttcaggccgctaggggtgcccaaaagcgggcagaaggcccatgaggggaaggtgatgcacctggggcagagaaaaaaaaaaaaaaaaaaaaccgcgccgcctataagcggggcctggctcccccacagaagaaactgtcctcacatcagcgcttgcgctgcgccccagggaccctggtatccctggctcgagcccagcgtgcgcctcggcctgctaggggtaccccaaggcagacag

SEQ ID NO: 445559 - DNA, 527 bp, Homo sapiens
ggaaaccaaaagcccctctgaatcctacccaccgaggttctccccagccaaggcgaggcggccgcagtgcgagatccacaccgcagcctcggaagacaagcgggcagaaatcccatgaggggcagttgaggtttgaggaaggcgaggtgaggcacctgtggcagaaaaaaaaaaaaaccgcaccacggagaagcagagcctgggtccccaacggacaaaagtgtcttcccatyagcccttgcgctgggcccaggtgaccctggcattcctggttcgagaccagggtgcgcttcaggccgctaggggtgcccaaaagcgggcagaaggcccatgaggggaaggtgatgcacctggggcagagaaaaaaaaaaaaaaaaaaaaccgcgccgcctataagcggggcctggctcccccacagaagaaactgtcctcacatcagcgcttgcgctgcgccccagggaccctggtatccctggctcgagcccagcgtgcgcctcggcctgctaggggtaccccaaggcagacag

SEQ ID NO: 445560 - DNA, 572 bp, Homo sapiens
ggacactggcgaccctggttagagcccagggtgcgcctcgtgcccaataagggtatcccaaagcgggcagaatgctcattaggggaaggtgagacacctggggcagagaaaaaaaaaaaccgcgccgcaaagaagcgggacctgggtcccccacggatgaaagtgtcttcccatcagcccctgccctgggccccatggaccctggcaaccctggttcgagccccaggtgygcttcgcgcccgctagggttacccagaagccggcagaaggcccatgagaggaaggtaagacacctggggcaaaggaaaaaaaaaaccgcgcttgcagaaaagcggggcctggctcctccacggacgaaggtgccttcccatcagcccctgcgctgggccctggggaacctggtgtccctggctggaaaccagggtacaccttggacccgctaggggtaccccaaggagagcagaaagcccatgaggggaaggtgaggcatctgcggcagagaaagaagaaaaaccgcgcagcggagaagcggggcctgggtcccccactgacgaaagtgtctttccgtcagc

SEQ ID NO: 445561 - DNA, 572 bp, Homo sapiens
ggacactggcgaccctggttagagcccagggtgcgcctcgtgcccaataagggtatcccaaagcgggcagaatgctcattaggggaaggtgagacacctggggcagagaaaaaaaaaaaccgcgccgcaaagaagcgggacctgggtcccccacggatgaaagtgtcttcccatcagcccctgccctgggccccatggaccctggcaaccctggttcgagccccaggtgcgcttcgcgcccgctagggttacccagaagccggcagaaggcccatgagaggaaggtaagacacctggggcaaaggaaaaaaaaaaccgcgcttgcagaaaagcggggcctggctcctccacggacgaaggtgccttcccatcagcccctgcgctgggccctggggaacctggtgtccctggctggaaaccagggtrcaccttggacccgctaggggtaccccaaggagagcagaaagcccatgaggggaaggtgaggcatctgcggcagagaaagaagaaaaaccgcgcagcggagaagcggggcctgggtcccccactgacgaaagtgtctttccgtcagc

SEQ ID NO: 445562 - DNA, 572 bp, Homo sapiens
ggacactggcgaccctggttagagcccagggtgcgcctcgtgcccaataagggtatcccaaagcgggcagaatgctcattaggggaaggtgagacacctggggcagagaaaaaaaaaaaccgcgccgcaaagaagcgggacctgggtcccccacggatgaaagtgtcttcccatcagcccctgccctgggccccatggaccctggcaaccctggttcgagccccaggtgcgcttcgcgcccgctagggttacccagaagccggcagaaggcccatgagaggaaggtaagacacctggggcaaaggaaaaaaaaaaccgcgcttgcagaaaagcggggcctggctcctccacggacgaaggtgccttcccatcagcccctgcgctgggccctggggaacctggtgtccctggctggaaaccagggtacaccttggacccgctaggggtaccccaaggagagcagaaagcccatgaggggaaggtgaggcayctgcggcagagaaagaagaaaaaccgcgcagcggagaagcggggcctgggtcccccactgacgaaagtgtctttccgtcagc

SEQ ID NO: 445563 - DNA, 527 bp, Homo sapiens
tcaagtagctgggactacaggtgccccccaccacacccagctaatttttatatgtttagtaaagacagggtttcaccatattggccaagctgttctcaatcctgacctcagatggtccacctgtytcagcctcctaaagctctgggattacagtcatgagccaccgcacttggctgggttttctctctctctctctctctctctctctctctctctctctactttaagttctgggataaatgtgcagaacatgcagttttgttacacaggtatacatgtgtcatggtggtttgctgcaacatgggtgtaggttttgcaggtaattattatattattaaaagataacagaatacctagctaaaaaaaaatgcgaggaggcattgatgggcacatgtttagtgagcacatcctgactccagaattaaaaatccaatttatgcctctgcagtccaataaaatttttccttaagaatccagggatcagactttcatctcagcaaccactccaatatggtttctcacctact

SEQ ID NO: 445564 - DNA, 527 bp, Homo sapiens
tcaagtagctgggactacaggtgccccccaccacacccagctaatttttatatgtttagtaaagacagggtttcaccatattggccaagctgttctcaatcctgacctcagatggtccacctgtttcagcctcctaaagctctgggattacagtcatgagccaccgcacttggctgggttttctctctctctctctctctctctctctctctctctctctactttaagttctgggataaatgtgcagaacatgcagttttgttrcacaggtatacatgtgtcatggtggtttgctgcaacatgggtgtaggttttgcaggtaattattatattattaaaagataacagaatacctagctaaaaaaaaatgcgaggaggcattgatgggcacatgtttagtgagcacatcctgactccagaattaaaaatccaatttatgcctctgcagtccaataaaatttttccttaagaatccagggatcagactttcatctcagcaaccactccaatatggtttctcacctact

SEQ ID NO: 445565 - DNA, 527 bp, Homo sapiens
tcaagtagctgggactacaggtgccccccaccacacccagctaatttttatatgtttagtaaagacagggtttcaccatattggccaagctgttctcaatcctgacctcagatggtccacctgtttcagcctcctaaagctctgggattacagtcatgagccaccgcacttggctgggttttctctctctctctctctctctctctctctctctctctctactttaagttctgggataaatgtgcagaacatgcagttttgttacacaggtatacatgtgtcatggtggtttgctgcaacatgggtgtaggttttgcaggtaattattatattattaaaagataacagaatacctagctaaaaaaaaatgcgaggaggcattgatgggcacatgtttastgagcacatcctgactccagaattaaaaatccaatttatgcctctgcagtccaataaaatttttccttaagaatccagggatcagactttcatctcagcaaccactccaatatggtttctcacctact

SEQ ID NO: 445566 - DNA, 553 bp, Homo sapiens
agtggaatattctacacctcctgggaggtctctcacttcaaccttcacctgacataacccctgctcctgttccytcaacctggagagcttgcccaggagcacagggtagtactggactgacctctttggaaagggtgattacatcctcatttcagctctccctcctcctagctttccacgtagaaatccagggctccatgcagcatttgctggacatgaggggaaaacttttagggcagggatctgccctgggtggggacagaggagtatcctggagtctgagtgtcaggagtgtgagacctgcccagctggccagcccctgtccccatgctgctcgatgcatgatgtttcctgcacaagcttcctttagagggaagcttccggagtgactgcagtgaggtccatgctgttgggggtgacagagcagccctggaggccctctgctcttaccctggcaggaggtggccaaaaagaagcaggcagaggaagcttctccaacacgcttggaaagaaatttccacatatcactcacgtcactcttgccactagaagg

SEQ ID NO: 445567 - DNA, 553 bp, Homo sapiens
agtggaatattctacacctcctgggaggtctctcacttcaaccttcacctgacataacccctgctcctgttccttcaacctggagagcttgcccaggagcacagggtagtactggactgacctctttggaaagggtgattacatcctcatttcagctctccctcctcctagytttccacgtagaaatccagggctccatgcagcatttgctggacatgaggggaaaacttttagggcagggatctgccctgggtggggacagaggagtatcctggagtctgagtgtcaggagtgtgagacctgcccagctggccagcccctgtccccatgctgctcgatgcatgatgtttcctgcacaagcttcctttagagggaagcttccggagtgactgcagtgaggtccatgctgttgggggtgacagagcagccctggaggccctctgctcttaccctggcaggaggtggccaaaaagaagcaggcagaggaagcttctccaacacgcttggaaagaaatttccacatatcactcacgtcactcttgccactagaagg

SEQ ID NO: 445568 - DNA, 553 bp, Homo sapiens
agtggaatattctacacctcctgggaggtctctcacttcaaccttcacctgacataacccctgctcctgttccttcaacctggagagcttgcccaggagcacagggtagtactggactgacctctttggaaagggtgattacatcctcatttcagctctccctcctcctagctttccacgtagaaatccagggctccatgcagcatttkctggacatgaggggaaaacttttagggcagggatctgccctgggtggggacagaggagtatcctggagtctgagtgtcaggagtgtgagacctgcccagctggccagcccctgtccccatgctgctcgatgcatgatgtttcctgcacaagcttcctttagagggaagcttccggagtgactgcagtgaggtccatgctgttgggggtgacagagcagccctggaggccctctgctcttaccctggcaggaggtggccaaaaagaagcaggcagaggaagcttctccaacacgcttggaaagaaatttccacatatcactcacgtcactcttgccactagaagg

SEQ ID NO: 445569 - DNA, 553 bp, Homo sapiens
agtggaatattctacacctcctgggaggtctctcacttcaaccttcacctgacataacccctgctcctgttccttcaacctggagagcttgcccaggagcacagggtagtactggactgacctctttggaaagggtgattacatcctcatttcagctctccctcctcctagctttccacgtagaaatccagggctccatgcagcatttgctggacatgaggggaaaacttttagggcaggsatctgccctgggtggggacagaggagtatcctggagtctgagtgtcaggagtgtgagacctgcccagctggccagcccctgtccccatgctgctcgatgcatgatgtttcctgcacaagcttcctttagagggaagcttccggagtgactgcagtgaggtccatgctgttgggggtgacagagcagccctggaggccctctgctcttaccctggcaggaggtggccaaaaagaagcaggcagaggaagcttctccaacacgcttggaaagaaatttccacatatcactcacgtcactcttgccactagaagg

SEQ ID NO: 445570 - DNA, 586 bp, Homo sapiens
tgtttgtctatatttatttgactttgacaatctgatattatttagcattatttccagtctcccaaataatgtcaaaattttgttatgttagataggaatatcttgttattcaacttgaaggtaaactgcttgatcaatgcatgtaattccttgacagattgtcagcacctctaagacaacatgtagatattgctcattattaactcatttcatcttttcatgataaattacaaaaatttaattttcatttttaaaatgcaaaccattatgccttgtattatggcattcttgcattactataaaggaatacctaagcactacataatttatactgaaaaaaaagattgacttggctcacagttctgcaggctgtacaggaagctttgcattggcagttgcttggcttcaagaagggtcctcagggagcttttacacatggcagaagrtgaagcaaaagaaggtatgtcacatggccagagcaggagcaagcagggagaggtgccacacacttttaaacagccagatgtaatgagaactcactcactcttgcaaggacagtgccaagaggatggtgttaaacatgaga

SEQ ID NO: 445571 - DNA, 521 bp, Homo sapiens
cccaactccaacactgggaattacaattcgacatgagacttaaagggtacaacatccaaactatttcattccatccctggcccttcaaatctcgtgttcttctcacattgcaaaatacaatcatcccttctcaatagtcccccaaaagtctcaamctgtttcggcatcactcgaaagtgcagtttcttctgagacaaggcaagtcctttccactgatgcgcctgtaaaatcaaaacaagttatttacttctaagataaaattggggtacaggcattgggtaaacattcccattacaaaagagagaaattggccaaaagaaaggggctacaggccccacacaagttcaaatcccagcagggcagtcattaaaactcgatgttccaaaataatctgctttgaaaccatgtcccacatcctgggaacatagagcattcccacgatgcataaggtgggctcccaaggcctggggctgctctgctcccacagctcttctacactgaaggcatgagctgctggtggc

SEQ ID NO: 445572 - DNA, 521 bp, Homo sapiens
cccaactccaacactgggaattacaattcgacatgagacttaaagggtacaacatccaaactatttcattccatccctggcccttcaaatctcgtgttcttctcacattgcaaaatacaatcatcccttctcaatagtcccccaaaagtctcaaactgtttcggcatcactcgaaagtgcagtttcttctgagacaaggcaagtccyttccactgatgcgcctgtaaaatcaaaacaagttatttacttctaagataaaattggggtacaggcattgggtaaacattcccattacaaaagagagaaattggccaaaagaaaggggctacaggccccacacaagttcaaatcccagcagggcagtcattaaaactcgatgttccaaaataatctgctttgaaaccatgtcccacatcctgggaacatagagcattcccacgatgcataaggtgggctcccaaggcctggggctgctctgctcccacagctcttctacactgaaggcatgagctgctggtggc

SEQ ID NO: 445573 - DNA, 543 bp, Homo sapiens
ctcttctacactgaaggcatgagctgctggtggctctatcattctgggatctggagggcagcrgcccccctcccacagctccactaggcagcccccctagtcaggaccccgagtggggcctccaaccccacatttccacttggcactgtgctagaagaggtcctctttgagagctccagtggtgcatagtcttctccctgggcatccagcctttctcatacatcctctgaaatttaggcagagaatgccaagcctccttcactcttgcactttgctcacctgcaggcttaacaccacatggaagccaccaaggcttatagtttgcaccctctgaagccatgacctgagctctatctgcagccctttgaaccaaggctggagctagaagggccaggatgcaaggaacaccctcctgggggtggtacaggacagtgatgccctggccctggtccaagtggaacaggaattaaaagaaattaaagaatgtgtaagcagaaactcagttgtatgtgagaaaacccagttccccctgagaaagagaaa

SEQ ID NO: 445574 - DNA, 543 bp, Homo sapiens
ctcttctacactgaaggcatgagctgctggtggctctatcattctgggatctggagggcagcggcccccctcccacagctccactaggcagccccccyagtcaggaccccgagtggggcctccaaccccacatttccacttggcactgtgctagaagaggtcctctttgagagctccagtggtgcatagtcttctccctgggcatccagcctttctcatacatcctctgaaatttaggcagagaatgccaagcctccttcactcttgcactttgctcacctgcaggcttaacaccacatggaagccaccaaggcttatagtttgcaccctctgaagccatgacctgagctctatctgcagccctttgaaccaaggctggagctagaagggccaggatgcaaggaacaccctcctgggggtggtacaggacagtgatgccctggccctggtccaagtggaacaggaattaaaagaaattaaagaatgtgtaagcagaaactcagttgtatgtgagaaaacccagttccccctgagaaagagaaa

SEQ ID NO: 445575 - DNA, 543 bp, Homo sapiens
ctcttctacactgaaggcatgagctgctggtggctctatcattctgggatctggagggcagcggcccccctcccacagctccactaggcagcccccctagtcaggaccccgagtggggcctccaaccccacatttcyacttggcactgtgctagaagaggtcctctttgagagctccagtggtgcatagtcttctccctgggcatccagcctttctcatacatcctctgaaatttaggcagagaatgccaagcctccttcactcttgcactttgctcacctgcaggcttaacaccacatggaagccaccaaggcttatagtttgcaccctctgaagccatgacctgagctctatctgcagccctttgaaccaaggctggagctagaagggccaggatgcaaggaacaccctcctgggggtggtacaggacagtgatgccctggccctggtccaagtggaacaggaattaaaagaaattaaagaatgtgtaagcagaaactcagttgtatgtgagaaaacccagttccccctgagaaagagaaa

SEQ ID NO: 445576 - DNA, 592 bp, Homo sapiens
ctgcagccctttgaaccaaggctggagctagaagggccaggatgcaaggaacaccctcctgggggtggtacaggacagtgatgccctggccctggtccaagtggaacaggaattaaaagaaattaaagaatgtgtaagcagmaactcagttgtatgtgagaaaacccagttccccctgagaaagagaaagagctggagccctttaaaaattaactgcctgtttttctgtggctagtgagcttcatctctcctcctttcccaggcattgtaaagaccctgtttccctaactgtgcagctgcaaggtcactagacagataaactcaagtcgtaaaacatgtttttccttgaaaagtaagaaatgatataatgcatgtctcaattaattgaataactgtctttgtttctcgcttctgtaatatgcttccccctgcacagatctccccactccccaccaccccacaaaatgcttaaaagttaacttaagtctttgttcaggactcagtcctttggttgttaatctgactgggccggtgcacctaaataataaatatcctcctcaaccccatcagtctctctgattccttaaaaaat

SEQ ID NO: 445577 - DNA, 598 bp, Homo sapiens
atgccaagcctccttcactcttgcactttgctcacctgcaggcttaacaccacatggaagccaccaaggcttatagtttgcaccctctgaagccatgacctgagctctatctgcagccctttgaaccaaggctggagctagaagggccaggatgcaaggaacaccctcctgggggtggtacaggacagtgatgccctggccctggtccaagtggaacaggaattaaaagaaattaaagaatgtgtaagcagaaactcagttgtatgtgagaaaacccagttccccctgagaaagagaaagagctggagccctttaaaaattaactgcctgtttttctgtggctagtgagcttcatctctcctcctttcccaggcattgtaaagaccctgtttccctaactgtgcagctgcaaggtcactagacagataaactcaagtcgtaaaacatgtttttccttgaaaagtaagaaatgatataatgcatgtctcaattaattgaataactgtctttgtttctcrcttctgtaatatgcttccccctgcacagatctccccactccccaccaccccacaaaatgcttaaaagttaacttaagtct

SEQ ID NO: 445578 - DNA, 540 bp, Homo sapiens
cttaaaagttaacttaagtctttgttcaggactcagtcctttggttgttaatctgactgggccggtgcacctaaataataaatatcctcctcaaccccatcagtctctctgattccttaaaaaatcccgctacagcctgggcacggtggctcacgcctgtaatcccagcactttgggaggctgaggagggcagatcacgaggtcaggagattgagactatcatggctaagacagygaaaacccgtctctactaaaaatacaaaaaattagccaggcatggtggcagtcacctgtagtcccaactacttgggaggctgagacaggagaatggcatgtcccggaatgcagagcttgcagtgagctgagattgtgccactgcactccagcctgggtgacagagtgaggctccatctcaaaataaataaataaataaattaattaattaattattttttaaaatcccactacacaagaaaccattctttcatcctagacctctaggtctgtgctgggatgagctgctgcaaagatttctgaaat

SEQ ID NO: 445579 - DNA, 540 bp, Homo sapiens
cttaaaagttaacttaagtctttgttcaggactcagtcctttggttgttaatctgactgggccggtgcacctaaataataaatatcctcctcaaccccatcagtctctctgattccttaaaaaatcccgctacagcctgggcacggtggctcacgcctgtaatcccagcactttgggaggctgaggagggcagatcacgaggtcaggagattgagactatcatggctaagacagtgaaaacccgtctctactaaaaayacaaaaaattagccaggcatggtggcagtcacctgtagtcccaactacttgggaggctgagacaggagaatggcatgtcccggaatgcagagcttgcagtgagctgagattgtgccactgcactccagcctgggtgacagagtgaggctccatctcaaaataaataaataaataaattaattaattaattattttttaaaatcccactacacaagaaaccattctttcatcctagacctctaggtctgtgctgggatgagctgctgcaaagatttctgaaat

SEQ ID NO: 445580 - DNA, 540 bp, Homo sapiens
cttaaaagttaacttaagtctttgttcaggactcagtcctttggttgttaatctgactgggccggtgcacctaaataataaatatcctcctcaaccccatcagtctctctgattccttaaaaaatcccgctacagcctgggcacggtggctcacgcctgtaatcccagcactttgggaggctgaggagggcagatcacgaggtcaggagattgagactatcatggctaagacagtgaaaacccgtctctactaaaaatacaaaaaattagccaggcatggtggcagtcacctgtagtcccaactacttgggaggctgagacaggagaatggcatgtcccrgaatgcagagcttgcagtgagctgagattgtgccactgcactccagcctgggtgacagagtgaggctccatctcaaaataaataaataaataaattaattaattaattattttttaaaatcccactacacaagaaaccattctttcatcctagacctctaggtctgtgctgggatgagctgctgcaaagatttctgaaat

SEQ ID NO: 445581 - DNA, 540 bp, Homo sapiens
cttaaaagttaacttaagtctttgttcaggactcagtcctttggttgttaatctgactgggccggtgcacctaaataataaatatcctcctcaaccccatcagtctctctgattccttaaaaaatcccgctacagcctgggcacggtggctcacgcctgtaatcccagcactttgggaggctgaggagggcagatcacgaggtcaggagattgagactatcatggctaagacagtgaaaacccgtctctactaaaaatacaaaaaattagccaggcatggtggcagtcacctgtagtcccaactacttgggaggctgagacaggagaatggcatgtcccggaatgcagagcttgcagtgagctgagattgtgccactgcactccagcctgggtgacagagtgaggctccrtctcaaaataaataaataaataaattaattaattaattattttttaaaatcccactacacaagaaaccattctttcatcctagacctctaggtctgtgctgggatgagctgctgcaaagatttctgaaat

SEQ ID NO: 445582 - DNA, 610 bp, Homo sapiens
tattcacggcagaagatgaagaaggagcaggcaggcacatcacctggcaaggcaggggaagcaccacacacttttaaacaaatagatcttgcaagaattcactcactmtcacaaagacagcaccagggacaggatgctagaccatttctgagaaatccacccccatgatccaatcacctccctccagacctaccaccaacattggggatatcacaattcaacatgagatttagagggaacaacatctgaggtatctcatgcctcatgttgtgacttggtataatgtccataagattacactgactttacacatcatattgcagtttttgctagctcttctgtagtaagaaaatggaattcatcagcaatgccttctaagtctggctctgttttcccatgcagacttttccctgagctctgcttgtcagtcttgctagaacctcaccctaggcagcaacctccagtctgagattgcccttgacagtggctgaggtttgcattgttggaatggattagaaaaaacaaagggaagacagaccaaaacagatttaaatacagatcccatttgttgaagttttaagtaattttaaatgtttatttgcaccagctg

SEQ ID NO: 445583 - DNA, 610 bp, Homo sapiens
tattcacggcagaagatgaagaaggagcaggcaggcacatcacctggcaaggcaggggaagcaccacacacttttaaacaaatagatcttgcaagaattcactcactatcacaargacagcaccagggacaggatgctagaccatttctgagaaatccacccccatgatccaatcacctccctccagacctaccaccaacattggggatatcacaattcaacatgagatttagagggaacaacatctgaggtatctcatgcctcatgttgtgacttggtataatgtccataagattacactgactttacacatcatattgcagtttttgctagctcttctgtagtaagaaaatggaattcatcagcaatgccttctaagtctggctctgttttcccatgcagacttttccctgagctctgcttgtcagtcttgctagaacctcaccctaggcagcaacctccagtctgagattgcccttgacagtggctgaggtttgcattgttggaatggattagaaaaaacaaagggaagacagaccaaaacagatttaaatacagatcccatttgttgaagttttaagtaattttaaatgtttatttgcaccagctg

SEQ ID NO: 445584 - DNA, 610 bp, Homo sapiens
tattcacggcagaagatgaagaaggagcaggcaggcacatcacctggcaaggcaggggaagcaccacacacttttaaacaaatagatcttgcaagaattcactcactatcacaaagacagcaccagggacaggatgctagaccatttctgagaaatccacccccatgatccaatcacctccctccagacctaccaccaacattggggatatcacaattcaacatgagatttagagggaacaacatctgaggtatctcatgcctcatgttgtgacttggtataatgtccataagattacactgactttacacatcatattgcagtttttgctagctcttctgtagtaagaaaatggaattmatcagcaatgccttctaagtctggctctgttttcccatgcagacttttccctgagctctgcttgtcagtcttgctagaacctcaccctaggcagcaacctccagtctgagattgcccttgacagtggctgaggtttgcattgttggaatggattagaaaaaacaaagggaagacagaccaaaacagatttaaatacagatcccatttgttgaagttttaagtaattttaaatgtttatttgcaccagctg

SEQ ID NO: 445585 - DNA, 592 bp, Homo sapiens
cccatgatccaatcacctccctccagacctaccaccaacattggggatatcacaattcaacatgagatttagagggaacaacatctgaggtatctcatgcctcatgttgtgacttggtataatgtccataagattacactgactttacacatcatattgcagtttttgctagctcttctgtagtaagaaaatggaattcatcagcaatgccttctaagtctggctctgttttcccatgcagactwttccctgagctctgcttgtcagtcttgctagaacctcaccctaggcagcaacctccagtctgagattgcccttgacagtggctgaggtttgcattgttggaatggattagaaaaaacaaagggaagacagaccaaaacagatttaaatacagatcccatttgttgaagttttaagtaattttaaatgtttatttgcaccagctgcccactcccattgtactctcctcacccaaaaaggtgacttgatattctagtaaaaagccaaactgtgctttagagaaacccacttgttacttctttaaatccatattattttgccaaagtgaatttttcttaatatgctctgg

SEQ ID NO: 445586 - DNA, 296 bp, Homo sapiens
gtgattttctaaacttcgggtaatatctgtgacttagtaaatgttctttaaaagrtgggataatatttttattttgtttaattatatgtgtttttaaactaattttataggaaaaataatttctttccttccctgttataccaaatacagcctttagctcaagacacaagtaattccaggaaaactggaatgtaagttcaatatgttgcactaagtacatttgaaagtgcatgcatttttattttaattcatcattctcagtcaactatcgcaaggacaaaaaaccaaacaccgca

SEQ ID NO: 445587 - DNA, 529 bp, Homo sapiens
cagttggagtaatatgtgtctagggctaactcagaggggtcttttatgtcttttaaaagaagctaactatactcttgtgatatgataatcaccrtcattgacttacagtttctaaggtttgaagggatattgaacactcaaggggctcacattcttactgattcatgaatctcttcaggtccagggaacttagtatttttcaagagtgcaaaatgcctagagacagctgggaacaaatgaatgtcattcctgatactgtgctcatagttacttgagcttcatctcagaaaacaaattgtctggtgcaatatttcttacaacttagttcctaaatgaactcaacaaactagttcttttgttttattttatttattactattatactttaagttttagggtacatgtgcacaacgtgcaggtttgttacatatgtatacatgtgccatgttggtgtgctgcacccattaactcgtcatttaccattaggtatatctcctaatgctatccctccccactccccccaccccac

SEQ ID NO: 445588 - DNA, 566 bp, Homo sapiens
aacacacacacatacataaacatatatattcagtttcaaacaattgttagggaacctgaggaagaaactaaatggaatataatggttgcatctatgatagccatggtactagaactagtagtakttctactaaggtgagaattgacatagtaaaagaaataagatacaaagcagtaagagagagctacattttccttaaggccaggctgaatattcactaacaaggaaatttctacagtcattattttaatctgattcattctcttggtgggatattccagagttaccacctacagaaattccacttttccttactgaggttctctttttttcttttcagtccaaatattagtcatttggtagagaaggcagaaacaattaacaattgagtaattcctcaggaatcatgttaaaaggtttccaaatcatgaatgtatagttatattttgttcactagattttaacccacatacctcacttgtatagaaattatgcttatttggatattcaatatatttcttcatacaaagacaaaatctataaaatgtacacacacacagatgcta

SEQ ID NO: 445589 - DNA, 566 bp, Homo sapiens
aacacacacacatacataaacatatatattcagtttcaaacaattgttagggaacctgaggaagaaactaaatggaatataatggttgcatctatgatagccatggtactagaactagtagtagttctactaaggtgagaattgacatagtaaaagaaataagatacaaagcagtaagagagagctacattttccttaargccaggctgaatattcactaacaaggaaatttctacagtcattattttaatctgattcattctcttggtgggatattccagagttaccacctacagaaattccacttttccttactgaggttctctttttttcttttcagtccaaatattagtcatttggtagagaaggcagaaacaattaacaattgagtaattcctcaggaatcatgttaaaaggtttccaaatcatgaatgtatagttatattttgttcactagattttaacccacatacctcacttgtatagaaattatgcttatttggatattcaatatatttcttcatacaaagacaaaatctataaaatgtacacacacacagatgcta

SEQ ID NO: 445590 - DNA, 566 bp, Homo sapiens
aacacacacacatacataaacatatatattcagtttcaaacaattgttagggaacctgaggaagaaactaaatggaatataatggttgcatctatgatagccatggtactagaactagtagtagttctactaaggtgagaattgacatagtaaaagaaataagatacaaagcagtaagagagagctacattttccttaaggccaggctgaatattcactaacaaggaaatttctacagtcattattttaatctgattcattctcttggtgggatattccagagttaccacctacagaaattccacttttccttactgaggttctctttttttcttttcagtccaaatattagtcatttggtagagaaggcagaaacaattaacaattgagtaattcctcargaatcatgttaaaaggtttccaaatcatgaatgtatagttatattttgttcactagattttaacccacatacctcacttgtatagaaattatgcttatttggatattcaatatatttcttcatacaaagacaaaatctataaaatgtacacacacacagatgcta

SEQ ID NO: 445591 - DNA, 555 bp, Homo sapiens
catgcacacatgtgcacacacaaatatgtatacatggtttaccattattttctagatcattcagaggtcagtattaattaaaacatcatagatctatggcaaattttgggccacttytcctaagacaggaatttaaaaagccttcaattgtcataacaatgggaagaagtctgagagctggagtaagggaagttggtgctcagaaatattaactaccatttatatatgatatccttatgagataatcttaaagccaaatgaggctaaaatattaatacgagctatttagccaagttttccagcaggaagaaggaaataagcagtgaactaaaaagcatacaagatacagaggagcaggttaaatgaagccattacagcagaaattgagaagaataaacaggagttagaagatgagagcaagcaattgcaagtggagtgggctgagctggaattatggtgtagaaaatgactggttgagaaaaacccaaacaaatatttctataatgtcatgtgcataagatacctgtagatgttatcaaggtatatacataaact

SEQ ID NO: 445592 - DNA, 335 bp, Homo sapiens
tggacagctgaccctgctccctgctccatcacaggttgtagagtattaattcccaagttacccagacatttagttstgaatgtgcaaaaatggtttaggttcaaatgttttcaactactgacaagctcaagaattcagaggaggtagtactaagggaaatgtaattaatatataatatcaaaacttaagcatagcaccataacacctaatttttgatgatgtcaaatacttaaagttctccctttttattttctggtgaaaggtgcgtagtatacaaacctctactaacttcttgggcttctgaataaaggaaaggactacctaatgacagtaat

SEQ ID NO: 445593 - DNA, 335 bp, Homo sapiens
tggacagctgaccctgctccctgctccatcacaggttgtagagtattaattcccaagttacccagacatttagttctgaatgtgcaaaaatggtttaggttcaaatgttttcaactactgacaagctcaagaattcagaggaggtagtactaagggaaatgtaattaatatataatatcaaaacttaagcatagcaccataacacctaatttttgatgatgtcaaatacttaaagttctccctttttattttctggtgaaaggtgcrtagtatacaaacctctactaacttcttgggcttctgaataaaggaaaggactacctaatgacagtaat

SEQ ID NO: 445594 - DNA, 567 bp, Homo sapiens
actacaataactacaaaaattatacctcctggagtatatatttacatatccatgcaaaaggggaatagattaaaagatgtttatgaatgtctaaarccttaagtcagtttaacgtagtattataaatcaggtttgtgggtgatattttgtctgcttctagacttgtgagcaagttattaagttttaggttacttatatttaaaattcaaaaaggaaatgattgtgattgcattcaaagaaagagaggacattttgaagcttcttttttttactaatatcaaaacctaatatcacatttgtaaaacacgttgatggcttacaaccaagtaaaatacctcaataccccacttttcaagatcagtaatattggcctaagagtatcactctataggaattataaaaagttgtatttatgccctgagattataccctataatgtgcaaatattataggatagacaagtggatataaggtttctttctaggtttccttatatactccaaatggtaaaactagatggaagattaaaattctaaatgttgttaattttagaaccttcaatgtcag

SEQ ID NO: 445595 - DNA, 567 bp, Homo sapiens
actacaataactacaaaaattatacctcctggagtatatatttacatatccatgcaaaaggggaatagattaaaagatgtttatgaatgtctaaagccttaagtcagtttaacgtagtattataaatcaggtttgtgggtgatattttgtctgcttctagacttgtgagcaagttattaagttttaggttacttatatttaaaattcaaaaaggaaatgattgtgattgcattcaaagaaagagaggacattttgaagcttcttttttttactaatatcaaaacmtaatatcacatttgtaaaacacgttgatggcttacaaccaagtaaaatacctcaataccccacttttcaagatcagtaatattggcctaagagtatcactctataggaattataaaaagttgtatttatgccctgagattataccctataatgtgcaaatattataggatagacaagtggatataaggtttctttctaggtttccttatatactccaaatggtaaaactagatggaagattaaaattctaaatgttgttaattttagaaccttcaatgtcag

SEQ ID NO: 445596 - DNA, 297 bp, Homo sapiens
aactgaaaaaaaattgttatctaaaagtccacacaaaagatgaagccaagagtttttttaataaacaatactgatagatcattagctagattarcaaagaaaaagagaagatccaaataagtataatcagaaattataaagattatattaaaattgatcccatgaaaatacaaaagatatgcagagactattatgagcacctctctgcacacaaatctagaggaaatgaataaattcctggaaacacacaatctcccaagattgaatcaggaagaaagtgaaaacctgaacggacca

SEQ ID NO: 445597 - DNA, 297 bp, Homo sapiens
aactgaaaaaaaattgttatctaaaagtccacacaaaagatgaagccaagagtttttttaataaacaatactgatagatcattagctagattagcaaagaaaaagagaagatccaaataagtataatcagaaattataaagattatattaaaattgatcccatgaaaatacaaaakatatgcagagactattatgagcacctctctgcacacaaatctagaggaaatgaataaattcctggaaacacacaatctcccaagattgaatcaggaagaaagtgaaaacctgaacggacca

SEQ ID NO: 445598 - DNA, 473 bp, Homo sapiens
ttattactgagcaatcctttggtggagaaggaggttcatgctgctacaggccacaatttgcctcatttgcagtcagatcaggctttttgtcagagagaggacatgcccattaggcaatatgtattcagatacttccaactgatcgytgccttttctttctgattcaaattcccattctcaatatatttacctaatgtatgcctccattttgcctttttaagcaagactaaaaaatcaatacccttgaaaaaaattgattaatttggctaacttaaatttaaagtcttcacttctagcaaaatagttttactacatattttttactatgagaaaatatgtaaactatgtatatgaaagcaaatctataaataatttagaaaaataaaaatatttcaatagaaaagtgggaaaatgtaaaaataggtacttactggaagaatcaagagattagttctaaagaccttaattattta

SEQ ID NO: 445599 - DNA, 473 bp, Homo sapiens
ttattactgagcaatcctttggtggagaaggaggttcatgctgctacaggccacaatttgcctcatttgcagtcagatcaggctttttgtcagagagaggacatgcccattaggcaatatgtattcagatacttccaactgatcgttgccttttctttctgattcaaattcccattctcaatatatttacctaatgtatgcctccmttttgcctttttaagcaagactaaaaaatcaatacccttgaaaaaaattgattaatttggctaacttaaatttaaagtcttcacttctagcaaaatagttttactacatattttttactatgagaaaatatgtaaactatgtatatgaaagcaaatctataaataatttagaaaaataaaaatatttcaatagaaaagtgggaaaatgtaaaaataggtacttactggaagaatcaagagattagttctaaagaccttaattattta

SEQ ID NO: 445600 - DNA, 473 bp, Homo sapiens
ttattactgagcaatcctttggtggagaaggaggttcatgctgctacaggccacaatttgcctcatttgcagtcagatcaggctttttgtcagagagaggacatgcccattaggcaatatgtattcagatacttccaactgatcgttgccttttctttctgattcaaattcccattctcaatatatttacctaatgtatgcctccattttgcctttttaagcaagactaaaaaatcaatacccttgaaaaaaattgattaatttggctaacttaaatttaaagtcttcacttctagcaaaatagttttactacatrttttttactatgagaaaatatgtaaactatgtatatgaaagcaaatctataaataatttagaaaaataaaaatatttcaatagaaaagtgggaaaatgtaaaaataggtacttactggaagaatcaagagattagttctaaagaccttaattattta

SEQ ID NO: 445601 - DNA, 437 bp, Homo sapiens
atgattctgagtaagatgtgcggtcatctcacttacacagaggagatatttagatcacaaaatatctcattttgtctttagatggtccaggaaaytacgccccatgagtcaaagagatttaggttttattataaacaaccctagaaaagaaatcacagcacatgcattcttctaaaagcattctgtaggtaagatattccttcctggaaacttcttagtttgtttgccaagaggttagccagttatatggttaccaaaaaacctgccttctttgtctccagcatgtttcttattaaagagaatgaatgaattgcagaactattgtttgcacatttacttttaaatggtttatcagtaaaatatgtgagaatacatttttaaaataaacttatgtgattgctttggaaaatgtctggaaatacgcaaaccacactgat

SEQ ID NO: 445602 - DNA, 437 bp, Homo sapiens
atgattctgagtaagatgtgcggtcatctcacttacacagaggagatatttagatcacaaaatatctcattttgtctttagatggtccaggaaactaygccccatgagtcaaagagatttaggttttattataaacaaccctagaaaagaaatcacagcacatgcattcttctaaaagcattctgtaggtaagatattccttcctggaaacttcttagtttgtttgccaagaggttagccagttatatggttaccaaaaaacctgccttctttgtctccagcatgtttcttattaaagagaatgaatgaattgcagaactattgtttgcacatttacttttaaatggtttatcagtaaaatatgtgagaatacatttttaaaataaacttatgtgattgctttggaaaatgtctggaaatacgcaaaccacactgat

SEQ ID NO: 445603 - DNA, 437 bp, Homo sapiens
atgattctgagtaagatgtgcggtcatctcacttacacagaggagatatttagatcacaaaatatctcattttgtctttagatggtccaggaaactacgccccatgagtcaaagagatttaggttttattataaacaacyctagaaaagaaatcacagcacatgcattcttctaaaagcattctgtaggtaagatattccttcctggaaacttcttagtttgtttgccaagaggttagccagttatatggttaccaaaaaacctgccttctttgtctccagcatgtttcttattaaagagaatgaatgaattgcagaactattgtttgcacatttacttttaaatggtttatcagtaaaatatgtgagaatacatttttaaaataaacttatgtgattgctttggaaaatgtctggaaatacgcaaaccacactgat

SEQ ID NO: 445604 - DNA, 437 bp, Homo sapiens
atgattctgagtaagatgtgcggtcatctcacttacacagaggagatatttagatcacaaaatatctcattttgtctttagatggtccaggaaactacgccccatgagtcaaagagatttaggttttattataaacaaccctagaaaagaaatcacagcacatgcattcttctaaaagcattctgtaggtmagatattccttcctggaaacttcttagtttgtttgccaagaggttagccagttatatggttaccaaaaaacctgccttctttgtctccagcatgtttcttattaaagagaatgaatgaattgcagaactattgtttgcacatttacttttaaatggtttatcagtaaaatatgtgagaatacatttttaaaataaacttatgtgattgctttggaaaatgtctggaaatacgcaaaccacactgat

SEQ ID NO: 445605 - DNA, 475 bp, Homo sapiens
  misc_feature (1)...(475): n = A,T,C or G
aattcttaattcttacctcatcaagtaccaacaaagaatgcccttccatattaatacactttgggaattaagataaagtatatgtaattaaatcatcaaactccttttgytgtttagcaggtagtttgatataataagagaaattgtgttctcattatatatttgtcacaatgaatgaatgtaaaaccttaatcaggctatctgacttcttttagtgacattaccctttttgcaaccaacacatcaaattagtaatatttatcctacaaaaataatgtgaagataaatgagataagatatataatagtcacaaatacttattgaataaagctgnttttatttatatatttctatgtacttactagatatgttcttattaaatattttattatggtatatgtcaagtcttttacttctttttttatacttagtgtattatagaactcaccatncaataaaattgtaatacaatttt

SEQ ID NO: 445606 - DNA, 531 bp, Homo sapiens
gactgaacccatcatccaggtagtgagcatagaacccaagaggtattttctatggcactttacacattctagaaaactggttgttaattarcacaagcacctataatagtgcctgatatatttagtactcaaaatatatgttaaattaaaaacaaatgtataaattaatggttgaatatcataataattactcaaaatgtaacataattccaaaggagaaaacttttttctaaaaaggctctctcaattgctctttctgatttactattttccccaatctgtagttgcttcattattgtttggaattttgcattagttgtcaataaacaaaaaatatggatcatatcacagctctttcattgctttcatttcttgagatatatgaatgtatgtgatatatttgatgtcctgtattttatctttattgctttttgatacttaagaacatctagaaaagaagataaatattaatcatgtcagaaattatcaaaggttgattacaataaaaatttctctaatgtgataaccact

SEQ ID NO: 445607 - DNA, 495 bp, Homo sapiens
gtagttattcattcttatagatatgtaacataattccttttgcaaaggtaaaaattgagctatctcttgttgaggatttgttgatctctgtctaaagtttcaaaaataaagaactttaaaagcaaaatgtaaattcctttcaagttttagtaaaattacttcaaacttagtagcttaaacaatacagatttattatgttacagttctgtaagacagaaatctgacttgatcacaccatggtaaaaccaagatactgccagggttggttttttcttggggggggtctgtgggaagagtttgtttcctttggttttccacagcccagaggctgcttgcattcctttratcactgtcccttcctccatttttaaaatgaggaatggagtcagggtgactatggttagcaatattgtattgtatatttcaaaatagctagaagagaggatttttgaattctctcaccgtaaagatatcaaagatgtatgaagtgaagaa

SEQ ID NO: 445608 - DNA, 494 bp, Homo sapiens
ttacatattgtttacggctacttatgcactatgatggcaaatactggtacttgtgacagagatcacatggcacatacattctaaaatacttaatagttggcccttcacgaaaggttttgagagctactgctctaggaaatctcaggttcaatgtcagttatgaatcagygttgcttagcatagccatgtttgaaatcctttccaatgacaataattgttactgcctctagacagaagagtccaattattttaaggtttcattattaggaatggttcatttaattaagccatagttgttacttcaagtataattaattagtgaaggtatattgcttttatgggatataattaataggaaaataggttactgctgtgtggcatagttataatttaaatgctgtggctttatagaatttaaaggtagggtctgcttattatgaattatgcctcccatcatctagctcatgtgaggtagttatggaatagcacaatat

SEQ ID NO: 445609 - DNA, 494 bp, Homo sapiens
ttacatattgtttacggctacttatgcactatgatggcaaatactggtacttgtgacagagatcacatggcacatacattctaaaatacttaatagttggcccttcacgaaaggttttgagagctactgctctaggaaatctcaggttcaatgtcagttatgaatcagtgttgcttagcatagccatgtttgaaatcctttccaatgacaataattgttactgcctctagacagaagagtccaattattttaaggtttcattattaggaatggttcatttaattaagccatagttgttacttcaagtataattaattagtgaaggtatattgcttttatgggatataattaataggaaaataggttactgctstgtggcatagttataatttaaatgctgtggctttatagaatttaaaggtagggtctgcttattatgaattatgcctcccatcatctagctcatgtgaggtagttatggaatagcacaatat

SEQ ID NO: 445610 - DNA, 494 bp, Homo sapiens
ttacatattgtttacggctacttatgcactatgatggcaaatactggtacttgtgacagagatcacatggcacatacattctaaaatacttaatagttggcccttcacgaaaggttttgagagctactgctctaggaaatctcaggttcaatgtcagttatgaatcagtgttgcttagcatagccatgtttgaaatcctttccaatgacaataattgttactgcctctagacagaagagtccaattattttaaggtttcattattaggaatggttcatttaattaagccatagttgttacttcaagtataattaattagtgaaggtatattgcttttatgggatataattaataggaaaataggttactgctgtgtggcatagttataatttaaatgctgtggctttatagaatttaaaggtagggtctgyttattatgaattatgcctcccatcatctagctcatgtgaggtagttatggaatagcacaatat

SEQ ID NO: 445611 - DNA, 583 bp, Homo sapiens
atcctacctgcaattgaggctgaaaaatacagcatttccttgtggtccaaagaaagaaataatgttatctcaccaatctctgtcaaggtcagtccttctgatgccaaaatacctgctttaatcttcctcccattataaaacacaccgacttctctcaaaatgaaaaatgcagagttctttcaaggtctggcatccagctcaaaatgtagtatctctggccactcataattctcccagtgargtccagataaggtcctcatttctcagtaaaatctaaacttaaaagaataaatatgtgtcctgtgtacaaatatgcaacggtgaagtgggaacaaggtggcagcaataaatacatctctatcaccacagtcatttgttcttgactatttgcaaatcatttcaggaagacatggtgaaacatcctacactgtgagtggcagaaccccatgtgcactgcaatctcatttcctaccctccggaggagtatataaacttttcctacataaataatggccatatttttgtatcaatacattgtaagttctaagatgtgtgtgtttttttaagaggaattaaaatagaa

SEQ ID NO: 445612 - DNA, 583 bp, Homo sapiens
atcctacctgcaattgaggctgaaaaatacagcatttccttgtggtccaaagaaagaaataatgttatctcaccaatctctgtcaaggtcagtccttctgatgccaaaatacctgctttaatcttcctcccattataaaacacaccgacttctctcaaaatgaaaaatgcagagttctttcaaggtctggcatccagctcaaaatgtagtatctctggccactcataattctcccagtgaagtccagataaggtcctcatttctcagtaaaatctaaacttaaaagaataaatatgtgtcctgtgtacaaatatgcaacggtgaagtgggaacaaggtggcagcaataaatacatctctatcaccacagtcatttgttcttgactatttgcaaatcatttcaggaagacatggtgaaacatcctacactgtgagtggcagaaccccatgtgcactgcaatctcatttcctaccctccggaggagtatataaacttttcctacataaataatggccayatttttgtatcaatacattgtaagttctaagatgtgtgtgtttttttaagaggaattaaaatagaa

SEQ ID NO: 445613 - DNA, 583 bp, Homo sapiens
atcctacctgcaattgaggctgaaaaatacagcatttccttgtggtccaaagaaagaaataatgttatctcaccaatctctgtcaaggtcagtccttctgatgccaaaatacctgctttaatcttcctcccattataaaacacaccgacttctctcaaaatgaaaaatgcagagttctttcaaggtctggcatccagctcaaaatgtagtatctctggccactcataattctcccagtgaagtccagataaggtcctcatttctcagtaaaatctaaacttaaaagaataaatatgtgtcctgtgtacaaatatgcaacggtgaagtgggaacaaggtggcagcaataaatacatctctatcaccacagtcatttgttcttgactatttgcaaatcatttcaggaagacatggtgaaacatcctacactgtgagtggcagaaccccatgtgcactgcaatctcatttcctaccctccggaggagtatataaacttttcctacataaataatggccatatttttgtatcratacattgtaagttctaagatgtgtgtgtttttttaagaggaattaaaatagaa

SEQ ID NO: 445614 - DNA, 456 bp, Homo sapiens
tctggtgacattcctgtgttattttaatttgtattttctttaccacccatgaatcttaacagatttttctatgaaagttcagcactttgattcattcttctgtggactgactgcctgtgcctatccacttccctggctctcttgcttggtgtgtgcatgtggcttagttttagcaaatagaatatttgctgtccctgagccttagtcttaaatccttatacaagcactttttcttgttatcttacctgtttgtctgacttgggtgatgattcttagagtaattttggttgccaaatgttaaagttagtagaastactataagcctctgagtggctaaatggtagttatttctgtggcctgaatactcttatgagatattcagagagattgagagggaagaattatttttgaagacatggaatttttattttctattccttagaacagtttagttta

SEQ ID NO: 445615 - DNA, 536 bp, Homo sapiens
ttactcagcaaaaatagaaagatgttagctgactgtgtcaaaagaaatattttaacactgatttcatttttactaaatgactgaatttgtctttatattttatgcttaagcttctctgctttctttctattttttgtggtttaaataaagaaccatgattatctgtataactgattgctcaaagtaattaatcatttttcttatgaaattaccagggtaaattaagaatcataattacagagttttctcttgtctagaggaaacatactgagaaactgtgttaggaaattattatttcaaaacccagtctaagttcttagccactggactttaaaaaatacatattacatatactttttctaacatgattgagaatatagtttgtttcagatttccacatttcttaaatgaaaacaataaagaattcaaaaggcaaaaggtactgtaaaaaaaaaaggtattygatctcatgtaaatgagaatcctacactctcagtgaattttactagaggggaacttattgtcacatcagattg

SEQ ID NO: 445616 - DNA, 536 bp, Homo sapiens
ttactcagcaaaaatagaaagatgttagctgactgtgtcaaaagaaatattttaacactgatttcatttttactaaatgactgaatttgtctttatattttatgcttaagcttctctgctttctttctattttttgtggtttaaataaagaaccatgattatctgtataactgattgctcaaagtaattaatcatttttcttatgaaattaccagggtaaattaagaatcataattacagagttttctcttgtctagaggaaacatactgagaaactgtgttaggaaattattatttcaaaacccagtctaagttcttagccactggactttaaaaaatacatattacatatactttttctaacatgattgagaatatagtttgtttcagatttccacatttcttaaatgaaaacaataaagaattcaaaaggcaaaaggtactgtaaaaaaaaaaggtattcgatctcatgtaaatgagaatcctacactctcastgaattttactagaggggaacttattgtcacatcagattg

SEQ ID NO: 445617 - DNA, 481 bp, Homo sapiens
ctcctacactgcagagggtagagggaggtatttatataatacacagaattttaattgaagaagcaaagaggaatggattaatgggattaatagtgtttatccaatacaagatgaaaaacaacatattattgtttgtatcgtgatggttctagaataaaacacatcatttctctaattttagttagatctttgctgaaagaaaaagataaataaaataccctacagtttatccatatccatgttcytctacactaaatattcatctttgattagttatttttaactatatttgatttctttataaattacattttgaaactttaaacacataaagacattgtttccccttaaaagatttttcttttcctttcttttgtttttttaatctaaaacttactttcaaaaacaatgactttcataaacttgcaacttgttaaatatagtatttttattaacattctagtttgtaacacaaggcaaa

SEQ ID NO: 445618 - DNA, 481 bp, Homo sapiens
ctcctacactgcagagggtagagggaggtatttatataatacacagaattttaattgaagaagcaaagaggaatggattaatgggattaatagtgtttatccaatacaagatgaaaaacaacatattattgtttgtatcgtgatggttctagaataaaacacatcatttctctaattttagttagatctttgctgaaagaaaaagataaataaaataccctacagtttatccatatccatgttcttctacactaaatattcatctttgattagttatttttaactatatttgatttctttataaattacmttttgaaactttaaacacataaagacattgtttccccttaaaagatttttcttttcctttcttttgtttttttaatctaaaacttactttcaaaaacaatgactttcataaacttgcaacttgttaaatatagtatttttattaacattctagtttgtaacacaaggcaaa

SEQ ID NO: 445619 - DNA, 481 bp, Homo sapiens
ctcctacactgcagagggtagagggaggtatttatataatacacagaattttaattgaagaagcaaagaggaatggattaatgggattaatagtgtttatccaatacaagatgaaaaacaacatattattgtttgtatcgtgatggttctagaataaaacacatcatttctctaattttagttagatctttgctgaaagaaaaagataaataaaataccctacagtttatccatatccatgttcttctacactaaatattcatctttgattagttatttttaactatatttgatttctttataaattacattttgaaactttaaacacataaagacattgtttccccttaaaagatttttcttttcctttcttttgtttttttaatctaaaacttactttcaaaaacaatgactttcataaacttkcaacttgttaaatatagtatttttattaacattctagtttgtaacacaaggcaaa

SEQ ID NO: 445620 - DNA, 586 bp, Homo sapiens
ggctaaagtaatcttcctttctcagcctcctgagtagttagaactaagacatgcaccaccatgtctggctaatttttaacayttttttgtggagatggagtctcgctatgttgcccaggctggtcttgaacttctggccacatgctatcctctcacctcgaccccccaaagtacttggattatcggctcaagtacttagatgtattaaccaggatcacagagagcttgattttgtaagtttgagttagcatgtaataactgcagttgattttgatgcatgtatttaatgagaatcattgctttagactatatgatatttgaaacaaaagagcaataggactgcatggcacaatataaagtctgttatgacatagtgactttaatatattttaattaaaattataatagtaaaagctaaaaatgacaagacaattgttagaaatcatatcacaacagcataatcatgtatccataagtgattgatacaataacatgaactgacattttgctgcaatattaatcagttaatacaggtttttaggtttcagttaactggttaatcataaaatattatataaaaaattat

SEQ ID NO: 445621 - DNA, 586 bp, Homo sapiens
ggctaaagtaatcttcctttctcagcctcctgagtagttagaactaagacatgcaccaccatgtctggctaatttttaacacttttttgtggagatggagtctcgctatgttgcccaggctggtcttgaacttctggccacatgctatcctctcacctcgaccccccaaagtacttggattatcrgctcaagtacttagatgtattaaccaggatcacagagagcttgattttgtaagtttgagttagcatgtaataactgcagttgattttgatgcatgtatttaatgagaatcattgctttagactatatgatatttgaaacaaaagagcaataggactgcatggcacaatataaagtctgttatgacatagtgactttaatatattttaattaaaattataatagtaaaagctaaaaatgacaagacaattgttagaaatcatatcacaacagcataatcatgtatccataagtgattgatacaataacatgaactgacattttgctgcaatattaatcagttaatacaggtttttaggtttcagttaactggttaatcataaaatattatataaaaaattat

SEQ ID NO: 445622 - DNA, 586 bp, Homo sapiens
ggctaaagtaatcttcctttctcagcctcctgagtagttagaactaagacatgcaccaccatgtctggctaatttttaacacttttttgtggagatggagtctcgctatgttgcccaggctggtcttgaacttctggccacatgctatcctctcacctcgaccccccaaagtacttggattatcggctcaagtacttagatgtattaaccaggatcacagagagcttgattttgtaagtttgagttagcatgtaataactgcagttgattttgatgcatgtatttaatgagaatcattgctttagactatatgatatttgaaacaaaagagcaataggactgcatggcacaatataaagtctgttatgacatagtgactttaatatattttaattaaaattataatagtaaaagctaaaaatgacaagacaattgttagaaatcatatcacracagcataatcatgtatccataagtgattgatacaataacatgaactgacattttgctgcaatattaatcagttaatacaggtttttaggtttcagttaactggttaatcataaaatattatataaaaaattat

SEQ ID NO: 445623 - DNA, 586 bp, Homo sapiens
ggctaaagtaatcttcctttctcagcctcctgagtagttagaactaagacatgcaccaccatgtctggctaatttttaacacttttttgtggagatggagtctcgctatgttgcccaggctggtcttgaacttctggccacatgctatcctctcacctcgaccccccaaagtacttggattatcggctcaagtacttagatgtattaaccaggatcacagagagcttgattttgtaagtttgagttagcatgtaataactgcagttgattttgatgcatgtatttaatgagaatcattgctttagactatatgatatttgaaacaaaagagcaataggactgcatggcacaatataaagtctgttatgacatagtgactttaatatattttaattaaaattataatagtaaaagctaaaaatgacaagacaattgttagaaatcatatcacaacagcataatcatgtatccayaagtgattgatacaataacatgaactgacattttgctgcaatattaatcagttaatacaggtttttaggtttcagttaactggttaatcataaaatattatataaaaaattat

SEQ ID NO: 445624 - DNA, 509 bp, Homo sapiens
ataggactgcatggcacaatataaagtctgttatgacatagtgactttaatatattttaattaaaattataatagtaaaagctaaaaatgacaagacaattgttagaaatcatatcacaacagcataatcatgtatccataagtgattgatacaataacatgaactgacattttgctgcaatattaatcagttaatacaggtttttaggtttcagttaactggttaatcataaaatattatataaaaaattatcaaattgtgtaagtcatctcactgtattctaaaatttatgttattttatatttctaatctatgttttgcagagatcatgaaaattttactgggtaactgaagaagaattgtcccaaggacttgaataaatgttaatgttcataacagtatgttctaaaaagaaatttaagtaaaaaaggaaaaaacatatttcattttaaaamtatctacccatgcacatcattcatctaaaaaacccatttaatataatcatcta

SEQ ID NO: 445625 - DNA, 509 bp, Homo sapiens
ataggactgcatggcacaatataaagtctgttatgacatagtgactttaatatattttaattaaaattataatagtaaaagctaaaaatgacaagacaattgttagaaatcatatcacaacagcataatcatgtatccataagtgattgatacaataacatgaactgacattttgctgcaatattaatcagttaatacaggtttttaggtttcagttaactggttaatcataaaatattatataaaaaattatcaaattgtgtaagtcatctcactgtattctaaaatttatgttattttatatttctaatctatgttttgcagagatcatgaaaattttactgggtaactgaagaagaattgtcccaaggacttgaataaatgttaatgttcataacagtatgttctaaaaagaaatttaagtaaaaaaggaaaaaacatatttcattttaaaaatatctacscatgcacatcattcatctaaaaaacccatttaatataatcatcta

SEQ ID NO: 445626 - DNA, 532 bp, Homo sapiens
aaatttacccaagtgacaattttacctgtgacaaacatatttccatccactgcagaaacaaatgtgtttagtttattaaagtatatgtttaacagcaaaaaataaatagaataaatttattatccctatccagtgacaaacacaattttaaaataaaaatgaaaacatcctgcttatatttgctatactatttcatgcattaggctaagatatatggttatttccatgctttcaggatgtgtttaacaaatctcttatacattttccyattgttgtcattttaatatcttgaatataatattaaataaacatttctacaaataatttgaacctcaaagtttcataaacatctatccttcaatatttaggcctaaaaagtaatctccattatctatcaaattctaaatttgaacttactatggtttactcctactttttaattattactttggttaaagatacttcatgatattattaagttccttactaataatgtatatggttgtattacattcatttatccatcaagact

SEQ ID NO: 445627 - DNA, 532 bp, Homo sapiens
aaatttacccaagtgacaattttacctgtgacaaacatatttccatccactgcagaaacaaatgtgtttagtttattaaagtatatgtttaacagcaaaaaataaatagaataaatttattatccctatccagtgacaaacacaattttaaaataaaaatgaaaacatcctgcttatatttgctatactatttcatgcattaggctaagatatatggttatttccatgctttcaggatgtgtttaacaaatctcttatacattttcccrttgttgtcattttaatatcttgaatataatattaaataaacatttctacaaataatttgaacctcaaagtttcataaacatctatccttcaatatttaggcctaaaaagtaatctccattatctatcaaattctaaatttgaacttactatggtttactcctactttttaattattactttggttaaagatacttcatgatattattaagttccttactaataatgtatatggttgtattacattcatttatccatcaagact

SEQ ID NO: 445628 - DNA, 476 bp, Homo sapiens
tttaatatcttgaatataatattaaataaacatttctacaaataatttgaacctcaaagtttcataarcatctatccttcaatatttaggcctaaaaagtaatctccattatctatcaaattctaaatttgaacttactatggtttactcctactttttaattattactttggttaaagatacttcatgatattattaagttccttactaataatgtatatggttgtattacattcatttatccatcaagactaactttgagctactatgaaatataattcaaatcattcacataatatctaatgaatgattactataatacaaagcactatactaggtttcataagtgatacaaaaacaagtgcaaccgcctcagtaaccaacacatttgcagtctaatagaggaaaacaagccctgttataagaataattatagtaaaaggctatataaaatacaatccattttgagacacacc

SEQ ID NO: 445629 - DNA, 532 bp, Homo sapiens
aaatttacccaagtgacaattttacctgtgacaaacatatttccatccactgcagaaacaaatgtgtttagtttattaaagtatatgtttaacagcaaaaaataaatagaataaatttattatccctatccagtgacaaacacaattttaaaataaaaatgaaaacatcctgcttatatttgctatactatttcatgcattaggctaagatatatggttatttccatgctttcaggatgtgtttaacaaatctcttatacattttcccattgttgtcattttaatatcttgaatataatattaaataaacatttctacaaataatttgaacctcaaagtttcataaacatctatccttcaatatttaggcctaaaaagtaatctccattatctatcaaattctaaatttgaacttaytatggtttactcctactttttaattattactttggttaaagatacttcatgatattattaagttccttactaataatgtatatggttgtattacattcatttatccatcaagact

SEQ ID NO: 445630 - DNA, 476 bp, Homo sapiens
tttaatatcttgaatataatattaaataaacatttctacaaataatttgaacctcaaagtttcataaacatctatccttcaatatttaggcctaaaaagtaatctccattatctatcaaattctaaatttgaacttactatggtttactcctactttttaattattactttggttaaagatacttcatgatattattaagttccttactaataatgtatatggttgtattacattcatttatccatcaagactaactttgagctactatgaaatataattcaaatcattcayataatatctaatgaatgattactataatacaaagcactatactaggtttcataagtgatacaaaaacaagtgcaaccgcctcagtaaccaacacatttgcagtctaatagaggaaaacaagccctgttataagaataattatagtaaaaggctatataaaatacaatccattttgagacacacc

SEQ ID NO: 445631 - DNA, 476 bp, Homo sapiens
tttaatatcttgaatataatattaaataaacatttctacaaataatttgaacctcaaagtttcataaacatctatccttcaatatttaggcctaaaaagtaatctccattatctatcaaattctaaatttgaacttactatggtttactcctactttttaattattactttggttaaagatacttcatgatattattaagttccttactaataatgtatatggttgtattacattcatttatccatcaagactaactttgagctactatgaaatataattcaaatcattcacataatatctaatgaatgattaytataatacaaagcactatactaggtttcataagtgatacaaaaacaagtgcaaccgcctcagtaaccaacacatttgcagtctaatagaggaaaacaagccctgttataagaataattatagtaaaaggctatataaaatacaatccattttgagacacacc

SEQ ID NO: 445632 - DNA, 561 bp, Homo sapiens
ttgtaatgtctacttcactgaagaaacttttaaaaaatttgacttataatggttttctgtaataacctatggtgcttggtttgtaaagtaaaacaggaactcaatttagtacctactgaataataacattttttaactgagattccactcataaggcacctaaatttttaaagttaaaacatattatattgacattaaatttaaaaagaataaacaagttagagaagaaataaaaaaaaaatcttcagagaataaactgcttccaagtatacaagtactaaagaggctacacactggtatgctcattataaataaaaacaytcattcatgtaattttatctcattactacatatttaaaataatctcttatcattatagtaggccatcattttccaaatagcatcaagaatccttattttgaaatagtaatcagatcatgtagttctcctgatcagatctcttcacactctagaataagatgcataccttcattttagcttttagacttttttctgatctagctctagattattgtttgatctcatttttactattcttct

SEQ ID NO: 445633 - DNA, 597 bp, Homo sapiens
cattactacatatttaaaataatctcttatcattatagtaggccatcattttccaaatagcatcaagaatccttattttgaaatagtaatcagatcatgtagttctcctgatcagatctcttcacactctagaataakatgcataccttcattttagcttttagacttttttctgatctagctctagattattgtttgatctcatttttactattcttctcattgctcattcaattcaatttcaagcataatgattttttgctcttttgggaatacactagctttttgatttcattagagcctgtacacttccctcttcctgaaatgttcttccccaaatttatgtatagcttattttctctctttgttcagggctcagtgtaattgtagattgttctctaccttgaatatgtcttacccctcatttgactggttttccttcataccaattatttgtattctaaaatattttatatttttctgttgacttgttcactgagttccttcctctaaaatgtagcttcatgagggcgatattttgttaaaattgtatgctactgtatcactagaactgagaacaatgcctgaacagagtag

SEQ ID NO: 445634 - DNA, 608 bp, Homo sapiens
aatagtaatcagatcatgtagttctcctgatcagatctcttcacactctagaataagatgcataccttcattttagcttttagacttttttctgatctagctctagattattgtttgatctcatttttactattcttctcattgctcattcaattcaatttcaagcataatgattttttgctcttttkggaatacactagctttttgatttcattagagcctgtacacttccctcttcctgaaatgttcttccccaaatttatgtatagcttattttctctctttgttcagggctcagtgtaattgtagattgttctctaccttgaatatgtcttacccctcatttgactggttttccttcataccaattatttgtattctaaaatattttatatttttctgttgacttgttcactgagttccttcctctaaaatgtagcttcatgagggcgatattttgttaaaattgtatgctactgtatcactagaactgagaacaatgcctgaacagagtagctactcatgactcattggctaaaacaagttaatgaatgagaacaggcaggtagaaagccaggaaggaaaagaggatattatattaagttgaa

SEQ ID NO: 445635 - DNA, 597 bp, Homo sapiens
cattactacatatttaaaataatctcttatcattatagtaggccatcattttccaaatagcatcaagaatccttattttgaaatagtaatcagatcatgtagttctcctgatcagatctcttcacactctagaataagatgcataccttcattttagcttttagacttttttctgatctagctctagattattgtttgatctcatttttactattcttctcattgctcattcaattcaatttcaagcataatgattttttgctcttttgggaatacactagctttttgatttcattagagcctgtacacttccctcttcctgaaatgttcttccccaaatttatgtatagcttattttctctctttgttcagggctcwgtgtaattgtagattgttctctaccttgaatatgtcttacccctcatttgactggttttccttcataccaattatttgtattctaaaatattttatatttttctgttgacttgttcactgagttccttcctctaaaatgtagcttcatgagggcgatattttgttaaaattgtatgctactgtatcactagaactgagaacaatgcctgaacagagtag

SEQ ID NO: 445636 - DNA, 608 bp, Homo sapiens
aatagtaatcagatcatgtagttctcctgatcagatctcttcacactctagaataagatgcataccttcattttagcttttagacttttttctgatctagctctagattattgtttgatctcatttttactattcttctcattgctcattcaattcaatttcaagcataatgattttttgctcttttgggaatacactagctttttgatttcattagagcctgtacacttccctcttcctgaaatgttcttccccaaatttatgtatagcttattttctctctttgttcagggctcagtgtaattgtagattgttctctaccttgaatatgtcttacccctcatttgactggttttccttcataccaattatttgtattctaaaatattttatatttttctgttgacktgttcactgagttccttcctctaaaatgtagcttcatgagggcgatattttgttaaaattgtatgctactgtatcactagaactgagaacaatgcctgaacagagtagctactcatgactcattggctaaaacaagttaatgaatgagaacaggcaggtagaaagccaggaaggaaaagaggatattatattaagttgaa

SEQ ID NO: 445637 - DNA, 513 bp, Homo sapiens
ggagtaaatgataagaaattacttaataagtacaaggtatgctttttaggtgatgaatatgctgaacatcctgacttcactatgcaacctatggatgtaacaaaattacagttgcactccataaatttatagaaataaaataaaataaattacattttaatagagacactatcagagaaatacaccraaatgactcgactgaattggaaatggaaaaggtagaaatctcattttctcttcagagactattgcaaatttgtatgtatgtaatacactaatcacatcagatgccagttttaagtacatattttcctccactgtgtagatttgtttcaatacggaaaaatttcagaacatacgtaatcaatacaaagccattctcagtaatttattttcattccatgccatgttacttaggtttacatttactaccttagaaaacattatgtacaaaagcttttctttcttatagtgaattaaatctccaactgcttttgtttctattttaagaaa

SEQ ID NO: 445638 - DNA, 513 bp, Homo sapiens
ggagtaaatgataagaaattacttaataagtacaaggtatgctttttaggtgatgaatatgctgaacatcctgacttcactatgcaacctatggatgtaacaaaattacagttgcactccataaatttatagaaataaaataaaataaattacattttaatagagacactatcagagaaatacaccaaaatgactsgactgaattggaaatggaaaaggtagaaatctcattttctcttcagagactattgcaaatttgtatgtatgtaatacactaatcacatcagatgccagttttaagtacatattttcctccactgtgtagatttgtttcaatacggaaaaatttcagaacatacgtaatcaatacaaagccattctcagtaatttattttcattccatgccatgttacttaggtttacatttactaccttagaaaacattatgtacaaaagcttttctttcttatagtgaattaaatctccaactgcttttgtttctattttaagaaa

SEQ ID NO: 445639 - DNA, 513 bp, Homo sapiens
ggagtaaatgataagaaattacttaataagtacaaggtatgctttttaggtgatgaatatgctgaacatcctgacttcactatgcaacctatggatgtaacaaaattacagttgcactccataaatttatagaaataaaataaaataaattacattttaatagagacactatcagagaaatacaccaaaatgactcgactgaattggaaatggaaaakgtagaaatctcattttctcttcagagactattgcaaatttgtatgtatgtaatacactaatcacatcagatgccagttttaagtacatattttcctccactgtgtagatttgtttcaatacggaaaaatttcagaacatacgtaatcaatacaaagccattctcagtaatttattttcattccatgccatgttacttaggtttacatttactaccttagaaaacattatgtacaaaagcttttctttcttatagtgaattaaatctccaactgcttttgtttctattttaagaaa

SEQ ID NO: 445640 - DNA, 444 bp, Homo sapiens
ttcactatttttttatgtgctgttaaaatttcatacctcctgttctatcttgaagtcttacagttttggaatggtgagtgggggaaacaagcataaaactattacataattcatgcagttttcactgggcaacagtatctatcctctgaatggtgaaatggctacttttcatttatttatttttttctctcctggggtaaarcgcttgaaaactgcaccactgggaaattgcagctatagtccatgtttcaacatagtccatgcttctttgagttggccacttactgtttactctcatctccttaggtttagcagtaaagacctgtaagatttcttctgttaggatcatctagccattccaaacatttctcttagatttgattctttcaagacaaatcaacccaataaaaatctcataaataaaggtgagctagctaccacatt

SEQ ID NO: 445641 - DNA, 444 bp, Homo sapiens
ttcactatttttttatgtgctgttaaaatttcatacctcctgttctatcttgaagtcttacagttttggaatggtgagtgggggaaacaagcataaaactattacataattcatgcagttttcactgggcaacagtatctatcctctgaatggtgaaatggctacttttcatttatttatttttttctctcctggggtaaagcgcttgaaaactgcaccactgggaaattgcagctatagtccatgtttcaacatagtycatgcttctttgagttggccacttactgtttactctcatctccttaggtttagcagtaaagacctgtaagatttcttctgttaggatcatctagccattccaaacatttctcttagatttgattctttcaagacaaatcaacccaataaaaatctcataaataaaggtgagctagctaccacatt

SEQ ID NO: 445642 - DNA, 532 bp, Homo sapiens
atttgtgtcttatgctggactcactccataccgtcatgtttccattaagatcacattgaattcataaaatcacttagtgggaattggcatgtctattatattaaaatttcctatttgaaagtatttctacttactaataatttactttatgtccctcaatgatttaaggttttctttatttagaacttgcctgtgacatattatagttacgttataaatgaaagagagaygagattgtgggatgctatcttcctttatttccaactccaatctagctgtcacttgtaagatgcatattctgaagtcagtgggaagcttggtggaagtaggttcctgagttatagaaattggagtatctattctgctttcctttgcattgggcaagaggctagagattaacctagacaaaattggaggaaagtgaatccagaagaaaaatgtaaggacttggggcatatattaacaaattagaaaaaaagaacaataatgcaaataaaagtaacttaggaaaggggaatcattgaaaatgtag

SEQ ID NO: 445643 - DNA, 532 bp, Homo sapiens
atttgtgtcttatgctggactcactccataccgtcatgtttccattaagatcacattgaattcataaaatcacttagtgggaattggcatgtctattatattaaaatttcctatttgaaagtatttctacttactaataatttactttatgtccctcaatgatttaaggttttctttatttagaacttgcctgtgacatattatagttacgttataaatgaaagagagacgagattgtgggatgctatcttcctttatttccaactccaatctagctgtcacttgtaagatgcatattctgaagtcagtgggaagcttggtggaagtrggttcctgagttatagaaattggagtatctattctgctttcctttgcattgggcaagaggctagagattaacctagacaaaattggaggaaagtgaatccagaagaaaaatgtaaggacttggggcatatattaacaaattagaaaaaaagaacaataatgcaaataaaagtaacttaggaaaggggaatcattgaaaatgtag

SEQ ID NO: 445644 - DNA, 612 bp, Homo sapiens
tgccgtgtgggtggaatgcagtatctcaaacatgagggcctaaatttgagtaacaaatagacaagcaataatgtacagggggaaagatacatctgacaaatttccttacaggattctaaaaatttttcttatcaaaattgtgaccagtttkgggatcctcttattgacataattacaaaataattactaactatgaagatatactacagagccagaagtagctcttgtgaccatcatttaataacattaaatttacagatccctgaacttaaaacaagtgaattttatggtaagtaaattatacctcaataaagctgttcaaaaatattaagtctcccattcacagacattcagatccagtggcagcagcagtttaaagaattttattccttttgacagttttaaacaattcttttctaatctcaatataagaatacctcctttaaagaaaaaaaaattgtgctttgtaatatacttttcaaaagtgtttaagaagtttatttctgtacttatcctagttacagattcttaattttatatggctctaaactttatttttcaactgaagcagggtaatattaaattgaatttctaggtagccttatagacagc

SEQ ID NO: 445645 - DNA, 622 bp, Homo sapiens
tagagttctctttcttttgtattttggaaggtttttcttttgtcagcatcatttgatagctcttactttaaattacagccatcaaaaccatgtgttttagggtttaaataaatttagatttgaattaacaatagttttcatatttttttttcaagtaaaactggcatatgaaactgtacagttactttacgaattaggctaaatcgcacattttataaaaggattcaaaacatatttctcttcaagttctgcggtctttaattttaatgattagtgagtcagagtaccaaattgcratggtgtaaaagttttcagaaacttacctataaagtgggctatagctgcacagtgtttcacaggtagttctaaattctagcctctttagaactacacaattcatctcagcctacaatttaagattttaaaaaaattgtttttcccctcatctaatgcctgacatagatagctatttctatatgttcttggctgagtaacaaaaaatcaatgtctgaaggtaattaaagctttaaagaagaaattcttttactactgaatttcaagtcacacacacaaaataggtgagaaattattttatcatatttagaatcaaaatatcccttaa

SEQ ID NO: 445646 - DNA, 585 bp, Homo sapiens
ttgtggaattcctggaagatgatagcgagtcctttgatggcactagctgattctcatcagactttgatccaagagattggagatattggcgattcaaggaaggataggacacatttttttttttcaccaaggagttcgtaatccagtacagatacacacacccaaggtaatgacaagggtacagtagaacaaagtgctgtcttgaaggtaagctgaaagatctatgggaataaacatgcaagagtaattaattctgccaagtggaagagaaaaaaggaaaactagagaaagaagacaactttctgggtgttcttggaatgaagrttttaccaggaagatgaggggctggagggcacttgtggcagaagaaatagtttgaacaatgacaagtgtgacaaccacaatgcttggatgcaagaaaaacatacatctgtgttgtttttttctaaactaaatgaaaaatggccagggtccctactcatctcttgttaggaaatgcagtgtgtcattttttggggtggggacaaaaggggctaatgtaggcagtctaaaaagtttgagaatgggcctcttgtctttggggca

SEQ ID NO: 445647 - DNA, 585 bp, Homo sapiens
ttgtggaattcctggaagatgatagcgagtcctttgatggcactagctgattctcatcagactttgatccaagagattggagatattggcgattcaaggaaggataggacacatttttttttttcaccaaggagttcgtaatccagtacagatacacacacccaaggtaatgacaagggtacagtagaacaaagtgctgtcttgaaggtaagctgaaagatctatgggaataaacatgcaagagtaattaattctgccaagtggaagagaaaaaaggaaaactagagaaagaagacaactttctgggtgttcttggaatgaaggttttaccaggaagatgaggggctggagggcacttgtggcagaagaaatagtttgaacaatgacaagygtgacaaccacaatgcttggatgcaagaaaaacatacatctgtgttgtttttttctaaactaaatgaaaaatggccagggtccctactcatctcttgttaggaaatgcagtgtgtcattttttggggtggggacaaaaggggctaatgtaggcagtctaaaaagtttgagaatgggcctcttgtctttggggca

SEQ ID NO: 445648 - DNA, 493 bp, Homo sapiens
aatgagtaatggtcaagaaattttaaaacataatgacatgaaacaaacaaccggtccgggaagctcagagaatacaattcatgacaaacaacaaaaatacagcaccagacatagcatttcctatatgtagaataaaataaaataaaataaatcaataaatagacaaagagaaaatcttgacagaatctggaatgaaaactacattccttgtagagaaaaaagagcaaggatttcagcccacttccagtaagaaaccaggcaagaaagaagagagttgcgggaaatgttwaggaataaatgcaccaacttagaattctacatctagcaaaattatacttcaaaagcagaggggaaatcagaatttaccagacaataaaacactaacggaatatattgccagaaaactttcctgcaaatgtgttaaaagaggttattcatggaggagaagagtgatatagatcagaaacctgtatttacaataagaaagcaagta

SEQ ID NO: 445649 - DNA, 493 bp, Homo sapiens
aatgagtaatggtcaagaaattttaaaacataatgacatgaaacaaacaaccggtccgggaagctcagagaatacaattcatgacaaacaacaaaaatacagcaccagacatagcatttcctatatgtagaataaaataaaataaaataaatcaataaatagacaaagagaaaatcttgacagaatctggaatgaaaactacattccttgtagagaaaaaagagcaaggatttcagcccacttccagtaagaaaccaggcaagaaagaagagagttgcgggaaatgtttaggaataaatgcaccaacttagaattctacatctagcaaaattatacttcaaaagcagaggggaaatcagaatttaccagacaataaaacactaacrgaatatattgccagaaaactttcctgcaaatgtgttaaaagaggttattcatggaggagaagagtgatatagatcagaaacctgtatttacaataagaaagcaagta

SEQ ID NO: 445650 - DNA, 425 bp, Homo sapiens
gcgttattttcagttttcagtaaaataaatgtgtgtataccacaacctctaagtacttcctttagaccttatggtttgaatttggtatgaaagaggaagcttctaaaagtgttttctatgtgcatgatgatttataggcaaatataccrgcacatatagttaccttaaaacttagatatttaagtatatgttggatgaatgaaaaaattgaagaacagaaaaatgtaaaaacaaaagaaggtaagtcaaacattttgagagagttcttggatgaaaagtagaaatttaaaatgtaaggttgtaaaaaatagcaatgtccagtaaatgcatgcacataaacatgaaataacttaaatgtcattatgctaattttacttgcataaactttcaggacatgaatacagataaggacataattacagtag

SEQ ID NO: 445651 - DNA, 425 bp, Homo sapiens
gcgttattttcagttttcagtaaaataaatgtgtgtataccacaacctctaagtacttcctttagaccttatggtttgaatttggtatgaaagaggaagcttctaaaagtgttttctatgtgcatgatgatttataggcaaatataccggcacatatagttaccttaaaacttagatatttaagtatatgttggatgaatgaaaaaattgaagaacagaaaaatgtaaaaacaaaagaaggtaagtcaaacattttgagagagttcttggatgaaaagtagaaatttaaaatgtaargttgtaaaaaatagcaatgtccagtaaatgcatgcacataaacatgaaataacttaaatgtcattatgctaattttacttgcataaactttcaggacatgaatacagataaggacataattacagtag

SEQ ID NO: 445652 - DNA, 502 bp, Homo sapiens
tggcctgacccacagggagcaaggaaaagcagggtggagcaatgcctcacttgggagctgcatggggcaaggggcactcccacccccagtcaagggaggcagtgagtgattgtgctccctttcctgaggaaccatgctttttccatggatctgtgcaactcacagatcaagagatccccttgtgagyccacaccaccagggccttgggtgccaagcacagagctgtgcagactctcatcaccgctcaggctgtggccagtgacagcagactggagactgtctaagatgactgagttcccaggggaaggggtggttgctatcactgtggcatcagttggctgttttcccctggtggtgctggggagacagggaggtttagaccgggagcacagcagctgtggcagatcatggccagactgcttttttaggtggaacctggatccatccctactcattgggtggggcccccttgtgggaatttcaccaactccagccagaggtt

SEQ ID NO: 445653 - DNA, 446 bp, Homo sapiens
gaagtacattaagctaagctttatctggtaagatggagaactaacatgatgtgggcttctttctgtgaccacaaccctggaaatgacacagaaatcagcatctaatacttattttatgtgagaaacctttgcagttacaaactacagtaagttctgcgagtagagaaaaaaatgacagcaaagagcagaaaactgagatgtaaggaaaccagaatatgctggggcggaagtttttagtggtcatcattccttytcattgcattcctgtatttttttctgctctttcaatagttagagtacccacagtgtgcaaggcactcttctaaatactgagaatacactacagagccagaaagacaaaactttgaccaaatggagctcccattctagcaaaactagagttgaaaagagaccactgctaactcctttaaagccattttggagtc

SEQ ID NO: 445654 - DNA, 442 bp, Homo sapiens
atagaatagcaaattgattgatcactacatasagtattaattttggtaatgaacatgatattttattatttcaatattagttaattagtgaaaaagcaaatatgcagaaaggtagatttacagcagtggttatcaaccaaagggtgattttgccccccagaggacatttggcaatgtctggtaacatatttaatgattttcaagggctgctactggcatctggtgggtagagcctgaggatgctgctaaataccttataatgcccaggtcagcctgcataacaaagatttttccagtgcacaatttcaatggtgctggctagtgagaaactctgatttctagtatgaagttcttacagttatttgtctttaaatttttcttatttgggatttaaatattgctatggactgcagattatttataactctcaaaagggcccctt

SEQ ID NO: 445655 - DNA, 619 bp, Homo sapiens
gactacagttgacagtagtaaaatacaattattcaagtagattacatgcatgttacatgtgtattttctatgtttctcacttttacaacaaataattcttgggacaaagttatgccgtaataacaataacttttcagtaactcaatacrttattcactattgtaaaaagctatcttacaaaatgatgaaagcctgctgtgatgtggttatgtggattttactaaatgttttgaataagcctatcatctacaattagattcaagaaaaatgggaacagtcaacatgtggattggtattgagattttaatgaaaacacaaaagtggaaatttggaagtgcacatccacatttcctcagcacatggtacttgagggaatcctaaagtgaaccaagatacagtaatcactttcatggtctcagataaaaagtgagaatgctgtttacaataaggcaaacaaacaaacactggcaaccacattgcccttgtttgtagattatctcctaaacataaaattcaatatttttctgatgtaatgatttaatttccctttaaggaatacttataaacagttaaaaagacagattgcattacggggcttctagcagtaacatttgttcct

SEQ ID NO: 445656 - DNA, 619 bp, Homo sapiens
gactacagttgacagtagtaaaatacaattattcaagtagattacatgcatgttacatgtgtattttctatgtttctcacttttacaacaaataattcttgggacaaagttatgccgtaataacaataacttttcagtaactcaatacgttattcactattgtaaaaagctatcttacaaaatgatgaaagcctgctgtgatgtggttatgtggattttactaaatgttttgaataagcctatcatctacaattagattcaagaaaaatgggaacagtcaacatgtggattggtattgagattttaatgaaaacacaaaagtggaaatttggaagtrcacatccacatttcctcagcacatggtacttgagggaatcctaaagtgaaccaagatacagtaatcactttcatggtctcagataaaaagtgagaatgctgtttacaataaggcaaacaaacaaacactggcaaccacattgcccttgtttgtagattatctcctaaacataaaattcaatatttttctgatgtaatgatttaatttccctttaaggaatacttataaacagttaaaaagacagattgcattacggggcttctagcagtaacatttgttcct

SEQ ID NO: 445657 - DNA, 571 bp, Homo sapiens
agtgtggaagaaaaagcacacccttgcttaactctacctcaaatcagattgataaatgccatgccatatattggattcaatagcgcctctctcttctgtctcaccaatcacctttaaaagaatatgtccacctagaacctcagaacacagtgtcatttggaaatggagtcattggagatgtaatamacttaaaatgaggtcatattgaattaggatgtgctctaaatccagtgattagtgtttttataagataaatgagagagagaaagatagatgtagagacacaaaaaagacatggggaaaaggccatgtggttgtcatgtgacaattagaagaggccatgtgccaatcagagattaaagtgaggcagctgcaagacaagaaactcctgaggccaccaagagaggcaggaagaatttttttcctagctctttcatagggaacacagccctgctgaaaccttgattttgatcttttagccttcagaatgtgaaataataaatttctgttgttttaagccatccagtttgtggtattttcttacagcaatcataagacactaaataccagt

SEQ ID NO: 445658 - DNA, 522 bp, Homo sapiens
acatgtgaattaaccagcctgtcaatatagaattgatgtgcctgagacatttcaagtaagctttgtaatctaatttttaaaagttaaccaaaagctttatggaagctaaactcgggaaaccagctatgattgcaaacacatggcagttagctgaaaattgtttggatrgagagaaaaacggcttcatttatcacttgtaagatcaaacatttccacttgagtagctcacactatataaatttggttcagtttctctcttggaggctaggcacgtaccagcaatgctttctttcaagcttagaaagtgaagaaaccttcctttattctgttttaaaattccacagcctcatccaagcctaaattttagcttacctccattcctatgtcttttcctgcaccatctttactcataagcttaagggtacgattgctaagatagaaacctgaaagtcttctttagctatctctcatccctaacatccaatcagtggctgtgctgttatatcactaatctcatgtctt

SEQ ID NO: 445659 - DNA, 580 bp, Homo sapiens
agctatcatctcccaatcttttatttcccatgaggcactgagaataagacaggcatgctccctttttctatggagttgaatggaaagagggagagacatgaaagaaatagaaacacataaaatttaaaagataattacctgctggccaacattatgggcatatgacstatgtgatcacacagggctctgactttagaagggccacacacttggcttaatgctttacttttgccttcctgaaactctttataacttttaacgagaggactgcattttcattgcattttgaactggacctaattacgtacttgtttattaagtattgtgtaattatgtagtcagtcttgctcagatagcaataactgctatgcaggaagtaaaacacagaaatgagatagagaaaaacaggggttatgagtcacagagttccttcagatggcataaaaaagacctctcttcctgtaatcccagcactttgggagacgaaggcgggcagatctcgaggctaggagtttgagagcagactggctaacaaggcaaaactccatctctactgaaaatacaaaaattagccaggtgt

SEQ ID NO: 445660 - DNA, 534 bp, Homo sapiens
gatggctaacttgggacagtggatgccagctatctcagaaagacaaaaatgaccaagtagagtggctcactccttaatcccagcactttgggaggtcaaggtaggtggattgcttcagtccaggaatcctagacctgcctgggcagcatgtagaagccccatctgtacaaatgtacaaaaattagctgagtgtggtggtgtatgcctgcagtcccagctacttgggaggttgaagtggaaggattgcttgagcttgggagggagaagctgcagtgatgtaagattgcaccaccgcaatccaggctgggcaacagagcaagaccctgtctaaaaatgaaaacaaacaaacacatacacatacacaaaagaaaataaatcagagttgcaggtgaatggtcaygctttaaatggaaaactgagccaggacctatcagagagcccacgtgaagaagctggggtgtggaaaaggaaaccagaaagtctgcagaggtggatgcctgagaaactcaaagccccatggaatggccccacagg

SEQ ID NO: 445661 - DNA, 534 bp, Homo sapiens
gatggctaacttgggacagtggatgccagctatctcagaaagacaaaaatgaccaagtagagtggctcactccttaatcccagcactttgggaggtcaaggtaggtggattgcttcagtccaggaatcctagacctgcctgggcagcatgtagaagccccatctgtacaaatgtacaaaaattagctgagtgtggtggtgtatgcctgcagtcccagctacttgggaggttgaagtggaaggattgcttgagcttgggagggagaagctgcagtgatgtaagattgcaccaccgcaatccaggctgggcaacagagcaagaccctgtctaaaaatgaaaacaaacaaacacatacacatacacaaaagaaaataaatcagagttgcaggtgaatggtcatgctttaaatggaaaactgagccaggacctatcagagagcccacgtgaagaagctggggtgtggaaaaggaaaccagaaagtctgcagagrtggatgcctgagaaactcaaagccccatggaatggccccacagg

SEQ ID NO: 445662 - DNA, 563 bp, Homo sapiens
cgcctggcacctcatttttttttggtgtttttttttttttttttttttttctccctattagacaaatgttgaaccatctcaccgtaattttcacataccatatgccctctcactacattatttttcattgcttctctgagcaacattatggataatttcttcagctctgcctgcccattaattcttcctttagttgtgtttaatatattggtttatttactcagtttcaattatttcatttttctgaaaatkggtacccactgaaaattgtctttttttttgatatgtctttcacatacttgctcagacatcttttatttttaataattttaaatactcatttcataatctatgtttggaattgcattatctcaatgttttggtatttctaatcttgatcttgatccttgtactgactttcactcaagatttcctcatgtgttttataactatggatttgagcttgtacttaacaggattttatatttataaatcctaagtgtcctctgttgagaatgtacccttccagagaaatttggtgattaaatgtatgaggtaacaac

SEQ ID NO: 445663 - DNA, 615 bp, Homo sapiens
taaatctccctttaggatttctttgtccttgtgggtggtataaattcaaacctgaaacatttgtgacagatttttaggagagactttttatcacttctcctagagatcccaaggctcttctttaagattgacaaatgttgcagggaacatccaaatatcactgactgcatattaaccatttccacttttttcttcagttttggccactggacatttctgtactatatttttttcaaggatgcattacagcatttgtcatattttattccagtatttcaaatatgttttgcattaagatcgtttactgtcggtttacaatatctgacacaactttttggcaaaaatgaaccaactttcgtttgtatttttatgtttgccctgtaataaacaygaagaactcacaattatgactgcattagtccattctcacactgttataatgaactgcctgagactaggtaacttataaaggagagaggtttaattgactcacagttctgcttggcttgggaggcctcaggaaacttacaataatggcggaaggagaagcaaacatgtccttcttcacatgaaggcagaaagaattgccgagccaagagggaaaaatcccttaat

SEQ ID NO: 445664 - DNA, 589 bp, Homo sapiens
tacttggcccgatgactttttcaaagtcacatggtgactagcagaataaagccataaaccagcttctgttggttcaaatcctgttctcatttcctgtaagacctattatttcacaattttcagatgttcactgggaaaatatttgtttttttccctcaatacaagtactttcacaatataaattgtgtctgctgcactcrtagttaatctgggtttctactaacagcttatgtataccaagtaagatcagtgaacaaaataaaccaatgaacaaaaacctggatatactgcttccccttccaagcataatcttcaatttcggggttaatgaagctgttatcccattctttggcggacacataaggcagccatttttaagtttcacttgcttcagctataaaattggtgctacagaagcagactgttatttttaaggcatttagggaaagctgtcacagatacaaatttaaatggaatgttaatctgcttggtaaaattagagttttaatcttaaagtctgaggtaaaataaattcagattgatatagattcattccacaaacatcaataattttccattatgttaaaat

SEQ ID NO: 445665 - DNA, 604 bp, Homo sapiens
aggcttaaatgacacctctaacatttaccttctatgtatctttggactgttcactttaattacaagattatttcttcaaatggaaagcggaatttaaaagtgacattcaccccaaagttatgtcgactaaatgagttaatgtatattaaatacatagaaaagtacatggtttaatgggtgttcccttacccagcatactgagaatgatcattcttcttgcctgtattcactttcactaaggtttgtccagtctgggcatccacacaagcatgcacatagccatgccacagagtagctagaaggtttatggatgaaatacttgctcactgaaaggactggtaactttatttcacacactttcctgaaaatatatatgaaaggattggtttcctgtgattactgacccaggttaggcttaaagcaaaagtagaatctgtaagcattttgagatccttgtgaaagattgtctagtacttcrctttcctctcatttatctcactttcctcttgtttattttactctctgggaccacgttttgaagactgttgatcatacggaagaaaaatagtctatatcctggaggaaaactgtggcaaataaatgt

SEQ ID NO: 445666 - DNA, 476 bp, Homo sapiens
agtccattcattccttgttaggaatctacatttgcatcctttcatctactacaacactctgagagatgtaacatatttcctttaggctgagccatttactgtagcagtgattcttacaatgagtgttggggactgatgtccctagcaaagaatattaaagtcagagagaggctaggttgaggcaataaagatgacagtttgaaaaagtcccaaagattattcttaaatgtcccactcttagggggaactcttgaaatcattttggtggactaattcagttaaaggtaatgacactgaataataaatatgaacctagggtaggaaaaatattcctatttttagggtattacaaacaaatgctgcaatggatatctttttttaaattttattattattatactttaagttttaragtacatgtgcacaacgtgcaggttacatgtgtacacatgtgccatgttggtgtgctgcaccca

SEQ ID NO: 445667 - DNA, 491 bp, Homo sapiens
ggcaaataaatccttcatttctcttttctgttgataaaatatccaattagatcctgtttccaattgtcatctgattttggtttcaccctgaaaagttttcgctactctccactcaaattctctaaaaattcgttttctctatgaaatgttctgagtcctacagcttttgtttatcctttctcatctgtgtaagagcatcttttcaacttcaatccacatacataagacttgcatggcatctcattttcagatcctttagaacagaacaactttcacattgcctctgggtgcctggcaaagtgttaagcatgaaggaaatgctcaatgatgtatttctgaatggatccattcacttcttgagaaggccaactgggttttctgyttaggcatcctgatggttattcatagtttcttatgtctaaaatgaatctagcccagagttagccatgtggagattagtactagagaaaaccgacataactcactggtca

SEQ ID NO: 445668 - DNA, 414 bp, Homo sapiens
gggaagaactgacatcttgatattatatcttcctatccatggacatgaaatatatttccayaaatttggttttcctttgacttcttttgttatagttttgtagttttcctcatatagatcatttattttttgttagatttctacctactgtttatttctgaagtgtgctaatgtaagtgttattttgtttttattttcaaattccacttgttcattgttggtatataggaaagcaattaccttttgtatcttaaccttgtatatggaatcttgttttagttgcttattagttctaggagttttttgattcttttgtatttttgcatagaaaatcatcttatttgcaacaaagatattttcatttttttcttttcccttctatatattttaatttcgtcttgttacattaactag

SEQ ID NO: 445669 - DNA, 414 bp, Homo sapiens
gggaagaactgacatcttgatattatatcttcctatccatggacatgaaatatatttccatawatttggttttcctttgacttcttttgttatagttttgtagttttcctcatatagatcatttattttttgttagatttctacctactgtttatttctgaagtgtgctaatgtaagtgttattttgtttttattttcaaattccacttgttcattgttggtatataggaaagcaattaccttttgtatcttaaccttgtatatggaatcttgttttagttgcttattagttctaggagttttttgattcttttgtatttttgcatagaaaatcatcttatttgcaacaaagatattttcatttttttcttttcccttctatatattttaatttcgtcttgttacattaactag

SEQ ID NO: 445670 - DNA, 414 bp, Homo sapiens
gggaagaactgacatcttgatattatatcttcctatccatggacatgaaatatatttccataaatttggttttcctttgacttcttttgttatagttttgtagttttcctcatatagatcatttattttttgttagatttctacctactgtttatttctgaagtgtgctaatgtaagtgttattttgtttttattttcaaattccacttgttcattgttggtatataggaaagcaattaccttttgtatcttaaccttgtatatggaatcttgttttagttgcttattagttctaggagttttttgattcttttgtatttttgcatagaaaatcatcttatttgcaacaaagatattttcatttttytcttttcccttctatatattttaatttcgtcttgttacattaactag

SEQ ID NO: 445671 - DNA, 636 bp, Homo sapiens
ccttttgctgtacagaagctctttagtttaattagatcccatttggaggtcagggatttttaatctattgtgttcccttctgtggcaccattgacartaacattgactgggtgctcaataatgtgccctcaataaatatcaattgaagagacagtgaattgaataaagaaatagagttccagttgtgtggaatgatttgccaaaggccacattgattcctaatgttaaaacctcacgaaagtctcaggaggtgtgaagcagtttggatacaagactgagcttagtcagcattcttacagtgggattttcttccctcacaggtatattaagtagatgggtcacaatggaacataaggtatcctctcttccttgttttatctgtgaagagacctatctttaggccactattaaatcctcaacacttgggaggacagatgtataagttctttaggaatttgtgttaaccttaatatgattgtaactctcagggaatttcttaagtgtagtctttcttgaactttgactttcttgtcatcatgttctgttttgttttgtttgaaggatcatcttggaggtgccacgtgcaaatatcaaacaaaatattatgtcatttcttaccacatggctttcataaaa

SEQ ID NO: 445672 - DNA, 636 bp, Homo sapiens
ccttttgctgtacagaagctctttagtttaattagatcccatttggaggtcagggatttttaatctattgtgttcccttctgtggcaccattgacaataacattgactgggtgctcaataatgtgccctcaataaatatcaattgaagagacagtgaattgaataaagaaatagagttccagttgtgtggaatgatttgccaaaggccacattgattcctaatgttaaaacctcacraaagtctcaggaggtgtgaagcagtttggatacaagactgagcttagtcagcattcttacagtgggattttcttccctcacaggtatattaagtagatgggtcacaatggaacataaggtatcctctcttccttgttttatctgtgaagagacctatctttaggccactattaaatcctcaacacttgggaggacagatgtataagttctttaggaatttgtgttaaccttaatatgattgtaactctcagggaatttcttaagtgtagtctttcttgaactttgactttcttgtcatcatgttctgttttgttttgtttgaaggatcatcttggaggtgccacgtgcaaatatcaaacaaaatattatgtcatttcttaccacatggctttcataaaa

SEQ ID NO: 445673 - DNA, 636 bp, Homo sapiens
ccttttgctgtacagaagctctttagtttaattagatcccatttggaggtcagggatttttaatctattgtgttcccttctgtggcaccattgacaataacattgactgggtgctcaataatgtgccctcaataaatatcaattgaagagacagtgaattgaataaagaaatagagttccagttgtgtggaatgatttgccaaaggccacattgattcctaatgttaaaacctcacgaaagtctcaggaggtgtgaagcagtttggatacaagactgagcttagtcagcattcttacagtgggattttcttccctcacaggtatattaagtagatgggtcacaatggaacataaggtatcctctcttccttgttttayctgtgaagagacctatctttaggccactattaaatcctcaacacttgggaggacagatgtataagttctttaggaatttgtgttaaccttaatatgattgtaactctcagggaatttcttaagtgtagtctttcttgaactttgactttcttgtcatcatgttctgttttgttttgtttgaaggatcatcttggaggtgccacgtgcaaatatcaaacaaaatattatgtcatttcttaccacatggctttcataaaa

SEQ ID NO: 445674 - DNA, 525 bp, Homo sapiens
acatgtaataagtattgaaaaccaaatattaatattaattaatattcaattattatagtcatattttatctccaataattcatagataaatatgatatatgcaacttttacttacatgtgcttgctggaaaatagttatgaaaggcagttgaaaaatccaataaaagaaatctttaccaaagatgatgaagtgtaataaaacaaatccttagcacttaaaatctgttgacaaaaataaataaaaaggcagggtcttgctytgtcatccaggctggagtgtggtggcacagtcatagctcagcttactgcagcttccaactcctgggttcgagggatcctcctgagtagctgggtctgcaggcacatgccaccatgcctggctaattttttaattttttgtagagatgggtggggtgggggggttctcactatgttgactgggcttgtctcaaactcctggcttcaggtaatcctcccacctcagcttcccaaagtgctgagattacaagtgtgagccaccgcaac

SEQ ID NO: 445675 - DNA, 497 bp, Homo sapiens
atggaaacagctcccatttgtatagcctaaaaatttaacttctggcaatctactgttttttttaatgccaaacttccaatgatagttactcattctaatatatacaaaaattagacttcagttgaacartacagatcctgtacctggaaaaacatccaaagttgttatcaaatttatgtatttcatttgtaactttacttacaattgggagagagtttatttcactaaatacaatataattgtaggccaaaatgtcaatgtggtgaaagaagactttcttctcttgtcccttatgaatattttacatttttcaaaatatgtatatttttccttttatttactgtaaaatactaaaatctgatgtccttgaaatgatacttttacctgtattcttgttttccttccagttaacttctagtgaattccacctcccccactgtaatctatatagatttctagttctcccttgtagaaactttaaaaaacatttcatcaga

SEQ ID NO: 445676 - DNA, 482 bp, Homo sapiens
tctttatataaatgggacctttccttgctcgtttttccttcctcactgttggttttcctttctccctccattgcctccataactttmctctttctttctgctccagctataatcctcactgtgcctctgccactcaagaccgtttctcagcctaggacttttctttctgcatagaatgctcttccctcgtatatgtgcagggatagctgcctcataccattcaacaatttgctcaaatatcaccttctaatatggccttcccaacaactttctttaaaattgcaactgtccatgtctcaaaatacattcccttctccaacactcaccaatatctgacatactttctctttgccatatgtgtcttactccctccattagaatgtaagcacttcgggggaaaattctcttcacaattttgtttactactgtaatccagggtatagaacagtgcctgtatatgaattctgagtgaatacttctac

SEQ ID NO: 445677 - DNA, 593 bp, Homo sapiens
ggtattagccttcaactaataccataaaatgccgtgtgtcagacagtgtggggatataatgaattacaaaggatgaacacttttttataatttcattaataagatggaaaaatgcttaaaactrtaatgcaaagtaaataattaagtatcaacaccaaaaaagttatttactgtcgctggaccttagttccctcagttgtcaaatgtatttgatgaaaaaaatatatcgatggtttctaagtttttgcttgtggagattctacaggctcacaaagctctcttagagaatctagagtggtcacctgtaggaaaggctgctgaatatttgagcttcaggccccacacactgcctatgtgccaagaccacttccacttagctagaaaaaccctgcatctatgagctttacctattgtactaacacctaagattttgtttgaacagagagccaatctcagtcccctaaaagctgaaactacaccaatgttctagcaatttatgatcgacataatggtttttcctaacctttaaaaataaaatgctacaactcatagcaaaatatagttaatttctaagtaaaatagagatagaaatg

SEQ ID NO: 445678 - DNA, 549 bp, Homo sapiens
cttagttccctcagttgtcaaatgtatttgatgaaaaaaatatatygatggtttctaagtttttgcttgtggagattctacaggctcacaaagctctcttagagaatctagagtggtcacctgtaggaaaggctgctgaatatttgagcttcaggccccacacactgcctatgtgccaagaccacttccacttagctagaaaaaccctgcatctatgagctttacctattgtactaacacctaagattttgtttgaacagagagccaatctcagtcccctaaaagctgaaactacaccaatgttctagcaatttatgatcgacataatggtttttcctaacctttaaaaataaaatgctacaactcatagcaaaatatagttaatttctaagtaaaatagagatagaaatgtttgagaatccatttgtttcagatctcctagtatgagattttgttcttcaggtataagggatatgatgccagcttgtatatgaggatttctaaatctgggtccattacaactatctagaatgttaagacttgttatga

SEQ ID NO: 445679 - DNA, 593 bp, Homo sapiens
ggtattagccttcaactaataccataaaatgccgtgtgtcagacagtgtggggatataatgaattacaaaggatgaacacttttttataatttcattaataagatggaaaaatgcttaaaactataatgcaaagtaaataattaagtatcaacaccaaaaaagttatttactgtcgctggaccttagttccctcagttgtcaaatgtatttgatgaaaaaaatatatcgatggtttctaagtttttgcttgtggagattctacaggctcacaaagctctcttagagaatctagagtggtcacctgtaggaaaggctgctgaatatttgagcttcaggccccacacactgcctatgtgccaagaccacttccacttagctagaaaaaccctgcrtctatgagctttacctattgtactaacacctaagattttgtttgaacagagagccaatctcagtcccctaaaagctgaaactacaccaatgttctagcaatttatgatcgacataatggtttttcctaacctttaaaaataaaatgctacaactcatagcaaaatatagttaatttctaagtaaaatagagatagaaatg

SEQ ID NO: 445680 - DNA, 550 bp, Homo sapiens
taaaatgaactgtaaccagatcactgaagcatccttactagagactatctgcaaaaaacatataaaaatgttttcttaagttataattatgttgtgttgaaatggaattctttctacattttctctaatctgtagtagctgtgaaagtaagtgtctctgaatcttctttcacttttttgaggaagcccagcatattgcctccacgcagcaggcactccgtacacctgctgaataaaaatgattgaatagatgcatgaaaatcaaacgaagtcagatgtcaataaagtcattatcagcatcaaatggaatttaattgggaaagtcatctgaagaaaatcagcttagaaccaagttcaaatgrggtatatgagttccacagaaagtagacagggctcaggatttcataccacatctccatgtgagtaatgactaggtttagttggtttcaagttcagtttaattgggaggggtaataattattgaatcccagccatgctgcagaattgttctttaggtaagtctttgtcaatttagctatgtgtttgcaaac

SEQ ID NO: 445681 - DNA, 593 bp, Homo sapiens
gggtataagaagtgatcattccagccctcaggttccaaattagaagattagtctaaggtcaagtaaagcataaacactattatccaagatctaaactcaagatacaaaaccaggatgtcaattcaagtgggtcagccaagcagtaagtggaagtccaaaatcctagtattggcagatgtccatctattaccagcaggacaagtgccaggaaaccaggctactaatgtctgtgtctgagcatgggcactgaatagtaatgcagtcagtgggaagtggggttcacaaaggaggagatggggtactaacagacacctgcrccctggggggataatgagttcacgttggagcaacaactgaatggagagtttctaacaaaggatttctttcagagcccatctgcctaaagtaacattcatctcagggccctgagtcaggctgagcctacagatggaggttaaatagagcagctgaaaggaagaaaggctggtggggccaggaaaaacaccagaaacaccatttttgcattaagtggccacaatctacaactgcattatatattttgtgatatatatatatatatacacataaatatt

SEQ ID NO: 445682 - DNA, 595 bp, Homo sapiens
cacaatctacaactgcattatatattttgtgatatatatatatatatacacataaatatttactacaattttatttttcctttcttgatttgaaaaacaattagcaaaacatttaatgtatttccttaaaaacatatttacaactaccttttataaggaaagcttttgtatacataccacattcaatattgaagagaatgaaacttgtattgttagaagaggtctgtgtatttaggttcaaaaactgctgttactatcactgttttcttcactagtagtttattctaatgattagctgggtaaaatgaattatatgccttcttcaggaatgtaacagctcatgaaaaatcatttatttgtcaatgaaatttatttttaagtgaatcctttcttgttacttcgcatagctaccattgacttgtgtttattctggtggtattaattcctataagtaaggaaatataattgttttccmacagcatgtccaacagctttccagctggggccaactctattcaattcatagctctttagttctaacagatattgaattccgtactctgtattaactcacagtgtgatcacgcacccacca

SEQ ID NO: 445683 - DNA, 599 bp, Homo sapiens
ttgccattcatatttcatctttttgtttcctatgtccagcttacattggatcctttccatgtctccctttccccacacagaaatacacaagcattccccattgggaagaaatccacacatgtgatccttattaaaaatataagaaaagcaaaaaccagagtagccagaacccgactatgaattccttgctaggaaaagaggggcatgtggcttttgctggtggagggaaaagaggctttgaaacaggaagttttagggattagaattagaaaaagacaccataaagcaaccatgatgctggttcattgaaactgtattttagttttgttatttatacacacttaccctaggagttgaataatgacaacattttactactgtatattaaaactattattgccacatgtcatgggcttcccaacatgctttcctgcatacacatgyaaacaagaaacacatgcagcagaactctgcgaccacggttgtgctacaaacagaagctgctgtgataaactgactgggtgatgttcagtgacctaaattgaggcttagaataagtgtgggcgcgtgcctgccttcatcaaatgaaaagtaggcca

SEQ ID NO: 445684 - DNA, 599 bp, Homo sapiens
caaggatgaataataaactaagaggagtttagacttgtatggttttgctgtcttatgactcattggtcactagaaaggtctactcaatccaggcagtgtgagatcaggaggatagtagacgaaggatgggaagggtagttttcctcagagagtcggkgtaaaggactggtgtgtactacagatgtaagtgaagtgtgaacagagaccaggaggactccccaatcatttataacaatatttagttttctctcctgctttcttccttactttattttaataattagataatatatttctaaaatgaggattttcaggaataggcttaactttttgtgtataagtttcatgcccagtatatggggttctcaccaaacatagcttttaaataagaaccaaatacccaatctcaccaccttcttctccgtattgtctatgggtgatgatatgtgagggaaaaaaaaagtaggtcttccaaagtgtcctttttattaaaacatgggaaaaataagaacaaaaggaagaaataaaatatggtgcctctaaatctagaataaataaaacatttttgacattacaaaaaggaattcttatatacctaa

SEQ ID NO: 445685 - DNA, 656 bp, Homo sapiens
  misc_feature (1)...(656): n = A,T,C or G
ttgtaaagaataagtgaaataatgtatgttagggcacttggaaagtgtgtgtgtgtgtgtgtgtgtgcacgcatgcacgtgcatgtttgtgtatgagccaagacaagtaaattttgatgggttcggaaaagccagaccatatggcgctgccatggaggggtcctgtgaaagtgggattctgaggagtatgcggcaaacacaggctgragagagagattgtctgttttacacctggttttagggcaggctgtgaccagcatcaacaatgaaatgagatcaacacctatgtagtatgttgccctttagtagatgagaagctggagtgtaaagtccataaaatagcagcagntccttactctntcttacttctatgtttagcccactgactgggactgatgaaagagaaaactttattccctagatgtgcaaccaaccactctggtcagtcaaaaatgaaccctttgattctcagcatctgtgcattccaccagctcaaagagatctaaattagcccacgaggccccagtgaccagacacagatacacagcaataccagagcccaaagagaatcaaaacacacacaaccaaaatgaaaccttctatacagtgtagctaaaacacattctatctgttgaaaagccgggactcaattagca

SEQ ID NO: 445686 - DNA, 555 bp, Homo sapiens
ttctttttttcattcttggtaataggatgcttacagtatttttaaatttgtgtttgttttaagataatgcttttagatgaatttaccactaagcttttggcatcgtgttgcaaaatgacagatcttctagaagaaggtattactggtaagtgttattcttggcatgaacactttttaattgtaattgggggagatctgaggtattaaattttagttagtagttgtgtttctaaggagcttatttttttaaattactgtagccataactattagatttaacattcttttctctgaatcttctgtcagtttttttccctcagccgagacattaatagacctctaaccargcctaacttaattgctttgttgaggttgttctttaaatgttttactcatatatacatatatatatataaaacaattttgtatattgatacacaagctttacttcagtattttgatttagtttatggtttcatatatcactttaaaatggatatcaagatttatgtcataaaatcagctgttgtacatgtttacaaatgcataatgctg

SEQ ID NO: 445687 - DNA, 560 bp, Homo sapiens
gggtaatgggtccctgaaaagtcaagatggctgtggtattttagacagctaagaaatcaagcttttatatcagtgatgtactatgaaattttcaagaaaggcaaattatacttaattgctaatgctatgaaatgttctgttgggagaagtgaaagcaaccgttactttgaaatttgcagttagaattgttgaagatgggccgggcatggtggctcatgcctgtaatcccagcactttgggaggctgaggcaggcagatcatgaggtcaagagattgagaccatcctggccaacatggtgaaaccccatctctactgaaaatacaaaaattagctgggcatggtggcacgcacctgtagtcccagctactcaggaggctgaggcagaagaatcgcttgaacctgggaggtggaggttgactgcactccagcctggcaacagagcgagactccatctccttctcaaaaaaaaaaaaaaartgttgaagatgggggcaacaaaggatttctttcttattctgaaaaaaaaaatggtggaaacctgcaacagccagttggtgca

SEQ ID NO: 445688 - DNA, 522 bp, Homo sapiens
cattgagaacgcatcccttcargcaggttttgcatgtgcttttgccagattagaggttttttcttttttgtattaatgtctcagtttggggttcctcagaccatgaaggtagtatgattaatacctaagactctgtgagacaggcctgtggctaaattatcagaggagaagcttccttgcatctccccttgcctttgaggttgtcctgaccttatgcagggtgtcagctcccaatctgtaccttgcacagtacccagggctcggccccttgtttgctaacatcagaaaatactccacaaggcagaccaagcctcaactcagtttaccattctagtatttagcttcctttttaccaatagccctggagatttctctgacttgtttactctcagctatgctttaaaaacatgtttcctcttaatcagtgctccttggtgctatttagagggaagttttcaggatctagggatttaattatctttatatctctcagtcttcacatgtgtgtgaaacaaattaaat

SEQ ID NO: 445689 - DNA, 522 bp, Homo sapiens
cattgagaacgcatcccttcaggcaggttttgcatgtgcttttgccagattagaggttttttcttttttgtattaatgtctcagtttggggttcctcagaccatgaaggtagtatgattaatacctaagactctgtgagacaggcctgtggctaaattatcagaggagaagcttccttgcatctccccttgcctttgaggttgtcctgaccttatgcagggtgtcagctcccaatctgtaccttgcacagtacccagggctcggccccttgtttgctaasatcagaaaatactccacaaggcagaccaagcctcaactcagtttaccattctagtatttagcttcctttttaccaatagccctggagatttctctgacttgtttactctcagctatgctttaaaaacatgtttcctcttaatcagtgctccttggtgctatttagagggaagttttcaggatctagggatttaattatctttatatctctcagtcttcacatgtgtgtgaaacaaattaaat

SEQ ID NO: 445690 - DNA, 595 bp, Homo sapiens
ctggctctactcctaatcatctaggttaycttggggtaggtagttaatgcactatcaagtacactgtatccacccaaccaatgagaaatattttgttactgataatgaaataatacttactttcctggtgtgggctcatgttcacctttaaaggattttgaattcactctctgagaacagatccgtttgggttttaaaaaagctgaaaaatgttagctatcattaaattcagagtatcaaaaatgagccccaaatggtgcctatgtatcattccttgaactttttgtatgaatgaaatatttcataaaattttaataaatcagaaaactgggaaacatagacaacaaagaacttttgctgggcgcggtggctcacgcctgtaatcccagcactttgggaggctaaggtgggaggattgtttgaggccaggagtttgcgaccagtcttccctgtctctacaaaaaaaaaattcataaaccccttccatactaactatacattttttgttaacttagctgggcatggtggcatgtgcctacagttttgtagctacttaggaggctgaggcaggaggttcactagagcccagaagttc

SEQ ID NO: 445691 - DNA, 595 bp, Homo sapiens
ctggctctactcctaatcatctaggttatcttggggtaggtagttaatgcactatcaagtacactgtatccacccaaccaatgagaaatatttygttactgataatgaaataatacttactttcctggtgtgggctcatgttcacctttaaaggattttgaattcactctctgagaacagatccgtttgggttttaaaaaagctgaaaaatgttagctatcattaaattcagagtatcaaaaatgagccccaaatggtgcctatgtatcattccttgaactttttgtatgaatgaaatatttcataaaattttaataaatcagaaaactgggaaacatagacaacaaagaacttttgctgggcgcggtggctcacgcctgtaatcccagcactttgggaggctaaggtgggaggattgtttgaggccaggagtttgcgaccagtcttccctgtctctacaaaaaaaaaattcataaaccccttccatactaactatacattttttgttaacttagctgggcatggtggcatgtgcctacagttttgtagctacttaggaggctgaggcaggaggttcactagagcccagaagttc

SEQ ID NO: 445692 - DNA, 595 bp, Homo sapiens
ctggctctactcctaatcatctaggttatcttggggtaggtagttaatgcactatcaagtacactgtatccacccaaccaatgagaaatattttgttactgataatgaaataatacttactttcctggtgtgggctcatgttcacctttaaaggattttgaattcactctctgagaacagatccgyttgggttttaaaaaagctgaaaaatgttagctatcattaaattcagagtatcaaaaatgagccccaaatggtgcctatgtatcattccttgaactttttgtatgaatgaaatatttcataaaattttaataaatcagaaaactgggaaacatagacaacaaagaacttttgctgggcgcggtggctcacgcctgtaatcccagcactttgggaggctaaggtgggaggattgtttgaggccaggagtttgcgaccagtcttccctgtctctacaaaaaaaaaattcataaaccccttccatactaactatacattttttgttaacttagctgggcatggtggcatgtgcctacagttttgtagctacttaggaggctgaggcaggaggttcactagagcccagaagttc

SEQ ID NO: 445693 - DNA, 599 bp, Homo sapiens
tcttgactgtattctatatctcttgcattctgttacctttttttttttaacctctccgcattgcaactgaatgttctctattaacctgactttgagtcccctacttctgtcttctgttgtattcagtctgctattaaacccattcattgtatccttttgaaaactgaggtataaagcaaaatttcccctttgtagtatacagttctgtgagttttgacaaatgcacactctcatataaccactaccacaatcaagatagagaataatgtcatcaccccccaaaatgtcctcatgcccgtttgcagataaccccttaactcagtccccatcccctgacaactactaatctgttttctgaccctgtagttttgccttttccagaatgtccaatgaatggagtaatacactatggctcttttcatttagcataatgcatttgagattcattcatgctgcatgcaagagtagtttcattactttttattgcygagtagtattccatcatatggatgtaccacaagttgtttatcaatttaccagtttcagaacattttagtttttccagttgttggcaattatgaataaagctactaaaaata

SEQ ID NO: 445694 - DNA, 568 bp, Homo sapiens
ttactaaattcacatgaatttgaaaagcatttgagcttaacttatgagtgctcatttacttatactccaatttggtagcatgctagacacaacatagcatgatgcatatacatgcacataaatacatctaaacatgtatacacacacaaactataatccagtaactttgatctttgattttagacatgatatagcaataaaactcaccattttataaaatatatgtagatctaaattatttttctgacaaaactggaacctattcgcatggttaaactttgtttgccccaacaggtaawccaaggaaggcttttcaccaaagtttgggtacagcagtcagtatggtagttcaatttttaaaagtgtttctttactttttcttcagtttcaaacaggtttccaatgtttacatttcaggtaaaccataaataataattctaatcagtcttacctcagcaccagcagcttagtaacaacagattcaaaccaggcagagaagaaaagagaggaaaatagagagctttagacaactctacttaattctatagtagcaaattaaccatttgaa

SEQ ID NO: 445695 - DNA, 404 bp, Homo sapiens
acctcatttgctgtgccatgtataacatraagcatttcatcagttgatgctttgccaaaaactattctaaaagtttatgagtttttcttccactttccagttccaccaagactgtattctgttaagatttttcttagttcttgtagcagtcatttcatattgccaattcttgcttcatatcacttcttcaggcaaggcttttaattttaaaattagcaattcatctctcacagtcattttcatggttcatactgttcacaacacccaaaggcctgcttactatttcaaatcacaatttcaagaataaggataattaataacacttaaattctgaacagaaccctaacaaaatgatttcttatgtagaaaaaaggtaatatgcaggacatcaaaaatatgcatat

SEQ ID NO: 445696 - DNA, 516 bp, Homo sapiens
aaaaaaaaaaaaaaaaacattttctgagaagaaattgaagccagctgcagaaatttgcataagtaagaaggagccaaatgttacttcacatgacaatggggaaaatgggcatgtcagaagtcttcatggcagcccctctcatcacaggtccagaagcctaggagaaatggttttattaaccagcccaggtccctgtgctgtgtgcattctaagaacttggtgctctgtgtcccagccactccagctgtgactaaaagtgacaatggtacagttcaggctgttgcttcagatggtggaagtccaaagccttggcagcttccacgtgttgttgagcctgcaggtgcacagaagtcaagaattgaggttkgggaccatctgcctagatttcagaagacgtatggaaatgcctagatgccaaggcaaaagtttgttgcaggggtggggccctcatggagaatctctgctagggcagtgcaaaagggaaatgtggagctggagcccccacacagagtcgca

SEQ ID NO: 445697 - DNA, 516 bp, Homo sapiens
aaaaaaaaaaaaaaaaacattttctgagaagaaattgaagccagctgcagaaatttgcataagtaagaaggagccaaatgttacttcacatgacaatggggaaaatgggcatgtcagaagtcttcatggcagcccctctcatcacaggtccagaagcctaggagaaatggttttattaaccagcccaggtccctgtgctgtgtgcattctaagaacttggtgctctgtgtcccagccactccagctgtgactaaaagtgacaatggtacagttcaggctgttgcttcagatggtggaagtccaaagccttggcagcttccacgtgttgttgagcctgcaggtgcacagaagtcaagaattgaggtttgggaccatctgcctagatttcagmagacgtatggaaatgcctagatgccaaggcaaaagtttgttgcaggggtggggccctcatggagaatctctgctagggcagtgcaaaagggaaatgtggagctggagcccccacacagagtcgca

SEQ ID NO: 445698 - DNA, 532 bp, Homo sapiens
tctcagtgaaaacccaactttagacaaaatcaacacatttacttgttagatcaatttgataagacatctgaaatgttttcagagctgtttcattcatatgaatacaaatatatatatatacacacacacacacacacacacacacacacacacacaaattagagatttgtcatctcctgattacctaagactgaaggcatatagttaaatattttattcataaagtactttttcttctttcctttttcttttttttcgttctgtctcttacttttttcaatgtagctatttttttgaaatataattacagtgctttgttccagcttattttttcccttctcattctagttgatttaattttcctttaaaaatacatatgacataatttaaaagtcaaaacactggaaaagtttaaccccaaaaaattgttactctttctyatatatcgttcacccttattttcaacctttgtaggtattcgacttcattgttttctggtttttccttcctctgtttccttttgtaatggtca

SEQ ID NO: 445699 - DNA, 588 bp, Homo sapiens
tttaaatatatattcttattatactttaagttctagagtttttatcatgacagggtgttgaattttatcaaataatttttcaacatcaattaaaatgatcatattgttttctgtcctttattctgttgatatagtatatcacactgattgatacgcctatgttgaaccatccttgcatccttgggataattccaacttggtcatgatgaagaatcttttaatatatttttgaattttctttgctagtattttgttaaggatttttgcataaatgttcaacagagatattggcctgtagttttttgttttatgtgtctttgtctagttttgatatcagggtaatactggcctcatagaatgggtttgaaagtattccttctgcctctgttttttggaatagtttgtgtaggattggcatatgttatttaaatatttgataaaattcagcagtgaaaccactgggtccttgacttttatttgctagagtcattttattatggatttgatctcattacttgtcattggtttgttcaggtttgaatttcttcacagttcacttgyatgtgtcgaggaatttatccatttcct

SEQ ID NO: 445700 - DNA, 191 bp, Homo sapiens
attgtgggaaccccgatttatagtcagtcagccaaatgcacaggttataatctgtgcttgccactggcatctgaagtgacagagttataattgaatagtataagagaakacctagatggtgtcccctgcagaactgattgattgctgatggagaaaaatccgcacagatattttggtgatcagagtaacag

SEQ ID NO: 445701 - DNA, 591 bp, Homo sapiens
gaaataatgatttttttctaaaagcatctgctttatcctytttcctgacatcacttaattatgtaggtcagtgcttttggcatcttctttaagacttcactgctatggttcccatttttagggtctctttttcaaaactatatttggcccctttgtacatgttagagttctatgtattagcaaaccctttggactctcctcagtagcagcaacacttgctgtctaaggactcattgtaaagatttaatgccacttccacatcatcttccatgacctcattaagactatccagttgtataaaccatggagtgttgggaatttgaggcctatcaagttcaagactaaggaaatcatgtcctttctcaaattagactcttttccacacactatccatatcacttcccaccatcatttttcaatatttttcttaacctggtggcaggggattgtaccaaaatccctgacacattccaccctcagcctcagtatccttgatgagctataaaagtgggtgttacatccagtgcatcctggatacacatttactttctgctttatcagctgctgtatcattttgtgttgcatggaaga

SEQ ID NO: 445702 - DNA, 485 bp, Homo sapiens
cattttttggtgtcctcttcaatttctttcattaatgttttatagttttcattatagagatctttcacttctttggctatgttaattcctaggtatttgattttatgtgtggctattgtaaatgagattacctttttcatttcttttttacattgttcactgttggcaaatagatgtattactatttttgtatgttgattttgtattctgcaactttactgaatttgtcagttctaatagtctttggtgsagtctttaggttttttcaaatataagatcatataatcttcaaacaaggataatttgatttcttcctttccaatttggatgccctttttatctttatcttgcctaattgatctaactatgaattcaaatattatattgaataacactggtgaaagtggacatccttgtcttgttcaggatagaggaaaggctttccaattttccccactcactataatactagctgtaagtctgtc

SEQ ID NO: 445703 - DNA, 487 bp, Homo sapiens
gtctctactaaaaacacaaaaattagctgggtgtggtggcgggtgtctgcaatcccagctactcaggaggctgagacaggagaatcacttgaagctgggaggtggaggcttcaatgagccgagatcacaccattgcactccagcctgggcaacaagagtgaaactccgtctccaaaaaaaaaaaaaaaaaaacctcaatttttaaagaacttttctttttctgctcctgggtactttaagcctcacaatttctctcagttatttctgtaagatcccaacagaggtttttctgtgtgtgagacatcagtaggttcatacatttctttgacagtatctttgtcaaggcactccacatttgygtgttctgacagtgccctgtcctaccaggcaaaccagtctgtgctgatgaacattttgtccctcagactgctagacctacattgtaatacgaagcacagagagaggtcttctttcctattctatgttg

SEQ ID NO: 445704 - DNA, 610 bp, Homo sapiens
agaaccactgcagtgtttatattattttttttttattttattctattttttgagacggagtctcactctgtcacygggctggagtgcagtggcatgatctcagctcactgcaacctctgcctcctgggttcaagtgattctcctgcctcagcctcctgagtatctgggactacagggatgcaccaccacgcccagcttatttttgtatttttagtagagacggggtttcaccatgttggccaggatggtctcgatctcctgaccttgtgatccacccacctcggcctcccaaagtgctgggattacaggtgtaagccaccgtgcccagcctatattattaatataatgggaatgcagaatgattcaaatgaaactgaatggcatcgatgttaggctctgggttattgttgagtgggttgtgacaaaaatttggggttttgctattcttgggtcctggttgataaaatagttcaaataagggtgacctcgaggccaagtaggtggcaaataatcagttcagaatctcaaacagcagtggaggttgtttgtggagttgtgtagcagaaatgcttatgcagcccagttcagtaaacatgttacatcaccttgc

SEQ ID NO: 445705 - DNA, 610 bp, Homo sapiens
agaaccactgcagtgtttatattattttttttttattttattctattttttgagacggagtctcactctgtcactgggctggagtgcagtggcatgatctcagctcactgcaacctctgcctcctgggttcaagtgattctcctgcctcagcctcctgagtatctgggactacagggatgcaccaccacgcccagcttatttttgtatttttagtagagacggggtttcaccatgttggccaggatggtctcgatctcctgaccttgtgatccacccacctcggcctcccaaagtgctgggattacaggtgtaagccaccgtgcccagcctatattattaatataatgggaatgcagaatgattcaaatgaaactgaatggcatcgatgttaggctctgggttattgttgagtgggttgtgacaaaaatttggggttttgctattcttgggtcctggttgataaaatagttcaaataagggtgacctcgaggccaagtaggtggcaaataatcagttcagaatctcaaacrgcagtggaggttgtttgtggagttgtgtagcagaaatgcttatgcagcccagttcagtaaacatgttacatcaccttgc

SEQ ID NO: 445706 - DNA, 528 bp, Homo sapiens
aaaaaacatcaaatattagatgtcattagagattgcatacagattaaggaagaaattataatatggatccaaagcactagaactactcttaaatggagaaataatttgaaaggactcatatggttagcttggtgaagaaaatataataggagtagcatcttctaaggctttagtccagacttaattatttgcttcaggagagtgaattcagagaatcactcttgaatttamtgataatttctagattttcttttgaatctaatgaattatatctggcatttaagtctttacataacataaaagggacccaacactttttgagatgggtgaaacaaacattctacatataggtttgctctcaatcaatataggctagaaaattgcgagactattttcaggattttgacgtcaatttctgtacctattggcataaaagactaatatcccattttctcattttgtatgatgttttgatttcaggaatgcaagttctatttaacatttaagtatctacaatactcaaaatac

SEQ ID NO: 445707 - DNA, 481 bp, Homo sapiens
aaatacaaaaattagctgggcctggtggcgcatgcctgtagtcccagctactcaggagggtgaggcaggagaawcacttgaacctgggatgcagaggttgccgtgagccaagatcacgccactgcactccaaccgagacagactctgtctaaaaaaaaacaaaaaaacaaaaaacaagtcaaaaaataacacatgctggtaagcttttggagaaaagggcatatttatacactgttggtaggagtgtaaattaattcaaccattgtggaaggcactgtcgcaatttctcaaagagctaaaaacagaactaccattcaatccagcaatcccattactgggcatatacctaaaggaatataaatcattctgctctaaagacacatgcatgtctatgttcattgcggcactattcacaatagcaaagacatggagttaacctgaaggtccatcaatggtggactggacaaagaaaatgtagtgc

SEQ ID NO: 445708 - DNA, 597 bp, Homo sapiens
ttaatttataagtcattaggatgtaaatataatttaaagacctttgttgtactacattatctaaagtctgagaagaggtagagaggagaagaaatacaaggaccaagcccttagggcactccaatatttaaagattggaaaaatgaggaaaaatccacaaagaccaagaaggtaaagccagagaaaccaatataaccaaaccaatatgagagcaggttggatttatagtacagyggcagatagtgtataaatatataattgccagactttggggcttcaattcagattacatctgttttctcagtgaaataggaaacaagtcaatgaacaagaatataaatatgaaatgagaccagtcaatatggctatgtgtttttctccagccatattcagttgtatggggggcaggcagggacgagacagttatgttcaactttctaagttaaatctgggaaaatataggaaagtagttgatagacaagggtattgaggatgtttgccagggaattattaaaatttaatgatgtaactaaagctggtttaagagggaagtaaagacagaaaaggttagggggaatgaaaaagcggtagaatcaa

SEQ ID NO: 445709 - DNA, 597 bp, Homo sapiens
ttaatttataagtcattaggatgtaaatataatttaaagacctttgttgtactacattatctaaagtctgagaagaggtagagaggagaagaaatacaaggaccaagcccttagggcactccaatatttaaagattggaaaaatgaggaaaaatccacaaagaccaagaaggtaaagccagagaaaccaatataaccaaaccaatatgagagcaggttggatttatagtacagtggcagatagtgtataaatatataattgccagactttggggcttcaattcagattacatctgttttctcagtgaaataggaarcaagtcaatgaacaagaatataaatatgaaatgagaccagtcaatatggctatgtgtttttctccagccatattcagttgtatggggggcaggcagggacgagacagttatgttcaactttctaagttaaatctgggaaaatataggaaagtagttgatagacaagggtattgaggatgtttgccagggaattattaaaatttaatgatgtaactaaagctggtttaagagggaagtaaagacagaaaaggttagggggaatgaaaaagcggtagaatcaa

SEQ ID NO: 445710 - DNA, 501 bp, Homo sapiens
aggttggatttatagtacagtggcagatagtgtataaatatataattgccagactttggggcttcaattcagattacatctgttttctcagtgaaataggaaacaagtcaatgaacaagaatataaatatgaaatgagaccagtcaatatggctatgtgtttttctccagccatattcagttgtatggggggcaggcagggacgagacagttatgttcaactttctaagttaaatctrggaaaatataggaaagtagttgatagacaagggtattgaggatgtttgccagggaattattaaaatttaatgatgtaactaaagctggtttaagagggaagtaaagacagaaaaggttagggggaatgaaaaagcggtagaatcaatgagtatcagattactatgttttaagccagaaatgtcactggagaataccgagttaatagagttgtttctaattttttggcagtaggtgaggtattacctataaaaactctgaaaat

SEQ ID NO: 445711 - DNA, 501 bp, Homo sapiens
aggttggatttatagtacagtggcagatagtgtataaatatataattgccagactttggggcttcaattcagattacatctgttttctcagtgaaataggaaacaagtcaatgaacaagaatataaatatgaaatgagaccagtcaatatggctatgtgtttttctccagccatattcagttgtatggggggcaggcagggacgagacagttatgttcaactttctaagttaaatctgggaaaatataggaaagtagttgatagacaagggyattgaggatgtttgccagggaattattaaaatttaatgatgtaactaaagctggtttaagagggaagtaaagacagaaaaggttagggggaatgaaaaagcggtagaatcaatgagtatcagattactatgttttaagccagaaatgtcactggagaataccgagttaatagagttgtttctaattttttggcagtaggtgaggtattacctataaaaactctgaaaat

SEQ ID NO: 445712 - DNA, 501 bp, Homo sapiens
aggttggatttatagtacagtggcagatagtgtataaatatataattgccagactttggggcttcaattcagattacatctgttttctcagtgaaataggaaacaagtcaatgaacaagaatataaatatgaaatgagaccagtcaatatggctatgtgtttttctccagccatattcagttgtatggggggcaggcagggacgagacagttatgttcaactttctaagttaaatctgggaaaatataggaaagtagttgatagacaagggtattgaggatgtttgccagggaattattaaaatttaatgatgtaactaaagctggtttaagagggaagtaaagacagaaaaggttagggggaatgaaaaagcggtagaatcaatgagtatcagattactatgttttaagccagaaatgtcactrgagaataccgagttaatagagttgtttctaattttttggcagtaggtgaggtattacctataaaaactctgaaaat

SEQ ID NO: 445713 - DNA, 466 bp, Homo sapiens
tatatttttgcatatctattgcctaatgtagtatttggattataaaagatgttcaatactgtaaaaaagtcagtaaatgaatgagaatctcagaaaaaatgtaagcatttttaataagtagcaaaactacatgcaaatgaagtaaacagtaaacaatgtcaagcaacaaatggtactccgagctctatttttagagagggaatacaattgattctgtgaggcatttrctataaggtaaaagaatgaggtcatgtgggaaaaggctagagtgctacctgaaggtacatattgagccagcacactcctgagtatatttcccatttctccaaataccgtgtgtggtaagctgaaccatggccccccaagatgccttcatcctaatctctggtgcctgtgaatattatcttatatggcaaaagagactttgcaggtgtgattaaattaaatatcttgagataaagatgtt

SEQ ID NO: 445714 - DNA, 579 bp, Homo sapiens
agatgaatgaaagaaaacatgatgaaccaaccgaagcagaaaaagtgatcaaagagcaccccaggcctaaaaaatcaaggtcctctctatagacccaatttaaagtacrtgattcaaaattgttgttgctcaaaatgaccgagctagtctcaagagctttgctaatgactttgccatctgggaaggcagagaacttaaaagataattattttaggggtgagggactagcacaagattacaagaatatcaaatgtaaatgaaaagctttggccatagcaaacactgacaaactgtccacaggaatagcttacctaaaatccaattaaaacagtaaggccccttatttaattgcccttaaataggaagtccaacccctaaaatgtatgcctaagggcgacagaactcttcactgaaacttctcctgtaaggaaccgcaaatcactctacggatcccagagcaaggacatcatctagtgtatgagcttccctctagaactcacttatactgggaaatggattgggatggtgaagtagctttgaaaacccctgcttactgtggtaaacacttaagctggttag

SEQ ID NO: 445715 - DNA, 579 bp, Homo sapiens
agatgaatgaaagaaaacatgatgaaccaaccgaagcagaaaaagtgatcaaagagcaccccaggcctaaaaaatcaaggtcctctctatagacccaatttaaagtacgtgattcaaaattgttgttgctcaaaatgaccgagctagtctcaagagctttgctaatgactttgccatctkggaaggcagagaacttaaaagataattattttaggggtgagggactagcacaagattacaagaatatcaaatgtaaatgaaaagctttggccatagcaaacactgacaaactgtccacaggaatagcttacctaaaatccaattaaaacagtaaggccccttatttaattgcccttaaataggaagtccaacccctaaaatgtatgcctaagggcgacagaactcttcactgaaacttctcctgtaaggaaccgcaaatcactctacggatcccagagcaaggacatcatctagtgtatgagcttccctctagaactcacttatactgggaaatggattgggatggtgaagtagctttgaaaacccctgcttactgtggtaaacacttaagctggttag

SEQ ID NO: 445716 - DNA, 569 bp, Homo sapiens
atttttgctatctgttccttgaaatgataaagtgaaagttactccttttataataatttagatgcaggtcaactccatggtatcaagtcatgaacattctgtaattctgtagaaactacaaaaaatgaaggaatattgacctgaacttttttggtggggagcggtgtttctttaattcttcttagcacctctttaagaaattttccttctctattcaatctgtttcatggktgaggctggtgaataagaatcatttgcttcattgctctagtaagcctgtgtttaagggatgatgtctaatctggtgtatacgctagagtagtacaaatatttggagtcattataagttgttcaaaccctctcagcatctgctatattgcttttaaatataatgtgtaacaacacttgcacttcctacctaggcagaataataaggacaatatttaccattttctatggaaaaaccaatataaccagtcaaaatatatgaaacaatattttttaagatactggatattaaggaacagagaaaaagggtcccacagatacagaaaatgagtaaggtgagc

SEQ ID NO: 445717 - DNA, 508 bp, Homo sapiens
ttttactttctcataatggctatactaagttaaattcctgccaactgtgtgtaaccgttctcctttctctgtatccttaccagtgtttgttctttttgtctctttgataataaccattctaactgggataagttgatatttcccaatggttttgatatgcatttccctgatgattagtgatgctgaacattttttcatatacctgttggtcatttatatgtcttctgatccaataatcccactactgggtatatatccaaaggaaaataaatctgaatgtgcaaaaaagatctgctttcccatgtttattgcagcactattcacgatagccaaaatatgaaatgaacttatgtgtccatcagtagatcaatggataaagaaaatgtggcatatgtacaatggaatcccatttagccataaaartgaacaaaattgtgccatttgcagcaacgtgaatgagcttggaggacattatgttaagtgaaataagccaggcatggaaagataa

SEQ ID NO: 445718 - DNA, 560 bp, Homo sapiens
gtgaaggaagttatctgtttccatgagagactgattccatctgcattaagagcaaactgtcgaagacattcaccaatttccatcatgaacttgagaagtccaggaaatttctctactgttgcctagtctgtatttactccctattctaaaagtttggtgcaggctagtcactgcagcatttaaggtagctaaattgaccatgtctggaatttaaaattcctttagctacactcttayatttacataaactgagtaccttatctattaatggtcagagacagcaagtgtagtagaaaaggcattgaggcaatttatttagtcatggcaatgggacgtatatggtggtgatagttgctctctctctctttctatatgtgtgtgtgtgtgtgcatgtagggtgagggggtgtagttgaaggggtactcacatagcaagcaagcaaaatctgataaaaataccactgaaattattgcatatcaacttaggtgtgtccccagcctaattggaacatattatgccccaatgaggaaatctggcagcattgagttcttggactcctt

SEQ ID NO: 445719 - DNA, 489 bp, Homo sapiens
tactcttatcacatatttcctttcttaaatctaacaacttttaaaaataagtttgaatgtagcctttataaataagcatgagaataacttctgagggtagagactagccagggcccagcattatttaacaatagtgacaggattccaattgttctgccgggaggatgccatggcaactatgccaaagttcccaatgccctgatgcaaggcatggtgatagttatcattttatataatatgacctcagttgaatgataaagtaagtactcttgcttaccaatgtcacagctatgcagttaagagagggaacrttctctagttacatattctcagaagcagactgcatgttattgacctggtgggaaatcaccagaaagatgctttccaactttgtgttccctcttcaggatacatggctggcctaaggaccacatgcagtggcttctctcttctctgttccaggagaattctgctcccatactaaaacct

SEQ ID NO: 445720 - DNA, 551 bp, Homo sapiens
atcaaactccacattaaacatatttaattcatatattttactaattcagagatgctttcctaccaagaagagttaatgttattttcctgtgcatattaaaactggaacaggagaagactcttggaaaatggcagtttaggaagcaccaggaatctgtttccccacctaggcaataaccgcactggcacaatctttctgatgtaactattttggaattttgaagcctattgaaggtttgaaatttccaggggaaggcagggacagtaaattgtggttgatttcagtcaatttcagcttttagcacagtagcagctatccattcccccatctctgtggcagacagccatgcatatgtttctgaaacagtttgcacagacctcaaaggaaccaggakaagcaaagagaatcctgcccttcaaatatcagagatctgtgcttcggttgctggttactgcttatgactatagaggtgcagacaaagaggcaggcagtcattattgttgcacctctcctgatttgtaacaagtctgtctccctctagttgaagtgac

SEQ ID NO: 445721 - DNA, 535 bp, Homo sapiens
ccccactctcaataatggctagagcaaccaacacaagataagtaaggaaacagaggacttgaacagaacattggaccaactatatttaacagatacacatagaacactgtactcaacaccwacaaaatgcacattcttctcaagtgcacaaggacattttccagtttagaacatgtgttagtcgattcttgcattgctataaatacctaaggctgggtaatttataaagaaaagaggttttcattggctcatgattctgcagtttgtacatgtatctgctcctccagcatctgctcctggtgcaagcctcaggaagtttacaatcatgacggaaggcaaaggaggagtaggtgcatcacatggagcaggagaaagcaagagagagaaaaggaggaagtctcagagttttttaaataatcagataatgtgcgagctaactaagaataactcatctatcaccaaggagttggtgctaaaccaatcatgaaggtctgcccccataatccaatcacctcccaccaggctcctcatccaa

SEQ ID NO: 445722 - DNA, 535 bp, Homo sapiens
ccccactctcaataatggctagagcaaccaacacaagataagtaaggaaacagaggacttgaacagaacattggaccaactatatttaacagatacacatagaacactgtactcaacaccaacaaaatgcacattcttctcaagtgcacaaggacattttccagtttagaacatgtgttagtcgattcttgcattgctataaatacctaaggctgggtaatttataaagaaaagaggttttcattggctcatgattctgcagkttgtacatgtatctgctcctccagcatctgctcctggtgcaagcctcaggaagtttacaatcatgacggaaggcaaaggaggagtaggtgcatcacatggagcaggagaaagcaagagagagaaaaggaggaagtctcagagttttttaaataatcagataatgtgcgagctaactaagaataactcatctatcaccaaggagttggtgctaaaccaatcatgaaggtctgcccccataatccaatcacctcccaccaggctcctcatccaa

SEQ ID NO: 445723 - DNA, 487 bp, Homo sapiens
cacattttaatacatattataaatatattaaaaatttaacagattttttttwaaaaagatgcttgtacatgaatagacagataagcttatgagagagaaaagaaattccagaaatagattcaaatacatataattacatagtaaaagatacaggaacatttcaaaatagcattgaaaatatggattatatactaacattatgggaaatctgggtaactacctgaaaaaaaaataaatttagatttatattgtttaccagaataaatctaaaattgatcaaatatttaagtataagaaatacaatcataaaagtagtagaaaaaaagccatgaaaaatattttattctttcaagtgagaaaatttaagtagaaacaaaatccagaggtcactgaaaaattgataaacttggtacaaaaaatttaaagaaaacattctacatggcaacactcacaataaaattgaaatcaagaaaaaatggtgagaaaa

SEQ ID NO: 445724 - DNA, 599 bp, Homo sapiens
acattcactccatccattaaccattgtttatttgtctctttactgaccactcattccaattgcaatgtcttgatgaattttgatctaagggtgagaagaaggaactaaccatctcatctcatctggagctcttcttgacacatggtaccctaaaaacattttgtattttcctgttttctatggcatccatggacttcctttctgatcattcatyaaagggccatctgctctgtgctcagtctgttccataaatgaaattaaggcatatattatgtggctccagtccagcttccccttcttcatagctgctgtgtccctttgaacagcccatgaggcaaaactgatgtctcaccttactgcaaggtgcatgacccctttgcttccaatcttattttactttgaaaaatacctgcacctcatgctgttcagatgttatgttagtgtatagtgttatttaccatacactaaaccactagttgtttagaccctttggcagtaacccattttaccaatgaaaggttttaatgaaaattcaacatttcagtccaattcttctattacaggaagaataacaactttcaatttccttttatatccca

SEQ ID NO: 445725 - DNA, 599 bp, Homo sapiens
acattcactccatccattaaccattgtttatttgtctctttactgaccactcattccaattgcaatgtcttgatgaattttgatctaagggtgagaagaaggaactaaccatctcatctcatctggagctcttcttgacacatggtaccctaaaaacattttgtattttcctgttttctatggcatccatggacttcctttctgatcattcatcaaagggccatctgctctgtgctcagtctgttccatraatgaaattaaggcatatattatgtggctccagtccagcttccccttcttcatagctgctgtgtccctttgaacagcccatgaggcaaaactgatgtctcaccttactgcaaggtgcatgacccctttgcttccaatcttattttactttgaaaaatacctgcacctcatgctgttcagatgttatgttagtgtatagtgttatttaccatacactaaaccactagttgtttagaccctttggcagtaacccattttaccaatgaaaggttttaatgaaaattcaacatttcagtccaattcttctattacaggaagaataacaactttcaatttccttttatatccca

SEQ ID NO: 445726 - DNA, 599 bp, Homo sapiens
acattcactccatccattaaccattgtttatttgtctctttactgaccactcattccaattgcaatgtcttgatgaattttgatctaagggtgagaagaaggaactaaccatctcatctcatctggagctcttcttgacacatggtaccctaaaaacattttgtattttcctgttttctatggcatccatggacttcctttctgatcattcatcaaagggccatctgctctgtgctcagtctgttccataaatgaaattaaggcatatattatgtggctccagtccagcttccccttcttcatagctgctgtgtccctttgaacagcccatgaggcaaaaytgatgtctcaccttactgcaaggtgcatgacccctttgcttccaatcttattttactttgaaaaatacctgcacctcatgctgttcagatgttatgttagtgtatagtgttatttaccatacactaaaccactagttgtttagaccctttggcagtaacccattttaccaatgaaaggttttaatgaaaattcaacatttcagtccaattcttctattacaggaagaataacaactttcaatttccttttatatccca

SEQ ID NO: 445727 - DNA, 539 bp, Homo sapiens
gacaaatactcatctctaccaaaccagagaaccagagaaatacctgtggatgactaggaggaagagattttttaattatatattttttgttaaaaaaatcactgttccaagatttcctgtgtcctaggtagtataaaatttgrcatgtttttaacctctgtgattctcactttgctaatcaataaattggtaataataaatacctacatgcaagagttttaaggactaaatattgagcatagtacctatctagtatgtagtaggcactcaacaataccacagtgtctagcatgtagtaggcattcaataattatctcttgtttgaatttatgaataatgggtgaatggaaataatatacagaaagtttttgtcttccaggaaaaattagtgtaatttggtgcctttatgcccaaggaagatatatatctaccataatttctgtaataatcaacttatagttctttgcttagcttgatatgaaaagtcagtgaaacataaaactgagagttggaaatactcttaatcaacagctaagtgg

SEQ ID NO: 445728 - DNA, 539 bp, Homo sapiens
gacaaatactcatctctaccaaaccagagaaccagagaaatacctgtggatgactaggaggaagagattttttaattatatattttttgttaaaaaaatcactgttccaagatttcctgtgtcctaggtagtataaaatttgacatgtttttaacctctgtgattctcactttgctaatcaataaattggtaataataaatayctacatgcaagagttttaaggactaaatattgagcatagtacctatctagtatgtagtaggcactcaacaataccacagtgtctagcatgtagtaggcattcaataattatctcttgtttgaatttatgaataatgggtgaatggaaataatatacagaaagtttttgtcttccaggaaaaattagtgtaatttggtgcctttatgcccaaggaagatatatatctaccataatttctgtaataatcaacttatagttctttgcttagcttgatatgaaaagtcagtgaaacataaaactgagagttggaaatactcttaatcaacagctaagtgg

SEQ ID NO: 445729 - DNA, 662 bp, Homo sapiens
gcttgtcttttcatgttcttaacagtgtctttcaaagagcagaaatatttaattctcatgaagtacaatctatcacttttgggggcctgttttatggatcatgattttggtttcctacctaacaaatcttagcrtaatccaaggtcacaaagattttcatctacttttttcttcagaaagttctatagttttagtatttacatttaggtctgtgatcatttttgagtttatacatatgataaaaagtgtgataatagtcatactttgcatttgaatattcaactgctcctgaaccagttgttgaacagtatcccttctctgcagaattgccttggaaatctttgtagaaaatcagttgtctatatatgtgtgtatctatttttgaactctattatttttcattcatttatttttatatctttatgagaataccacactgtcatgatttatgtagctgtaaataagtcctgactttaaaactttattctcttccaaagatgttttgtttattttatgttctttgcaatttcatgtgaattttatactcagcttgtctatttttttaaaagggcctgttggcagtttgaatctattgaatctatagatcaatttggggagatttgatgtcttaactatattgattttctctactcacaaataca

SEQ ID NO: 445730 - DNA, 617 bp, Homo sapiens
gggttgctgtggtactacaaccccagtttagctctgggctctcaaaacagtaagtcttgcacacctgtcagatttactttaaaatacgatgctattataagtagcgttatttttaatttcaatttttaattagtttgttatttatacctgctacagtcttaattttggtatacctcacaaaattcatattctggaacttaatcttcatgtgacagtattaagaggtggggcctttaggaggtaatttgatcacraggtcagggccctcatgtatgggattagtgtccttataaaagaagcttgagggagtcggattgcctcttccatgtgaatatggagcaacaagattccatctatgaagcagagagcaagccgttaccagacaccaaatctgccaacaccttggtcttggactccccagcctctagaactgaacaataaatttctgttgtttgtaaattatctagtctaaggttttttttatagtagccaaatgagctaagacaatatagaaataaaatggactcattgttgatcttgtatcctctgaccacaataaacaaatatattagttgtaatcgcattttttggtagatttcattggattgtctacaaag

SEQ ID NO: 445731 - DNA, 603 bp, Homo sapiens
ataaaggtattgctaaaatatttcatatacaatgttagcatttaataaaatattaccacaccttctaggaggcaatggcaaatgmtaaaaacttaagagaaaaaaaaacaggaaaaaataaaataaaacagacctataggagagacatttattagagttagcagacatggacctttaaataactttgataaatattctaactaaaaggacaacatgaagagaattgtatagaactggaatctagaaaaacaatgaaattggaattctagagtagaaatgcaataactgaatttaaaagtcaatttaaaaatcagtgtgtgggtttaagagccaattagacacagccaaaaatagaattagtaaattagaagataagtcagtgaaaatattcagaaaaaagtatagagaaacaaagtaaaggaaagcacagaggataagagacatataggaaataatgaaaatatctatcaaatgtgtaatcacaattttagaagaagaaaaagagagagaatggggaagaagcaatattggaagagacaatggctgataattttccaaaactgctgaaaaacatcaacacatagattcaagaagagttatgaa

SEQ ID NO: 445732 - DNA, 603 bp, Homo sapiens
ataaaggtattgctaaaatatttcatatacaatgttagcatttaataaaatattaccacaccttctaggaggcaatggcaaatgctaaaaacttaagagaaaaaaaaacaggaaaaaataaaataaaacagacctataggagagacatttattagagttagcagacatggacctttaaataactttgataaatattctaactaaaaggacaacatgaagagaattgtatagaactggaatctagaaaaacaatgaaattggaattctagagtagaaatgcaataactgaatttaaaagtcaatttaaaaatcagtgtgtgggtttaagagccaatkagacacagccaaaaatagaattagtaaattagaagataagtcagtgaaaatattcagaaaaaagtatagagaaacaaagtaaaggaaagcacagaggataagagacatataggaaataatgaaaatatctatcaaatgtgtaatcacaattttagaagaagaaaaagagagagaatggggaagaagcaatattggaagagacaatggctgataattttccaaaactgctgaaaaacatcaacacatagattcaagaagagttatgaa

SEQ ID NO: 445733 - DNA, 603 bp, Homo sapiens
ataaaggtattgctaaaatatttcatatacaatgttagcatttaataaaatattaccacaccttctaggaggcaatggcaaatgctaaaaacttaagagaaaaaaaaacaggaaaaaataaaataaaacagacctataggagagacatttattagagttagcagacatggacctttaaataactttgataaatattctaactaaaaggacaacatgaagagaattgtatagaactggaatctagaaaaacaatgaaattggaattctagagtagaaatgcaataactgaatttaaaagtcaatttaaaaatcagtgtgtgggtttaagagccaattagacacagccaaaaatagaattagtaaattagaagataagtcagtgaaaatattcagaaaaaagtatagagaaacaaagtaaaggaaagcacagaggataagagacatataggaaataatgaaaatatctatcaaatgtgtaatcacaatyttagaagaagaaaaagagagagaatggggaagaagcaatattggaagagacaatggctgataattttccaaaactgctgaaaaacatcaacacatagattcaagaagagttatgaa

SEQ ID NO: 445734 - DNA, 636 bp, Homo sapiens
tatcatacaaatatttttagtgtgttactctttggataactttgtatttctgcgtggataactttggtttacctatgtttctcacttttactgttgttttcttgaaaaacccagcacccccttcccagttcattcttgccactctcatgatttaatattcttgagaaccctatcaggtttcattttatagatgaggaaattaagacttaaagaaattaaataacttcctcaagtctacacagctggtaagtagtagatctgggattttgattcagatctatctgactccaaaaattgcacttcaaccacaattttattcttgcattattttaaaagtttcctctatgcatataccattaagtacttaattacatggtattatgacttctttgagctagtctgtgactcctggmacagttcatactctggtctataagcatgggaatgatgaagcatatatcatccttagtgctcctttcagtttatgatggttctgatccattgcaaaatttacagtttctaataccattaagtttctagagaaaaataagccattttcactggagaatcttttggtcttctgcttaaccgtttctactttgtagcatactcaagccatcctgcagaaactttgtt

SEQ ID NO: 445735 - DNA, 569 bp, Homo sapiens
ttattattaaatgggctgggcgtggtggctcatgcttgtaatccgagcacttttggaggctgaggcgggtggatcacttgaggtcaggagttcgagaccagcttggccaacatggtgaaccctcatctctactaaaaaacaagtaaataaattagccaggcattgkggcacacacctgtaatcccaactattcaggaggctgagacaggagaatcgcttgaacatgggagggggaggttgcagtgagctgagatgatgccactgcgctccaacctgggtgacagagcgagacactagctcaaaaaaataagactttattattaagtgcccctaatggttaccaccttttctttcacagatatcatgaagtagggtcaccgtttagccaaggagaaagacacagaaaacaatgggcaatatataatactccataaaaagtactatgctagagacatgcacaagtgctttataaagaaggaatcttagtgcaaagtgcccagaaattaataagtaggcaaatggattgaagaaaacattataaccaataggaataacaaggacaaagactg

SEQ ID NO: 445736 - DNA, 569 bp, Homo sapiens
ttattattaaatgggctgggcgtggtggctcatgcttgtaatccgagcacttttggaggctgaggcgggtggatcacttgaggtcaggagttcgagaccagcttggccaacatggtgaaccctcatctctactaaaaaacaagtaaataaattagccaggcattgtggcacacacctgtaatcccaactattcaggaggctgagacaggagaatcgcttgaacrtgggagggggaggttgcagtgagctgagatgatgccactgcgctccaacctgggtgacagagcgagacactagctcaaaaaaataagactttattattaagtgcccctaatggttaccaccttttctttcacagatatcatgaagtagggtcaccgtttagccaaggagaaagacacagaaaacaatgggcaatatataatactccataaaaagtactatgctagagacatgcacaagtgctttataaagaaggaatcttagtgcaaagtgcccagaaattaataagtaggcaaatggattgaagaaaacattataaccaataggaataacaaggacaaagactg

SEQ ID NO: 445737 - DNA, 569 bp, Homo sapiens
ttattattaaatgggctgggcgtggtggctcatgcttgtaatccgagcacttttggaggctgaggcgggtggatcacttgaggtcaggagttcgagaccagcttggccaacatggtgaaccctcatctctactaaaaaacaagtaaataaattagccaggcattgtggcacacacctgtaatcccaactattcaggaggctgagacaggagaatcgcttgaacatgggagggggaggttgcagtgagctgagatgatgccactgcgctccarcctgggtgacagagcgagacactagctcaaaaaaataagactttattattaagtgcccctaatggttaccaccttttctttcacagatatcatgaagtagggtcaccgtttagccaaggagaaagacacagaaaacaatgggcaatatataatactccataaaaagtactatgctagagacatgcacaagtgctttataaagaaggaatcttagtgcaaagtgcccagaaattaataagtaggcaaatggattgaagaaaacattataaccaataggaataacaaggacaaagactg

SEQ ID NO: 445738 - DNA, 562 bp, Homo sapiens
ggttacaaagacagaaattctctgagaactgcaaatagattcagaaaagaatgtaagttaaaacaagtgtttgtatgaattaatcaaatgagcatctgttccctttcaataattttattgttattgagaaacatggaactgtaacctaaaagccttagagctagaattgttcttcaaatattatctcttctgccctgtcctcctttagcccttctctttctctactttcagaaaggcagagaataatctcattttaaagtcaagcatatgggagcaaaaaagatccgatactttgatatttactgtctcaaaattactagtgaactcactgaattcagatcagctattttaaaagtacggtatcctcaatgataaaatgtactttgcccatagtttattcttccatagttggaatgagtcttaaattcaatgtgaatgtttaatgtttgcttatttattgtgcctaaagttgttatttatagtgcatatgacagtcaatgrcatcttagaataagaaagtatgttaacttttgatttcattaaacaaaaaatagtaaacaat

SEQ ID NO: 445739 - DNA, 586 bp, Homo sapiens
ggaatattaaccttggctttaaaatcgtgataagagcagagcctcacttgagaggtacactaagaagaaccaaccatgtggaagaaaggtgcatagaagctcatgtgagtaagkagaactctaccagttgtaggaggctcatcattccctcaaaccccagtccagaatagccgcaaaataggtatcatgcgccatactatattttcaccacaaatctgtaaataacgttttttgttatgggatcccacatgaaatagaaacctaaatgtttcttgatattaatggaactctaccctactgcaaacataatttgttaattctcatctctgtgccttcttcaaagatgttctgtctaaaacggacttctttcttgtatctgccagtgcatatcatgtttttcataatctagctcaagattctgatctactgaggctgccttgatgaatcttcccccaaatgatcacttcattgctttgaataaataatgtaagaggtatagctgtaatacattatccacaacttgattttcaatgtccttcagagtttagagttttcttatatttctatctgttttcccaaatagagt

SEQ ID NO: 445740 - DNA, 579 bp, Homo sapiens
ggaccttgcaagtgattcccccacccaacaacaaaaaaagtgatattttaaaagtctaattttatcctattactctaagtgcttttaaaggggttattagattggcactcttaaaatagccaatcactggaaaatgctcccctcaaacaaaggtcaaaattaatttaacaatactgttgtgcctcacagacaaatacttctttcagaatccacacagctccttctcttctggacaactcttctatcttcacttacagaaaacagtattcaaaaatgaaaccaaaagaacgcatggaaaacatcctagctcttaaacacaacacagacacaccccaacaaatgtrccctcttccccatcttcccagttcagaacacctggagaactgtggtgctgccgccaaaggtctgcatcccctccaatccaaatcctaccacaggaagaaacccagagccgtctccactccctctgccagggcaatattcctaatctgaataccacaatgtatatacttattctttatacatggtagttaggtatagctgaattaaggctctaggaaaaatatttaatatatgtca

SEQ ID NO: 445741 - DNA, 593 bp, Homo sapiens
actctgtaataaagatgacatgggaataactgtctttcaaataaaataggtaagtagaaagattttatcgctgtcatcctaagaagatcttaggatggcagcaaaagaaagctgtaaaacccagaatagatagccataaacattttatgtgractttctatgaaaaaaatggagacaaaaatacagtttgtcaaatcaattcgtttaaagtgacacaaaagataactagcaagcattctgcatgaaatcaaaggctttctacactgcctgcctggtagtataaaccactttggggatggacaataatatctcactttaaccaatgctaaccttgcattactgagggatcactggttaggaaggatacacagaaaagaggatagccaacctctgagtgaaacacttagggaatgtaggaggaggcatttaagggggcttatgaggcttttagaccagcacgacaccaggcactgaggacaatggccatggagctggcactgtcctttgcttcttatctgaacttcagggttgcaaaggacagtaagaaaagaatagggaggtgccatttacacaggctaaacactaaaagttgc

SEQ ID NO: 445742 - DNA, 569 bp, Homo sapiens
atgctagggtcagttcagcaattatcacctgctctatgttttagggatttaaacataaataggccgggcatggtggctcacgcctgtaatccctgcactttgggaggcaaaggcgggtggatcacttgaggtcaggagtttgagaccagcctgagcaacatgatgaaagtctgtctctacaaaaaaatacaaaaattagctgggctaatggcatgtgcccataatcccacctacttgggaggctgaggtgggaggatcacttgagcttgtggggcagagtttgcagtgagctgagatcatgccactgcactctagactggaagacaaagtgagaccctgtctcaaaaataaataaataaataaataaataaataaataaataaataaataaaaataaaaaataatacttggtcctgctcttgaggagtttatagtttttaagttccagacggcctgtgtgtggctctgactagagtacagcgttccaaagggtggcctgaaaagctgaagctacaaaactttttagcttaaatcttytttctacaacagaaaaaggccctaaatctctt

SEQ ID NO: 445743 - DNA, 621 bp, Homo sapiens
tgagttactctggaataattctaagtacgtgcaagtggtcctgctcctccgtttgtttgcttgttttgtttttccacgatgaggtgctgcttcactcatttatctgccaggcacaaattgggacattttcatagcagaaggtgttggtttccctcstttttaaaatggctgtgactcgttccattacatagatgtcccataaatgtaggcttctgtgcccccactccaacagcacctccagcaatggccatttctatcatctccaggttttcaacgtcataaaactacactgcaagaacacgtttgtctttgggaggccgaggtgggtggatcacctgaggtcaggagttcgagaccagcctggctaacgtggtaaaaccccgtctctaccaaaaatagaaaaaaattacccaggcgtggtggtgggcgcctgtaatcccagctactcaggaggctgaggcaagagaattgcttgaacctgggaggcagaggttgcagtgagccgaggtcgtgccaccgcactccagcttgggcaacaagagcgaaactccgtctcaaaataaaaataaaataaaataaagaacacgtttgtatatacatgcactttgtatgtaagtttat

SEQ ID NO: 445744 - DNA, 621 bp, Homo sapiens
tgagttactctggaataattctaagtacgtgcaagtggtcctgctcctccgtttgtttgcttgttttgtttttccacgatgaggtgctgcttcactcatttatctgccaggcacaaattgggacattttcatagcagaaggtgttggtttccctcctttttaaaatggctgtgactcgttccattacatagatgtcccataaatgtaggcttctgtgcccccactccaacagcacctccagcaatggccatttctatcatctccaggttttcaacgtcataaaactacactgcaagaacacgtttgtctttgggaggccgaggtgggtggatcacctgaggtcaggagttcgagaccagcctggctaacgtggtraaaccccgtctctaccaaaaatagaaaaaaattacccaggcgtggtggtgggcgcctgtaatcccagctactcaggaggctgaggcaagagaattgcttgaacctgggaggcagaggttgcagtgagccgaggtcgtgccaccgcactccagcttgggcaacaagagcgaaactccgtctcaaaataaaaataaaataaaataaagaacacgtttgtatatacatgcactttgtatgtaagtttat

SEQ ID NO: 445745 - DNA, 621 bp, Homo sapiens
tgagttactctggaataattctaagtacgtgcaagtggtcctgctcctccgtttgtttgcttgttttgtttttccacgatgaggtgctgcttcactcatttatctgccaggcacaaattgggacattttcatagcagaaggtgttggtttccctcctttttaaaatggctgtgactcgttccattacatagatgtcccataaatgtaggcttctgtgcccccactccaacagcacctccagcaatggccatttctatcatctccaggttttcaacgtcataaaactacactgcaagaacacgtttgtctttgggaggccgaggtgggtggatcacctgaggtcaggagttcgagaccagcctggctaacgtggtaaaaccccgtctctaccaaaaatagaaaaaaattacccaggcgtggtggtgggcgcctgtaatcccagctactcaggaggctgaggcaagagaattgcttgaacctgggaggcagaggttgcagtgagccgaggtcgtgccaccgcactccagcttgggcaacaagagcgaaactccgtctcaaaataaaaawaaaataaaataaagaacacgtttgtatatacatgcactttgtatgtaagtttat

SEQ ID NO: 445746 - DNA, 563 bp, Homo sapiens
caccgggctaatgacgctaagggggaggggatgctgccttacctggggaccagcagagatggtggagagtggtgaccccagtgggcaccgtctcttcccattcagcccaaccacccagggcttcagaagcaggcctgagcctggaggcaasggggagtccaggcccaaggacagcagcggaggtccctggtgtccctgctatctgtgcatggggctgctgacaggaaggacacaaacactcacctggcttggcctggaagggccctgaactcggcccaggatgcacaagtgtgggtggattccactccaaggatacctgggctgggagccgcctgatggttttagttcccggtcatggctgggtgacaggcaaaggggtcggatgggaatcacggaaagaggctgctttccctcattccgcatcacaacctgctgtgcttacagtgaacgtctccatagagaaaagcagtttcttagtgactgacaacaacaaagttcaggtatttcccagcaaatggcacctaaaaccactgcaagcactgtatcctttcatattttaggga

SEQ ID NO: 445747 - DNA, 606 bp, Homo sapiens
gatgggaacacagtcccaaagggaaggaatttccttgggcacacagaaactgggaggcaagtaggatctgagagttccaacatgggctctaccacaaatcttattctctttctgagttttggcagccctctttacgagctggaaattcttatcttcagcacggtcacctcgcaggtctgttgtgtggctaaactgggataatcgatatgaaaacaatacattgttaagcagaaaaggtcacatgattgcatcggattatwatatacaatgaaactgaagaacctagtaagctgaacagactcaggtccttctatgttttacagggaaactaggctttggcaggcttcctctggggtgttttatttttgaggtctagtcatccaacactccagaactaaatagctcttgaaattgtgattactttggcccagacttggctgtgatcaagcctgggactgctatcttagccaaagagggggcacagctttaaggggatgatgtcagagggcagagatgaggtcttaccaagggtcatccaggtcttaaatttctccgtgcctccctccctgcacctggaaaatgacgagagtagtactagtaattata

SEQ ID NO: 445748 - DNA, 421 bp, Homo sapiens
caaggggcttttattggctctataagtcaagtttgatttcttaaaagaaagcacactattccagtcaaagcttggtaaaataatctgtttctccaattgtatcctgttacaaatgaaaacagattcttattgcacttatgcaaataactatattaccataagaatactcacaaatagtttacaaattctggagaaatcaggtagagagaamcaaatatcacaaaaatcttatcacagatattgatgccatactctacaggtagctcccattccttctatctcaaatcaaaataattcaattgtccagtcccttccattgctgagcctcagctgtttttttctatctgtttagagggttagattttccgacttttaagggggctttcagttctaacagtttatatgtctatgaaacaaggca

SEQ ID NO: 445749 - DNA, 547 bp, Homo sapiens
tcaagtgtagtagttacaattataatcacttaaatttctagaacacctttacattgaaggggaaaatgtcctttgaaggatcctctctgttagctatacaccatccycctgaagtaaggtaaaatgacattagttattaccaagctctagatgggaaaacagagactccaagaggtgagagtaagcctctccctttggagaagatcctcctatttcagtgcctcagatcatctcattacttctccaagtcttctttgtgaccaccctcaataatacccaatgcagtttaagaacatttatccttgtttaaaatttactataaaagttgtttttgttccattaagtactgagtcctccttttttttgtcatctcccggaattccgcacctcccttcacctcttgtttctcccattggggccctatctgtcagcatctgctaatagtggacacacccagaatgttctcctcctcaccacatttccatgaaaaccagacaaaggactaaaaaggtgacacgaggactatggttgctttagtctcactgtc

SEQ ID NO: 445750 - DNA, 593 bp, Homo sapiens
acagaaacaaatgaatgtggttgtgttccaataaaattttatttatgaaattttagtgaaccatgatcacaccactgcattccatctttgttaacagagtgaggcccaatctcaaaaaagaccccaaaaaaacaaaactaaatttttgtatcctttggtcaagatctccctagtctcaccacccttttccccacctccagtccctagtaactaccattctattctctgcttctatgagtttgactttttaagatttcacatgtaagtgaaatcatgcaatatttgtcttttctgaaggcttatttcacttaacataatgtcctctgagttcattcatgctattggaaatggcaggattgtactgctaaagctggatagtattccattgcatatatattccacaatttatccattgatctgttgayggacacaggttgattccatatcttggctattgatatggaatgctgcaatgaacatggaagtgcagatactatttgacatacagatttgatttcctttggatatataccaggagtggaattgctagattatttgaaattgtttgaggaacatctatactgttttccata

SEQ ID NO: 445751 - DNA, 570 bp, Homo sapiens
ttttgcagctgggaggtggatagcctggagcaagttctcagccctgctcacccactgcctagaaacaaacttggtgctgttggggggaggggacacagtgggartgagatggccctttgcgttgcatgggaggtgggtgaagcctgtaactgccgacttttccccacttccctgacaacctgcatggcagcaaaggaagccataatccttctagaaacataaatccattgacctagaaacctcaactgcattgcccacagcagccacaataagagctgcccaagtagagtctgagctcagacacacctagccttctccccacctaatggtccttctttacccaccctggtaactgaagacaatgggcatatactcttgggagttctagggccacgggcaccacctattcctccccatactaccatagctgatgctgtcttgaaagtgccatctcgcagcaggagcagaactaaatgaacttgaagcaaaagaaaaaatacaaaatataaatgaaataaaaagctggttctttgaaaagatgaatgaaattgatagaccattagcaagatt

SEQ ID NO: 445752 - DNA, 585 bp, Homo sapiens
aaaaacacctaaaccttggtttattccagtaggtacctgtagtggtgccatacaccagcagcggtgggaccagatggactctgaagccctcccctgcaatatccctgggactctatgggttctgcctccaaatctcatccagttccacttcagcatcttgacccaaggatcaatgagccaggccaagtgaaatctaccagccctcacagaacacagaccccacttcctccatcaaccttaggggctacacatcccagcctgcctccatgtacctgtatctgtttgatttcatactggagaattgtttcagtgtcagcagggtctacactggcaggaactaccttctcactggagattttggcctgaatcactgcataggaagagaaaagagggaacgtttagcagctggtgagggcaacacacctgaggtctggatgatccagggtccctgaagaagtctatagggcaattcttggttttggtgtggtcgggtcrtgagcaatgtgatgtgtgagaagggggacctggaaacgcctcctctgcagtcactggaagttccaaacccctcaggcttattaggtccta

SEQ ID NO: 445753 - DNA, 567 bp, Homo sapiens
gaattgtttcagtgtcagcagggtctacactggcaggaactaccttctcactggagattttggcctgaatcactgcataggaagagaaaagagggaacgtttagcagctggtgagggcaacacacctgaggtctggatgatccagggtccctgaagaagtctatagggcaattcttggttttggtgtggtcgggtcgtgagcaatgtgatgtgtgagaarggggacctggaaacgcctcctctgcagtcactggaagttccaaacccctcaggcttattaggtcctataaccgctaaactctttctgccttttgaaccagttagtctggagagctctagttcgccatagccatttgtgcagtggggcacacggtaggagtcagagtagagaagggatgaggagccccttcagggcagttggtgtgaagtttatctattgctgtggtcaaggcctctcagcctgcctacagttgacattagtaaatgtttattgaattcataaatgttctgaccctgcactgaggtattgcatctcttgcgatttgagcattaataaccaaaactgtt

SEQ ID NO: 445754 - DNA, 567 bp, Homo sapiens
gaattgtttcagtgtcagcagggtctacactggcaggaactaccttctcactggagattttggcctgaatcactgcataggaagagaaaagagggaacgtttagcagctggtgagggcaacacacctgaggtctggatgatccagggtccctgaagaagtctatagggcaattcttggttttggtgtggtcgggtcgtgagcaatgtgatgtgtgagaagkgggacctggaaacgcctcctctgcagtcactggaagttccaaacccctcaggcttattaggtcctataaccgctaaactctttctgccttttgaaccagttagtctggagagctctagttcgccatagccatttgtgcagtggggcacacggtaggagtcagagtagagaagggatgaggagccccttcagggcagttggtgtgaagtttatctattgctgtggtcaaggcctctcagcctgcctacagttgacattagtaaatgtttattgaattcataaatgttctgaccctgcactgaggtattgcatctcttgcgatttgagcattaataaccaaaactgtt

SEQ ID NO: 445755 - DNA, 550 bp, Homo sapiens
aggagatgaaagaaagagccagtaagtgtacttyaaaaaatagtggctgaaaacttccttaatctgggagaaaatgtcaacatccaagtacatgaagtacagaagtctccaatcaaattcaatccaaaaaggagttcacaaaagcacataataattgaaccatcaaaaattaaagaaaataaaaaattctgagagtagcaagagataagaaacatatcacaaaaaagggggtcccaatactgctatcagtggattactgagcagaaattcttttgttcaggggatattgggatgatatatttaaagtgctgaagcaaaaaaactgtcaatgaattccttttgtttgtagtatagctattttttctgaaatgaagaaattaaaaaacttcctagccaaacaaaagctaagggagttctttaccaataggctgtcctcacaagaattgctaatgggagttctttaagatggcaaaaaggccactatttaataacataaaagttacacaaatataaaattcaatcatataagtaatactgaacaagattcaga

SEQ ID NO: 445756 - DNA, 550 bp, Homo sapiens
aggagatgaaagaaagagccagtaagtgtactttaaaaaatagtggctgaaaacttccttaatctgggagaaaatgtcaacatccaagtacatgaagtacagaagtctccaatcaaattcaatccaaaaaggagttcacaaaagcacataataattgaaccatcaaaaattaaagaaaataaaaaattctgagagtagcaagagataagaaacatatcacaaaaaagggggtcccaatactgctatcagtggattactgagcagaaattcttttgttcaggggatattgggatgatatatttaaagtgctgaagcaaaaaaactgtcaatgaattccttttgtttgtagtawagctattttttctgaaatgaagaaattaaaaaacttcctagccaaacaaaagctaagggagttctttaccaataggctgtcctcacaagaattgctaatgggagttctttaagatggcaaaaaggccactatttaataacataaaagttacacaaatataaaattcaatcatataagtaatactgaacaagattcaga

SEQ ID NO: 445757 - DNA, 540 bp, Homo sapiens
cagccatatgttccaagaaagtcatataccagttaaactccaccattctgcctcttaatacacatgcttgagcccactttctcaactgctgagatcttatcaggaagctgctatttactagtttcaactgtttctgtttattgagagactaccattccctggcactggctgtgatcaattattgttttggagagacagttaacaactgcctaactatcacctaatggtcacctgacattcctggtgtgtgtgcaggggtgacccctctcttgtcctgcttatgtctgactagctacctactgtaacattatttcagtaatacatttttatgttgtatttttttcttgtaatgttattattattattatttttaattatactttaagttctgggatacgtgtgtagaacgtaggggtttgttacataggtatatatgtgccatagtgttttgctgcacccatcaacctgtcatctacattagatatttctcttaatrctatccctccccttctccccaaccccagacaggacacagtgtgt

SEQ ID NO: 445758 - DNA, 486 bp, Homo sapiens
ccccttgcacttcctgggtgagagaacactccgctctgcttctgctcgccctctgtggtctacacccactgtctaactagtcccagtgagatgaaccaggtacctcagctggaaatgcagaaatcactcatcttctgcgttggtctcactgggagctgcagactggaactctttctattcagccatcttkctcggaacccctatttttgtaataatttttaaatcacttaatattatgcttggattaaataggcaacacagaataattaatttatacgtttgttttataaaaagcgtgtactcaatgtgtcacttttaacattgatttcttatttcttttccatcttttttaaaatatagtttgccagaataaaatttaaggtgagcacacatcattgtttgggtttaaaaagaaaatttttaaatgtttagtgaaaatagaccttcatattaatgatttaagaacattagaaaaatcactaagtt

SEQ ID NO: 445759 - DNA, 550 bp, Homo sapiens
gcattagttaccacaaaccacagactttcttaatacttgaaaatattatctcataagaatcttatgaaaaatactattattacatgcattttacagctaagaagagtaaaatataaagatgctaagtttcttgcccaaggtccttaggtggaactacaatttaatagaatctgactctcaggtctacaattttgaccgctaaaagtatcttagatggttattcatgtataaccaattggcaatgtcttttcttttacctaattaacatatccaatacatcggttttttttcttttttctctgtcacaatcctattttagaaacttacatagcaagtttgtctccaaattttttcacttattttctgacttttatttaaatctatgctgtcctccatgtagtgtaaatacaattgtacctttaagtctcattttactcacaacttcctaagtcttcttgattacagracatcatttgcatctctaagtgggatatagagccccctaaattctggctagactacacccactaccccacttctaccattccct

SEQ ID NO: 445760 - DNA, 459 bp, Homo sapiens
aagctactaaaaacaaaacagtaaattgaagagcgacccataaatcagtgtgacatctcaaattgaccatgcactctccactctattctgttgcctctttccttaccacagatgcatgagtatatagtgagctgtctacatgcagcaagaggatcttgagaacttgttgaatgagaagtatacccaatgtgtaaagatatgtactgggcagtgatctgctgtasagtggggtgagaacaccttaccaggtgaaactgaaggggcagcaaatgcaaccttgaactatctgaaaattgttaaggattcacagctaaaaagtggaatggaggttagaattcgatatctcgatgggattaatcttgtctaattcaaattaatcataatatattccctctagtatatattattgattatctttagagacaatacatttcctgggagagaagtttaaagaaaatc

SEQ ID NO: 445761 - DNA, 490 bp, Homo sapiens
tatcattagcatttgaatgtgcaaatgaattctctggagaacattaagaatgttatgtaaaatattctcaaataaataaatgcacatacatacaatctttagaataaggttaagaaaccttacactaaagcataaggtttatattgtggtatacaaagtatactaaggtataaccttaatgtaaggttaagaaacacatactacatgtatacatatatgtttgtgtatgtgtgtgtatgtatatatatgtgtgtgatcttttatatacaaatagatatatatgtaatgcttatgcttggatcatatgagttgatacagatagacatataaacttaacttttatatacaattatatatgaaacgggaaaagttctcttgtccccctcgcagggcgtgtgatgggggtaggactcgcttcttcagtggcccgctgctcggasttctaggggagcatgcagacaggcaggccgtgggactccgaccccacagc

SEQ ID NO: 445762 - DNA, 522 bp, Homo sapiens
atcttgactattgtggataatgctgcaacgggcatggatgtctcttcagaatactgattacatttccttctgaaatatacccaaagatgtgattgctagtcatatagtagttcaaattttagttattgaggaaatttcatactgtttttcacaatggctttaccaatttacattaccaccaacagtatataaaggctcctttttctccacatcttcactaacacttatctctcctacttttgatagccattctaacaagtgtgaagtgatatctcattatcattttgatttgcctttcctgataatatatttattacctcacatggttattttacgttgagaacatttaagatatactcttaccatttttccagtatataatacgttattattaactacagtcaccatactatagagtagagctccagaacttatttattctgtctaactaaaactttrtaccttctgaccaacatctccccatttcccctctaatgatattaagcaccttttatatgactt

SEQ ID NO: 445763 - DNA, 590 bp, Homo sapiens
agtatttggttttcttggcctgtgttagtttgctgagaatgatggcttccagyttcacccatgtccctgaaaaggacattatctcattcctttttatggctgaatagtattccatggtgtgtatgtgccacattttctttatccagtctatcactgatgggcatttggtttcgttctatgtctttgctattgtaaatagtgctgcagtaaacacacgtgtgcatgcgtctttatagtagaatgatttatattcctttgggcatatacccagtaatgggattaagacttctattcttactttaagcaaagtagactattgcccaaaaatacaaggccctagaagaaaaaagagtcttgatatagtatcaaaagttgcacagttactaaatataccatgagctaacagaatataatatcatgtttatcatttaataaaaaacagtcaattttgtaagtgacttctgttctttccacaaaatgctgtattttgaaacacaacacacttaaagaattgtcatagttatttgtgttggcactgtatttattttattttagattttatctttttgaattttatttatttttgagca

SEQ ID NO: 445764 - DNA, 527 bp, Homo sapiens
tgacaaaatattttcaaaatctatctgaggaaaactataaaattctgatgaaataaatcaaagttgatctaaataaatcaaatttgatctaaataaatggagagatattgcatgatcatggatagcaagtctccatattatcaagatgtaaattcttcccacttgttctatagaatcaatgcaatcccaataaaaattacagcaagcaaccttgcaggtatcaacaaactgattctacattttatgtggaaagccaaaagacccacattagccaacacaatacagaagaagaacaaagwcgtaagactaacactactggttttcaagactcagtgtaaagctacaacaataaagacagcgtggtactggaaaaaagaacagataaatacatcaatagaacagaaaagagagccttgtaatagacacatgtaaatatagtcaactaatttttgataaaagagcaaaggcaattcaaaaaagaaagaatagttttttcaacaaatgacgctggaacaactgaacatgta

SEQ ID NO: 445765 - DNA, 579 bp, Homo sapiens
gtcaatttaagcatccccagaaatgaggccagtgtgaaaccagcatgaaagagggttatagaaaaatgggaattttgtaggtcctgttagcttttacttaaatgtgatgaagagttttgaaaatgaaagggatatgacctaactatatttaaggttagaaggaaggaaaccagtaatactggcttacgtaggatgggaacaataaagatagagtgaagtaaacagatttgggtgaaggcagagccaacaggtgctgttgaaatccagtgtaaggggagaggaaaccagtgcaaggaatcttagagacattaagttctagcataagccaatgtgacatataatactgagtatcacatgctgagatccagaagactcagaaagaacagattcaatagggacctcttggattcrttttctatgagttgcctagaactagattgccagtaagaagtcaaaaggggaggaatagcagataaaagcgactgccagatactgggtaagtggtagctgagagttgtgtagggtcatataaaacaaggtaagaaagaatctcaaaaaaggtagtaatcagataggtca

SEQ ID NO: 445766 - DNA, 579 bp, Homo sapiens
gtcaatttaagcatccccagaaatgaggccagtgtgaaaccagcatgaaagagggttatagaaaaatgggaattttgtaggtcctgttagcttttacttaaatgtgatgaagagttttgaaaatgaaagggatatgacctaactatatttaaggttagaaggaaggaaaccagtaatactggcttacgtaggatgggaacaataaagatagagtgaagtaaacagatttgggtgaaggcagagccaacaggtgctgttgaaatccagtgtaaggggagaggaaaccagtgcaaggaatcttagagacattaagttctagcataagccaatgtgacatataatactgagtatcacatgctgagatccagaagactcagaaagaacagattcaatagggacctcttggattcgttttctatgagttgcctagaactagattgccagtaagaagtcaaaasgggaggaatagcagataaaagcgactgccagatactgggtaagtggtagctgagagttgtgtagggtcatataaaacaaggtaagaaagaatctcaaaaaaggtagtaatcagataggtca

SEQ ID NO: 445767 - DNA, 658 bp, Homo sapiens
ctttgcaggttacagcctccctcccaactactttaacagtgtggtgttgagtgtctgcagctattccaggtgcaaagtccaagctgtcagtggagctaccattccagggtctggaggacagtgaccctcttctcacagtttcactaggtggtgctgcagtagggactctgtgtggggctctgaccccacatttctcttccacattgtcctagcagaggttctccatgagtgccccactcctgcagcaaacctctgcctgggcatccagacatttccatacaacttctgaaatataggcagaggttcccaaacctcagttattgattctgtgcacctgcaggctcaaarcaatatggaagctgccaaggcttgaggcgtgcaccctctgaagcaagagcctgatctgtaccttggcccgttttagtcatgactgaagtggctgggatgcagggcaccaaatacctagactgcacacagcagaggaaccctgggcccagcccacaaaatcatttttcctcctaaacctctgggcctgtgatgggaggggttgccatgaagacctctaacatgccctggagacagtttccccattgtcttggtgagtaacattcaactcctcatttcttacgcaaatttctgcagcaggcttgaatttttc

SEQ ID NO: 445768 - DNA, 572 bp, Homo sapiens
ggacaaattgaatcttcagcagttacagtatctatatagtttcagcaatcaaaaattactacagagtaaattttaataaaaatataattttcttaaaatggtattcmagtaagaaactatgtaatttagaaataaaaaaattagaagtgttgaaagattattaaagaaagccttaaatacaaagaagtttctaatttgtattaatacaagtagactgtaaatacagaagagaaaaaataagttagaaactagcatagatatgtgattttaaaattgagatatttcttaaatccataatcctagcctaatcatgagaaaagcatcatgcaaatcatcactgagggtcattctacaaaacacctcatcagcactcctcaaaagggtcaagctcatcaaaagcaaggaattctgagaaactggcctaaggattgtttggttaatgtagtgtggtatcatggatgttattctggaacacaaaaagagattggttaaaaactaacaaaactgaataagttatggaatttcattaataataatataccaatattggttcattaaatatagcaaatgta

SEQ ID NO: 445769 - DNA, 572 bp, Homo sapiens
ggacaaattgaatcttcagcagttacagtatctatatagtttcagcaatcaaaaattactacagagtaaattttaataaaaatataattttcttaaaatggtattcaagtaagaaactatgtaatttagaaataaaaaaattagaagtgttgaaagattattaaagaaagccttaaatacaaagaagtttctaatttgtattaatacaagtagactgtaaatacagaagagaaaaaataagttagaaactagcatagatatgtgattttaaaattgagatatttcttaaatccataatcctagcctaatcatgagaaaagcatcatgcaaatcatcactgagggtcattctacaaaacacctcatcagcactcctcaaaagggtcaagctcatcaaaagcaaggaattctgagaaactggcctaaggattgtttggttaatgtagtgtggtatcatggatgttattctggaacacaaaaagagattggttaaaaactaacaaaactgaataagttatggaatttcattaataataayataccaatattggttcattaaatatagcaaatgta

SEQ ID NO: 445770 - DNA, 572 bp, Homo sapiens
ggcccatgagctgacctggtgagggagtcacccctttcccatcacatcacacaacataactgcaaacacaaggatatacaaatgaactgcatggctgagtaagagcctatgtactgctcactgctctgaaatactatctactggattgcagcccaaaccgcaacaccaataatcatgttgctaattttccctgctgtgaaaccaagggcaagaatccaacaacaaacaaaaaccctgtacagagtattagccctctgaaaacttccagaaacaaagccaaatcactatcaattttcaccacagttaaagaaataccagccctcccagrtgaaagagaatccatgcaagaaccctgttaattcaaaaagccagagtgttcccttacctccaaatgagccctctagctccccagcaatggtgcttactagtctgagcttcctgggatgacagacacagaattcagaatctggatggcaagaaagttcattgagatagagagcaagttgaaactcaatccaaggaagccaaacaatcaggttaaatgattcaagagctgacagatgaaatagcca

SEQ ID NO: 445771 - DNA, 564 bp, Homo sapiens
ttttaaataactattatctaaaacccaaaagcaaatattaaaatctctgagaataataaaaaatactgggattattataatcccaaagaaacatatcaaagtaccaggaataagtatatgcacagaataacataataacataatattccctttyagattttccaaaatatttataagaggaaaatatctattttgaatatgtgctgccttaaaaatggggacatctgtttgaagatggtgagatgagcatacatggtttatttcccctccaataagccattgaaatgaaagtacagaattagaaaggcaaatttatttgcaaaaatactgttgatggagaacaggagtctctatgaactaactattttaatgaaactctcagtaaaggcagctggaatcatactgatattccaggcagataccaccgatatgaaagagtcatagctaagaaacacacagacacatttttcatagtgagtcgtggcttattgcagagcccttgttgcttagttactgagaatttcagagaaagtagggtcagaaaataaagtaattgaaaaaaac

SEQ ID NO: 445772 - DNA, 479 bp, Homo sapiens
tctgaatgcagcttggattcggaaaagtgacaactttctcagttattaaccacgagaacaaaaggtaaaaraatccccagtggctgttaatgattaaaatgaatactttacgtcagaacaaacagacattttatgactaaattttacatttttattgatgtcaaatataaaacatttgaattccaagcaactttactgctttgggagatgaccctagatccaaatttatgatgttttccagaaaaccactgatctatctgcttctggtcaaatgattgaaataccacagtgaaggatcattattaaagtagtccatagtagtgtacagcagcccctcagtgtacttgtgtaatcatttgcccatatactgtcttccctaggtatctgtgggggatttgttccaaggcctcatgcggatatgaaaatttgcaggtactcagatctgtaatataaaattgtttagtatttgcatataacct

SEQ ID NO: 445773 - DNA, 579 bp, Homo sapiens
atcaacattagtcctgtcttacaagaaatgaattcttgtgaattctaaaatgaattcttcaagtcaaaagaataggacactaattagtgacacaaaaatatatgaaggtacagtcatccctcagtatccatgtgggatttgttctacaacctgccttagacaccaaaatctgcagatgctctgctctttgatataaaatggtgtattatttgcatgtaacttatgcacatattcccacatattttaaccctttctccattaaaaaagggcagattgctgccagtactcatttaattttacagaaacacactctttgaggctgaaccaaatctgactgattttcaatgtgaaaataaaatataaatctgtttttggagttatatctaaagaggactaacatcagaatcatctgaatcatcaaaatcttctatttcaaaaaaatagaatttatcaagtgaattttcrgccagtgactgttcgagaataatattaacatcatatgtaagaatgctacattttctagaggacttgacattttcagcaattaagaattaccatattttgtaaatggaaacacca

SEQ ID NO: 445774 - DNA, 444 bp, Homo sapiens
gactctccccacttagtagtccccagtgtctaccatttacattttgtgtccttgtgtattcaatgtttagcttccactggtaagtgagaacatgtaatatttggttttctattcctgcattaatkcatttaatataatggcctccagctgcatccatgttattctagggtaaaatatcttaaacatgcacctggattaagcattgaaaattgtattactgtaacccatgtcaaatcttataaaattaaatttctgaaaaataggaacaagtcttctgcatttttacaaattcttcaaataattcaaatacatacatacaagaaaagataataattattgtactgtagtggaggacattaaaattaaaagaagtattgatatttgttgaattgtagctgttgctcctacttgaaatactttctcaatattagatcgtatttttca

SEQ ID NO: 445775 - DNA, 612 bp, Homo sapiens
gtaataacacatccaaaggtcacactagctttctagaaagggattttaaccaaaatgaaaactttgaaatgataaaagatttaagatacatattgtaaggaagttcaatgagatccaagagaaagttgaaagccaacaaaaagaaaccagaaaaacaatttargagatgaaagaagagatagatatattttttagaaaaacaaacacaacctctggaaataaaaaaaaaatcactgaagaaatttcaataatgctgttgaaagctttaacaataaactagaccaggcagaagaaagactttcagagcctgaagaccagtcttttgaattaatcaagtcaaatagaaacaaagaaaaaaataacttaaaaaaacgagcagagctttcaaatatatgggattatggaaaacaaccaaacgtacaacttgtaggcattcctaaggggaaaaaagaaaaagtaagaagtgtggaacatatatttgaggaaataattttttttaatttctcaactttgctagagacatagatgcccatatacgagaaatttggagaacacctggaagacactatgtaaggtaaacatcaccaaggaacatagtcattagactattta

SEQ ID NO: 445776 - DNA, 507 bp, Homo sapiens
tggcccatgccacaggcctgatcatgctatccaacttatccagaaaaatctgcttggacatcagatactacctaagactcagctttgacactaattgaattgaagggaacaagtcacccctgggaaagctggttaactggaacaacctgaaaccccagaaccggatatacgacaaaattattgaacatttttggcatatttgcatatgacaaaactggctggctgttctcataatatgtttcccttttcttttgggaatacacctcttgctagactcttattttctagccttctccttagttgggtatggtcttgttgctacacggctaaattctgatttttgattgattgttatcctttctttttttcagaggatccagatggccacagatttttgacactcctcctattgagagrttagagagtttagaactaatttccttttttttttcttttttttgtctgggcgctaagctgagtgacatgcttgaccaataatatgtggta

SEQ ID NO: 445777 - DNA, 510 bp, Homo sapiens
tttagttgtaaaaaaccaatgaaaattcaaatataatatgtttctgcagtcagcattttaccttaatcaacatattccttagaattgaatctttaatttttgggcagattattctggcagaaaaatcatatctaaaaagtctcttttggctttaagtagttccaaytttcataattttcttcactatagttaatataaaaacatctctcaagtcttggtttaatttgtccaaagccaaaaatttgaacaaaaagacaaaccaccgtttacaagtgatggcctttcaattatttaaaataaataaataaacctccctggggcatttacttcctggtgcaatgcccctaaatctgcaggtttctttatcctttgcaattttaaatgtaaattatctgaatgtatttcaatgtgactttatgatgtccagaaatatttaaaagaagaaaaagcaatgaatacttactccatggttttatacatatacagtagaggaattactgcttcccctac

SEQ ID NO: 445778 - DNA, 510 bp, Homo sapiens
tttagttgtaaaaaaccaatgaaaattcaaatataatatgtttctgcagtcagcattttaccttaatcaacatattccttagaattgaatctttaatttttgggcagattattctggcagaaaaatcatatctaaaaagtctcttttggctttaagtagttccaactttcataattttcttcactatagttaatatawaaacatctctcaagtcttggtttaatttgtccaaagccaaaaatttgaacaaaaagacaaaccaccgtttacaagtgatggcctttcaattatttaaaataaataaataaacctccctggggcatttacttcctggtgcaatgcccctaaatctgcaggtttctttatcctttgcaattttaaatgtaaattatctgaatgtatttcaatgtgactttatgatgtccagaaatatttaaaagaagaaaaagcaatgaatacttactccatggttttatacatatacagtagaggaattactgcttcccctac

SEQ ID NO: 445779 - DNA, 510 bp, Homo sapiens
tttagttgtaaaaaaccaatgaaaattcaaatataatatgtttctgcagtcagcattttaccttaatcaacatattccttagaattgaatctttaatttttgggcagattattctggcagaaaaatcatatctaaaaagtctcttttggctttaagtagttccaactttcataattttcttcactatagttaatataaaaacrtctctcaagtcttggtttaatttgtccaaagccaaaaatttgaacaaaaagacaaaccaccgtttacaagtgatggcctttcaattatttaaaataaataaataaacctccctggggcatttacttcctggtgcaatgcccctaaatctgcaggtttctttatcctttgcaattttaaatgtaaattatctgaatgtatttcaatgtgactttatgatgtccagaaatatttaaaagaagaaaaagcaatgaatacttactccatggttttatacatatacagtagaggaattactgcttcccctac

SEQ ID NO: 445780 - DNA, 510 bp, Homo sapiens
tttagttgtaaaaaaccaatgaaaattcaaatataatatgtttctgcagtcagcattttaccttaatcaacatattccttagaattgaatctttaatttttgggcagattattctggcagaaaaatcatatctaaaaagtctcttttggctttaagtagttccaactttcataattttcttcactatagttaatataaaaacatctctcaagtcttkgtttaatttgtccaaagccaaaaatttgaacaaaaagacaaaccaccgtttacaagtgatggcctttcaattatttaaaataaataaataaacctccctggggcatttacttcctggtgcaatgcccctaaatctgcaggtttctttatcctttgcaattttaaatgtaaattatctgaatgtatttcaatgtgactttatgatgtccagaaatatttaaaagaagaaaaagcaatgaatacttactccatggttttatacatatacagtagaggaattactgcttcccctac

SEQ ID NO: 445781 - DNA, 540 bp, Homo sapiens
attagccaatgtgctgttatttcctaaagcactacttctacttgtgataaaattggcagccggggagataaagagagtgtttgaaagtgttatatccaagggtcctagatgaattgcgaaaatacagtgcgtattacatgaaaatttttgttctttaatgtttccttatttcttcagaaaaataccattttaaaaatattatttattttctctataactctgtttaattaaagcatttcacaattatgatattcagaggaaaatcaacattcattcatttattttccttcctcctttcaacaactagctcctggtgtttgcaaattataaaayggtttcttatctgttttccattttacgttgtatgataattatgcaactggtaacactgccttctccctagtcatggacagtgtgcatctcggttttatgattgctttttgttgcagcttggggaaagataaaaaggcctgtcaaatctcaagagattgccggctaatgaatcacaaatagctctgcagcaggctggaagcatgctgt

SEQ ID NO: 445782 - DNA, 444 bp, Homo sapiens
attcatgcctcagtggtcgcaggcataaaagagccttctggggtcataggtagattaagctttttataaattagcagtgtaatgaaactgactgccaaaccaaagctaatttgttattcaactgcattaagaattgaataatttagaaaatgatgaatttaatactctgtgccttaaaatcattyctggaatgttctgagactacattttaagaatatcgaagttcatactgagaaacactcaaggaattgtaagctatcagaaaaatcatttacctccgtacaaaataaactgctgtaggaggtttgggatgcttgtaatactgaataatactgaaataatgctgaaactcaagcacatacctgcagactgttgataaggatgttattgagaagtcttaagttttatgtgagtaattaaacttgaagactgatgctccttcca

SEQ ID NO: 445783 - DNA, 647 bp, Homo sapiens
tgtccaaattcagctgacttgtgaagacaccttcaaagacaaatttccaaaattatctcctagcacttgctattccttgtttcttgaatcaacctattcatcactagggtcttcttttccacttatttctcaagtactaggtttgattcacctgtgatcccaaagtcactcaatgccacaggcattggtgggtccctaccacatggtatacctctagaatgtgacatgtccttacttagaaacggaacattttgttttttattcaacgtaaagatggataatatgtactgttagtctgaatatgtcttacagaaaacacaaagctcatttatttttaaaatatagccttatatctccaattagacaactttccaaatctttgaaaccctctcttttgtttaaacatcactctcattcttttatggaatcacagcctttaaattctaaatcaggttaattctctactaggtaaaataccaagtttcctcrctctctaaagtcaaacacaatttgatggcaaaaatattctacaaatatctgataaaagtttgccacaaagagaacgccaaaaacttttggattgctccattaattggataattttcacttgtcctttatagcaagttcctttactgtggcttgtatga

SEQ ID NO: 445784 - DNA, 546 bp, Homo sapiens
ccttttataaatgaacccaaactaagacaatttctgagatcatttcagttcaataaactttcattggctattaattcgacgctaaaaaaaaatgtaccagagactaaagacaagcaatgcaataacacactctcctgatctcaagaaggagtagcttttttttgaagaagggagacaaacagatacatcagcacaataagatattataattgctataatagcagctgccccagaggcwtatgggagctcagaggaaggaacaacaaattctttgtggggtaggggcaggggaagcaggggacttactctgaaattattccagaaagggggtttacctgatgagagatgtatcaaataacagcatgccgcatgaaaaacaaagagtaagaaataatttaaacaacgagtaagggcatgggatatttccttcagtgcaaactacagtgcacttactgcatcccaagttttgtactagatattgggaacacgtcaataaaacagaattttgtatgaaattttgtcaggactcactatactagactgcac

SEQ ID NO: 445785 - DNA, 546 bp, Homo sapiens
ccttttataaatgaacccaaactaagacaatttctgagatcatttcagttcaataaactttcattggctattaattcgacgctaaaaaaaaatgtaccagagactaaagacaagcaatgcaataacacactctcctgatctcaagaaggagtagcttttttttgaagaagggagacaaacagatacatcagcacaataagatattataattgctataatagcagctgccccagaggcttatgggagctcagaggaaggaacaacaaattctttgtggggtaggggcaggggaagcaggggacttactctgaaattattccagaaagggggtttacctgatgagagatgtatcaaataacagcatgccgcatgaaaaacaaagagtaagaaataatttaaacaacgagtaagggcatgggatatttccttcartgcaaactacagtgcacttactgcatcccaagttttgtactagatattgggaacacgtcaataaaacagaattttgtatgaaattttgtcaggactcactatactagactgcac

SEQ ID NO: 445786 - DNA, 584 bp, Homo sapiens
aaatgttggtctataaacctgacctaaagtcatccagaaacctggctatgagaccttcgtctggaaaagtctgtccatgtgatggcatctaaagtggaaacaaaggtgaaaaggggtacaactggctcccaacttaatgaaatacacagccatctatgtctgtagggacagatttatttcttgctaaaacatgtatttcctgtctcataaacacaactttagcacaccttttcaaacacccaaggagagactaaggcagggggcagtggagcatgataaatgggactaacccacactgggcttatttttctctatggaaggtcrcgtttctcactctaaatttagtgtctgcctacctcacccccagcccagcaccaggtctctatttttaaatgatgatcacagtttcttaactcagtaaactgccttgttaaaatattcttctcatctgtttttttttttcttcctctggggagcaaagtatttcctgacatctgttttgaatttgtttttcttttaatttctgtgtatgcctctttttcctatcatctgcattaaattgaaaatagcatgtgaggttgaag

SEQ ID NO: 445787 - DNA, 482 bp, Homo sapiens
ggcaatgggttttcacaaaagactcaccccagctccaaacatggactggaatctgcatcagaggtcagtgctgccatctctgagtgaccacagagtgccattccatcttcccatggccactrgagccttgccatctatattttgagatgttcacaaaagagtgggaaaatattttcttctcatttccagcaggaagtaatttctgtaagtgattgactatcttaaacaaccctcattctagaattcacatttacataaatgcgtatctctttataaaatggaatatctggtcagactgttaaacaagttcaattctcatgatccttcaatgaccttggcaaaggaagcataagactagaggtcctttttgggatatagtgttccttaactgtggcttattaacttctaaaatactaagatgaagaaatcttggaatatttcccaaaggtactcattctgtgcttttcaagttcaaaagtggc

SEQ ID NO: 445788 - DNA, 571 bp, Homo sapiens
ttgtttaaagaggcttagaagacaatgtagctttgtgcaatgagaaaaataatggccactgtggagaactggaggtgcatatggttggtgatcacaagtcactgtgggacttggagagagctgattgcctccattttctaactcggaaagaggattgcactggcacaaggctgcacatttggtaaatattagacttcagaaactcaacgtcaaattggagctccttgatcacagttgagctgatgggcgacaatccgtattacaaaggtgttgcccatgtggatttcaaaggatgactgactggccctgtttcgtgttgatgtatataactcctagaaatgttggttggagtttcgggagttaaccagcatcaggtctatgaattcttaaatgaatcaaaattctactacaaagctcgtgttttcatcttccctctcatgcaaaaggaacctttctaggagatggcagactactktggcacacatccatgtgcttgttattcatcagaacgatgatgagttattattagaaagtcaaatggcagctatcatcaatgagatttcattaatat

SEQ ID NO: 445789 - DNA, 504 bp, Homo sapiens
cccttcctctgctgcctccaagttggggaaggaacatgaacactgagatcaccccagagcagcagtgcgggcagccaaggaatgccaagccgtaatctacagccagcactcaatggggagaagaacccacactttgagaacattgagagggaccatggctgtaacatgtgaaaacatctaraaaagaagtctattgggtgcactcaatctacactgtaggtaaaggaatgacaacatgcagagatgagaaagaaccaacacaagaactccagtagctcaaatgactagagtgttatatgtcctcctaagaaccaaaccagttctccaacaagagtttttaaccaggctgagtgggctggaattacagaaatagaattcagaatatggatagggatgaagcccattgagattagaggatggcaaaacccaatccaaggaaagtaataatcacaataaaatgataaaggagctgaaggatgaaatagctggtataataaagaacct

SEQ ID NO: 445790 - DNA, 514 bp, Homo sapiens
aataatcaagttaagaagttgctagattagaagcaatgcccccaaatcaaccaatgtgttttcggtactcttaggatatagtcctagaaaaatctaattttttaagctatccttaacaaaagctttgaaaatgatatttgtcatgtctctatactggatttaatatgctgtctgagtttcctctcttcaagggatacgtgccattcactatgtttctactacactccatgcattttatatataacacatcrtttaatcctcataataaatctaaaaagtagccagtgccatccttccttagaagtgaagaaactgaaaatcagaggagttagtaaacacctcagaccacacagccaggaaatgaacaagacaagcctgaaatcaaattttttttatttccaagtctatgcactttctattatatactgaaatccctcagtattatctacataataaatgtgtcccactacattacataagttatgtggtctttttgctttgttttggaagtgcc

SEQ ID NO: 445791 - DNA, 675 bp, Homo sapiens
ataaatatatatgcatgtatttatatactataaatatatatatttgtatataatatatactttataaatatttatatttataaagtattctatttatatatttatttcatatactatagaacatatttttattttataaaatatatataaataaatatatcagatggcagagctgtatatttatatattttttaaaggtaaaaaatatatatttttacatataaatatataattaaaatctactttctgatcagttttcaagattgcaatacattattattaactatagtaaccgtgcagtacaatagatttctggaacatattcctcctgcctaactaaacttttgtttcctttgagcaayatctccccatctcttttccaaagacaatgtagtccaacttcatttgtaagaaaactaacattcttctaaatacaggaggtggttaccactgtactagccaatttttattttagaaaagagaacacttagagaatgggtggagagtttccccaataactctgtgtaggtctgtgtttcctatctgcaagatcccaaagctcacaaagtgcatcttcacagaataaggggagagtgctcatttacaggcccacatttttgcacatattcctaatgcagaaagtgtttacctttacaccaattaagaggagagttt

SEQ ID NO: 445792 - DNA, 606 bp, Homo sapiens
gcaaatctgtcattgtgagaacttcacagaggtaccatatatgtttgtacttacacagcctactacacacctaggttgtacgatatagcctattactcctaggctacaaacctttacagcatgctgcagtactcagtagtgtaggcaattgtarcacaatagtaaaatgggggatcaggtgatttgtatgtctctgaacatagaaaagatacagtaaaaacatggtttgaaggcataaaattggtacacacagctgtatagggcagttaccacgagcaaagcttgcgggcctggaagttgccctgggtctgtcagggagtgagtggagagtgggtgagaaggtctaggacattcccatacatgactgtagacttcatatataaacactctacacttaggctacactaaagccataaaaaatatttttatttcttcaataattaaccttaacttaatgtagtaacagcttaaaacacaaacacagatagctgtaaaaaatacttttatgtatttatatatttattctataagcttttttctattaaaaaatttttttttgctttttaaactttctgtttgttaaaaaactaagacacaaacacacgt

SEQ ID NO: 445793 - DNA, 646 bp, Homo sapiens
actcaacttcactggtaagcaagtaaatgtaaattatgaaacmttaacattttcatatatcattgatgctaatagataatgacaagcacatgatgtgaaaaacactgctggtaggagtgtaaattggtacacctttcccagggaaaaaaatgtcacactatatcaagagtcttttaaaacgttcacactccttaagagtgattctatttctaggaatcatttcaaaagaaaaaaaatcaaggatgtggatagtgatttatgtaaatgaatgtccatcacactgctactttaaagtgtcactgaataactgcaaatggtgtatattcccaatataaggaaaatagtaaaagaaattatggtataattatgtcattattataaacatttctacaaatcatgatactgaaaatactgaataacactaaaaaatgaacaatactgagtaagaaaggggatagaaaaatatacattatgacttggtattaatgacccaagtcttagaacccaaacatacacttgccattcacaccctcacaatttcccccaaattttatcccacagtcaatggaaagaacaccaaaagaaaagcccagagtgtgaagactgtgtcctttacttgtcctttagcttctggaattttagttca

SEQ ID NO: 445794 - DNA, 646 bp, Homo sapiens
actcaacttcactggtaagcaagtaaatgtaaattatgaaaccttaacattttcatatatcattgatgctaatagataatgacaagcacatgatgtgaaaaacactgctggtaggagtgtaaattggtacacctttcccagggaaaaaaatgtcacactatatcaagartcttttaaaacgttcacactccttaagagtgattctatttctaggaatcatttcaaaagaaaaaaaatcaaggatgtggatagtgatttatgtaaatgaatgtccatcacactgctactttaaagtgtcactgaataactgcaaatggtgtatattcccaatataaggaaaatagtaaaagaaattatggtataattatgtcattattataaacatttctacaaatcatgatactgaaaatactgaataacactaaaaaatgaacaatactgagtaagaaaggggatagaaaaatatacattatgacttggtattaatgacccaagtcttagaacccaaacatacacttgccattcacaccctcacaatttcccccaaattttatcccacagtcaatggaaagaacaccaaaagaaaagcccagagtgtgaagactgtgtcctttacttgtcctttagcttctggaattttagttca

SEQ ID NO: 445795 - DNA, 646 bp, Homo sapiens
actcaacttcactggtaagcaagtaaatgtaaattatgaaaccttaacattttcatatatcattgatgctaatagataatgacaagcacatgatgtgaaaaacactgctggtaggagtgtaaattggtacacctttcccagggaaaaaaatgtcacactatatcaagagtcttttaaaacgttcacactccttaagagtgattctatttctaggaatcatttcaaaagaaaaaaaatcaaggatgtggatagtgatttatgtaaatgaatgtccatcacactgctactttaaagtgtcactgaataactgcaaatggtgtatattcccaatataaggaaaatagtaaaagaaattatggtataattatgtcattattataaamatttctacaaatcatgatactgaaaatactgaataacactaaaaaatgaacaatactgagtaagaaaggggatagaaaaatatacattatgacttggtattaatgacccaagtcttagaacccaaacatacacttgccattcacaccctcacaatttcccccaaattttatcccacagtcaatggaaagaacaccaaaagaaaagcccagagtgtgaagactgtgtcctttacttgtcctttagcttctggaattttagttca

SEQ ID NO: 445796 - DNA, 610 bp, Homo sapiens
ttgcccagcacccccaggagagaagctccaggtcccgcgtctgtcctgcctgcagggagggaccccaggggtggatcaagtctgtcacgccaggttgaccaggcctggttctgtggccttgcaggggtgtttttcataagcacagagacggatttccatggctgcgtagatgactaggtcaaagcaaggatgtgggggcgctgagcctgaacctgctgagaaacgtctgcaacgacggcctgggacttccccccgaaccccctggctccccgaggagrtgtctggagtctccacagtgtctacttgcccagatgtgggtcaccgcaaaggcacgctggggcggggctctcactgtctctccagggcatggcgatttccgacctcaaggaatctaggggctctaaggagactctgggtgtgaatgctctggcattgttgccgtttcccgccggcactgcagcagggggactgagactgtcccgtggagctcgcatgcagaagccggctcccctaacccccgtgctcccaagaaaccccagctctgaggagactcttgtgtgtgcctgagctcagccccgccccactgggtgtcctgctccttacgaggtgg

SEQ ID NO: 445797 - DNA, 610 bp, Homo sapiens
ttgcccagcacccccaggagagaagctccaggtcccgcgtctgtcctgcctgcagggagggaccccaggggtggatcaagtctgtcacgccaggttgaccaggcctggttctgtggccttgcaggggtgtttttcataagcacagagacggatttccatggctgcgtagatgactaggtcaaagcaaggatgtgggggcgctgagcctgaacctgctgagaaacgtctgcaacgacggcctgggacttccccccgaaccccctggctccccgaggaggtgtctggagtctccacagtgtctacttgcccagatgtgggtcaccgcaaaggcacgctggggcggggctctcactgtctctccagggcatggcgatttccgacctcaaggaatctaggggctctaaggagactctgggtgtgaatgctctggcattgttgccgtttcccgccggcactgcagcagggggactgagactgtcccgtggagctcgcatgcagaagccggctcccctaacccccrtgctcccaagaaaccccagctctgaggagactcttgtgtgtgcctgagctcagccccgccccactgggtgtcctgctccttacgaggtgg

SEQ ID NO: 445798 - DNA, 583 bp, Homo sapiens
taaacatttctgttacattctgcaagcgatactacagggtmaaaaagttacattttactacacaactaataaaaggtagtgctatattcctcagctacatttttgtctgatattattagagctattctaattttaactgaaaatatgtatttcctgaaaatatgttaactgaacacatcttttcttttcattaaaaaacacgatttttcattatgccatatcagagattaataacaaaagtaaaagataattaggcaaaggcaaagacatttaaaataaatgaaattcacaaatgtattacatgcctgattggctaaaattaaacaactaatctgaatatgactgatgggaatgatgctgaaggaacaattaaaacaaaagctaagaggctctgcacatgtgatcacttcaagttaggtgtcttgttattttccatttacctcttgatagttgtacctatcaaatgcaaaacctatgatcagtttcccatctctgtttatggttgtgataacagagaaaccagttattaattggtcaactcaaattgtattcatgtattactgtatgtctgtgtaatcctcct

SEQ ID NO: 445799 - DNA, 594 bp, Homo sapiens
gatcttagaccaagttgataaactgcaacatgttcttatttattttattttatcttacgttattttattttattttttagacagagtctcactctgttgcccaagctrgaatgcaatctcggctcactgtaacctctgcctcccagattcaagtgattctcctgcttcaggctcccgagtagctggactacaaggtgtatgccaccacgcccggctaattttttgtatttttagtagagatggggttctcaaactcctgacctcagatgatccacccacctcggcctccccaagtgctgggataacaggcacgagccactgcacctggccggcagtatgtttttaatctgtatctcagtgccctctgtttttacaaagtagatgataagtattgagttttgaaatagataaagggttgacagtcatagattcttgcttttaattttaagagagaagtaggtagcaaattttggagttgaaagacggatcatgcagtaactagcaactgtttctcaaaattccctcatcattaggatctcttgaattgctggtttaaaatatcagtttctaggctgctccacaaaatattttggg

SEQ ID NO: 445800 - DNA, 507 bp, Homo sapiens
gaactggaaatcagtggatatggagtctgggagactgaacgggttcaaagataactccaaggttatgggcctgagcatctagaagagtaggtttgctactttctaacatgaggaggccttaagaaaggataaataacwcataaacctttgatgctattcattccagaagtgggccaaccatccttgaggttgacattatttaaaatggcatccaccctttagtaatggagttcttttccctgtcatactttctccatcctgacacccttctctaaaccaggcaccttttcttccccaagccaacttcccagcccttcccagaatcctcctttcccctcatgaatcctttctcatttcccatatgcttattggaggtatttttctcccaaggggacattattcttgcttctttcttcatcttgaaactaactgttatttttctctctcctacagtgaccccacactttgccttcaatcctgttctcgaatgtcggcttactattatcc

SEQ ID NO: 445801 - DNA, 576 bp, Homo sapiens
gaatgaataaaacaaaatgcagtctgtacatatacaatggagtatcattcagccttaagaaggaaggaaattttggtacatgctacagcatggataaaacttaagacatgctgagtgcaataagtcaatcacaaaaagacaaatagtgtgtggttccacttgtctgaggtacccacacaaatcaaattcataaagacagaaaatacaatagtagtttccagggactgatgggatgagaaaaccaggaattaccatttacagggtacgaagcttcagtttgggaaaatgaaaatgaaagttctggatactgatggtggtaatggttacatgataatgtgaatgtacttaatgctgcagaactttgcgaagtatatatctgctaaataatttgtatcaagacatataaagaactcttacaactgaataataagagaaatattccacttaaacaaaaatggtctgggcatcatggctaatacttgtaattccaacactttsggaggatagcctgacgatgggagtttaagaccagcctgggcaacttatggagaccctgtctctacaaaatttttaaat

SEQ ID NO: 445802 - DNA, 484 bp, Homo sapiens
ataagccatcctgcctttaaggttaattaaatgatttgaactaatatttaacactatgaactgtgaggagaattgtggacaaagtagactggttagtcacatatgaccagttactgacatgttcttttcaatttaaatgtttacattttttattaatattatttaaaatgtcaaccacataccaaagtggagcagataacacagtgaactcccaagtacagtcacacactgcctaatgacaaggatatgttctgagaaatgcattgttagacaattttgtcaccctgtgaacaaagagtctacaccaaactagatgttgtagtctgctacatacctagacaatataacatattgctgctaggttacatacctgtacagcatgttactgtactgaatactataggcaattataacacartaagtatttgcatatctaaacacagaaaagttacagtaaaaatacggtataaaagatttaaaaaaa

SEQ ID NO: 445803 - DNA, 588 bp, Homo sapiens
aatcctctccctcagcctccctagtagctgggaccataggcacgcaccaccacgcctggctgattttgtttaatttttgtagagatrtgatctcactacgttggccaggctggtctcaaactcctaggctcaagcgatcatcctgccttggcctgtcaagtgctgggattacaggcatgagccaccgcactgggcctgagatgtgcctttttaagtgtggatgtctactgttccaacctctgccagttacccagctccaaagttgcttccacatttttgggtatctttatagcagcaccccactctctgcagtaccaatttactgtattagttctttctcatgctgctataaagaactgcccaagactgggtaatttataaaggaaagaggtttaattgacttacagttctacatggctggggaggcctcaggaaaattacaatcatggcagcaggggaaacaaacatgtccctcttcacgtggtggcaggagagaagtgctgagcagagggagaaaagccacctattaaagtaccatcagatctcgtaagaactcactcattatcacgagaacaccgtgagggtacc

SEQ ID NO: 445804 - DNA, 510 bp, Homo sapiens
aattgttctaacagatagtttgttcaaaataataataacaatgcatttaattatatgtgcttatgtatatatcttatgtatttatttacatgaatayatatatgcttgcatgtacttatatataagtgaaatgaatgacagaaatgatacaaaggattgaagggaggaattaggattattttattgttataaggtacttatactacctgtgaagtggtatagtgttatttgaaagtggatttagattagttgtaaacatacattgaaaactccaggtcacccactaaaaaaatgtaaaaccagaagtataactaatatgctaagaaaggaaagaaaactgaatcatataaaatgctcaattaaagccagaaaaggcagaaaaagtgtgaaagactaaaataggaacaaagaagaaaggcaacatatagaaaggcaacatacggaacacacaggcacacactgtggcaggtaaggtggggaaaatagtaaacaaatatagtagatattaat

SEQ ID NO: 445805 - DNA, 510 bp, Homo sapiens
aattgttctaacagatagtttgttcaaaataataataacaatgcatttaattatatgtgcttatgtatatatcttatgtatttatttacatgaatatatatatgcttgcatgtacttatatataagtgaaatgaatgacagaaatgatacaaaggattgaagggaggaattaggattattttattgttataaggtacttatactacctgtgaagtggtatagtgttatttgaaagtggatttagattagttgtaaacatacwttgaaaactccaggtcacccactaaaaaaatgtaaaaccagaagtataactaatatgctaagaaaggaaagaaaactgaatcatataaaatgctcaattaaagccagaaaaggcagaaaaagtgtgaaagactaaaataggaacaaagaagaaaggcaacatatagaaaggcaacatacggaacacacaggcacacactgtggcaggtaaggtggggaaaatagtaaacaaatatagtagatattaat

SEQ ID NO: 445806 - DNA, 561 bp, Homo sapiens
gttactgcctcttctctgtggaaggagcttaacttgacccttggtcgtctctcatgggacgatgctataggaagaactaagcgcaggtctcgttgctggaagtttgaacgtttggcagcaggtgcaggtagaggcccctggcaagtgacagctgatgcttttggactcatgagcagtctccctccctccctgtggccatgactactccatcacaccgtttttgtagcagctcccaagtggacaatgacagaggctggttgaattcaaccgcttggttacttagtgtctcttccaaaatagatgctctctgtggtgttaaagcttgttacaaagatctccgaaggcagtgcccacccttccaggcccacccacmtacctgttttccttgtatcttacactccaatctttcttcttgctggctccgatcaactggtcaaacattcaccgctgaccgttagtgggcatctattatctctactggctttgagtctttccatagaaactggatgcacaacatctttgccctttgtgaagactcctcccactgttgcatttcaagat

SEQ ID NO: 445807 - DNA, 582 bp, Homo sapiens
tcatatattctaaaaattatcattctttttagcactcacaaatgggcatttccaaatgaaatgaaaagcacggccaactcagcagtctgctgttaggccttgttgccaagcgctcagcttaaaaacagtatgtaattacacagtgtttttattatctcactaaaaatattgttcatcatagagaatcctgcatttcccaatttctgaaattaaagaaactagrggctggctccaatgtgataagaaaaaatccatgttcttcagcattcatctttgtatttaattaactgaaaagctataatgtgatcattttctcatatttcttttcaatgttctactaaatctatattgtgtgtgtgtgagcacacttttattataatgtcctagaatataagatcatggaaaagcatcattatttgggagctttgtgatgaaaatatatccacactaccagttggccagcagttgaccctaatgctacgacttttccccggaattccagataatttctcacagttgcataaaaagttaataaatttgtcagagaatagtgctatttaaaacgttagtgaatttattttg

SEQ ID NO: 445808 - DNA, 582 bp, Homo sapiens
tcatatattctaaaaattatcattctttttagcactcacaaatgggcatttccaaatgaaatgaaaagcacggccaactcagcagtctgctgttaggccttgttgccaagcgctcagcttaaaaacagtatgtaattacacagtgtttttattatctcactaaaaatattgttcatcatagagaatcctgcatttcccaatttctgaaattaaagaaactaggggctggctccaatgtgataagaaaaaatccatgttcttcagcattcatctttgtatttaattaactgaaaagctataatgtgatcattttctcatatttcttttcaatgttctrctaaatctatattgtgtgtgtgtgagcacacttttattataatgtcctagaatataagatcatggaaaagcatcattatttgggagctttgtgatgaaaatatatccacactaccagttggccagcagttgaccctaatgctacgacttttccccggaattccagataatttctcacagttgcataaaaagttaataaatttgtcagagaatagtgctatttaaaacgttagtgaatttattttg

SEQ ID NO: 445809 - DNA, 556 bp, Homo sapiens
ggttggttagggcttccacaaaggaatctgaggactcactttgtccatggcaggtctcatctctgaccactctcctcattcaccacctcagtctcacagccgtttgtcttcccaaaacacccttgacatgcaccctgccagagccagccgctccaagtgcctgccccatcctgcgccatgtgagcctcactccctgggggccttctcaagtgccagccttcctggccttttctgttcacctctactccacggtgtggactcagctacacatttctaatagtccttagtctttttcttttttcctrtagcaattatcacccctaacatacaatttccaggctgtcatagctgatttttcgcatattttcctgaatgctgtacacccagtctttagaatagcatctagagctatgtggctgctcaaaatatatttaccaaagaagaaaattaacagatgaatgaatgggccatgttcaggtcattttggcagaaggaaaatagctgtttattaactgctcctgtaggatagcttacaaagaagctataccaggaacat

SEQ ID NO: 445810 - DNA, 663 bp, Homo sapiens
gtgaccgcaccttaattcatttayatcctcttccaacatgcatgcttattataaatagtcccaaatatatatacacaaaaataaaattaaaatgtgtctgggataacaacaaatacattcagcctttctctttatgtcgtctttaattcagaatctcagttctctccctctataatttcatgagcattttgtttatttggaaaaaattatcagtacattttatttaggaatgtagatgagaaataatatgtcttatctacatagggcttattccaagaacttaagcatgttttaacataaaaagtatagcaaacatagttattatgttaaaagattaatggaaaatagagctagatttttcttcatttaatttttccatgaatatatatgacatttgttttacaaacattgtattgactgaaaactgataatatcacattagcaaaataacttgcaatgttctggatccatttcccttaaatcagttgcagaattaagcaaaattcttcagtgaaatgatgaattcttaatacaactgagtgttggcggttacaactctcaatggagccctaactctatggttgaaaaattcagtgaactttcgatttcaggtgggtagggtcacaaaaggctctttatgcttgatattgaggctggaaaatc

SEQ ID NO: 445811 - DNA, 578 bp, Homo sapiens
tgaatctagtcatacaaagagattgcttttcacccttcattgtggaaaagtgaatgccacagcacactgcaaagaatagagcttattatctccaaataccatttgaaaataagtgatcagtgctggagagtcattaaatatacacagttggaatattgagcttttaatctaygggagcgacttggaatatattgcctcattattttattttatggctcaagacataacttgcattatgtttcagtgaacaatgagtatcaaaccctgaaaaaattacctcatttcttttttatgctttctcactataggcaaatgcattacaaactctaatttattctgacccagaaattgctctgtggcacatttctgcaggctgctgtgtgcataaaacagggagtcactcagcataggattattattattttcttatttttttcaaattgtttatatttccaaaagtcaaagtcagattagctattataggcaactttcaatataatgttttccagaagataacaccattacctaggattagtgccattctataacgcctgagaataagaacaactagcacccac

SEQ ID NO: 445812 - DNA, 578 bp, Homo sapiens
tgaatctagtcatacaaagagattgcttttcacccttcattgtggaaaagtgaatgccacagcacactgcaaagaatagagcttattatctccaaataccatttgaaaataagtgatcagtgctggagagtcattaaatatacacagttggaatattgagcttttaatctatgggagcgacttggaatatattgcctcattattttattttatggctcaagacataacttgcattatgtttcagtgaacaatgagtatcaaaccctgaaaaaattacctcatttcttttttatgctttctcactataggcaaatgcattacaaactctaatttattctgacccagaaattgctctgtggcacatttctgcaggctgctgtgtgcataaaacagggagtcactcagcataggattattattattttcttatttttttyaaattgtttatatttccaaaagtcaaagtcagattagctattataggcaactttcaatataatgttttccagaagataacaccattacctaggattagtgccattctataacgcctgagaataagaacaactagcacccac

SEQ ID NO: 445813 - DNA, 578 bp, Homo sapiens
tgaatctagtcatacaaagagattgcttttcacccttcattgtggaaaagtgaatgccacagcacactgcaaagaatagagcttattatctccaaataccatttgaaaataagtgatcagtgctggagagtcattaaatatacacagttggaatattgagcttttaatctatgggagcgacttggaatatattgcctcattattttattttatggctcaagacataacttgcattatgtttcagtgaacaatgagtatcaaaccctgaaaaaattacctcatttcttttttatgctttctcactataggcaaatgcattacaaactctaatttattctgacccagaaattgctctgtggcacatttctgcaggctgctgtgtgcataaaacagggagtcactcagcataggattattattattttcttatttttttcaaattgtttatatttccaaaagtcaaagtcagattagctattatagkcaactttcaatataatgttttccagaagataacaccattacctaggattagtgccattctataacgcctgagaataagaacaactagcacccac

SEQ ID NO: 445814 - DNA, 245 bp, Homo sapiens
tagaacttcggattgtatgttgagctaatgtttaactctttaagtagctgggaagcccctttctgagtggctgtaccgcccagattcccaccacccacaggtgagattcctgctcctccacattctcacccacaattggcgttttgtgtcttttcaatgattctgccaggcatatggcattcttccttatggttttagtytgctcactgaattttcacatgcagcccttttctactttggaaatc

SEQ ID NO: 445815 - DNA, 639 bp, Homo sapiens
gcccagatcctacagaaatgactgtgagaatgatgaataacgtggcatgttcagacagaatcaatccacaggacgttaaaaacaccctgyctgccatttggacaggaaagttccaggcttcagctcccagaaaccaccttccttcatgtggagggacgcagcctcataaggtcagaatgagggcctggaaagtcagggtgtccggccaggcctctgggggtctgaggttattttggggggtgacaaatgaggacacacatagagcatgtaatgtctctgggaatttaaaatatatagatgtgttttctttccgcttttgcacagaagaccagatttcattaatgttttgtgtcatgttatttcacatttttgggtactgttatttcattaatgttttgggtcctgttatttcatgtgtaaaatctgcataaatggcaaaaatgtattcccttttcttttgatatcatactgatattactctggatgaaacacctatattctttgaatacacagagttcacaaagaaagatacattttacacaaatccctttatttttagaattgcacgtaactgttccatcctttccagtgcttgacaaatattagaactgtggacagatacagtccgaggcctgtttc

SEQ ID NO: 445816 - DNA, 561 bp, Homo sapiens
aaaacgtgaattgtaaaaacgaaggccaaaatgaaatagacatggataaaatataaaaagtaatttcattccaaatttaagataactatcacaatyggcaactaattccacagactatttcttgaataaggaagaattgcttaaaagacaggcaatgtagtcagataatatactaaaaaagtcagtacatttgagacttccttttgcgtctgcaaattttagatggcagaagcaataaaggtcagaccattacagaaaagttggaatatggcaaaagcaatatttagaggtgaattaataaattcaaagtatatccatgtgctttccccagctcatcagtttccaatatttcatatatcaaaaaagccatatccatgtagttattaatgcaatcgttgaaaattgtggtgagaacaaaaattttatttagataaccaattaggaagttagaaatcagaagtattatcagagacataaatatttgcaagttttcaaggcaaaaatatgtgttttgcccaaggttaaaatgcacaggttgaaactgctgtgaaaaacaaatat

SEQ ID NO: 445817 - DNA, 639 bp, Homo sapiens
ttaaaccatgtgacaaacagcagcactgctggttgggaatatcaatgactccataaactcttgatggcaagaggagctgagcttcttctcacctgtcttttaaatacagcacacctataatttcctggtttcctgcaacttgctggatgcatttcacaggcttcatatggaccaagcatacgtgtgaccagcagcagctccaacagtcactgtaggcaggcagtgtccgacaccaggtgtattagtctgttctcacactgctaataaagacatatgcaagactgggtaaattataaaggaaagaggtttaatggagtcacagttccatgtggctgggaaggtctcacagtcatggcagaaggtgaatgaggggcaaagttrccccttacaaggtagcaggccagacaatatgtgcaggggaactcccctttttaaaaccatcagatctcatgagacttattcactatcacgagaacagcatgggaaagacccgcctccatgattcaattacctttgactgggttcctcccacaacacgtggggattatgggagctacagttcaagatgagatttgggtggggacacagcccaaccagatcaccagggacctgacacacccagtgtcgcttgctctttct

SEQ ID NO: 445818 - DNA, 639 bp, Homo sapiens
ttaaaccatgtgacaaacagcagcactgctggttgggaatatcaatgactccataaactcttgatggcaagaggagctgagcttcttctcacctgtcttttaaatacagcacacctataatttcctggtttcctgcaacttgctggatgcatttcacaggcttcatatggaccaagcatacgtgtgaccagcagcagctccaacagtcactgtaggcaggcagtgtccgacaccaggtgtattagtctgttctcacactgctaataaagacatatgcaagactgggtaaattataaaggaaagaggtttaatggagtcacagttccatgtggctgggaaggtctcacagtcatggcagaaggtgaatgaggggcaaagttgccccttacaaggtagcaggcmagacaatatgtgcaggggaactcccctttttaaaaccatcagatctcatgagacttattcactatcacgagaacagcatgggaaagacccgcctccatgattcaattacctttgactgggttcctcccacaacacgtggggattatgggagctacagttcaagatgagatttgggtggggacacagcccaaccagatcaccagggacctgacacacccagtgtcgcttgctctttct

SEQ ID NO: 445819 - DNA, 579 bp, Homo sapiens
aaaaccaaacagaaataaaagaaaacataacagaaaaaaaaaatcccacaaatcctagctgcagaccaggtaggaacgctgcataacmagtcacagagatgtatggttagtgaacacataattcgagggagctttatttttcccatgggaaatgatttgggccaaatgcaccagattccagccaaccatccccagattctatcattttcctaatagcacctggcctgggattggctgctacagccaaagattacaactctaaaacagaaacaatttctacaaggacaaaacaagcattcaaagggtggggagattggttgtttaaaaagattttaataatactgctccagctcttcacataattgtagccttactatccatgcccctatagttaagcaaatgtcacatttgtaaaacgaggctttctaaagcccagtggggcattttatcatccctaatgtagcaccacgatcacgcctattcctcattactgttcatacacacagaaaagctatgttgcaccagatctgaaggtgtcattacagagcaaatgacattaatagtcacctgataaagttt

SEQ ID NO: 445820 - DNA, 638 bp, Homo sapiens
ttataaattttacatttttgcctttgaaacacacattatgaaataatcacatccttatataatatgctttcttatgttataaatcttcctattcctttattttcaaatttttcactcatatcatttttagattaagtcttgttcacaacgtgttctatatttttcttttaatcatttcttttgtgttttcattattctttcccttgctctgagttgtaaaatttctccataaatgttttctactttttcagtgtttctactggctgttttcatttatgagaaaaacataattaaacatgattcaagaagtatgtaataattcagaccagcatcctaacccatcacgagactttcaacaaaattktagcttttattctcctatacccatgactctattaaacttatgcagacttttagctctaagtcattgctaatttgtaataaaatatttgttacaaaatgtaggactacattcttaatactttctttagatttaaattatcattttcaatcttttctaaatctggcaccagaagatactcttatcattcgcatggacattctttatcctgtcactttagccccactcttccacttatattcccgattcagattttaatttgacagatttcagacgc

SEQ ID NO: 445821 - DNA, 571 bp, Homo sapiens
atgtaggtggaggtctgttctcttgctataaaggaaaactttgctcagacgttataaggggagcccagcatggtggatcgtgcctgtaatcccagcactttagaaggctgaagcaggggaattgcttgaggccaggagttcaagactagcatgggcaacaaagtgagatgccatctctatacaaaaataataacaaaagaattagctgggggtagtggcacacacctgtagtcctagctacctgggaagctaatgcagaaggatgccttaagcccaggaggctgaagctgcagtgagccatgattatgccactgcactctagcctgtgagacagagtgagactctgtctcaaaaaaaaaaaaaaaaaagctataaaaattaaattagaatgcactcctaaatcccagtaattatgcctatcatacgtcatatttttgagtagtgttaaataaagggaggtctcctgatactagttctayataaaaacaaagcaaaatgatgaaaagtaaatgtcgtgtcacagcttcctaggttctagggatatgaaacttcctgctgccctacgatgacg

SEQ ID NO: 445822 - DNA, 637 bp, Homo sapiens
ttttaaacaactttggacatagttatttcaagatgtctgttccatagagatagcaatagttcattaccatccacactgaaaacctattttaaggagtactttgctgcacaaagattaatttactacatcattttttttcctcccagtaacagtaatgtaagtaattgttgtaccttaaattggcattatattttgatagcctagtttttaatatacaaagaactgttcagtgtaactgttcagaaacacagaaatagagacagaaaataggaatctttgggaacagctctccatttaaatcccatttattgttctgatagagagtgctggctaaagatgtttcaccataataataatgactgaaccatgattgttttgcaaggaagcttcaaaaactatcagacatttttgttggtgatttggatatggcaaaatctgaaaacccaccctgactaaaagtattccgttctttcccatctgttaagacacggttatttcctgtgaaatttctataatagggcttttatacatatataaagttgagcaacactctgtgatattaactggtgataattttataagctygcctagtaataaaagagcattaatatcacaaaataaaaatcagtagatagta

SEQ ID NO: 445823 - DNA, 602 bp, Homo sapiens
tgtgaagattcaacacgctggctgcagaaaatttttaaaagacaamtttgtaaagacttgtgataaatcatctgcttatcatgaagcagaagagaaattcattgacaagtttgccaatgtcatcactgctgaaagtctgacaccagaataagtctataatgctgatgtaacataacgattttggtgttattgccccagaaagaaactgactacagctaatgaacagctactagaggaattaagaatgccaaggacagaataactgcaccaggatgtgctaatgcagcaggcacgcttaagtgtaaacttgctgtgttaggcataagcttgagtcctcaatgttttcaaaaggctaagttcttacttgtctattattatgctagcaggaaggcatgaatcaccagagacatcttctctatctggttttacaaacatttgtaccagtggcttatgctcactgcaaagaagctgaactggatgaggactagaagatttttttattccttaacaaccgttctgttcatcctccagctgaaattctaaaaaataatgtttatgtcatgtactttcccccaaatatgacttcattaatttggccatgt

SEQ ID NO: 445824 - DNA, 618 bp, Homo sapiens
tgacaaaaccttttttcctactggacatgttttaatttaaatttcatgatgtyttgtggtcttaaaatctatctggcaatatagaaataggcaaaatttataacttatttattcttctaatattgaaaattctgaggctacatttatgtcaaactgttgctgttttaaaatattttttggataaagatgattaagtaaagccaggttacaaatcttattccccaacacctatagaaattaatgttttaataaaagcccaaagttcaacagcagcaactaaaaaaggactagagtgtgatcttatgccacaaggtattttaacattgctgtcatgaaaagtagtataaattatgatacgacgtgtgaagcctcaaaccccatgtcttctccacagggttaatattgaggagcagaagggaataaagccctgaagattcttgctggttttcccactcaatttttagagctgaggagactacttgagggaatagttttaagaagagaagccccaacatactgctatgggagctcagtggagtcagaaagttctagagcagtatgctgagttttagaaattgggtgaagctgtatgagcaggatagcacgtagctgggtgca

SEQ ID NO: 445825 - DNA, 507 bp, Homo sapiens
aggttacaaatcttattccccaacacctatagaaattaatgttttaataaaagcccaaagttcaacagcagcaactaaaaaaggactagagtgtgatcttatgccacaaggtattttaacattgctgtcatkaaaagtagtataaattatgatacgacgtgtgaagcctcaaaccccatgtcttctccacagggttaatattgaggagcagaagggaataaagccctgaagattcttgctggttttcccactcaatttttagagctgaggagactacttgagggaatagttttaagaagagaagccccaacatactgctatgggagctcagtggagtcagaaagttctagagcagtatgctgagttttagaaattgggtgaagctgtatgagcaggatagcacgtagctgggtgcagaaggccatgtttgatatttttgataagattttggtaaagataatctagtcttgctagattgacatatgacatggccacagctaagctagc

SEQ ID NO: 445826 - DNA, 563 bp, Homo sapiens
agtggcttctaaagcttcttccacaaggcatcatatcatttttgctcacattccatagactcgaacaagtcatgaggccaagcctaacattaataccacaataaagtagattctgccccactagagggttaatattttatattaaagtataatatggtctaccaaattctctttcacttattttttttacctgtaatagtgtaacctttagctaccactgtctgctttgattccctcaaactgcctgaactattgcttcagctgtgaacaacactttctatttctattctattctgtgtacttgttttcttgattttagcccaattatctctctgattttctatttttctctttgtgtctcattgttctatgtttggagcataggaaggtgcctcagataataaattaaatatcctmtctcattcataatggcatcaattttttttggtggaagaaaaacaaacttcacaaatccataattaaatctcctctctctcccacaaatcaccttttggaatcagttttagtatcagactagggaaccaacatcctctgtgtctggt

SEQ ID NO: 445827 - DNA, 387 bp, Homo sapiens
atatcattggaatgtgtctgatttgcttcctcttctgccttatggtagacccactgaatcccaacttcctaccccttcctcattaccaccgcacaaactgatgagccaattctgatcatggcttgggaatgaattataatggggtttgtagagaggcacagggtagtggagcatttagggatacttaggcgattgattcattgaacatcaagtccgcatagtaatagttcrgttctggtcttgggctctgcctctgaggtctcagtgacaaactcccaatgctccttttgggttctggaaacctaggtccctgccttgacatttgtttagtgctttctgccttctagtggaaagaaactggaatcttgccaacaattttctctcacc

SEQ ID NO: 445828 - DNA, 575 bp, Homo sapiens
tagacaataatctgtgttgagctcttgtctcacatctgggcacaatgggaaggcagtgggaccccacatcctcatgaagccctgtccctagggttttgtttggctcagtccacccagcagcactaatgggttagagtcttatggctgcagctctcccaggatgcagttgcacattggttgctctgtagttctggggtcacagggtctacttcacttccatggctccactaaacattatgagagtaaggagtttatgtagtggcctcactcctrtggctctgctggacatttcctcagtggaggctctccggggtggcaccatccctgtgacaagcctctgtcttggctcacaggttcttcgcaacatccatttaaatttaggagtagatcgccatggccctacagctgttgcattctgcacacctgaaatgccttaggatcattctcccattgtcttgacaaacagaacctggtgtttttctagccatataaatctctttagcaaacacctttgtcacactattaatattctctctcaaacatgctttacttggctaggctctgagagttttcta

SEQ ID NO: 445829 - DNA, 439 bp, Homo sapiens
gcattctcctgaagtatcaattttactcagtactgaaacataatctatcataaaacaaacacaactgattagagagtatattgcaaaatctccatgaacttaatactaaaataagagtctgaaagccgactggtaccccagattgtcaatcagctcctattggaagcctgtcaagtccaccataragcagcagccaaaccatttcatgggagagaacgaggactctgcagcgaagtctgaaagtgctgcagccctctggaccctgtggactctcaaaactaatcaaatggaatgtccatccaagacaaagccccgcaccaatgtgaaattgttgagagaaaaccaaaatttatcaaatagctacaatagaagcaaaggaaataaagtggtaaagagagagagagggggaggcaaagaaaaggaggaacaaaagcagcat

SEQ ID NO: 445830 - DNA, 542 bp, Homo sapiens
caaataaacccctcacttcttgacctgctccatacttgactatccaggtgcctttgggatgtctcactggcatttcaggtgggtcatgtccaaagtcacctactcagtgcttaaatctacctctcatatacaatttcataatttggaaaacaatgttttttttctgtcactcagattcaaaactccagaagcatccatcactgctttcttctttgtcatgttcattatatcaaatgtccttgtttgctcatgtctgcccccaaagtacctcgaatctgttctctcctttaactcttcactgccactccctcaacaccactctctacttgcaataaataactgttttttgccttctctgacttcattttgtctcatctgctagtgatgttgtcaaactgatctcaattggtagatcggagytgtcttctaggggagtttatgaatgtaaacaaaactgtgaatgtggcctcctgaagttgcatatttgacctggctctgtcttcttcagggcaacagattctcaacctggttttgttgttagt

SEQ ID NO: 445831 - DNA, 542 bp, Homo sapiens
caaataaacccctcacttcttgacctgctccatacttgactatccaggtgcctttgggatgtctcactggcatttcaggtgggtcatgtccaaagtcacctactcagtgcttaaatctacctctcatatacaatttcataatttggaaaacaatgttttttttctgtcactcagattcaaaactccagaagcatccatcactgctttcttctttgtcatgttcattatatcaaatgtccttgtttgctcatgtctgcccccaaagtacctcgaatctgttctctcctttaactcttcactgccactccctcaacaccactctctacttgcaataaataactgttttttgccttctctgacttcattttgtctcatctgctagtgatgttgtcaaactgatctcaattggtagatcggagttgtcttctaggggagtttatgaatgtaaacaaaactgtgartgtggcctcctgaagttgcatatttgacctggctctgtcttcttcagggcaacagattctcaacctggttttgttgttagt

SEQ ID NO: 445832 - DNA, 570 bp, Homo sapiens
cagaagttgcagtgagccaagaccactccactgtacttcagggtgacagactgagactctgtctcaaaaaaaaagaaaaaggaaatataatgtgagtcatatgcaagccatgtatgcaattaaaaattttccactatccacattaaaagagtaaaaagaaacagatggattaattttaacatattttacttcattcaatatgtccaaatattatcatgtcaacatctaataaaaattaaaaagtaaaatgagttattttacatttctttttttctacatgaagtctttgaattctaatacacatattttacttgcagagcatcttaatttggactagacacattytgtatgatcaacagccacatatgaccaatggccaccatactggacagataagacattataaattaaatgatttttgtatgaagatttcaaagtcagtcacttttttttttgaacatgggaagtgttcaaagttgtttctcatttatcttggggtttccaagtacaaaaaactgcacatattgataatgttctttactcgtatattaattattttgattatttgtt

SEQ ID NO: 445833 - DNA, 579 bp, Homo sapiens
gaggaactgttgtgtttctttggtggtgtcatgttcccttgctttttcatgtttcttgtgtccctgtgttgatatctgtgcatctagaggaacagtaactacttttaattttatagattgttttttgtaggraaaaactttcatttgcagatgggtcttagggtgtcatttggacagggtccattgcctccagttctgtgtgagtgcagtggtgtagcctttgtgtatcttcttcagctgtgatcaacattattgataactgcagttgcctcagtggtctacactgtaggagtttgtggcagcgtagtggcagggtaagttgtatggttcttggtgataagggctttaggggtcttcctgtttatgtttacccacagtagagagactcagctgaggggatccctcttgctgtctggtttgacatgtcccataggcagccatagtggtgctgtactacaagacacaggtactcagagtggctgtagagctgagggcctgggctcaatgtcttgtttcattactataacacctgtgacattgatgcaggttcattctctgaggtgcaggtgggtgctgcag

SEQ ID NO: 445834 - DNA, 513 bp, Homo sapiens
aggtaatcatgaggctcaaaaacgactgcacatgagaatcttttgtaatagctaagcctcattagaagctgtattctggtttgaatgtgcttgtagcctatatgtttgtgttgctgcaactcctaccttgctaaaaagagataaaggaacccatctagggaaactgttatgctaaggttgagttcctaaagccatggtgtacttcaaattagggaacaggaggagttgaacaagaccatcaaggaaaaaatttattatatacagatttctggcacgatttacaaataggcaggtccctgggctgatacagaacatgcaatgctgatatgttctggatatctgggacagtgtttgcaaaacaaatagaaattgaatgcctttatgttagtcataggactcactgctaatttattaatttacgtcttgctcaagacctrtttatgtccctcctttgttcccaggaacattagaggttgctaacgttgctctaagacttgagcttaattaaggtga

SEQ ID NO: 445835 - DNA, 652 bp, Homo sapiens
ccttacttattaaatgaagatattagcatccttagtcttttttttaatctctcttccctaggcccttctgtcttcccatttctgttgtttgttaagaacacttaaatatagygtcaccataaatatatttttcttaccttactcataggtatattttgaaatctagtactctacgaagactaatcaccttaatatgtggatatattgtggatatatatatatatgatatatataaatccttatatatatatataaggatgatatatataaatccttaatatgtggatacaatgatccattgtaaaatcaagtatgaaattttgattatatttcctttcagtatagcttcttggattgttggtccagctagcaactctattaattctctccctccaatactcacagtgaccagttatttcaccttgtctcctggagcacccatctatcacacaaacagataccttctcaatctgctgcctgcatgtcttcttgggatttatctgcactgtttgcctgggttgcgtacttcatttttggattttcttgctttcctgtttttaattttgtttttcctcctttggctaaataaggaccatatattccctgagtatttctagagtgtctgaaaaatgtctttattctatgctcacac

SEQ ID NO: 445836 - DNA, 657 bp, Homo sapiens
cagtgcagttgagacatgttcaatggatgtccaatccaaaggcagatctactgaggattattcacatttcaggagacaagaactgtttttattctgctagaatcacactttaatattgccacagactctgtgagagaggccaggcctcaaagttagaaacttgttaattttaattacttattttgctcttattgcattaatcaatgtccctgaattttgttttgtttgttgtaatcaaatgagcttaacacacagagaatgaaatgggaagaaatttctgtcaggaagtaattacccggcattacaaattgtattcaggacaagatggctcacccagagagatataaaggaaaatggaatgacttaaggatgtgatagatacttcttggatgctcaagtgactatcactttttagaaagttttyatttatttggtcaccagaatattccctaagataattggagcttgtagtcctcagctataaagctaagtggtggaacttcatcacaatatagcacagttgtccctggatatgcttggggattgattccaggatcccctgtagataccaaacttgaaggctactaaagtctcttatacaacaaggtgtgttatttgcctatagcctacacatatcctcctatatactttcaatca

SEQ ID NO: 445837 - DNA, 642 bp, Homo sapiens
ctgttatgtcattaagaaggatttgtagcaggaaaacgaggctggcaccttttctcaagaagctatcttgacctgaaacttacattctttcatcatcatgccattttcatctggtttcctgagagctgcctttggcagtcacagttggaaatgacattttatacaggctcttatatcagagcaaagtatggtcctgataaaaggttgtgtgaaaatgttcagcaaacacctctcaatcccctgtgctttgatgtcctgcatgcttttataatggccacactccagggcagctggagacaggaaatttcatataactgggttgtgtctgaacagaatcagcacactccacgatgagattcaccatattcacatttggtatattccctttccatttctttcaaacttccgtattaaaaatgyaagatttacattagtatagaatactaaccatcaactattatcaaaggaaacagaatggggagatgaacaaagagaaagagatgacccagaatcagaaaccctgggttagtcttggctctcagtgattaagcaatttgtccagcatcacagatctacaatgatcttacagtctcaatccctcattttcttcttttacaaagccaatggttggcagaggctgac

SEQ ID NO: 445838 - DNA, 566 bp, Homo sapiens
ggcagcagtgctctgggagggcattttagagggggatacacagcactgaaccttgaaagatggagaaactcagtgaacacagatgggtccggaaatgcacacaggacatcagtctacttacaggatggtttccgagagcaayaaagtgagtgaaaagactaacaactaaaaatgaggagaggtttggatagcagagaagagtggagtgattcttccttaaaggggaattgacacttaacatcagatgaatgacttagaacctagatctatcagttatactttgcactgaaaagctacaaacttttaacacttagctgtcccatctgtgaatctctgtggctcattattgctgtgaggattaggtgaaataaatacatcacagtgtctggcatatattaaattcctaataaactttcagttttatttttctactttccttttccttctctttatattggcagtggggtttctggcccttaatttagagtggaaacaccttatggttttctcttatcacattttatgacttagatatctcttatgtttatatcatctgctccctacat

SEQ ID NO: 445839 - DNA, 551 bp, Homo sapiens
tagtctggttgagtgaagttttgcccacacttaactgaaaaaaaaaaaaaaaagattcctgtgccccttctgagacttgctgaatcagatttgaggaaaaatcctggaaatctataaacttagtaagcataataagtgacatttataagtggcctctttagaaagccagccctgcagagtacacagaatgaaaatctaaaagtctgagaatcccaggttagaattgcaatactgcatttaacatctgcagagagcttccaggyaagtcacttaacttccctgactacattttcccattgaaaaacagaggtattaccaacttacactcatcactactctgaggctcaaatatgacaaaatacataaaaaggctgacactcaatgtataattgaaccttccacttccctttttgatctaaacaattactcttctgaatatggtggaaaggttgaatggtacatttctccctccttccctgctaccctgccccccacatgccagctgggcttgcaaaaggcagaactggattccaaaattatagcagcagcca

SEQ ID NO: 445840 - DNA, 555 bp, Homo sapiens
aggttatatacatttagcattgtacatacgtgtgcacccttctgcagtatacatctagactggcaattgacggagatatgctccaagagagcaaagcagtttctccttaagcctacttctagtctggcctgctaactacctattaatgtttttctgaaatttaaaattaaatgayactagagtgaaataagcaaccagcgattatagggaataaaaggtactctgaacacatgggagtgatgatagagtctatgcatcccaggcacaaccactgatcttccactatgcatgaataaaccttttaagactctcagctactttaaaatattttgcctttcccaaccttaaaatattttttcagatgatccctaggaaaaaacagtgtctggaaccacaagccattatgaaatccttattaagtacacatgtaggaaaggaaagtcatcaatgcatttcttggctaacacaaatgtagatcagaaagacttggagtaaaatctctgcaactttacacaaagtgaagaataccataatttgtatcaatatccatgctat

SEQ ID NO: 445841 - DNA, 593 bp, Homo sapiens
gaatagcatattcacatgcagatctttgccctgtcagttgagagagcctagaagcaacgacaccccagtatctatgagcacacctgtaactcagatcttggtttctaaaactattttccaatttttactggagccagggtcccttgaaaaaataagtggcttattctaggactacagcagggaatatacaagatgagctggagcagcttgccaggaaatataaaaaatgctaaaaaaatgacaatgatatgggcrtgtcataatattcagaagccaactggaagagttcccaattttcaaagctggaacaatttgagcaacaaaataaagttagattggactgtaacccagtgtattaaatggaaatccatgtgcatatgttggtataaaaaatgattccataagtaaataaacgggaaaaatagacaaatctctcatgcagaaaaatttcaaataatttattttgctactccatctacataaataattgagatgaaacgtaacttcttactccttaaatgtaggctacacatagtgacttttcttccagagagcagtgtatggaaacagaaaaaaaaaaagtaacattacaa

SEQ ID NO: 445842 - DNA, 666 bp, Homo sapiens
tatcttacaataagtcttgatgatgttcttcatctagggtttccttttctaatcttatttacatagttcaaaaatgaggatactaatagctactttatcytgtaagagttaaatgacagaacttttgtgcatgtacctggcaaggtttcttgtatgaactagaataggttgttaataaatgttacttgtagctgaattggcttacactatagggatgtgtttttgatttacaaattccctgttgctcactcttaattaaggaacaccacttacagattatccacaaagcactcctattggatctggaatgtgttcctggacaactaaagtgggttatgcccaatatttaaaaatgtcctgcatgtataatcacagagcttttctgtgaagacaagaaatcaggaaaaactgaaaatttgataaccttctcatggtttaaagcacagtgggaatctaatgtttatctgccagatcaattccaccttaattctcaaacaaaacttccctaagggattgacttttcaagattcccaagaaaatggagacagtggagacaccaaccagtataattgaccactgacagcttattcataaggagagactaaaaatagttaggggagccaggaattcagaagatccagtgctggttctaaaaaatttatccac

SEQ ID NO: 445843 - DNA, 666 bp, Homo sapiens
tatcttacaataagtcttgatgatgttcttcatctagggtttccttttctaatcttatttacatagttcaaaaatgaggatactaatagctactttatcttgtaagagttaaatgacagaacttttgtgcatgtacctggcaaggtttcttgtatgaactagaataggttgttaataaatgttacttgtagctgaattggcttacactatagggatgtgtttttgatttacaaattcccygttgctcactcttaattaaggaacaccacttacagattatccacaaagcactcctattggatctggaatgtgttcctggacaactaaagtgggttatgcccaatatttaaaaatgtcctgcatgtataatcacagagcttttctgtgaagacaagaaatcaggaaaaactgaaaatttgataaccttctcatggtttaaagcacagtgggaatctaatgtttatctgccagatcaattccaccttaattctcaaacaaaacttccctaagggattgacttttcaagattcccaagaaaatggagacagtggagacaccaaccagtataattgaccactgacagcttattcataaggagagactaaaaatagttaggggagccaggaattcagaagatccagtgctggttctaaaaaatttatccac

SEQ ID NO: 445844 - DNA, 570 bp, Homo sapiens
aagcctggatctctaattcactacttgaataaaactagtcatttgctaccttaaacaggaaatacatctaccttggacaagaaaaagtagtatcaggaaataaattgctaccgtctttgagccattataataacgtgggctctattttttgatgcagctggcattaccctaactatactcttccttgtcatctactaaattccagtatagtttatcwtattaatgggaaactttggcatataaccaacattttttttctctctgtcccaaccctagcattatcatgagtaactggaatatccattagacaacttatccaaaactatgtcctctcaagtccttgacctctagtttcaaattatttccccctcaacctcagtttggttatttacactcataggaatgctttgaatattgtcatctcctataactcctccatcttcaaaatcaaaatcaaccaatctgccatatgactataatctcttcatcacaccagcttgttcaagcgctctcatgatgactactaattgatttcattgaaacggtcattcttctttcacttccttctac

SEQ ID NO: 445845 - DNA, 591 bp, Homo sapiens
ggaatttctgcatgccaggccctaatcaggtgtactttacctccacaaaaaaagcaatgatgttggacttttttctctctctctttcactttttagatgagaaaactgtgcttcagtgagattaaaactcttacataggttacaaaatctgagacacttccagggcaccaatttggttgatctgaccgttaagccccatgactattcgaattgacagcccatcctaccaaacacaaatatgtgtgtccatgtctgttctacgtgcatatagaatgcaaaccatcctgaccrgctaacatctgcctgatcagcagagcaatgaactgtactgggctggacccaagtattcaacctcagatgttcctctatttaaatggttctttttttaatcattcagttattcactcattcacttttaaaattcattgcattaattaacatttttttctgttgccataatatttgtctgaagtgagaataagggaaaaaactattgctaccattgtaattgtttccaagactaattgctgagcttccttttatgaattctttatttagcaaataagcttttccttttagaaaacatgcatc

SEQ ID NO: 445846 - DNA, 570 bp, Homo sapiens
attctgagaacaccaaaaagattcaacccaagtaagactacataagacatataataatgaagctctcaaaggtcaaggacaaagagaatcctaaaagaagcaagagaaaagaagcaaataacatattaaaaagctccaatttgcctagcaacagacttttcaatgaaaataatacaggccaggaggcartagaatgagattttcaaagtgttgaaagaagacaacttccattcaagaatattgtatccatcaaaattatccttcaaatatgaaggagatataaagtcttctccagacaaaataaagctgagagaattcacaactaccagacccatcttataaaaaatgctaaagggagttcttcaatctgaaaaaaaataaaacaccaacgtgcaaaataaaaaaaaacttttccaggtataaaacgccttggtaaaattaagtacatgaagaaacccaaaatactctatattgcaactgtggtgtgcaatttgctcataaatctattatgaagtccaaagacaagtctatcaaaaataaaaatattacagcaacctgttaagagattgg

SEQ ID NO: 445847 - DNA, 366 bp, Homo sapiens
taacttgccagtctgtgtcttttcattggggcatttagcctgttcacatttaaggttaatattgttatatgtgaatttgatcctgtcattatgaagccasctggttattttgcccattagttgattcagtttcttcatagtgtcaacatgtgcatatttcttatatgcatatatttcatagtggtgaaatatgggcatttagtgtacctctcacctaaatactgaacattgtaccaaataggtaatttttcaaccctcccacattttagtctccatcaaaacctgtggattgacttaccctgctttccacagctggtactcacacacaccactggggaaacagggtggaaccacccaccttctgcc

SEQ ID NO: 445848 - DNA, 548 bp, Homo sapiens
cagcctcccgagtagctgggattacaggcgcccgccaccatgcccagctaatttttgtatgtttagtagagagggggtttcaccatgttggccatggtagtcttgaactcctgacctcaggtgatctgcctgcctcggcctcccaaagtgctgggattacaggtgtgagccaccttgcccggctggcctaaccttttggttacatacttctgtaaacatatttgaacatgtattctcagtatacttattttaaaattgataaattacaaaaagtacctccacagtttattatatatartattagcattataaacacttcaacaagaatatttaaaaggattagataattatgtaatagataagtttaaaataaattttgagctactctgcctgtggagcaggcctgctctgtctatggatcagctattttcttgtactctgttgctctaataaacatgcttttctttaactcaaaaaattttttttttgtttactaaaagtataaaaccttatttgctcttaatttagaaatataagtgtaattttag

SEQ ID NO: 445849 - DNA, 549 bp, Homo sapiens
cagtagtttatcaccctgaagaacatgaggtggttaacttttgatataagttgttttaatattgaacatttagttgctgctgataaatgtgataggctctttgtacattggtaaatctcagaaaatagaaacactggcttacaaaaagcattktaaagagagtttctggtctctatgaagacatggtaaggcagtttcagttactttccatgggtgtttggaaaaatcttaaagaggggttatgataatgttacctagtgagttattacccctggcagccctcattctacttttctgataagtcacattttagaattttaatgggaagtgatagaatggaagaagggttcaatggagaacaacagaatgaggatgatggggaatatagtacatcaagattaaaaaaatcatagaatggatatatcaaataattcctcttaaatgcctttttccccctagaaatgttgattgatgtaataacttcaggaggaagattattttaattcatttcaattcagtttagctctaatgaggaaacactgactgagc

SEQ ID NO: 445850 - DNA, 573 bp, Homo sapiens
gatttctgtatatgtaatatttttgctaggttatttaggtgtttgatatacggttaaaagcaaagatatttttttcttcctttccaacatgtatcatgttagtattcaatcaatattttattgcattgacctaaacttaaattttttttttttttgagacagagtcttgctctgtcgcccaggctgkagtgcagtggcatgatctcggctcactgcaagctccgcctcccgggttcacgccattctcctgcctcagcctcccgagtagctgggactacaggcgcatgccgccatgcccagctaattttttatatttttagtagagatggggtttcaccgtgttagacaggatggtctcgatctcctgaccttatgatccgcccgccttggcctcccaaagtgctgggattacaggcgtgagccaccgcgcccagccaaattttttaattattattatattttaagttctgggatacatgtgcagaacgtgcaggtttgttacataggtatacatgtgccatggtggtttgctgcacccatcaacccgtcatctacattaggtatttctcctaa

SEQ ID NO: 445851 - DNA, 573 bp, Homo sapiens
gatttctgtatatgtaatatttttgctaggttatttaggtgtttgatatacggttaaaagcaaagatatttttttcttcctttccaacatgtatcatgttagtattcaatcaatattttattgcattgacctaaacttaaattttttttttttttgagacagagtcttgctctgtcgcccaggctgtagtgcagtggcatgatctcggctcactgcaagctccgcctcccgggttcacgccattctcctgcctcagcctccygagtagctgggactacaggcgcatgccgccatgcccagctaattttttatatttttagtagagatggggtttcaccgtgttagacaggatggtctcgatctcctgaccttatgatccgcccgccttggcctcccaaagtgctgggattacaggcgtgagccaccgcgcccagccaaattttttaattattattatattttaagttctgggatacatgtgcagaacgtgcaggtttgttacataggtatacatgtgccatggtggtttgctgcacccatcaacccgtcatctacattaggtatttctcctaa

SEQ ID NO: 445852 - DNA, 520 bp, Homo sapiens
ggtgtgggtttttataaatgtactttatcatgttgtggaagttttcttctattcataattttgtgagagtgtttttcaaaccatgaaatggtaacagattttgtcacatgcattttttttgcatcaattgagatgagatgatcatgtggctttttccattgttckattaatgtggtgtattatactgagtgattttcctagtttgaaccacactttctttcctgggataaatcctacttggtcttggtgtatgattcttttaatatgccattagtccatttttctagtattttttgagaagttttgcatctgtatcataaggatactgctctgtatgtttttaaaaataatgtctttttctggttctggtatcatggtaatgttggtcttattttgtaagttttccctattcttttattttttagaagagtgtgaggagaattggtgttaaatctttaaatgttttatagaattcatcagtgaggccatctggtcctagacatttctttgttgaaagcgt

SEQ ID NO: 445853 - DNA, 647 bp, Homo sapiens
ttaacactgattgcacaaataacaacaacaacaacagcaaaaacaagcaaaaaggaaactagcaaaaactctacactttaacttcatccccctgctttttaactttttgatttttctctttatgtcttattgttaactatgtcttggaaagttgttgtagttctatttatttttaattggttcattatttagtctttctacttaagagtattttacacatcacaattatagtgttatactattctctgtttttctatctgctactacctgtgagttttataccttcaaatgatttcttattgttcatgaatgtccttttctttcagattgaagaactctctttagcatttcttataggacaggtctggtgttgataaaatccctcagcttttgtttgtctgggaaggtctttatttttcctttatgcttaaagcatattttgccagatataatattctagggtaaaagtctttttccttcagctctttaaatatgtcctactactctctccaggcctgtaagattttcactgaaaagtctgctgccagatgtattggagctccattgtatgttayttgtttttttccctcttgctgcttttaggattctttctttatccttgacctttgggagtttgattattaaat

SEQ ID NO: 445854 - DNA, 488 bp, Homo sapiens
cccttttcttatctgtacatttagattaataataattccaacatcacaggttacctatgaggatagtaatatataatacatgtaaaatgcttaacaccgaggctggcaggcaggcatctcagagacatcagtaaggaagtgtaacttcccaaaggcacctgtgttcaggttagcgatcatttcagttcccatactcatacccagtgggtgaacttttacttatctatgctgtgaggctatcttggggaaatgaaaaggggtaagggagagtytgccctggaagtaaattcaactcaggcagaaatggtttataacttttaaatggcaatttttttcaagttttaaaaaatattagagtacagtcccagtgagtacacattattaaaacatgtgaaaggtgggagaacagagagagagagcacaagagtgagagcagttattagaatagtttaataaccacaaaggagccctatgaaattgactgaagg

SEQ ID NO: 445855 - DNA, 488 bp, Homo sapiens
cccttttcttatctgtacatttagattaataataattccaacatcacaggttacctatgaggatagtaatatataatacatgtaaaatgcttaacaccgaggctggcaggcaggcatctcagagacatcagtaaggaagtgtaacttcccaaaggcacctgtgttcaggttagcgatcatttcagttcccatactcatacccagtgggtgaacttttacttatctatgctgtgaggctatcttggggaaatgaaaaggggtaagggagagtctgccctggaagtaaattcaactcaggcagaaatggtttataacttttaaatggcaatttttttcaagttttaaaaaatattagagtacagtcccagtgagtacacattattaaaacatgtgaaargtgggagaacagagagagagagcacaagagtgagagcagttattagaatagtttaataaccacaaaggagccctatgaaattgactgaagg

SEQ ID NO: 445856 - DNA, 488 bp, Homo sapiens
cccttttcttatctgtacatttagattaataataattccaacatcacaggttacctatgaggatagtaatatataatacatgtaaaatgcttaacaccgaggctggcaggcaggcatctcagagacatcagtaaggaagtgtaacttcccaaaggcacctgtgttcaggttagcgatcatttcagttcccatactcatacccagtgggtgaacttttacttatctatgctgtgaggctatcttggggaaatgaaaaggggtaagggagagtctgccctggaagtaaattcaactcaggcagaaatggtttataacttttaaatggcaatttttttcaagttttaaaaaatattagagtacagtcccagtgagtacacattattaaaacatgtgaaaggtgggagarcagagagagagagcacaagagtgagagcagttattagaatagtttaataaccacaaaggagccctatgaaattgactgaagg

SEQ ID NO: 445857 - DNA, 656 bp, Homo sapiens
ggtttacattccagtgggagagggacaggcaattggcccaggtggtgggtgctgtgaggggaagtacgtcttgctgggggagcacacaggatgggaaactgccactggcccaggcttcccagtgaagtgagagtaagctgggaagtgaagtctgactaagaataggctgggcaagggagaggcatggggtgggaacaagcactttccataatgggcacggcatgtgcacaggcctraaggtttggaagagggtactgatgccggaaaggcttccatttaaatttgaatccatctgcaaaatgttctttcaggataatcaaaaagctccttcttgaagagatttcctactacctactgtttaagaccctgaacggtaggtatgtaatgttgtagaatatataatgtagtaaaatgtaatgatgagcactatttctggggctttatgattggggggaacttgcttctcagcccagagtaatcaagcactaaatttcttcaagtcaggagtcagaaagcttgggaattccaacttatgtttcataatttcaaggttgaagaaatagagtaaaaagataatattatagcaactccaagaggcctgcatatacacatatctcttctcctaccaacactctaccacctaagagaaaggtgat

SEQ ID NO: 445858 - DNA, 655 bp, Homo sapiens
tagcaataacaatatactgatagtggcatagaaatagattaatataccagtgatacagaatagagagttcagaaatgacccatgaatacaggaacttgatataggataaagatgccatcacaaattaatagggaaatgacatattgtgcagtagtcagtagttgggaaaattggtgtacagatattaggctgggagaagacagttgttacatctaaaactttcaatatatgaactatacaataaactcttgaaaaaaaaaaaaaacaacagaaaaagatgggtgacctgatagaaagatgagcaacttgggcagatacaagaggagacatatatatatagatgttcattgcagtgttatcattacaggatgctagagggaaggtaagtttcatccttagggaaaaagtaaatgaaatgtgatggaaacacagtatgaagcattctgcagaagtcaagagttagggacaagattaacgaaaggcaaagtggatgratcttaaaacataacgctgagtggaaaaaaaaagtattaaacagatgaagggctataccacaactcatgtataaattaaaaatagatacacacacaaaacaacactgcttattttataaagattcctacatttcatacacattcatggatatatattaaac

SEQ ID NO: 445859 - DNA, 257 bp, Homo sapiens
ggactatttagcaagagggaatggcttctaatttttcatgtttgtgtctcyacagcactgtagggaagtcagattttgagaacatcattgcatagatttgcctttagtatcaaaaggggcaactctttgcgttacacaggtcacaatgtctgtccatctgtctggatcccatttttcgcatgactggaatgaacagttagctatacagaaaaccagaacaagagtccagcattgactatggtcaaacttagtttaaa

SEQ ID NO: 445860 - DNA, 590 bp, Homo sapiens
ttcacaacccatcagaatttccagataggatttactagttaccaggtatgcacactttcacaagtttcttgccatttctgaatcttcgctttgtcatctgcacaatgaaagtaatgatacttgtgacatataccattgtgaggattaaataaaagagttttgcaaggtgtttgtaagctattcacctagatggatcagacataaatttcaagagcaaaattttaaaacatttaataaaaaataaatttatttataatcttgaaatagagatggatttattcaattaggcaaaaccagaactatctataagagaaaaagattgacgagtgtgactacataaaataatgatactttatcaaaacacactgaaagactgtgaatagtgaatagttatttttaaacttggaaattatctttgtagcacaacagtattccayaggcctttctagtaggaatataaactgtcatagccagtttggaaaacagcttgatattgtcttgtaaaatttaacattcatgtactatatgaccccaaaattctactcctagcttgtacgcctccacctcaaactcttgaatctacataccta

SEQ ID NO: 445861 - DNA, 444 bp, Homo sapiens
tcttcggaaaacaataacttagattctaggctccccacttatagtgtagagcagaactgccttcaagacttggacttttactgttgaaactatcacatggacaagaatgaaattcccttgttctgtaagtcattttatttttggctttcttcattagagcaaccttgcctatataacaatcttatcctattttattttttgttttcttttgctttttttttaagcaatcttaccttatgtagatayacatcaaacattttcaagtgggtcactaaatataataatgagacatgctagatggactaaatcatgtcagagagctaaataatctaggcaaatgtgaacttctgccttttccacaaatgtggacttctgcctttttcaggtgaaagtaaactgtgttctctgcttagttggatttaaaaaaaatttacaaaattgata

SEQ ID NO: 445862 - DNA, 519 bp, Homo sapiens
cttccacacctgagagaacaaagttttgaatgaaaaacgttgctttgttgatgtgaaacaaacaaacaaccctccctcaaaaagacagatattaaggatcctaattattttacttaacgaaacttgttatgtatcaggcactattctaaggaacttacaaatattgaagcatcataatagccctatagggtgggtgctgtcattgcctccatttacagatgaggaaaaagggacttgaagggacttggttacttgcyccaggcacgtggcccctgagccacactggaaggcatcccagcgtctacagtcctcactcctggcctctctcccagctgcctctgttcttgagacacccactctgaagacgtggctatctaggttgctagatgtcaaatttacagcaatgagaaaacccaaacgaacgtaaaatgcatttttaaggtagtttgttgagagataaagaaaagcagaatcaagacaatgattggcttgcatctcctggcagcaaattcgagcaca

SEQ ID NO: 445863 - DNA, 572 bp, Homo sapiens
tctaatttttctcattgtcataatttttgcaaaggtgattgcatttcctcctctgaagttttgttaaattttcttgcatagagaagatgccatatgagcccagggtctttgtcagkctttagctcactctctcaagtcatatggcttggtgcctttactctgagatggtgcgggtggctctggggaagaatctaagcttttcactttcttggtttcatctctttttccccaactacctactctccagccccaagaaagggtctagaaaaggtaattagtggtggtaatggtgtgtgtgtggcgggggtagggtagggggtagggggcagttcctatttataggattaacaggacagggacagttttcccaatatctgttccctcaaattgtgtctttttttaaactaaatttctactcattgccccaaacagtgaataatattaaccctctgccttccctccacaaagtaacaaaatgttgaactgcagtgttttgttttttgtttgtttgttgttgttgttttttccttttcttttctgtctccaagcaaacataaaggtggctggggaga

SEQ ID NO: 445864 - DNA, 584 bp, Homo sapiens
tatctcagttgctgctgcacccttcacccttgtgtcagagctgaagcaacactaaaaatcccaaagaaattgtgccttggctatcaagagcagtcacacctctctgtatctaagctaaagtactacactgtctccttggaaaacagtaccttggccacccagaggagttattcttccctagtgcccaagtacctctcagaaaagggtgcctttgccatccaatgtggtcatgcaccacagtacttaaagtaagtggtgcccaacataccagggaaatggtgtctgagtcacctggaacaggtatgcactctgggcctgagatgaraaggtgtgttgtgccctggggaaatggtgtcttgaacaagctaaacagtaacatatcatagggtgaactgatgtagtactccatgtctcagggaaatagaaaagtggtgcagctgagataccccaccctacaggccaaagaattctagtatcctgcttccctgaagctacactaacctcatgcagtcttagctgttgagacacttctctccacagagagtgtcattatttctgtacttctccctacccctcaggagaca

SEQ ID NO: 445865 - DNA, 506 bp, Homo sapiens
tttcaaaaaataaataccataaaaaagaagaagacagaaatcttacatctgaagaattaaatgaacaaaataaaaaacacaacaggaaggagagcttcaatggaagacttaatcamgatgagaaaaaagaacctctgaactacaatgttggttatttgaaattacccagtcagagggaaaaaaaagcaatgaaaataaaaaagagtgaagacagactgcaagatttatgggacaccattagtgaataaatatttgtatgacaggagtttttgaaaaagaagggatggggaaaggcatagaaaacacatttagtaagtgaatagctgaaacatttccaagttgtgagggagatataaacatttagatccaggaagctcaaagattgcaaaacatattcaacccaagaaggtgctctcaggggtaacattatggtcaaactgtcagaagtcaaaagactaagagataattattaaaacaacaagataaaaaacagtcacatacaacag

SEQ ID NO: 445866 - DNA, 506 bp, Homo sapiens
tttcaaaaaataaataccataaaaaagaagaagacagaaatcttacatctgaagaattaaatgaacaaaataaaaaacacaacaggaaggagagcttcaatggaagacttaatcacgatgagaaaaaagaacctctgaactacaatgttggttatttgaaattacccagtcagagggaaaaaaaagcaatgaaaataaaaaagagtgaagacagactgcaagatttatgggacaccattagtgaataaatatttgtatgacaggagtttttgaaaaagaagggatggggaaaggcatagaaaacacatttagtaagtgaatagctgaaacatttccaagttgtgagggagatataaacatttagatccaggaagctcaaagattgcaaaacatattcaacccargaaggtgctctcaggggtaacattatggtcaaactgtcagaagtcaaaagactaagagataattattaaaacaacaagataaaaaacagtcacatacaacag

SEQ ID NO: 445867 - DNA, 574 bp, Homo sapiens
cttgctgtgtgggaaagctggcacttgtaaggagccaaggcctacgccaacagtcatgtgagtaagtaagcatggaagtgggtccaccagtcccagtcatggcttcagatgactacagccctgaccaacagtttgattgcaacctcatgagaccctgagccagaaccacccagctaagcccctcccagattcctgaccctccaaaactgtgagatttttttttaatgtttattatttaggctgcctactttgggggtgattggtatgcaggaatagatcatcattacacacccccattaaatctcttcattcttcaaatcttaatatctgttttggggtttttttattatttatactgttaaacctgyaatccatatagttcacctgactgaatcattaagttgattgaaaaataccatgttctgtctcccatgttccagtccagtgtttgatataataaatatagactttgaattcacctttcctatatttgaccccatattagaatgtacttaagagaatcgctctctgacaaggagtcttcttgaggttattccacagatccttttccttt

SEQ ID NO: 445868 - DNA, 473 bp, Homo sapiens
tcagagtcaagagtgcctacttgagtaccaagcaccatgmtaatgatttcacatacatattaccttattaatcctcacacgggtgctgtgaggtattattatccccagtgtagtgatgaggtagttgagggccagagatctgtgcaagggcccttagcatatgacagccaggatttaaaccttagtgctttgttctttcactaccagtatttcccaaatgagagtctctggggaggagcagattcccaggctcctcccctggcgattctgatttcagtaggcaaaggtggagctctagataaatgccttggtgattcttcagatagagcaagtttagaaaatgcatgcgggacaccatgctgctccacagccaccccagaaatggatcatcagacctaatcaatgccaggagaccttcatcaggtcagataaatggaacaaaaataaaacatcattaattcccctcaaacaac

SEQ ID NO: 445869 - DNA, 570 bp, Homo sapiens
gattatagatgtgacaatccttaacaaaatattagcaagtagatttcagcaatatataacaataagtgtacaccatgaataagaagggtttacgccagggaggagagattggttcaacatttgaaaatcagttcatgtaatccaccatattatcagactaacaaagacaaaatatatgatcatattaatcaatacagaaaatgtatttcacaaaattcaatatctgctcataatttttttcaaaaactcagaaaagtaagaatagagaggagcttccttaacttgataaagatcatctacagaaagcttacaattaatactatactcacctgtgaacaactgaatgcrttctctctgtcttagtcagttccagctgctgtaacaaaatatgacacactgggttgcttaaaccacaaacatttatttcttacagttctgggaatggtaagaaaaggagcacagtgctggcagatttcacgtctggtgagggctctcttcctggtttgcagatggccaccttcttgctgtatcctcgcatggtagagagaaaggtctcatctctcttctttt

SEQ ID NO: 445870 - DNA, 574 bp, Homo sapiens
tcttctctgggaggcttcccctgactctgatttgggttgatgcatgttgacraaacaccaaacggggcctgcctatcacaggctcaataaacattgaacaggctccttgcaatcacttgattttctctttgtatccaggaatcaccaagtagaagaacttcggctctcagactggtttcatcctaggtaagaacaaaaatgcctgtttacatgcacacacaaacaatatacttcaattggaagtaacaggtttttcttccccagtcaccaaattcagctctcctgggacgtttccagaattggagttttattttcgaggctcttataaacaaaccagggtctgttgatcaagaaccaggcgatgattgtggtcatgaagaagcagacgctctctacctggcttagctttcctggtttatgcagtgcgagaaagtctcttcggaaccagcttgaatatgccactgatgacgctgcttgactttggtggcagcactcaggggcagcctcatcctttgtaaagtgtatgtggtttcaactttgtgttgtgttcctatgtagctttggggttatttac

SEQ ID NO: 445871 - DNA, 574 bp, Homo sapiens
tcttctctgggaggcttcccctgactctgatttgggttgatgcatgttgacgaaacaccaaacggggcctgcctatcacaggctcaataaacattgaacaggctccttgcaatcacttgattttctctttktatccaggaatcaccaagtagaagaacttcggctctcagactggtttcatcctaggtaagaacaaaaatgcctgtttacatgcacacacaaacaatatacttcaattggaagtaacaggtttttcttccccagtcaccaaattcagctctcctgggacgtttccagaattggagttttattttcgaggctcttataaacaaaccagggtctgttgatcaagaaccaggcgatgattgtggtcatgaagaagcagacgctctctacctggcttagctttcctggtttatgcagtgcgagaaagtctcttcggaaccagcttgaatatgccactgatgacgctgcttgactttggtggcagcactcaggggcagcctcatcctttgtaaagtgtatgtggtttcaactttgtgttgtgttcctatgtagctttggggttatttac

SEQ ID NO: 445872 - DNA, 574 bp, Homo sapiens
tcttctctgggaggcttcccctgactctgatttgggttgatgcatgttgacgaaacaccaaacggggcctgcctatcacaggctcaataaacattgaacaggctccttgcaatcacttgattttctctttgtatccaggaatcaccaagtagaagaacttcggctctcagactggtttcatcctaggtaagaacaaaaatgcctgtttacatgcacacacaaacaatatacttcaattggaagtaacaggtttttcttccccagtcaccaaattcagctctcctgggacgtttccagaattggagttttattttcgaggctcttataaacaaaccagggtctgttgatcaagaaccaggcgatgattgtggtcatgaagaagcagaygctctctacctggcttagctttcctggtttatgcagtgcgagaaagtctcttcggaaccagcttgaatatgccactgatgacgctgcttgactttggtggcagcactcaggggcagcctcatcctttgtaaagtgtatgtggtttcaactttgtgttgtgttcctatgtagctttggggttatttac

SEQ ID NO: 445873 - DNA, 311 bp, Homo sapiens
aactttgtgttgtgttcctatgtagctttggggttatttacagtttgggggctaytgcaggcaaagttctggtgactaaatgtaacccgtcttttttttttttacacagatatatgacttccggtgtgagacacatttctaaaatgaagttattaggccaaagaatgcagacatttaaaatttttgatgtaaattttaaattgctaaatttacttttaataatggtaccattttatcttcttgtctacagtgcataaactaaagtattaccagctttttcatgtttggcaaagctgctagttaaggcatct

SEQ ID NO: 445874 - DNA, 311 bp, Homo sapiens
aactttgtgttgtgttcctatgtagctttggggttatttacagtttgggggctattgcaggcaaagttctggtgactaaatgtaacccgtcttttttttttttacacagatatatgacttcckgtgtgagacacatttctaaaatgaagttattaggccaaagaatgcagacatttaaaatttttgatgtaaattttaaattgctaaatttacttttaataatggtaccattttatcttcttgtctacagtgcataaactaaagtattaccagctttttcatgtttggcaaagctgctagttaaggcatct

SEQ ID NO: 445875 - DNA, 539 bp, Homo sapiens
tcaaatgttcatcaactaatgaacatataaacaaaatgtggtctagccatccaatggaatattattcagccatatttccagaacaggcaaatctayagagacagaaagtagatgagttgttgcagggattgcagggagaagggaatggggagtgactgcttttgggtagtgatatatcaaagtatttcattttctttggagaaactgtaaatagcatgtgttttaaatattactttctgcatgttcattgttcatagtaatgagattaatttttaatgtgctgatcttgtatcctgaaactttgctgagttcacttgttagttctaggagatattggtttttttttaagattccttaggattttctatgtagacaattatgtaatctgcaaatagggacggtgttgtttttttccttcccaatctgctggcttttatttcattttcttgccttattgcagtggctagaactgccatcactatgttggtactgccacgttcctcattgtagggagaaagcattcagtctttcactatgaa

SEQ ID NO: 445876 - DNA, 539 bp, Homo sapiens
tcaaatgttcatcaactaatgaacatataaacaaaatgtggtctagccatccaatggaatattattcagccatatttccagaacaggcaaatctacagagacagaaagtagatgagttgttgcagggattgcagggagaagggaatggggagtgactgcttttgggtagtgatatatcaaagtatttcattttctttggagaaactgtaaatagcatgtgttttaaatattactttctgcatgttcattgttcatagtaatgagattaayttttaatgtgctgatcttgtatcctgaaactttgctgagttcacttgttagttctaggagatattggtttttttttaagattccttaggattttctatgtagacaattatgtaatctgcaaatagggacggtgttgtttttttccttcccaatctgctggcttttatttcattttcttgccttattgcagtggctagaactgccatcactatgttggtactgccacgttcctcattgtagggagaaagcattcagtctttcactatgaa

SEQ ID NO: 445877 - DNA, 564 bp, Homo sapiens
gtaaagcactccctgtttaacttggttcttgttccacagaaaacgccctgatgttataacgaaaacagactggctcgctccygtcctatgggaagggactttcgacaggcgggtcctggaaaaacattacagaaggcggaatatcactgtgggcctggccgtctttgctactggcaggtaggtgccactcacctttgcccttttttattttgggaaaatgtggatcagcattcacgagcctttaacctccaaagagccaaccataattaagcataattagtgataacaatagccacgatttctggggagaaacaaacttacctgtccaaacccaaataagggactcaaagacctggagaacagtgaaagtgagacttttagtgacagtcttgcaagatcggatgtctgatgggcaggcacacccagcacagtttcaactgcaatttatcccctagtgcacaggtccctccctcagttcctcataggctgagtacttggggtcacaatcttcccagacgtcgcctatttgttgttgggcaggggctttaggtgttttctttaggg

SEQ ID NO: 445878 - DNA, 564 bp, Homo sapiens
gtaaagcactccctgtttaacttggttcttgttccacagaaaacgccctgatgttataacgaaaacagactggctcgctcctgtcctatgggaagggactttcgacaggcgggtcctggaaaaacattacagaaggcggaatatcactgtgggcctggccgtctttgctactggcaggtaggtgccactcacctttgcccttttttattttgggaaaatgtggatcagcattcacgagsctttaacctccaaagagccaaccataattaagcataattagtgataacaatagccacgatttctggggagaaacaaacttacctgtccaaacccaaataagggactcaaagacctggagaacagtgaaagtgagacttttagtgacagtcttgcaagatcggatgtctgatgggcaggcacacccagcacagtttcaactgcaatttatcccctagtgcacaggtccctccctcagttcctcataggctgagtacttggggtcacaatcttcccagacgtcgcctatttgttgttgggcaggggctttaggtgttttctttaggg

SEQ ID NO: 445879 - DNA, 615 bp, Homo sapiens
tcttttctgttccattgatcaagttgccaatccttgtgtgacatcacactgtctgcattactgtagctttataatatgccttcatttttatttctttatcttttaaattttcttttgagagggagtctcgctctgtcacccagactggagtgcagtggtacgatctcaactcactgcagcctccgcctcctgggttcaagcaattctcctgcctcagcctcccaagtagctgggactacaggcatatrccaccactcccagctaatttttgtattattgtggagacagggcttcaccatgttggccaggctggtctcgaactcccgacctcagtcgatctgcctgcctcagcctcccaaagtgctgggattacagatgtgagccaccgcacctggctcatttttatttattttgaatgttgtccttactattcttgctcctttgcaatcacaattgaattttttaaatgagcttctccatttctacacacaaaaaaaccactgcgttcaatgcaatcaggattgcattgaatttacagattaatttggagagaattgatgtattggcaacattgaaccttccaatccatggatatggtatatttctccattcaga

SEQ ID NO: 445880 - DNA, 568 bp, Homo sapiens
  misc_feature (1)...(568): n = A,T,C or G
nnnnnaaatacaaagcaaatggacagaaataagttttctacaacagcaatgacagcaaatgtaatttggttattctttctagtttaaagaaaatgacccttagacaacatttcaaaaagtcaataacatattgtttataagagataccaaaaaatgggacattggaagtaaaaatggagaacacttttctatcaaataagaacctaaagaatgttgagagttgtttgtttgttttgtagttttcagcatgcaaattctgaacatgtttcagtaaaaatgtacatctagtatttcatttttggtgctattttaaatggtactttctttttaaaaaattgatttgtgaaaggaaaataaaaaacttgggacctcaattcacccatccaaaagaaaaaaaattaagctggaagctgagtcatagaagaagctgcctctccttttgttcctaagcagaaagctacagataaaaggttgagtatcttcacaggtagctgctccatgttcacctgaccttatgaaaagcrtggattactgagcacaagacaaatatatgattgactgtttccct

SEQ ID NO: 445881 - DNA, 614 bp, Homo sapiens
cctatcaaactaagtcacttcaataaaattctgtgtaaaggaaatttatgtctttaaaggaaatttccattttgtaaggacatctctgtctctgcgtctaaaccactaggaactttaactaagggggagacaatggcttcatttacataacagaccttgccttttttagatccaagtctgtgcctttgagwtgtacattttttaccttgcttcacctaagtcatgtatttggagatgtaaatttagagttacctagttaacaattgtttaagacatggaatagataatcaagagattagtggtataaagtagggaagaaaaaaactttgaaaacaggcaagtgaaacattttaaatccctaagatttgcctctgtctgtgtctgttaagtctgtgtgtttatgtgtcacatggaaacaatatttcactaccaatcatatgaaagagctctaattagttggcttaaagaaaagtaagtgtttgtagactaatagaagctagcccagaggcctttcagctcacatgactttagtaatctttggtaagattaatttggtaaatgtaatctcacaattctctccagtaattgaaaatcttaaagtcatgttgtgttaa

SEQ ID NO: 445882 - DNA, 600 bp, Homo sapiens
gttggtatgtgatgaagttaaggctccaaccaggtggtcagtgatctaaagtcttgtaagtgctttatttttcttctttgtttctctgcttttcatgtggcatctcatagataagagttaatatctttcttgcaaatttaagtactgtaattgcttcacactcaatcactggtcagatcactctcccaacaccctctacacactgcatatttattctcatttttatctagtcrtctatactgtatctgattgtcctaagtcctgcctctagttttaagaaaattaagattatgtaatgcctttccaagtgtcctaaatcctgcctccaattttaagaaaattaagattatgcaatgcctttccaaggctcggtgtgaagttgcactgtagtcctgccattttctccaagggctctcttgaaccacccagcccttcagtgaccttgcagagcagttgcattgctacttggcaatctagtgcttgattggaatataacttttctaatccttttgtgaatgtaattctcatccctctgaactagattatcaagtcaagtatagggaataaagctaccttttaaaaatacctcccataaaattt

SEQ ID NO: 445883 - DNA, 512 bp, Homo sapiens
tgtgtggtgaaaataaaagcttcttcattttccaggatgttttactctgggatamcttcaccttctgggaaacagtctcccctgtttagacaccaaggctatatcacactccttctgccttattatattttaagtctgtcattttagctgaagacaaaaaaaaatctcatgtaaaggcataagatttctaaaatatagtttctagaatatcatttctagaaatagttatttttcagatgaggtccccactatgaaaaaacatcttcttcttcataaagtttcaatttttcttgacataactaatgaaaaataataaatacatgtatttgtgttaagggtgaaaaatatataaagcacatttccagtgtccccaaatcataagggacctcctcattttttcatagcatttcagtggtgtcagaggaccgagaatgctgcattctctcagagtaggtcagtccctaaaggattactctgcataagtgtgtgtgcagcaggcattagaaagagaa

SEQ ID NO: 445884 - DNA, 451 bp, Homo sapiens
tggcacccaggtgaatgtcctagtggtcagagtgtgacctgaacttcaggcccagtgtccttggcttggcaccttgtgcaataatccatttaatttaaaagagacaatagtgtatctggtacgaattttttaagtgatttttttccttcacgtgaagtaaggwttacatagattacagacactaacgctcttctttttgctgccttcaaaatcactgatttccttttatagtacaaggatttgtgcagtagctttctgtttgaaaggactttctcatgaaatggctacaattataattataattatatttaactggcaatgcagatgtgagtatcacatgagataatgtatgaataatgttttgttgactacaaaatcctctacacagtgagttgttagtatctcctctaattaacacaatctctggaggtagacacgcagagaattccac

SEQ ID NO: 445885 - DNA, 500 bp, Homo sapiens
gcattggctttttcaggaactctgttggtatataatagggccatgagaatgaccgattctgagcttgtggtctttaagccaaagcttaagatgaatactggttccacaagttactaactctttaactttggacagaccacgtaagcyttctctcatttaattgccttgtctgtaaattggtaatgatactaattcctctgtccatgcacaggtgctatcagtagcacactgagtttttttctagctaacttactcccttcaaatgactcctcttatcatcctctcactccaaatgtaaatatataccttaaataaacttattttttattactcataattgacaaaaataacctttgctttctatgctatgagacaaaaggtaaatgcatttttctttacgttcttatactgacatagtatttttggatggagtcaaagttgaaaagttcctgatacataaatcttcaggcacttaatcttagttattgtatccaataaat

SEQ ID NO: 445886 - DNA, 519 bp, Homo sapiens
tgccgccatgtaagacatgcctttgctcctccttgccttcatcatgattgtgaggcccccagccatgtggaactgtgagtcactcaaacctctttttccatataaattacccagtctcaggtatgcgtttatcagcagtgtgaawatggactaatacaattatgaaagccagtttgagttggtttttttaaactgaagtgcagaatattctagctgacaccctagtcttgtgcatggctccttagatagtactgctgttttctgatgaatggccatactctttacatgtcttcttgtctgctgcataagacttcatcacagttcaattccaaatggcctaactaaatgatgaatctgatgagctctggtatacaggtgctcaggaaagtgaatggcaattactgagaataccaagtcttgttaaaaatatatgtcaacatgctaataagacatgtaaatggccacagcacattagaaaccttaactgtatacagcaaaagtagaaaactttaactgtgt

SEQ ID NO: 445887 - DNA, 538 bp, Homo sapiens
tcctgtaagtgttcattttgctccaagccttcttttgagggaggatacacacgttgcccaaggcaccaagaataaaaactttcttcctgggctctttccctstcatcagttttcatctgaaataaaaggagattgactccaggatcttccaaggctgctattccaagagcaggttcataaaggtgattgtcaagctccagtgcaaatgctaataatctggaattttccttcaaaccatctgcctatgcaaaatacaactgggtcacactggaaaggagagagagagctctgattcatatgagaaatcaagaatcgaaccttcgtaagttccatactacagaaacatagctaagcatgctcattttctattgggattctggcctgctatttgagtgtatgcagagggcagtatcctaactctggtataattctactagtagcttggtcttccaaagcttgctcaaagaagatagcatatttaatctactaaattatgttttaatcaagatagaactctataaaaataattctgcatgca

SEQ ID NO: 445888 - DNA, 573 bp, Homo sapiens
gcctgtacctcctaacaaggcaggaggactcataacatccaaccgtttagattcatcatctcatctgctctcacctttctgctggctgcacagaccaaatatttgcttggctgcaatacaacaagagaatgaatgtaaacagtgggactctsagaactgctgatcagagttgttgggaaggaaactagaaactcttaaaaaaaatcttaaaagagggttgtgagtaaagtgatcttttgaagaagagagcaattactttaatgatttgcattttcattctggagaaagtacatcctattaaaggaaatgtgaaaagttttgaatattcaaaggaagaaagaaaaacaaaacccactgtcccatgagtgaaacacaataattgggtgtagtctagtgtatttccttttagcttcttcttctatgcataggcatttaatgatattgttgaaatcactgtttaatattacacataatcattttttatggtttgcatacaatttatatagccacttctcattgaatggatttgccatactttatattattatgcctctatagttgaatgataatgag

SEQ ID NO: 445889 - DNA, 603 bp, Homo sapiens
tttgactcctatcacgaaggcttctatgattcagcctccagttggaggtgttctttctctttattctccaggttccaaaagcaatgcccatttttaccttcctttgagcttttctctctctctctagaaaataaatggcttgaggattgggattataataacagttttacaggcaataacttattcagtcccttaagctttatgaagaagggacacattcccttttatagatgagaatgctaaggcccaggcaggtaaaatcaccttgcccaaagccatacatctaaagaggggcagaayggagcttcagatttaggagtcttggccccaggatctttttcgtttgcttaaccactacactcatcagcctctctgaccaccttatatccacgtctgccccatagcttctaacacagctcctcgcgcatagtgggtaatcaggataggtaggttttcaaaactgaattgaattacactgatttaattagctctggaaaaaacctcgccaatctgaggatataaaatgttaacacttaattcctttctccagcactcatctaattacttagaaccatggctatcaatatagctgtgagaggcacc

SEQ ID NO: 445890 - DNA, 603 bp, Homo sapiens
tttgactcctatcacgaaggcttctatgattcagcctccagttggaggtgttctttctctttattctccaggttccaaaagcaatgcccatttttaccttcctttgagcttttctctctctctctagaaaataaatggcttgaggattgggattataataacagttttacaggcaataacttattcagtcccttaagctttatgaagaagggacacattcccttttatagatgagaatgctaaggcccaggcaggtaaaatcaccttgcccaaagccatacatctaaagaggggcagaatggagcttcagatttaggagtcttggccccaggatctttttcgtttgcttaaccactacactcatcagcctctctgaccaccttatatccacgtctgccccatagcttctaacacagctcctcgcgcatagtgggtaatcaggataggtaggttttcaaaactgaattgaattacactgatttaattagctctggaaraaacctcgccaatctgaggatataaaatgttaacacttaattcctttctccagcactcatctaattacttagaaccatggctatcaatatagctgtgagaggcacc

SEQ ID NO: 445891 - DNA, 636 bp, Homo sapiens
atgaataaatgagtgactttttaatctataggttgggagattgagaagcagcaaatttaagtgaattacccaagatcacscaagcaatgattgactggattgggttcaaactcatgttatatgtctccaaatccaatccactttttacttctttatagtaagtcaagaactttggacatccaactaaagcaaatccatccctgggtaaagaaaaggaggtttggaaggaaataaacttgattgacattgtaattctgcctgaggctcaggggagcttccaaaactcattacctctgccacatttgtggctgccatagagtgccaatacctgcattattcaaattcatctgacagactttagaaccttgggtcacccaatttttgaatttgaaacaagtccctgtagattgctctagtatggctctgttcagtgcttatccttccacaccgaatggaggaaaagagggtcaataaaaaagaaagaaaaaatggaaaaagaaagaagtgaaagggaatgtctatagccaacaaattatgtcatacaattaaatttatatatttttatttccactagactttatgttacttactctgcactaaggataacagacattctcctttgtgtgcatactcata

SEQ ID NO: 445892 - DNA, 636 bp, Homo sapiens
atgaataaatgagtgactttttaatctataggttgggagattgagaagcagcaaatttaagtgaattacccaagatcacgcaagcaatgattgactggattgggttcaaactcatgttatatgtctccaaatccaatccactttttacttctttatagtaagtcaagaactttggacatccaactaaagcaaatccatccctgggtaaagaaaaggaggtttggaaggaaataaacttgattgacattgtaattctgcctgaggctcaggggagcttccaaaactcattacctctgccacatttgtggctgccatagagtgccaatacctgcattattcaaattcatctgacagactttagaaccttgggtcacccaatttttgaatttgaaacaagtccctgtagattgctctagtatggctctgttcagtgcttatccttccacacygaatggaggaaaagagggtcaataaaaaagaaagaaaaaatggaaaaagaaagaagtgaaagggaatgtctatagccaacaaattatgtcatacaattaaatttatatatttttatttccactagactttatgttacttactctgcactaaggataacagacattctcctttgtgtgcatactcata

SEQ ID NO: 445893 - DNA, 532 bp, Homo sapiens
tgcctcggataaagatatctctctgccatcacagggcccccaactcacccaattcgtctatagtttccatgacttgcagtgtttggtggatccttctatttttgcttttcaaacaccagagaaaacactgttgagctcaaataaccattcgaatttactgtatggaaaaagcattctggtttatcagggcccttcgcatgtcagcttctgtagtgtcctgctcacttacaagagaagccacagagggattcggaaaacataacaacagcatagctctcagtgtagtgtcaagggrgacagatataaaaggtcttaacatttctctgttgttcagtttataacagatcttttccagttatgataaaaatgtggttttcatagagaatagctcatccaattatttcagctttttgatatacatatttctgctgcctgccttccttaaatgtcctcatttcttgatatatttcattttcacaaaggtattctaggtgtaaaaaagtcagcattagaccattcagtaagcttggat

SEQ ID NO: 445894 - DNA, 595 bp, Homo sapiens
cacacctgcctctacctcacttcatggaaatgctctttatcttggtgtctgacttatctataactatgtggctccatccataaggccaggcagctttagtttccttatgttataaaaygagctatcataagaatatatttcaaaatgctcagagctttctggagagcgagcaaactaggagggaaatttatatttggacagttttaccttatgccttcagaaagagaagctaccaacagaacaccaaggtctcagtgatatgctttacaggtgcttcttgtcaaattgtcttcattcgtttatttactcattcaataaacatatatatatatatatactgctgatctctctctttctgcttcatttgatcctacttattctttgtgtttcaacttagatatctcttcttctagggaaaaatatccctaatccatgctggtcccaaagtgtagttttaagagcagcagctaaaccacatttattaggagcgtggatatcaaagaatgcttcctatcagaagggagaaaaagaaaaagaaagaggacagagagcagagaaggaaaaatgttgcaggtggagaggataaaagacatca

SEQ ID NO: 445895 - DNA, 606 bp, Homo sapiens
atatttcaaaatgctcagagctttctggagagcgagcaaactaggagggaaatttatatttggacagttttaccttatgccttcagaaagagaagctaccaacagaacaccaaggtctcagtgatatgctttacaggtgcttcttgtcaaattgtcttcattcgtttatttactcattcaataaacatatatatatatatatactgctgatctctctctttctgcttcatttgatcctacttattctttgtgtttcaacttagatatctcttcttctagggaaaaatatccctaatccatgctggtcccaaagtgtagttttaagagcagcagctaaaccacatttattaggagcgtggatatcaaagaatgcttcctatcagaagggagaaaaagaaaaagaaagaggacagagagcagagaargaaaaatgttgcaggtggagaggataaaagacatcaaataagaaaagtatattgcatttaaggaactaagaatatcccagtacttctggggaaggaggtaggttgaggtgagaaatgaagctggaaggtcagcaggagtcagaacaagaaggggtttggaagacacactaaaaagctgaga

SEQ ID NO: 445896 - DNA, 606 bp, Homo sapiens
atatttcaaaatgctcagagctttctggagagcgagcaaactaggagggaaatttatatttggacagttttaccttatgccttcagaaagagaagctaccaacagaacaccaaggtctcagtgatatgctttacaggtgcttcttgtcaaattgtcttcattcgtttatttactcattcaataaacatatatatatatatatactgctgatctctctctttctgcttcatttgatcctacttattctttgtgtttcaacttagatatctcttcttctagggaaaaatatccctaatccatgctggtcccaaagtgtagttttaagagcagcagctaaaccacatttattaggagcgtggatatcaaagaatgcttcctatcagaagggagaaaaagaaaaagaaagaggacagagagcagagaaggaaaaatgttgcaggtggagaggataaaagacatcaaataagaaaagtatattgcatttaaggarctaagaatatcccagtacttctggggaaggaggtaggttgaggtgagaaatgaagctggaaggtcagcaggagtcagaacaagaaggggtttggaagacacactaaaaagctgaga

SEQ ID NO: 445897 - DNA, 553 bp, Homo sapiens
ctgcagctacatgccatgaaaagtgttaggaaatctgagatgataaactagggcctcaagaaactcaagctggtaacaaytaaaatgcagggaaaggacaaatgtcttggttttaccccctagcaaaatccctttttacaattcaggcatctcttatcatgaatatactttggaattttccattctccctagagttcccttccttagcattttagtctaggaggcatttgttcttttgaatgtcatgcagtgtgacaaattagttcccttacttttactgaagcacttaataagctgcttcgcttatgcacccttactcttcccaggtgttctcatagtcaaaatgtaacagccttctgtttttcctgaaaagtctcctaatgtttcatttgagaacatccagaaaacagaggtaaaataaatgacataaacataccataaaaagtaggtctaaaatctatgttgcgctggctgtgttttcaatggtcttgcgtgtaagggtaaatttgctataggatgagaaattcagtcttactgatttattgagaccatc

SEQ ID NO: 445898 - DNA, 553 bp, Homo sapiens
ctgcagctacatgccatgaaaagtgttaggaaatctgagatgataaactagggcctcaagaaactcaagctggtaacaactaaaatgcagggaaaggacaaatgtcttggttttaccccctagcaaaatccctttttacaattcaggcatctcttatcatgaatatactttggaattttccattctcyctagagttcccttccttagcattttagtctaggaggcatttgttcttttgaatgtcatgcagtgtgacaaattagttcccttacttttactgaagcacttaataagctgcttcgcttatgcacccttactcttcccaggtgttctcatagtcaaaatgtaacagccttctgtttttcctgaaaagtctcctaatgtttcatttgagaacatccagaaaacagaggtaaaataaatgacataaacataccataaaaagtaggtctaaaatctatgttgcgctggctgtgttttcaatggtcttgcgtgtaagggtaaatttgctataggatgagaaattcagtcttactgatttattgagaccatc

SEQ ID NO: 445899 - DNA, 538 bp, Homo sapiens
tttattcattattttgatgctaaatgtatatttgttgtgggtgacagaaaaacatttacagactagatgcataatagtaagttgccaaaatacagatactatcttttgttcttagttattgttacgggctgaattgtatccccctaaagaggcacatgttgaagctctaatcctcaatctgactgtatttggagatagggccttcagggaggcaattaaagttatatgagatcataagggtgggttcctaattcaatagagctggcactgttataagaagagacaccagagagctcactctctctctgccacgtgaggacacagagagaagactgctgtttgcaagtcaggtggagaacccttcccagaaactgaattggccagaaccttgatcttggacttctggtctctagaattataataaatgtctgttgtttaagmcacccagtttgtggtattttgttatagcagccctagcaggctaataccgttatagctccccttcttaaaggtgagaacttgatgatgcttggcaggg

SEQ ID NO: 445900 - DNA, 620 bp, Homo sapiens
ctttaacttctttgacatctgcagatcaggtgcttgtaactggacatggggacaccagtacttaccactctctgttcaaaagagacttaaatagaagagcagtcacaaagaaggtaggaaaacaggcttcttattttgaaaagaataaaacttcagtgctcagttccaaaggccttgtttctagatacttctttctataatacttctcatactcctcttagatttgcccttggttatgtgtgtgtgtgtgggaagggtacatatacacacataaatacatactcatataaatatactcatctacagatacacacacacawacacacacacacatacacagatacacaacacatgcttctgtatagagtttcagaactacaagcatctctggtcctcaatggttcagttaaagtattctttttttcatctttaaaatttttattttcataagtttttggggaacaggtcatatttggttacatgactaagttctttagtggtgatttgtgagattttgatgcacacatcaccccagcagtatacaataaatacaatttgttgttttttatccctcgccaccttcccaccctttccctccgagtctccaaagtccactgtat

SEQ ID NO: 445901 - DNA, 590 bp, Homo sapiens
aacaccccaacatatgtcaacatcacaaacatttagtctgcttgtcttgagctcctcatagcatgggaaatgcaggctcatattttactggcacgttgactaatctttaggggagatctggcatatgtgggaagtgattgactaygtggtaccctttcccttgagctagtactaacccagaccccagacatactcttggcattccatctttctgatgacatataaaaatgaggagccacacactctgggctattatggattccatggtgcttttaggaagacctgaggctttatccccaatgtggcaaaatgccagctcagagagtaaagttccaagtactcaaaatctttctatactttatagattgttctgttatttgctgcaaagattaactagcatgaagtagggagccatttatctgttaacacatttttttttcttccagagttgcctgcatttcagcagtggatttaagcaacctctatgtaaaatattgcagcatgctgaggtaagtaaatgctatggaagataaattatttgatgaccaagtgggtattttcctataaactattttttttaataaaaatca

SEQ ID NO: 445902 - DNA, 538 bp, Homo sapiens
atcctgtaccaaatacatttataagaaacaagcaggaaacactcagctagaatcaccctcaagaagttattagtgccatcaattctgtggtagctttgctccattgagtcttctgtacctcgctctttaacaccctacgtgaaaaaccatcatggcctccgtgcgctctggaatcacctttctccaccagtgttctccagatgtgtgataggaaatggagccagggagggttccaaggtcaaacgaggtaacaggcagaatctattctctctttactgaagtgtctgagaaatctgtcattatttctctctctgcctcatgtgcacaataatctaagatttcctaaactatttgactatgaaatcctttatttttcttttcttgtatagcatttttgctaaccacataaattatttttaaaaccctttcatttgtattagctacyctcatccttaggcccaccatttgaagaaggcaagttatatcttattttacgtctttgagagatgaagaaacagaatcatcaatgttcataact

SEQ ID NO: 445903 - DNA, 468 bp, Homo sapiens
cattataaaaattttcctactttacagaccatcatctaagttagttaatgacccacccaaaagatgatgagtgttactggtaaaataaatctttcctaaattttcrtcaaaagtctaaagtgtttccttctaaataaacacactgattttaaaatctaagagaagataaattctaatatttgagaattaagtgctgattaataagtgttggaaagaatacatcatgatataaaatagattactattccctgtaggggagcagaaataatcatgactgtggactgtataacattgtctacaaggcaatctaactccctttgcttaagcctttccttattaagcaccttctaattcctaatttggctttctagacaccttgatatgccttggatagcagataggaacattcaggagctagaaatgattattcctccaccttactctaaaaacgaatttaaaaatgacacc

SEQ ID NO: 445904 - DNA, 600 bp, Homo sapiens
gagtttctgaattttcaatgttcagttcagttgtgacatcctaggcccagatttagagtaggaaaaaaagttaccatattgaaaaatgactagtacatatatatttttcttaagagataatataattttaggatttaaaaaaatcaaaagygaataaaatattagagattttcacttttaatctatataccaaaaacatttctataaaatactgtaaatagatatttagtccctagctaatggctgcctgaaggcaattttcagaacaacacaactttccttagaaaaataaggatttaactgtgaatactattacctcaagagagaaataagctcagccaacttcttatgttatcaatatacacagaaaaagtgtacaggtccaaaaacattaaggaagaaatgaagcaaacaggtaataatatttgatttttttgtactcctcctattacccctgttacttatttctcctcctatttttacccttctattaattgatgagaagatgacattaaatgcctaggatgcatggaaataatttgataaaccagaaattaattttagagaacctcaactctttgaaaacaaattggcagttca

SEQ ID NO: 445905 - DNA, 600 bp, Homo sapiens
gagtttctgaattttcaatgttcagttcagttgtgacatcctaggcccagatttagagtaggaaaaaaagttaccatattgaaaaatgactagtacatatatatttttcttaagagataatataattttaggatttaaaaaaatcaaaagtgaataaaatattagagattttcacttttaatctatataccaaaaacatttctataaaatactgtaaatagatatttagtccctagctaatggctgcctgaaggcaattttcagaacaacacaactttccttagaaaaataaggatttaactgtgaatactattacctcaagagagaaataagctcagccaacttcttatgttatcaatatacacagaaaaagtgtacaggtccaaaaacattaaggaagaaatgaagcaaacaggtaataatatttgatttttttgtactcctcctattacccctgttacttatttctcctcctatttttacccttctattaattgatgagaagatgacattaaatgcctaggatgcatggarataatttgataaaccagaaattaattttagagaacctcaactctttgaaaacaaattggcagttca

SEQ ID NO: 445906 - DNA, 547 bp, Homo sapiens
tggaaagacttcaaacttccataacattattaactatgcaccatttaaaatttggctggctgataatataaatggaaaaaacatctagagtctaattttacctaactctygataaagagatgaaatctagattttatgaagaagtagatagcaacttccaaatggatgattatttaatttattattctattaagtccatgctcattttattccatttagcacttgaagctgagaaatcaactttaccaaaataactttgatcattgtaggtaattcataattaagttcttaaacttggttatggaattttaatgtatttggactaaatacatatttgatgaaaatttaaaactaaatgttttcaggtttcaaatatttattatgagtcctttggatgtcagcattctttgacaacagtgtactacagcttaatgcttctgaggagattaaaatatgtattgtattattatgagtgatgatttatgtcaggatgtgctgtcatcttctctaataaaaaagattacaaaacagatagctataatgtatg

SEQ ID NO: 445907 - DNA, 608 bp, Homo sapiens
ctgacttgtgtccttgctttcaatctctgtctctacaaattgaattcttaaaaacctttcagggactctgagatccttgtgaaatgaggttcaaactcttgaatgtgagcgagagggcattcccagtgtacctcctttctgcctcgccagccttctcttgacccgtttcccccttttactctatacctcctcccaaatgtcaatgtttacctctccyctatcccccagtgtgtgctttttcaccccctttactgcctagaaagtcctgttctccaagaccataaagtcttctctgatttgtccacatggactcatcacttctttctttgttttcatatgatgagttcactgaaggcaggaatcatgacttgattatctttgcatcacaggtgccaagctgagcttagacttagtgcatgatgggctttttggaaacatttgttgaatgaataaatgagcccaatgaccaagatgcacacaattcacaaaattgaaaggaaaaagtaggaaatgggaaactgagaacaatttgaatggcatgtaagtaatgggatgtcaatcaagagtcatgttgtaaaaatgaagtgcttaaagaatacctaaataaa

SEQ ID NO: 445908 - DNA, 608 bp, Homo sapiens
ctgacttgtgtccttgctttcaatctctgtctctacaaattgaattcttaaaaacctttcagggactctgagatccttgtgaaatgaggttcaaactcttgaatgtgagcgagagggcattcccagtgtacctcctttctgcctcgccagccttctcttgacccgtttcccccttttactctatacctcctcccaaatgtcaatgtttacctctcctctatcccccagtgtgtgctttttcaccccctttactgcctagaaagtcctgttctccaagaccataaagtcttctctgatttgtccacatggactcatcacktctttctttgttttcatatgatgagttcactgaaggcaggaatcatgacttgattatctttgcatcacaggtgccaagctgagcttagacttagtgcatgatgggctttttggaaacatttgttgaatgaataaatgagcccaatgaccaagatgcacacaattcacaaaattgaaaggaaaaagtaggaaatgggaaactgagaacaatttgaatggcatgtaagtaatgggatgtcaatcaagagtcatgttgtaaaaatgaagtgcttaaagaatacctaaataaa

SEQ ID NO: 445909 - DNA, 533 bp, Homo sapiens
ctctacaagggtcaagagccacgcatctttatttctttgtaaacattaatgcattgtcactcattgtgtcatggttgggaaggaaacagcactcatggctcatggtgctaaagatgatataggatcaatgaaagactaaatcatcaatacatcaatctgagtgctaccaacctaagagactaatgtgcaaattaatgacctttaaaattcaaggaatgtacatacatcaatctaattgaaagaagaattgataaagtgttccrtcatttactgtcacaaacaggaaggagagattaatgacacatgttgatcaaatgcagcacttaaagagtaagatatcattttgccatcatcacaagccctgatctagtcttgggtttcttttgtacgaagattggagggggaatatgactaaccagatgtagtaagactaccatgactctccagatacataagaaaagttttctatgatcgaaaacacacccactcagcagtttgtaccaagattacagattcatcttgggaacagggaa

SEQ ID NO: 445910 - DNA, 608 bp, Homo sapiens
tattttgacatcatgatagctttgtttttattcatgaaactcctctcttattaaataaaaaaaagaagaaccgttgagataaacgcagtattattacagggcagttctcaatgtcagtattgcctttgactatctaggttatagagaatcaactggagaagggggcacaatgtacaatctaggaagatagtcacttacaatcattttaaataacacccttcttttcccagcagctgccttgggaacrcagaccaccctcttatctcttgtaacccttctcatttagtgagcatcggaaagtaattttctgtaagtgtggaagagattatatgttgaacatacactgtgtgcagatataatgcattatttcttacatatactctctacatacctctggagattcacaggagggagtttttccagcatttgcagaaagaatcgctgaattcccttgagcttcttggcctcttatcattcctgacaccagtctaaactttactgaagcttttccttcagaaaactgcttttttttttttttcttttttattctggatgtccctttatcagccatccccctcccccagaaaactctaattatctttcactgg

SEQ ID NO: 445911 - DNA, 598 bp, Homo sapiens
tcttgttatgccttttcatttcaatgtttctaaggctaggcatggtggctcatgactgtgatcctagcaactcaggaggctgaggtggaggatggattgaggacaggagatcaagaccagtctgsgcaacacagcaagactttatctctgcatttttttttttaattagcctggcatggtggctcaggccttagttttagctacttgggagcctaaggtgggaggatcgtttaagcccaggagtttgaggctgcagtgagccatgatcgggccactgccctccagcctgagtagctgagaccccatctctacaaaagaaaaaaaaatgtcaataacgttttaagaacattaaatacctcaaacattccctgaaagtattgagaagttaaatatatgaaggaaatgtatttctattatagacttccaaaaactattttaaagagagctcactttccttcaatcttcatttcctgtagcatctactaacatttacctcagttttaaagagagttcacttctctccaatctttatttcctgtagtatctgctgaaatttatctgaattttcccgtagcatctactaaaatttacctgaatt

SEQ ID NO: 445912 - DNA, 592 bp, Homo sapiens
aagtcactgcagatggggtgcatagtaagagaactagaattagaaaaagagcttgaagatgtgactgaattgctgccctctcatgatacaacttgaatggatgagaagttgtttcttatggatgagcaaagaaagtagtttcttgagatggaaactgctcctggtgaagatgctgtgaatgaatattgttgaaataacaacaaaatatttagaatattttataaacttagtgattaaagcagtgtcagggtttgagaggattgactctaattttgaaagaagtttcactgagggcaaaatgttatcaaacagcattgcatgttacagagaaagctttcakgaaaagaagagtcaatcaatgcagcaaactttgttgttttcataagaaatggccacagcccacccaaactttcagcaaccaccaccctgaccatcagcagccaccaacatggaagcaagatcctccaccagaaaaaagattatgacttgaagtctcaggtgatcattagcatttttagcaatatagtattttaaaattaaggtatgtacattgatattgcacatttaatagactatagtgtaaacataagtt

SEQ ID NO: 445913 - DNA, 602 bp, Homo sapiens
tgttggttgttctcactgattttgtttgtgtgcgtgtgtatgtgtgtgtgtgtgtgtttgccatcagaattcttggaaagataaagatgattccaaactctagaaaaaaatacctttcaaacctgtctccccttaaaggaaggaagtcattgaatgtttttacaaggttcctccacttgaaactctaaacttctttatcatatgtatataaaataaattattggctaaaatatggtatatatccaatcgagcacagaatgttttccagcccctaagtttcctacatcccagccggatagattgaatgtgaattttagtaaaagaaaacaattgctgcagtgaatagatctaaagtaaaaacagtgacttaaacgtatattgagttaattagtaatctctgaagaaagaagagaatagtgttgaagtagaagtgtgagatacgcattgaccgattgttaggcaragaatgacctttgaaattgagctacatgttaagaagggtgtaatatactctaaactccatgcagtttataaagaagcagctcctggaaagagatacatgtaacaggcgcaatctacagccaggcttttcagtcaaatta

SEQ ID NO: 445914 - DNA, 553 bp, Homo sapiens
tcattgccccaaaggaaatgcaggctttcgctacacatttctgagggagattgagcaagataagaaagttggaactgatatttgacttttaacttctttagaccttaaagttagaattttaaactttctttggaatttgacttataaaggcaataggaattaatctaatgagctgaaatttctccttcataatttgctaggttaagctttatttttaatttgcgacatcctatgctacattattatttagcctaaccgggtaaaatatattggatgaacagattgggcatactttggggcagaaattagrctagagggtaaatcttcaaccttggagtaaaatatgatcctggaataaattaatgtgctgctctgaccaatttcatggcttcaagagcaaatggtagcaggccactgccagtcccatgagcatacccacggcaggatgttaaattgaaagagcaagtcttttttccttcagaaaagtctctattttaacatttaaaagaaagactcaaattcattccaacagctttatcaggctttgccacaa

SEQ ID NO: 445915 - DNA, 580 bp, Homo sapiens
tgcttgtcatctgaaaggatgtcttaccctggctcaggctgtgggggtagctgcagtagaagcttgccttgggattatgagaacagtaaaattagcatgatgcttgcagccagcttcaccatagaacatcctacttattgaattggagtgttctgaatgggcaggctgagcttggttaggatagacagagagacaragagagagagagagaagagagaagagagagattgagattctgtagtgctccagattgaaagcaggtagtcaaaggtaaaataaatttcagtagcctgttccttcctgagtattcagcagccctggttcagggatttttccatttgcaaggctcttgaaatatttttctggctaaattctttttctttttcttttatttttatttatttattttatttttggctactaggtggttttgatgaatttgctgcgatccaggagtgttcaagtatttcttttagagttggctttggctcagattatggttcaacagccttgaaatgagatcagggaatataaacctgggctattcttttgtaggtcttttgctggtggaagggagact

SEQ ID NO: 445916 - DNA, 580 bp, Homo sapiens
tgcttgtcatctgaaaggatgtcttaccctggctcaggctgtgggggtagctgcagtagaagcttgccttgggattatgagaacagtaaaattagcatgatgcttgcagccagcttcaccatagaacatcctacttattgaattggagtgttctgaatgggcaggctgagcttggttaggatagacagagagacagagagagagagagagaagagagaagagagagattgagattctgtagtgctccagattgaaagcaggtagtcaaaggtaaaataaatttcagtagcctgttccttcctgagtattcagcagccctggttcagggatttttccatttgcaagrctcttgaaatatttttctggctaaattctttttctttttcttttatttttatttatttattttatttttggctactaggtggttttgatgaatttgctgcgatccaggagtgttcaagtatttcttttagagttggctttggctcagattatggttcaacagccttgaaatgagatcagggaatataaacctgggctattcttttgtaggtcttttgctggtggaagggagact

SEQ ID NO: 445917 - DNA, 670 bp, Homo sapiens
tgtgtgtgtttagagagggagagattaaagctgttttcaccgtaattattctttttaatatctttggtataacttcatatctttgatataatagaggagctcttccagaccaggttcttgaaaacccctcaaaatgttttaycgtgggattggacctcattatggaatggaaataccaatattcataaatccttgaccaaaatgagtctaaccttctgttgtcattgttattattactcaaataactgacattcacaaagtgtaaagttatataatattatatgatcctaatactctaaagagttacttgggttgatgcattttctgtattgtattataactttcttgagaggattacctgaactcctagtgcaaatttttgcatataacaagtttcaaaatttgtaggcattacatttgaatttactcagaaggttaaatattttctctttctttcacttagtaatatatttataatcttggatcttttagttgtcactccagctagtcttccaaatgggtattataaagaatagacatcaatgcatccaaacccttcacttttggcttcggcttggcttctcttttctgtgcacaatgcaaacatctgaggcactttttcctgtgttttcctttaaagcttaggttaatcctagaactaatcagccat

SEQ ID NO: 445918 - DNA, 670 bp, Homo sapiens
tgtgtgtgtttagagagggagagattaaagctgttttcaccgtaattattctttttaatatctttggtataacttcatatctttgatataatagaggagctcttccagaccaggttcttgaaaacccctcaaaatgttttatygtgggattggacctcattatggaatggaaataccaatattcataaatccttgaccaaaatgagtctaaccttctgttgtcattgttattattactcaaataactgacattcacaaagtgtaaagttatataatattatatgatcctaatactctaaagagttacttgggttgatgcattttctgtattgtattataactttcttgagaggattacctgaactcctagtgcaaatttttgcatataacaagtttcaaaatttgtaggcattacatttgaatttactcagaaggttaaatattttctctttctttcacttagtaatatatttataatcttggatcttttagttgtcactccagctagtcttccaaatgggtattataaagaatagacatcaatgcatccaaacccttcacttttggcttcggcttggcttctcttttctgtgcacaatgcaaacatctgaggcactttttcctgtgttttcctttaaagcttaggttaatcctagaactaatcagccat

SEQ ID NO: 445919 - DNA, 670 bp, Homo sapiens
tgtgtgtgtttagagagggagagattaaagctgttttcaccgtaattattctttttaatatctttggtataacttcatatctttgatataatagaggagctcttccagaccaggttcttgaaaacccctcaaaatgttttatcgtgggattggacctcattatggaatggraataccaatattcataaatccttgaccaaaatgagtctaaccttctgttgtcattgttattattactcaaataactgacattcacaaagtgtaaagttatataatattatatgatcctaatactctaaagagttacttgggttgatgcattttctgtattgtattataactttcttgagaggattacctgaactcctagtgcaaatttttgcatataacaagtttcaaaatttgtaggcattacatttgaatttactcagaaggttaaatattttctctttctttcacttagtaatatatttataatcttggatcttttagttgtcactccagctagtcttccaaatgggtattataaagaatagacatcaatgcatccaaacccttcacttttggcttcggcttggcttctcttttctgtgcacaatgcaaacatctgaggcactttttcctgtgttttcctttaaagcttaggttaatcctagaactaatcagccat

SEQ ID NO: 445920 - DNA, 451 bp, Homo sapiens
gaaataccaatattcataaatccttgaccaaaatgagtctaaccttctgttgtcattgttattattactcaaataactgacattcacaaagtgtaaagttatataatattatatgatcctaatactctaaagagttacttgggttgatgcattttctgtattgtattataactttcttgagaggattacctgaactcctagtgcaaatttttgcatataacaagtttcaaaatttgtaggcattacatttgaatttactcagaaggttaaatattttctctttctttcacttagtaatatatttataatcttggatcttttagttgtcactccagctagtcttccaaatgggtattatamagaatagacatcaatgcatccaaacccttcacttttggcttcggcttggcttctcttttctgtgcacaatgcaaacatctgaggcactttt

SEQ ID NO: 445921 - DNA, 621 bp, Homo sapiens
gttcctacttgcaaaaaaaaaaaaggatctgacaacttgtcaccttggaaaggttccatttcattttttgtgaactttgttttttaagtgtgaagcagagaaatcttcatacaccacagtgcatacacctcgccttatatccacagactaattcacaggaggaagtatgcatacatcaaatgaccaatgtgcaaggttgaagggcttgaaacactgtcttcttacagttttatttattttatatgagtttagaaacagagaattcttcttaatgtataataaaaatatgaaaaccccactgatactgttgatgtgttttcatgtaaccatgcaagaacagcttcttaatcagccagccactgttgcagcccgaatttaacarttgtatagaaccatacagcatgcatcttcttgcatgtttgcttttgttgggccaaatcaagccactgtatactacttactttcatctgacttctaaaaatccattttttatcttctccctcaatgtctcgagtctattactgtaaaacaactaaaatcatatggtaaagtacatggattattgaaaaacagagaaacaaattacacatagatacactcattactttctaaaaagttgat

SEQ ID NO: 445922 - DNA, 621 bp, Homo sapiens
gttcctacttgcaaaaaaaaaaaaggatctgacaacttgtcaccttggaaaggttccatttcattttttgtgaactttgttttttaagtgtgaagcagagaaatcttcatacaccacagtgcatacacctcgccttatatccacagactaattcacaggaggaagtatgcatacatcaaatgaccaatgtgcaaggttgaagggcttgaaacactgtcttcttacagttttatttattttatatgagtttagaaacagagaattcttcttaatgtataataaaaatatgaaaaccccactgatactgttgatgtgttttcatgtaaccatgcaagaacagcttcttaatcagccagccactgttgcagcccgaatttaacaattgtatagaaccatacagcatgcatcttcttgcatgtttgcttttgttgggccaaatcaagccactgtatactacttactttmatctgacttctaaaaatccattttttatcttctccctcaatgtctcgagtctattactgtaaaacaactaaaatcatatggtaaagtacatggattattgaaaaacagagaaacaaattacacatagatacactcattactttctaaaaagttgat

SEQ ID NO: 445923 - DNA, 621 bp, Homo sapiens
gttcctacttgcaaaaaaaaaaaaggatctgacaacttgtcaccttggaaaggttccatttcattttttgtgaactttgttttttaagtgtgaagcagagaaatcttcatacaccacagtgcatacacctcgccttatatccacagactaattcacaggaggaagtatgcatacatcaaatgaccaatgtgcaaggttgaagggcttgaaacactgtcttcttacagttttatttattttatatgagtttagaaacagagaattcttcttaatgtataataaaaatatgaaaaccccactgatactgttgatgtgttttcatgtaaccatgcaagaacagcttcttaatcagccagccactgttgcagcccgaatttaacaattgtatagaaccatacagcatgcatcttcttgcatgtttgcttttgttgggccaaatcaagccactgtatactacttactttcatctgacttctaaaaatccattttttatcttctccctcaatgtctcgagtctattactgtaaaacaactaaaatcatatggtaaagtacatggattattgaaaaayagagaaacaaattacacatagatacactcattactttctaaaaagttgat

SEQ ID NO: 445924 - DNA, 529 bp, Homo sapiens
attcaatctttatacttgtgtatagaaaatctaaccttatatactgtattagtccatttttatactgctgtgaagaaatacctgatattgggtaatttataaagaaaaagaggtttaatggactcacagttccacatggctggggaagcctcccaatcatggcagaaggcaaaggaggagcaaaggcacgtcttacatgggggcaggcaagacagcgtgtgcaggggaactgccctttataaaaccatcagatctcatgagacttattcactatcacaaaaataacacgggaaaaacccacccccttgatttaattacctcccactgggtctctccaatgacacwtgggaattctgggagctacaattcaagttgagatttgggtaggggcacagcgaaaccatatcacataccaaagttttatttatatatttcatagacatgaatatcacaaatcacttaacagtattcctatatatctaaagattgtcctttggaaatctgtgatctagatgagataatagcacta

SEQ ID NO: 445925 - DNA, 587 bp, Homo sapiens
  misc_feature (1)...(587): n = A,T,C or G
tttaatggtgttagaaataattttgttttgtgagctgcaggtctaacaaaaataactaaagaaaaatagtccaaaatgtgatgaaaagatatttagatttatcactgaacttcgtctgctgttactcagacctttcctttcaccagctgataataaatgtcatgtatccttcatagtcgtgtcccgaaagaaaaagtagctctgcattgaggtgtaaggttcttcatcttttcaaaaatgacagacattccaaataaaagattgaaggtctaagatgttaatccttcaatgttgaaaaagaaagtttcagaacttggatattctctcgcaatgacaaattatcttaatgtaaccgagatagatggtatcttagcttctcgagtaataagtgaaattacaaatcatatatatcaggtaatattaattcatcctaccaaggatatgctgaaaatctgtaatgtaggtttcgctagctgctttaaaacaataatagastatattatttagagcagatttaggttcacagcaaaattgagcatatgctgtagagattcccattggcaaccccgcccctatcnccattgcta

SEQ ID NO: 445926 - DNA, 457 bp, Homo sapiens
gtcatagaagtagggggtgctcctgtatctgctgttcctataatctttaaagttaactttatccatcataatccttcagttatagttaataattagtaatattagatatccctgttcgcgttgcctgttatttctgtctcttgattggactctaatacaatattgctgttctattgcgtctttttttatggtttgcttccactacttagaaagggaaattacaattttccactctaatgatagatttgtaccatctttwtacctctttcaatttctgctaaatatactttgtggcaataatattacaagtgtataagttaaatatttttttctttttctgattaatggatttttttatcattatatagttataccacatcacctctactaaagtctattttatatgatgttattacagctgtatcaactgactcttgtttagcatttacctggaata

SEQ ID NO: 445927 - DNA, 574 bp, Homo sapiens
atataattattgtctatattatttatgtgtttataaatgacatacatataaagtcttctaggtatttgtcattgactttaccttcaatattgtggtaattgggggccactgcaggggttttagccataagtgccataatcagacaatttttaaagttggacaacattgaagccactgtgggaatgtaaaagggaacatgacagcaggaagactaatttacaggctatttacttgggtaagaaattataagactgcaagttaatggagtgatctaggttttaaatagcataagataaatgtgacagatayatgggaactttttgggtgagtgaattattttaggtgatcagggaaaaagaattcaagatgacttccaagttaactataaatttacctggacaggaattggtacagagattaaatttgcatgtaatacataactagttaatttctatacttgtgtttgcggtgtttctgaaacttccaactggagatgtatgagtagggcattggaaatacaagttggaggagcatagtggattgttgtcatagatgtggaatcatttgtacaaaa

SEQ ID NO: 445928 - DNA, 613 bp, Homo sapiens
acattgatttatttcagaaaaagccaaaggacaaagacatggaaatgataaaagaaaaaaatagaatattagggtaactttagaatagctaatacctaaataatgaaaattccatgactagaaaaaggaatagctaacagaaatatctataattaaataaatagagaaaatcgtactgagctaaaaataaaaagacttacattttggtgtaaaagatttcaaaaggacaagtcagtaatacagagtgttagatagagatagacaagtattgagaatcactattttttctttggaaatttaaaattaccccatgcacctgtgagtttacttcagcctgccaggccccttggcatacagtttggaaactatgaacttaaatgactgcaggtcaggtcatctgagytaatatttaggttgtgagtatgctttctaagtacactacccatatgagcttatcacttgtggaccagttagataataaggcataagtgtattagggttctctcgagggacagaactaataggatatatgtatatatgaaagcgagtttataaaggagaattgattcacatgatcacaaggtaaaattcacaataggccgtctgcaagttg

SEQ ID NO: 445929 - DNA, 585 bp, Homo sapiens
gggccatttgtagttctccctggattgggctgttgtagtttcccattgaccttaatcacagggcatggtaatactaagagacgccctaagggatctcctgtattccatgcatactcttccttacctccactgtggtgtagtagactgatttcatcttgatatttcaggtcaatcaccccagccaacactgtaactcccttccgagcctgttgccttagaggcaggaggagcacaaagtggccaggtggcaatcttacattccagtgtaatggaatcattgttgtgtctcctggtggcagcattcctccttctggaactaaaacggtctaggccagcagaatgttgtgtcatgggaacaggaagcaaacattttgctagtaggtcactaggggtgatggtgagtggtcccacttctacttccaccccttgattcctggacccgtgcatcctggctgtgggggaaacactaccatatacgctaarcattactcaatgcagacacattgcaactctgcggtgatgcctagtcccctaatgtgtcgtgtgttatcttcatgttacaaataacactcaggtataataaac

SEQ ID NO: 445930 - DNA, 499 bp, Homo sapiens
tgggggaaacactaccatatacgctaagcattactcartgcagacacattgcaactctgcggtgatgcctagtcccctaatgtgtcgtgtgttatcttcatgttacaaataacactcaggtataataaacatttcaggatgaccagcgacttctgcaacgacatatttcccctggattttctgaccataaggcaaaactaaaataatctaataataaagatcaaactagaatcagtcctccaagatctaaccacttagacttaaaaattaactatttatttatttattaatttacttatttattttgagatggaatatcactctgtcacccaggctggaatgcagtggcatgatctcggttcactgcaacctctgcctcccaggttcaacagattctcctgcctcagcttctcgagtagctaggagtacaggtgtatacccgcaaacctggccaatttttttgtatttttagtagagatggggtttcccctttgaccag

SEQ ID NO: 445931 - DNA, 499 bp, Homo sapiens
tgggggaaacactaccatatacgctaagcattactcaatgcagacacattgcaactctgcggtgatgcctagtcccctaatgtgtcgtgtgttatcttcatgttacaaataacactcaggtrtaataaacatttcaggatgaccagcgacttctgcaacgacatatttcccctggattttctgaccataaggcaaaactaaaataatctaataataaagatcaaactagaatcagtcctccaagatctaaccacttagacttaaaaattaactatttatttatttattaatttacttatttattttgagatggaatatcactctgtcacccaggctggaatgcagtggcatgatctcggttcactgcaacctctgcctcccaggttcaacagattctcctgcctcagcttctcgagtagctaggagtacaggtgtatacccgcaaacctggccaatttttttgtatttttagtagagatggggtttcccctttgaccag

SEQ ID NO: 445932 - DNA, 494 bp, Homo sapiens
aactaaaataatctaataataaagatcaaactagaatcagtcctccaagatctaaccacttagacttaaaaattaactatttatttatttattaatttacttatttattttgagatggaatatcactctgtcacccaggctggaatgcagtggcatgatctcggttcactgcaacctctgcctcccaggttcaacagattctcctgcctcagcttctcgagtagctaggagtacaggtgtatacccscaaacctggccaatttttttgtatttttagtagagatggggtttcccctttgaccaggctggtgtgaaacttctggcctcaagtgatctgcccacctcagcctcccaaattgttgggattacaggtgtgagccaccacacccagccaaaattacacatttaaagaagtcacttggatgagacagctctcaagcatcattttcttcaataatgagtaagtcaaacttaagttgtcaacccaagaagct

SEQ ID NO: 445933 - DNA, 544 bp, Homo sapiens
acacctcaaatttcaaaaaaagaaaagatgtaaaaaatggacaaaagtataatacccagtactgggattgccggatcgaacggtaattctgcttttagttctctgagaattcaccataccattttccacagtggctgaactaatttacactcccaccaacagcatataartggtcccttttgtctgcaacctcaccagcatctgttatttttttacattttaataatagccattctgactggtgtgagatggtatctcattgtggttttgatttgcatttctctaataatcagtggtaatgagcttttttccatatgattgttagccacatgtatgtcttctttttgagaagtctctattcatttcctttgcccacttcgtaatggggttgtttttctcttgcaagtttaagttccttaaagatgctggatattagacctttgtcagaggcatagtttgcaaatatttcccccattctatacgttgtctgtttactctgttaatagtttattttgctgtgcagaaactcttaagtttaattaga

SEQ ID NO: 445934 - DNA, 559 bp, Homo sapiens
aattaatgttgtgtttaaaatctttctatttagattgggttaaaaccatgattactttcaccccaacctaattgcagtttccagtggttttaccagtgcatcatatcaaatatttaaagtagaaatggtacaaatactatgcaatcttctgcagaaaataacaggaaaggaaacatttttaaactcatgtatgaccatcattatcctgataccaatattatacactggcattacaagcttagaaaactccaggccaatatccctttgaacttagaggcaaaaaatacctagcaaaatactagcaaactgaatccagcaatatgtaaaaagaataaataattcatcacaaccatgtggggtttatcccaggaatgtaaatctttttcaatgtatgaaaagcaatcagygtaattcaccatcaagaaaaatcgcatgatcatgtctatatatagagaaaagaatgtcaaaattcaatgttcattcatgataaaaagaaataaccatttatcacactaggaatagaagagaattttctttcttttttttcagacagtgactc

SEQ ID NO: 445935 - DNA, 544 bp, Homo sapiens
acacctcaaatttcaaaaaaagaaaagatgtaaaaaatggacaaaagtataatacccagtactgggattgccggatcgaacggtaattctgcttttagttctctgagaattcaccataccattttccacagtggctgaactaatttacactcccaccaacagcatataagtggtcccttttgtctgcaacctcaccagcatctgttatttttttacattttaataatagccattctgactggtgtgagatggtatctcattgtggttttgatttgcatttctctaataatcagtggtaatgagcttttttccatatgattgttagccacatgtatgtcttctttttgagaagtctctattcatttcctttgcccacttcgtaatggggttgtttttctcttrcaagtttaagttccttaaagatgctggatattagacctttgtcagaggcatagtttgcaaatatttcccccattctatacgttgtctgtttactctgttaatagtttattttgctgtgcagaaactcttaagtttaattaga

SEQ ID NO: 445936 - DNA, 581 bp, Homo sapiens
ctacccactgattctaaatgcagttcactgatttaattgtggctcatgacaggataggtaatcaaagcagatggcccatgtttctactacattttttaatttactgcatgacagaacacagatcatctaatgggtttcctgtttttaaaaagtagttagtcacattttatttttcttawtccctcccctgatttccttactagtaaaatcacacttagaagctacatagtaaagtgcaccaaagaaagcatcatttttccacttcaggccagtcagtgtttcttactcattaccgagtttctgtatttaacctctcattcccagaactcacagtcttgatattccccatggtttctatggacaaagctgtccctgaggcaaagtgttcttaggatttctactttggcagtcttccaagtgctgagtcctaatcttggaaaacaacagcaacaacaacacattaatgtggcatcaacttgagggatccgtgtctcagatgctcatatgtgttcatacaaggcgtgtgtgcctgatggtttcctaatccacagcaaagtaccttttcccaacacaagtaagaa

SEQ ID NO: 445937 - DNA, 581 bp, Homo sapiens
ctacccactgattctaaatgcagttcactgatttaattgtggctcatgacaggataggtaatcaaagcagatggcccatgtttctactacattttttaatttactgcatgacagaacacagatcatctaatgggtttcctgtttttaaaaagtagttagtcacattttatttttcttaayccctcccctgatttccttactagtaaaatcacacttagaagctacatagtaaagtgcaccaaagaaagcatcatttttccacttcaggccagtcagtgtttcttactcattaccgagtttctgtatttaacctctcattcccagaactcacagtcttgatattccccatggtttctatggacaaagctgtccctgaggcaaagtgttcttaggatttctactttggcagtcttccaagtgctgagtcctaatcttggaaaacaacagcaacaacaacacattaatgtggcatcaacttgagggatccgtgtctcagatgctcatatgtgttcatacaaggcgtgtgtgcctgatggtttcctaatccacagcaaagtaccttttcccaacacaagtaagaa

SEQ ID NO: 445938 - DNA, 626 bp, Homo sapiens
ttagtatttttcaactatgttgtaagttttacccatgcatattttaataaaggtatactttatatagtgtaaaatgcacaaaccttaagcacatatttcaaagattttttgacaagtgaatatatccatgtaacctaccattctatcaagttataatgcggtacaaatgttaatttcatttctattgctattaattagtttggcatattctagaacatatgtaatcatgacatgaaatcaaacagtacgtacacttttgtattttttcactcagtcttatgtctgagtctcactcaggctgttgcatgcatccgttgctttttcttggtataatttatatttttcttattttcattccagtatacaaactgcagcttgcaaattagawttctcacctttagattttttccaagggattaatttgtctttctactgctggccttatagatgtatgtcatttagcatatttgatataagcaacatgctgattgataggcacacaagcacagtgtttgagatgagtacaatggagcggctggagggtttgcttctatgattaccaatttttcctcttgtttacatgtgtttcatctctcaaagcagtgatggatgaaaatgtgtatgga

SEQ ID NO: 445939 - DNA, 533 bp, Homo sapiens
atcattttattcatataatagggtattttctgttgaggtaggtgtttaaagatmtgcatactttatttccaaaggggtagatactccatcaccaacttttaaaattgcatcagtagatagcgtgtaatctatttcctaatccatgtttatctgtgcaactccagacataggggtgaacacagataaatctttatgtgagtagaagttatacaaatgctaagtaagtcatttcttctagaaattatagaactgagaaaacgtttgtctgtctttgaataagacagactgcttctgttgtaaatctcacatctcatgtttgtgcacttatcaaaatcactgagaatgttctcctatttattaatattggaatggagtgctaggaaatatcgtctccaatattttcaaaacagccttcttcacacatcaaacctttacatcatttgaaaaaaaacccactaaattttggctctaataacaacaaattggggcagatagaaaaaatataaggaaacaatttcttttgatttgtaaat

SEQ ID NO: 445940 - DNA, 533 bp, Homo sapiens
atcattttattcatataatagggtattttctgttgaggtaggtgtttaaagatatgcatactttatttccaaaggggtagatactccatcaccaacttttaaaattgcatcagtagatagcgtgtaatctatttcctaatccatgtttatctgtgcaactccagrcataggggtgaacacagataaatctttatgtgagtagaagttatacaaatgctaagtaagtcatttcttctagaaattatagaactgagaaaacgtttgtctgtctttgaataagacagactgcttctgttgtaaatctcacatctcatgtttgtgcacttatcaaaatcactgagaatgttctcctatttattaatattggaatggagtgctaggaaatatcgtctccaatattttcaaaacagccttcttcacacatcaaacctttacatcatttgaaaaaaaacccactaaattttggctctaataacaacaaattggggcagatagaaaaaatataaggaaacaatttcttttgatttgtaaat

SEQ ID NO: 445941 - DNA, 533 bp, Homo sapiens
atcattttattcatataatagggtattttctgttgaggtaggtgtttaaagatatgcatactttatttccaaaggggtagatactccatcaccaacttttaaaattgcatcagtagatagcgtgtaatctatttcctaatccatgtttatctgtgcaactccagacataggggtgaacacagataaatctttatgtgagtagaagttatacaaatgctaagtaagtcatttcttctagaaattatagaactgagaaaaygtttgtctgtctttgaataagacagactgcttctgttgtaaatctcacatctcatgtttgtgcacttatcaaaatcactgagaatgttctcctatttattaatattggaatggagtgctaggaaatatcgtctccaatattttcaaaacagccttcttcacacatcaaacctttacatcatttgaaaaaaaacccactaaattttggctctaataacaacaaattggggcagatagaaaaaatataaggaaacaatttcttttgatttgtaaat

SEQ ID NO: 445942 - DNA, 583 bp, Homo sapiens
aataatataaaaacttacaacatagatttaaaatacaaagcaaatatttttattgtgataggcattgtgtttactaaaaattcattactccatttgttcatgaccaacattcaacagggttaacccaaaagcatttctgcatttaatttgcttccaaaaagagtcttattttattattttaagagttcttaatgttatttatttttatttccatttattaaattacattactcaaaattaagtaaagtttttctttctatctgggcaaattctgtgtgctggcccagttgcaratgtactgatagtcgccattggtacatagttttttacttaatggaagtcctcacagttattttcttgtcaaaattttcaataatatggtaacaatttctatgtgtaattcaaagtaataaaatggcatttttatatgtgttccataatccagatattttacatatgattttcaattggtgacattatgtatttcagattctgatccaaactctattgccttgctaacaattaatatggcactgaatcaaagcctttctgaagttaagacctaaggcatctttggttttcc

SEQ ID NO: 445943 - DNA, 598 bp, Homo sapiens
ttctaacaatgtgcctgaggtctttttgtatgcctctccttttattgttgaaatctgacagttgtgtataggatagtagagaataaggtwaatagttttcacatggggatttgtgttcatctaaatagggattggactgggtttgagtttgctgttgctatggttacccacagtacaacagaggcttcaaattcttcttggtcaccttaccttttttcagtatatcttatttggtaagtgggggttaccaaagcctgctcctctttgtgttctcttcttagatttctcctttgtaccactctgtagagagaacctgtgtcttgtagctatatttgaaagtttcttacttgatgcttgccagcatagcagggatgaagaaccagtacatgccctgacctttatacttagcctcagtcaggcaggcattgtgaacccgggtggcagtggcccagctttcactaatgatccttcccctcctgcaggtgcaacactggacctagtacgtattcctggtcctatggtggttgttcttctgttgttcttatcttcttccctgaattgctgcggatttccagtgacctgaggctggtttttgttg

SEQ ID NO: 445944 - DNA, 598 bp, Homo sapiens
ttctaacaatgtgcctgaggtctttttgtatgcctctccttttattgttgaaatctgacagttgtgtataggatagtagagaataaggtaaatagttttcacatggggatttgtgttcatctaaatagggattggactgggtttgagtttgctgttgctatggttacccacagtacaacagaggcttcaaattcttcttggtcaccttaccttttttcagtrtatcttatttggtaagtgggggttaccaaagcctgctcctctttgtgttctcttcttagatttctcctttgtaccactctgtagagagaacctgtgtcttgtagctatatttgaaagtttcttacttgatgcttgccagcatagcagggatgaagaaccagtacatgccctgacctttatacttagcctcagtcaggcaggcattgtgaacccgggtggcagtggcccagctttcactaatgatccttcccctcctgcaggtgcaacactggacctagtacgtattcctggtcctatggtggttgttcttctgttgttcttatcttcttccctgaattgctgcggatttccagtgacctgaggctggtttttgttg

SEQ ID NO: 445945 - DNA, 546 bp, Homo sapiens
taaattaatgcagtttggcaattatagtatgaggtagacagggattattagtttcatttagccgatgaattaggctagaattttcacttcaattttaacaaggcaaaaatttaacattattgccttctaagaatgtattgctcagtgtaataaacttattaactagaagaatttgtgataagaccaaagttatgtccaccaaaatcaacccttgacatgcatacacacagacattcacaattaagtatgattaattgcaaggcaattacgtcattttatttctatcattttacttctatatcatctttgacatgtttgaaactagagatacatctagcaagtcaatattgtatccttataacttgatgagttctgaggcagtctcttacagtcagatttatagtctattttacaagaaggaacttagatgagcacttagagaggatakactgaaatatgtggtaagacccttaggctagtctagaggctttcaacactttactctgaagaccacatttttagaacagattagcaactgcgattaca

SEQ ID NO: 445946 - DNA, 482 bp, Homo sapiens
actgttaatccatttcccaccttagacggaagcaatatctcctcgaatttgaagtctcygtggcattcagggtaacacagcaagagtaaattacaaacatgcccaactcctgactacattaacacaaacccttgcactaaaggtctagcacagggaaaagaatgcccatttccagggataagactgagggaaataagctccatggtccacaatgtctggttttcaataataatgtaaaaaatatgtggcatatggaaaggcaagaaaaacaacacactcccaagacagagagcaataatcacaaatagatataacatagatcttgacagaaaattaaaaatgcatatgattaatttgttataggctttaaaaggaaaggtggataaaaggcaagatcagatgagtgatttcaacagaaaatataagaaaaaaccaaataaaaatgttagaaattagaaacatgataacaaagacaaagaatg

SEQ ID NO: 445947 - DNA, 482 bp, Homo sapiens
actgttaatccatttcccaccttagacggaagcaatatctcctcgaatttgaagtctccgtggcattcagggtaacacagcaagagtaaattacaaacatgcccaactcctgactwcattaacacaaacccttgcactaaaggtctagcacagggaaaagaatgcccatttccagggataagactgagggaaataagctccatggtccacaatgtctggttttcaataataatgtaaaaaatatgtggcatatggaaaggcaagaaaaacaacacactcccaagacagagagcaataatcacaaatagatataacatagatcttgacagaaaattaaaaatgcatatgattaatttgttataggctttaaaaggaaaggtggataaaaggcaagatcagatgagtgatttcaacagaaaatataagaaaaaaccaaataaaaatgttagaaattagaaacatgataacaaagacaaagaatg

SEQ ID NO: 445948 - DNA, 607 bp, Homo sapiens
tggattctgtgctaaaggctttttataatattatttcctttaattaatcccatcttagggatgaggaaacaggctcagaaaggtgaagttacttactttgctgtgcagacagggtgaatttcaggtttttttgacktgagaatccaaaccagatgcatatacacgaagctcagttgtcctctgccagggtgagacttctgtggggcttcaggagaggaagaggatggggggatgtgggggtaatgctatagaaagcaccagaagataactggaagagagatgatgacaaaaaagggggtcctggttaggtttcttgatcaaacatcttgaggaattcagcagcttgtcataaactaaaaaaaggcacacttgcacattaaaagagaaataattaaacagttgcatgagacacttatgttcctttctcccctcaatttggatttgatgggagggaggccacatgggaggaagcaagctgtttggacgcgttgactctgtgccaggcactgtgccaggaaccttatggaaatatcagcccatctagtcttcgccatgactctgagaaataatattaaccaagaacgtcacttaggaatgcctaccgtag

SEQ ID NO: 445949 - DNA, 567 bp, Homo sapiens
agaaccactgtcctcagatgactaggcatgtcatatatattatcttgagtcaccctgccagctagctgtcatgatgcccactttgtaaatgaagacactgaggctgagagaaggctgacatcattgtcagtagcagggctaagaactgtgccacgtgttttcaatactgaatttagagaagcagcaaatgaagaccccggcccagttaaccttgggctaacactaaaatatagattgtatcttctcttttttaaccacagtgaatgtcttagaggaggggctggtgtttcattatgttttgtttgtttgtttgtttgttgtttttaagtamgctggcgacatggcacaggctctggaaccaagcaccttcacttattatctctgaaaccctggcatgttacttaacctctttggctctcagttttcttctctgtaaaatggaactaatgattatacctcctcatagggttgtttggggatgaaatgagatcacgtgagcgaagcagtgcctggcagatagagactcagcatcaacaaatgtgagctgtcattcttacgagcaagttt

SEQ ID NO: 445950 - DNA, 525 bp, Homo sapiens
gagctggggctgccttcacatcaggcatggtggagctcatgcatgtagctgttgattggaggcctcagttcctccccacataggcctcttcatggggctggggctgctcatgacacattggctgacttccctgaaagcaagtggagagagagagaggaagagaggaagagagggagcaagaagcctggatggatgccacagtgttttatgtcagtgtttatgtcagagtgacataccatcacttctgccatattctattggtcacacagaccaacccaggtactgtgtgggaggggactacacgggggtgtgaagaccagggaggcagagaccactggagtatcttggatgctggtgaccacagtgtrtttctctgaatgatgaggacattctcctacaaaacaaccgtactatgaccacacattaatactgtactactacctaacattcactctgtattcaaattctcccagatgtctcaataatgtcttttttaatcagtctagatccattccactttcttga

SEQ ID NO: 445951 - DNA, 580 bp, Homo sapiens
gtgccatgggtagggctgtcttggaatcccacagacccacattcaaatcctggctttgcccctaagagctgcctgagctcaggtgagccatgcaccctatcacatctctcctctgtaaaatgggcacagcccacctcacagaggagctggaaggatgtaatgaggtgccttcagtttccctcaaggtctaggagggtgttaagtccaccggaagtagaacgaaactcctaagtcgattcccggctcttctgctcctcagctgtgtggcctttcatagcctccttcatctttctggggctcagtttcaaaatccgcaaactaaggggcatgatatccatctgacagggttactgtgagaaattcaatgcatttctatgtgtaaagtgcctggacttcagtaaacactattaaaagaagcagtaacagagtggttaaaggctctgayatttacctgctgtgtgatgttgagcaagttaccttccctctctgtgcctcagtttcctcacatgtatcatggagatactcatgcccttatcttaaaggcttgtcctgagggttagatgagacattataaaggcct

SEQ ID NO: 445952 - DNA, 611 bp, Homo sapiens
gcatctatgatgcacaaggatagcatgacacaaagaggctgaggtgcttgcacaaggtgatttatggagctgggtgtgcaccttggcattctggttccatagcctgtgtttttctccactgtgcatgcaaagtgctcaacacagtgcctggcacagagtaagctcccagtaatcaaaagagccatcaatccaggctcgtttaaaggtggtggtggacagggcaagggtttctcccaggataacacgtagtgaagcatggagttgagtgatataaaaaataatcactttcctagagtctgggagaactgaattattatttcccagctgccactaatctgcagggggaccttgcagcratgtttccctctcagacagagactcaattttcacaaccataaaataatctaaggagtctcaagtacccttctagccctgatattctaagagtctgtgacttgatgatgcctgtgagtttggaggtctcatggctgggcactgagtttccaagattgcacatggtttggggtgctggagctgtggggaaatcatgaggagtcactctgcagcatctgttccctgctcctccttctgggtgctcctccaccaagggg

SEQ ID NO: 445953 - DNA, 611 bp, Homo sapiens
gcatctatgatgcacaaggatagcatgacacaaagaggctgaggtgcttgcacaaggtgatttatggagctgggtgtgcaccttggcattctggttccatagcctgtgtttttctccactgtgcatgcaaagtgctcaacacagtgcctggcacagagtaagctcccagtaatcaaaagagccatcaatccaggctcgtttaaaggtggtggtggacagggcaagggtttctcccaggataacacgtagtgaagcatggagttgagtgatataaaaaataatcactttcctagagtctgggagaactgaattattatttcccagctgccactaatctgcagggggaccttgcagcaatgttyccctctcagacagagactcaattttcacaaccataaaataatctaaggagtctcaagtacccttctagccctgatattctaagagtctgtgacttgatgatgcctgtgagtttggaggtctcatggctgggcactgagtttccaagattgcacatggtttggggtgctggagctgtggggaaatcatgaggagtcactctgcagcatctgttccctgctcctccttctgggtgctcctccaccaagggg

SEQ ID NO: 445954 - DNA, 587 bp, Homo sapiens
gagggattttttctgtaaccagcagctttctggtcacagcacatgtagcagtaaccagttgtctggtgtcgctttggcattccctaaagcttatcctagcgtctgtgcccccaacctccccagaaattctctaagtcgtttgctagcctgaattaaccccttcctgcttaagctagctgtagtgggttctaccctctgcaactaaactctggttgataccagttataacctacatcctgggtctgctggacaagcagaagagtgccagtcactgaggattagaacaaagttcccacaacagccctgaagggcaaccgggctatgcacttctacatcatgggccaccagggagctgagtaataaaaccactctcaggcrtcagaggactcagattcttgtcccagctcccccactaacctgctgtgggaccttatacaggtaattttcgtcatctgaacttcaagtgactaatctgtggcccaggcaggagaggatgggggcgagagtgtggatttcaggatcagatgggccaagttcaacctctcagagcctaagttccttcatttgtgaaacagggataacagggt

SEQ ID NO: 445955 - DNA, 587 bp, Homo sapiens
gagggattttttctgtaaccagcagctttctggtcacagcacatgtagcagtaaccagttgtctggtgtcgctttggcattccctaaagcttatcctagcgtctgtgcccccaacctccccagaaattctctaagtcgtttgctagcctgaattaaccccttcctgcttaagctagctgtagtgggttctaccctctgcaactaaactctggttgataccagttataacctacatcctgggtctgctggacaagcagaagagtgccagtcactgaggattagaacaaagttcccacaacagccctgaagggcaaccgggctatgcacttctacatcatgggccaccagggagctgagtaataaaaccactctcaggcgtcagaggactcagattcttgtcccagctcccccactaacctgctgtgggaccttatacaggtaattttcrtcatctgaacttcaagtgactaatctgtggcccaggcaggagaggatgggggcgagagtgtggatttcaggatcagatgggccaagttcaacctctcagagcctaagttccttcatttgtgaaacagggataacagggt

SEQ ID NO: 445956 - DNA, 559 bp, Homo sapiens
tcgcacctattaagtgagaacatgcagtacttggttttctgttcccgtgatagtttgctaagggtaatggcctcaagctccatccatgtccctgcaaaggacgtgatctcgttctttattatggttgcatagtattccatggtggatacgtaccacattttctttatccagtatatcattgatgggcatttaggttgattctgtgtctttgctatggtgaatagtgttgcagtgaacatacacgtgtatgtgcctttataataggatgatttccattcctttgggtatatacccagtaatgggattgtgagtcaaatgttatttctgtctttaggactttgaggaatcgccacactgtctgaggaaccttcatttgttggraaccacccaacacagagtagatgctcaggaaataaatatgcagtggatgagtaatatgtgcagaatgacctgactgagtcacaaagacctttctggttgcatttgcatctgtcattgtgtacatagagcccttccccttagttcagagtctctccccttggcactgtggagatttggg

SEQ ID NO: 445957 - DNA, 538 bp, Homo sapiens
ttctcagttctgtaatttcctttttttttttttttgagatagagttttgcttgtgtcacccaggctggagtgcaatggtgcaatctcggctcactgcaacctccgcctcctgggttcaagcaattctcctgcctcagcctgccaagtagctgagattacaggcacctgccaccacacctggctaatttttgtatttttagtagaggtggggtttcaccatgttggccaggctggtctcaaactcctgcttcaggtgatccacctgccttggactcccaaagtgctgggattacagatgtgagccaccacacctgaccagtaatttccatttttaaagagcctagatttttttagcagcattctcatcttaaatcaatttttttattatattatcacagttgctagggactccgtgtttgacaacttcaatagcwgaatctcgtgaggtttttgtttttgttttttgtcttggtttttgatcatttggttttgtctttttgcatgcctggtaatttttttattgtgtataaaacattgt

SEQ ID NO: 445958 - DNA, 554 bp, Homo sapiens
acacataaaacaacatggcatcatttataaggaaacatttacatatttaatatgtcagagtcattgtctagggcatggtggaaaataaggataaatgggaacttttaaaaatcttgttggaagaaggtgatggctcaaataagatttccttcctccctgtctctctctccctctgccccttctttcctcccttcctccaacagatgctaactggatgatggaatgaacaagattctgtgttaagtgctgtggaggaaataaagatgatttccccattggcttggccttcaagaaccttaggcaagggcctaaggtgaatacaccagaagccttagtagcaatactctgtcccagagttcagactcataaacacattcctgctctgcttaaaatcaacaaatgctgttttggatgtgtaagagctcttaaggatgacagcaacactcagtaaagtaaataagctaygtgactgaggccagaagtgtcacactgccgtctctttccttagcaggcttttctgataatacatatgacatagctctcaaatgcaaatg

SEQ ID NO: 445959 - DNA, 472 bp, Homo sapiens
caatcaaaactgcaatcaaatgacatgtggctctccctgaggcttcatcgctcactctggccacacatctgtaaaagtgatgagtcagctgttcaggggcacgtgggtgaaagggatcttaagcattctttagctcaggcaccatttgaggactctttctctcaacataccccaaccaaatggtcayccagcttctgtttaaaacctttcaagggggttcatttcagctttgaataattctcttagaatgtctcctattagacattcctcctattagatgaaaatccgtattcctccctctcactgtcctttttcttccttcatttcttccttccacctttcttccaagttttcttccctctctcctctcacttcaggaagatttcacttgtctacccaccagaggccaggcacatcctgtgccaggccatgcaactactaggatagatgttacaaagtctttgttttaaac

SEQ ID NO: 445960 - DNA, 593 bp, Homo sapiens
ctcaaaaaaaaaaaaataacaacaacaacaaaaaaacctttttatccccctaaaaagttctgtcatatcccgcctttgcattcagtycttcctgtaacctccagacccaggcacctctgatctctttgtcactatgattttatttttcctagaatttcatattcattggatcatagtatttgtcttttatgtttgtcttctttcacttagcatattgttcttgagacatatccatgcaggcgatatatctctgctattcatttttattgcgagtagtattctatggtacatttatcacaaaatgtccaaaggttgatggacattttgtgatatccataccatagaatactactcagcaataaaaatgaataccatttcagttgcttccggtttggagctcttatgaacaaggctgcaatgaacatttgaggaggagtctttgtgcggatatagtttttctttctcttggataaattcctaggagtagaatgatggggttgtatgataagtgtctgtttgactttacaagaaactgtcaaatttttccgtctatagtggctggaccactttgcagctgcctcagaattatgtgt

SEQ ID NO: 445961 - DNA, 593 bp, Homo sapiens
ctcaaaaaaaaaaaaataacaacaacaacaaaaaaacctttttatccccctaaaaagttctgtcatatcccgcctttgcattcagtccttcctgtaacctccagacccaggcacctctgatctctttgtcactatgattttwtttttcctagaatttcatattcattggatcatagtatttgtcttttatgtttgtcttctttcacttagcatattgttcttgagacatatccatgcaggcgatatatctctgctattcatttttattgcgagtagtattctatggtacatttatcacaaaatgtccaaaggttgatggacattttgtgatatccataccatagaatactactcagcaataaaaatgaataccatttcagttgcttccggtttggagctcttatgaacaaggctgcaatgaacatttgaggaggagtctttgtgcggatatagtttttctttctcttggataaattcctaggagtagaatgatggggttgtatgataagtgtctgtttgactttacaagaaactgtcaaatttttccgtctatagtggctggaccactttgcagctgcctcagaattatgtgt

SEQ ID NO: 445962 - DNA, 530 bp, Homo sapiens
ataccctgatttgatcatcacacattgtatgcatgtatcagaatatcacatggaccccccataaatacatacaattgttatgtatcaawaaataatcttgcaaatagaaggtggagcatgggcagtggttgggcttgttggagagtgagcagaaggaccaaatgacctctggatgtctcttatgtctcctccagctctggttctgtgagctgaggcttagtgagtttcaaaatgttgcctactacatgttcgcaactgctaaccgtggtctaccatggaaactcaaaggcatggatattcagggaggaatctcatttttccctaggctagtactgtgtacgaggtgagacttttttttctttttggccttcccctagtgttacaaatcctgtcgagtgtctgaaataccatccatgtgaaggtttcccatgataactgtaacagctgccattcatccattcaacacatatttattgaacacttctatgaggcagccactgttccaggcacttggcaagcagctatgtaca

SEQ ID NO: 445963 - DNA, 337 bp, Homo sapiens
ttctcatctgtggagtgggtgtgtattactccattctcacactgccaataaagacatacccaactgggtaatttataaaggaaagaggtttcattggctcacaggtcagcatgtctggggaggcctcagaaaacttacaatcatggcggaaggggaagcaaacacatccttcttcatatggtggccggaaggaggagaatcagtgcccaggaaagggggaagcctcttataaaaccatcaaatcttgtgagaactaactcaytattgtgagactaggatgggagaaaccacccccgtgattcaattatctccacctagtccctcccacgacacgtgg

SEQ ID NO: 445964 - DNA, 635 bp, Homo sapiens
cttttacaaataactgaggtcagcacattcacaaggtacaaataaccaaaattaattgtatttttatatactagcaattaacacatggaaaccaaaagataaaacatgacattatttataatcactcaaaaactgaaatactcaggtataaatctagcaaaaaatgtgcagaacttgtacaatggcaagtataaaattctgttgaaacaaatcaaaggtgatctaaataaatgatgagacatactgtgttcactaaacactgaacatagtaaagatgccagttttcccaaatgatctatagattaatgcaatttctatcaaaatcccagcacaatattttgcagatatataaaacattactctaaaatgcaaaaatttgatgtaaagcatttcaactagaacctggtagatagtaaaagatatacaaatgttagctaatattactattggtaatagtatagaagtactacacttatgtgaatgttcattgaatagttcatagactttaagttatagattccatcaatcaaatgagagagwgaaaaagacagataactaaaactactctctcataatgagtttacaaaacaaaattccaaaatactgaggaaaacttttagcaataaagagaacca

SEQ ID NO: 445965 - DNA, 523 bp, Homo sapiens
  misc_feature (1)...(523): n = A,T,C or G
gtctacacaattccctctgtctcttttttttctctctctcatacgcatgcacacattcatgcacatggaaacagtaaagtaaaaatcttccactgtaaaaaatagtttagatatacttatgtcatgtgggcctgtcctgagactttcagtgccattttttccttaaaggcctaaatgaargactttactattttaggtcagctccatgggccatggtccctgctaataattntgttgtttatttcattgtggtgaatgccagtccttgatttccagtgttctgtgtcaagtatacaggtatgaaatgtaaaagatgggcaataacagattcagccatcatttgctagattggctcccagcacaattaatatttattaaatgcccacaaggaggcatgaaatcatattaggtcttatatctcataccaaactctcatttggactctctttgatatataattcaggttgacatgtcaatgaaatactttaaaaagtaattatattcatgactttttagagaaatt

SEQ ID NO: 445966 - DNA, 523 bp, Homo sapiens
  misc_feature (1)...(523): n = A,T,C or G
gtctacacaattccctctgtctcttttttttctctctctcatacgcatgcacacattcatgcacatggaaacagtaaagtaaaaatcttccactgtaaaaaatagtttagatatacttatgtcatgtgggcctgtcctgagactttcagtgccattttttccttaaaggcctaaatgaaggactttactattttargtcagctccatgggccatggtccctgctaataattntgttgtttatttcattgtggtgaatgccagtccttgatttccagtgttctgtgtcaagtatacaggtatgaaatgtaaaagatgggcaataacagattcagccatcatttgctagattggctcccagcacaattaatatttattaaatgcccacaaggaggcatgaaatcatattaggtcttatatctcataccaaactctcatttggactctctttgatatataattcaggttgacatgtcaatgaaatactttaaaaagtaattatattcatgactttttagagaaatt

SEQ ID NO: 445967 - DNA, 523 bp, Homo sapiens
  misc_feature (1)...(523): n = A,T,C or G
gtctacacaattccctctgtctcttttttttctctctctcatacgcatgcacacattcatgcacatggaaacagtaaagtaaaaatcttccactgtaaaaaatagtttagatatacttatgtcatgtgggcctgtcctgagactttcagtgccattttttccttaaaggcctaaatgaaggactttactattttaggtcagctccatgggccatggtccctgctaataattntgttgtttatttcattgtggtgaatgccagtccttgatttccagtgttctgtgtcaagtatacaggtatgaaatgtaaaagatgggcaataacagattcagccatcatttgctagattggctcccagcacaattaatatttattaaatgcccacaaggaggcatgaaatcatattaggtcttatatctcataccaaactctcatttggactctctttgatatataattcargttgacatgtcaatgaaatactttaaaaagtaattatattcatgactttttagagaaatt

SEQ ID NO: 445968 - DNA, 410 bp, Homo sapiens
agttgatgtatctagcagttatctgtaaaccctcattcgcaagacttgcctttatttgacctgacccagacttcactcagtgcagacagtatagaaaaattcctggaggcatttgtgaaaacaatcagcagcaattgttcaacaaggcagctgcctgaagtagtgatagcaattggagcatacaagaaccaggccaaaaaaaacaaaagaaattgttagagaatgagatgttcacagaggactttggaaagatccactacattcctagtaatccaagaaggccatgcacatacatagggctgtgtgcattcccaaggctatgtttacatacaggaaagagcctgagaaggctctaagcactcacctttagctgacattgaggttttgcrtaagcaggaagtaaaggctat

SEQ ID NO: 445969 - DNA, 630 bp, Homo sapiens
ggtgtttaatatatactaggcactgttctaagcataccataaatattgactcatttaattctcwcaataactctgtgaggcaaattgttaaaattatttctacattaccaatgagaaaactaagtacaagagtacttaagtacaccttttctagagcaacttttgtgaagaataatttcacaatacctatcaagagccttaaaatattcatattctttgactcaatgtagtggaagctgtgatgcattgcccagatccccttcaagacttattcctccagtgctaccagataatagtcctcagctctcagtcctcttaagaaattgtcctcagctggagactcttgccttgacaaggtattcctttggatataccctcattcaatgactgactgatgagaagacataaaagttcagcttcctcactgcatacaggacaactcttcagagctctctctgctccagagctttccatgggatcaaccgaccctttgttgagattctatctcagctgaacttctgtcttgtccaatcctgccttcttcccttcctttccagcggttttaatcctaagagtatgtccttaaaaaaaacttgctgaatactaatctctgtcttagagtctgcttcc

SEQ ID NO: 445970 - DNA, 630 bp, Homo sapiens
ggtgtttaatatatactaggcactgttctaagcataccataaatattgactcatttaattctctcaataactytgtgaggcaaattgttaaaattatttctacattaccaatgagaaaactaagtacaagagtacttaagtacaccttttctagagcaacttttgtgaagaataatttcacaatacctatcaagagccttaaaatattcatattctttgactcaatgtagtggaagctgtgatgcattgcccagatccccttcaagacttattcctccagtgctaccagataatagtcctcagctctcagtcctcttaagaaattgtcctcagctggagactcttgccttgacaaggtattcctttggatataccctcattcaatgactgactgatgagaagacataaaagttcagcttcctcactgcatacaggacaactcttcagagctctctctgctccagagctttccatgggatcaaccgaccctttgttgagattctatctcagctgaacttctgtcttgtccaatcctgccttcttcccttcctttccagcggttttaatcctaagagtatgtccttaaaaaaaacttgctgaatactaatctctgtcttagagtctgcttcc

SEQ ID NO: 445971 - DNA, 580 bp, Homo sapiens
aacttgtcccaggctacctgccttccagctacaaaagaaaagggcttggttcttcccttgcttgaggaggagtctgcatgccaaatttgtgcactcccctgagttctggccaggaggcttctcrccccattcaaattgttacaaagttcagctacagatttccttctccctgtggagttttaccccctgctcctctggctaccctcctgatggatctctgtggtaccaggcaggaatgggctacttggagacccagcgagctccgagggcctttctgctgcttcctgtatttcactcggctccccaagttaactcagctccaggtaaggttggaaacttttcctgcaaacagaccttcggtttctccagtggggtgtgtgtttgggagaggagggcttcccattcctacttctgcagttggggcaatcagagtatatgggggtctcccgggtcctgcaggagcagtctgtttccttcggagggtatgtgggtcctctcaggattgtcagtttgtcttgcagtggatctggagctcaaattcacaatgtgagcctccacacactgctctttccagagctgc

SEQ ID NO: 445972 - DNA, 556 bp, Homo sapiens
attcttttagttttgcttaatgcttgcttcaatgaacaaaccaatttttggagtttcctactccaccatttttatgacatcaccactacaactctttcttgcacaagttaaggtatacttattctcttcccaaaagggtgaaatacaggatcctattagtcaccatatccctttctggaaaggctaatttcttttctagatcagtaaaaagcccacagaggtatttaatatctgaagactaaatttaaaaattaagtattaccaacactgcttatacaaaatagtgcraaaaggggaagtgaatgataaaacacacatgcatataaatcaagcaaaaaaccaaatatacacactgcacaaagtatgtaatagttcttgtttctgtaactggacacgaatccatagtggaaattgaaggtcttttgttcattgcatattccatgctttttttataattacccttcactttacctggtcaaacttttagctggttggatgattcaaatcttcattgtaaagagtctgagtccttagtgatcctgcattaactgggtag

SEQ ID NO: 445973 - DNA, 575 bp, Homo sapiens
ctactcccaacatctcatccgtcttagacctctgcttttaccctaccccagattcatcttatctaaaatttccataygcattggtgccttcacatataatttttaatgtcttctgtttttaatttcaaaggagttctatatttgtgggatgagcaaatagagagagaagaggaatggcaagagttaataaataataaaactaaaaagcactgatagagaaaagaagcacaggtgcccattcatgaaataaaataactattctcacatattctggacatttaactaatatatgtaacatatagcctcagtaaagatctaagaataacttcttctttcaaagtacatgacacaacctttaatttcaaattaattgagaggagtctgcattgcctgaagaaaatctcgtaatactactaaattatttcctaaaatcacagatacaggcacggagttttactttgttatgtattaaatgttttcttctttgccaagaattatcaaaaatttaggttaaaaataaaagaatgccaatcaaggtgtgttatgaagataataagacaggacatggaaacttg

SEQ ID NO: 445974 - DNA, 453 bp, Homo sapiens
ccaaacctcaattcttgacgtctgtgcacccacaggcccaacaccatgtggaagctgccaaggcttggggctttcaccctctgaagcaatggcctgaactgtacattggccccttttcgccacagctggagcagctgggacacagggcaccaagtcccaaagctgcacatggcaaggggagccctgggcccagcccacaaagccatttttccttcctaggcctctgggcctgtgatgggagrggctgccatgaaggtctctgacatgccctggagacattttccccattgtctttgagattaacatttggctccaagttacttatgcaaatttctgcagcagacttgaattcctccctagaagatgggtgtttcttttctatcacattgtcaggctgcaaatttttcaaatttttatgctgtgcctcctattgaatgctttgctgcttagaaa

SEQ ID NO: 445975 - DNA, 511 bp, Homo sapiens
atctctacctgtgtaccttgggtcgagttagttaacctttctgtgccttgattttctcatttgtaaaatggagrtcataatagtacctacctcatagggttcttataaagactgactaagatatgtgaaagttcttgtgaccattaaaaggtaggtaaagtgcttagtttgacacacaataaatgttcaacaaatgtgacaatattaattttaaggcttaaaattgttagttgttttttttttagtgaattggtaaatttagtgaatttgggtgtctagtaccacattttgaatatagttcaattcctcattttaagaacagttctttcagtaccccgtggtcttcgaagcagtttctcaactacagggtgcactatcacgaataaatgacagaaagaagcaccatgctgataatctaacgttctaaattactgttaagtacttagttctaacacccaccctcaggtttgttatagtagaagctaattaataaatatggatgtttttattt

SEQ ID NO: 445976 - DNA, 511 bp, Homo sapiens
atctctacctgtgtaccttgggtcgagttagttaacctttctgtgccttgattttctcatttgtaaaatggaggtcataatagtacctacctcatagggttcttataaagactgactragatatgtgaaagttcttgtgaccattaaaaggtaggtaaagtgcttagtttgacacacaataaatgttcaacaaatgtgacaatattaattttaaggcttaaaattgttagttgttttttttttagtgaattggtaaatttagtgaatttgggtgtctagtaccacattttgaatatagttcaattcctcattttaagaacagttctttcagtaccccgtggtcttcgaagcagtttctcaactacagggtgcactatcacgaataaatgacagaaagaagcaccatgctgataatctaacgttctaaattactgttaagtacttagttctaacacccaccctcaggtttgttatagtagaagctaattaataaatatggatgtttttattt

SEQ ID NO: 445977 - DNA, 592 bp, Homo sapiens
agaaccagacacaacctccctgatgtggatcactctgtgtgttctccaagagcgcactctggcccacggcttgacttgcctttatttttcaacaaaaggaggaaagtgaattccttctagagcttgtktaggtgctccttggctccttggtgctgggctctggcaggatacagccactgaagtgtagtgcattttaaaaaactctttctgggaaatgaaaacatgattttgaagtagtctgtagtattgaaatgcagcactctgcttctttgcgaagcaagacttactggaggctcactggtacagaagggccctcaaggcaaagaggctcagaaacagcaggaatgggatcttgagaaaggtaccgctcatcctatgaaacaaattgctctaattaaaaaaaaaatgtgtcatgttagcaagaggaactcagctggcaatgtgacggtggaagtaagttgtaaaaagcctccatagaaatatctactctaccgacttcataatctctgctgctttctgaggtgtgatgaaaaggatcggaaattgttggccggtggcctccaacacttctggccattcccttctcccctca

SEQ ID NO: 445978 - DNA, 592 bp, Homo sapiens
agaaccagacacaacctccctgatgtggatcactctgtgtgttctccaagagcgcactctggcccacggcttgacttgcctttatttttcaacaaaaggaggaaagtgaattccttctagagcttgtttaggtgctccttggctccttggtgctgggctctggcaggatacagccactgaagtgtagtgcattttaaaaaactctttctgggaaatgaaaacatgattttgaagtagtctgtagtattgaaatgcagcactctgcttctttgcgaagcaagacttactggaggctcactggtacagaagggccctcaaggcaaagaggctcagaaacagcaggaatgggatcttgagaaaggtaccgctcatcctatgaaacaaattgctctaattaaaaaaaaaatgtgtcatgttagcaagaggaactcagctggcaatgtgacggtggaagtaagttgtaaaaagcctccatagaaatatctactctaccgacttcataatctctgctgctttctgaggtgtgatgaaarggatcggaaattgttggccggtggcctccaacacttctggccattcccttctcccctca

SEQ ID NO: 445979 - DNA, 381 bp, Homo sapiens
cttctaactatcacaaaattaattttagaaatgttattaaaatagaagtgatctttaggtatcaatgttttagttttatattgtatttttacattcctcatggagactggcttcttaactcaaggccatttccaaaattatgtttggttcttctttttatgagatatctctgtgtttgtttgttctctccttagctttttkgtggtatagagaatactcgtggactaactactaaaggcaaaaattgatatttaagggaggttataaattaattttgacctgttacaatattaggaaaacattgtcatgttacaaaaaattttcatttgctcataattatcaatttgactatattagtaggaattaagaaaagtggaaaag

SEQ ID NO: 445980 - DNA, 509 bp, Homo sapiens
cttgatagcagttcttcatgtctgttaggtaaatcatttgagggaaaaatggttctgcgctgaagggaaagtcaaaacatctcatgcaaaatcttaaataagttgtttttttaaataagaaaaaaaatgaactttctctaactgtaagtatcttctgtttgtgccccagggatccctctacctttgctgtctctttcctcaggtatatttctctatttattcatatagagaatatgctatatgccctgatgtgctatatcagaaatagcaagcgtgactaattcagttatccttagtgaatattataaactgagaaatttggtattctttatggcctttttggtgggcaggatctctgggtactctttccgtattcttttgcttgatakagatgagcacatttaaaagccaaatctatgtctatgatctatgtctgcctgcagctaaccccagttgaaaattttgctttgtgatttctttttattaggttgatgcaaaaataactgcag

SEQ ID NO: 445981 - DNA, 636 bp, Homo sapiens
acattcatataattatgtaccatatccttgaaaaaagttctttcagtcaacaattaaatcagccaaatgtcttagacattgttttagtccattcaggctgctatcacaaaatactataaaagggctggcttataacaacaggaatttctcacagttctggaggttaggatgtccaaggtcaagggactggtagattcagtgtctgctgagggtctgcttcctggttcatagatagcacattctcaccrcatcctcacgtggtggaagggatgaatgagttcccttgggcctattgtataagatcgttaatcccattcacaagggttctaccctcatgacccaatcacctcccgaaaggccccacctcctaatattatcaccttgagggacagaatttccagatataaatttgtaggggaggagacacaaacattcagaccatagcagatgtactaagggatactaatgatatgacttgatcccccaacacaaacagatcagtatgttctgagagaggcaagactgacacccaaacagtaaatgaacagtatcagatgccaccttatggaaataagacctgaactgtgtggtgatttagactgcaatattcagctgaagtcagaaaaggtattgtga

SEQ ID NO: 445982 - DNA, 636 bp, Homo sapiens
acattcatataattatgtaccatatccttgaaaaaagttctttcagtcaacaattaaatcagccaaatgtcttagacattgttttagtccattcaggctgctatcacaaaatactataaaagggctggcttataacaacaggaatttctcacagttctggaggttaggatgtccaaggtcaagggactggtagattcagtgtctgctgagggtctgcttcctggttcatagatagcacattctcaccgcatcctcacgtggtggaagggatgaatgagytcccttgggcctattgtataagatcgttaatcccattcacaagggttctaccctcatgacccaatcacctcccgaaaggccccacctcctaatattatcaccttgagggacagaatttccagatataaatttgtaggggaggagacacaaacattcagaccatagcagatgtactaagggatactaatgatatgacttgatcccccaacacaaacagatcagtatgttctgagagaggcaagactgacacccaaacagtaaatgaacagtatcagatgccaccttatggaaataagacctgaactgtgtggtgatttagactgcaatattcagctgaagtcagaaaaggtattgtga

SEQ ID NO: 445983 - DNA, 636 bp, Homo sapiens
acattcatataattatgtaccatatccttgaaaaaagttctttcagtcaacaattaaatcagccaaatgtcttagacattgttttagtccattcaggctgctatcacaaaatactataaaagggctggcttataacaacaggaatttctcacagttctggaggttaggatgtccaaggtcaagggactggtagattcagtgtctgctgagggtctgcttcctggttcatagatagcacattctcaccgcatcctcacgtggtggaagggatgaatgagttcccttgggcctattgtataagatcgttaatcccattcacaagggttctaccctcatgacccaatcacctcccgaaaggccccacctcctaatattatcaccttgagggacagaatttccagatataaatttgtaggggaggagacacaaacattcagaccatagcagatgtactaagggatactaatgatatgacttgatcccccaacacaaacagatcagtatgttctgagagaggcaagactgacacccaaacagtaaatgaacagtatcagatgccaccwtatggaaataagacctgaactgtgtggtgatttagactgcaatattcagctgaagtcagaaaaggtattgtga

SEQ ID NO: 445984 - DNA, 455 bp, Homo sapiens
ctttaataacttgcgcaaaagtacatggttataagtggcaaagttgggattccaacacagaccctcggactccagagtccctgctcttagttatataccaggcctctatgcatccttccatatctccatgcctaaaatttaaaaaaatatatcccatgtttccaagttgacctgcctcckgcagtcaatttttcctttaatagcctcttaaaatgggtcgagaccccatccacggaaagtgggaagtccactgtgccttttccccagtatttctgtgaattccaggctgtgttgtgctctgggacattcttctgaatcctactccctcacagcatcttgtccattcatttgctgtcttgtctctttgtctctggacacctcctcaatgtaccactaacatagataaattggttatatgtagagaacttttcctgaagatctgaggataaggaaga

SEQ ID NO: 445985 - DNA, 531 bp, Homo sapiens
cctgtctttaggaggactggcccttgacaggttcctgggagacagcctctgagcccttggaacatcctgcttgagacgagtgtttttgtactcctgaggccttgtgtcatgttgtaccggtgtgatctctgggggctggacactgggtagcgaagtagtggtcacacaggtgctgcctagctatctgaccggctggcaatagacacaccctagatgccaaaaattaggtgaacttccatggttggcaatgcttctcttgtgttgcctcacatcactgatgggagarttaagtgctgtccatgcaactctgctcagagagacaactagagacttgttcctagttcctcttcgactccaccctaggagtcttttacctttgctgattttattttacttttaattaattaatttatttttaaagaaatagtgtctcactccgttgcccagggtggagtgcagtggcacagtcacagcccactgcagccttgaactcctgggctcaggctattctcctgccacagcctcccaagt

SEQ ID NO: 445986 - DNA, 524 bp, Homo sapiens
cttctctatgtgttctcactacaggatgggggctcacggtgcagccatcatctggagctatgtgtcactatgacagagtgcaataccttgccatactttggcataaacagttaccagcaaaagaactagcattcttttttctgacatctgagtgtgttgggtatacagtattatttcctagttactgctggtaacagtttcccagctgtttcctcatggcctaatatggattgttatcattcccatttcagcctcttctaaagggtacttgacaccttcatgatccactgaatccatgccacaactgtagggttttgcttttcttaacactatcccctccctcctttcctgggtccaatttctatataagttaaaatcaatttgcaataataaacaaccataaaatcttaaaatratataatcaaatgtcatttctagctcacattacgtgcccaccacaggttagctggagtctcttctcagcattgacttcactcctggactcaggctgatggaaacatcac

SEQ ID NO: 445987 - DNA, 661 bp, Homo sapiens
gaccttccagcacatttgaagttaggtatggccatgtgacttgttttgataaaggaagcttgagaaaaaactgtatgtatcactgtctagaggaaggctttatgaacctggcaggcatgatatgcttggtgtacttcctcagccaaagcaactgatgatgttctagatgttgaaaactcactgtttgtgttactgagataggacaaaggaaagcagagccactcagccaaccttaggtagataaataatgtgagttgaaacctagaactttttagttgtggttgaaatcagaaaacactttggttgtgtttgttactttggcaaaactagtctatactgaattatgtataagaagattaagctttctctttcactgtgagtaaaacagattggtgattataatttatttattcagtaaaacagtaacattatgaaaatttaagtttgattttctacaaaaaaatcatagtaaatatttactgtattttccaattgcataatataaggagtttaatgaaactgtaatgaaccacttataatggatcaagtwtaaaggacattttaggcattaccccatttatactttaaagtaatccttcaaagtgttaatgttatgattgtatttttttttactttaaagataagaaagctagggctaaca

SEQ ID NO: 445988 - DNA, 626 bp, Homo sapiens
taaagcagtgaaccccaagttaaccttaatttggcaacggtgtactggcaagtgtcttttaaacaatggatagtttggctctagaccataggtaagatttacacctaagcagcaatatagtaggatttcttttttaagcctggtaacattccccagtctcttgttctgcacgaggtgattatctaattgtaatttgtcataacataaagttttcctttgggaaaaaaaaataaactctcataacattcctgtcttatttgttcttaaagcatgtgtgactcataatagaggcccatggtacctctattatggggtttatctttgttacgggtttggaaacagagggtaaggaagcaaaatgtttgagagttaaagggagataatgaagaaaaggactatctttgtattattttcttggccttttgtatcattttcttgtaccytcttctgagtgtaggcctggccctaaacatatttggaagtatagtaaacatgaatctgaaattttcttacacattttcttagagtcataagtaaccaacactccagttctggcccaatcatttcttttctctaatgatgagtgtagtctgcttctgacctgcttaatggacagaatttactca

SEQ ID NO: 445989 - DNA, 558 bp, Homo sapiens
gtagttttcaacatatggtactcttatgatactgccctaatcaaacagtgatctcaatatagaaagtttcaaatggaattaatattttcacagtagtttttctattataatattaagatgatgcactcaaataaaaatgttttctgatcagtctatgtgycctagggctgttataaaaattgtcacaaagttggttgcttgaaaaaaaatattttttcacaattctgggggccagaggtccaaaatcaaggtgtcagcaggagcactgtcactttgttctacaggagaatactttcttgcttcttccagcttttggtggctttctgcattctgtgattatgcttacagcaatccctgcctttggggtcatgttgcgtcttccttttctctgcatgtacttctccatggactccctgttataagattacttttcatagccttcagggaacatctggataattcaggttaatcactccatgttgtcaaggaaaaaaattgctttgaacaacttagacaaggaaagctttatttaagactattgcaatagggaggagagat

SEQ ID NO: 445990 - DNA, 629 bp, Homo sapiens
taaccttttggctcttcattttgtgaattttgtattattaattatakacaattttgattctcagattactatagtttttcctaccctgacaagccaaggaacttattataaaaaggccagaaatatgtaaaacatgaaatagatttaaaacacaacatgttctctggtgagagcctgcatatatcatttttgttaaaatgcttaataaatgaagattttgttttccttttttttttttaagccagcttgctgatggatgacaaagataaggcatctttcctaaatagcaaacacccatgtgtctggtagaagctctgtatgttacagaaaatagtatacagacacaattctaactttcatagctatgaattccatgtgtgcatgcatgtgtgagagagacatgcacatacacacacagagagagagagagagagagaatatctgttgcagtataatcactctgaaagaaaaattatggtagtattttctcttatgaatttaatgaatgggtaggttttgttgtgaggtatagcgggatgtcatggaaagatttcagaataagatagaataaaataataatatgttaagtgggacagagtacacattaggttataacgtcttgagatgtt

SEQ ID NO: 445991 - DNA, 603 bp, Homo sapiens
cttgcaccttttgaagccacgttccgaattctatgttggtctatttcaaccaytgctggagcagctgggatgcaggacaccaagtccctaggctacacacagcatgtgaccttgggcccagcccatggaaccacagttttctcctaggtttctgggactgcaataggagaggctgccataaagtcctgtgtcatgccctggagacattttccctattttcttggtgattaacatttggttccatgttacttatgcaaattatgcagccagcttgaatttcttcaactaaaatgggattttcttttctatcgtattgtcaggcagcaaattttccaaatttttatgctctcctttcctgataaaattgaatgcctttaacagtactcaaatcacctcttaaatgctgtgctgcttaggaatttcttctgccagatactttaaatcatctctctcaagctcaaagtttcaaaatctctagggcaggggcaaaatgccagtagtctttttgctaaaacataacaaaacctgcctttgctccaattgtcaacaagttcctcatcttcatctgagaccacctcagcttattgttcatatcactatcag

SEQ ID NO: 445992 - DNA, 603 bp, Homo sapiens
cttgcaccttttgaagccacgttccgaattctatgttggtctatttcaaccactgctggagcagctgggatgcaggacaccaagtccctaggctacacacagcatgtgaccttgggcccagcccatggaaccacagttttctcctaggtttctgggactgcaataggagaggctgccataaagtcctgtgtcatgccctggagacattttccctattttcttggtgattaacatttggttccatgttacttatgcaaattatgcagccagcttgaatttcttcaactaaaatgggattttcttttctatcgtattgtcaggcagcaaattttccaaatttttatgctctcctttcctgataaaattgaatgcctttaacagtactcaaatcacctcttaaatgctgtgctgcttaggaatttcttctgccagatactttaaatcatctctctcragctcaaagtttcaaaatctctagggcaggggcaaaatgccagtagtctttttgctaaaacataacaaaacctgcctttgctccaattgtcaacaagttcctcatcttcatctgagaccacctcagcttattgttcatatcactatcag

SEQ ID NO: 445993 - DNA, 600 bp, Homo sapiens
tttttttcaagaactccaattatggatatagttataaatttagaatggtgacttgaagaaaatacagagttcagtaaaaattatttaattagcaagttgctaatcatattttcccactgagaggaagaaaaaaatgaagaagagaatgttaattagttaagataaagccaatttagatcacattagaaaagcttacagctctggacgaaattargcataggtatgtatgtacctttctatgagagacaagaaaaggaattcttcatacgtataatacataggaaaatttgaaggaaaagtgaataaatgtgtcaatgttaaatcttttttaggtagagtaaaaaaataagattatttagcaagggatatataaaaagtttgctataaaattaaggtacctattaagattacaaaactgcagggctaggattacattttcttcaccaagggagtgccttcagatttttaatctgtaaaataaagtcaaataagacaaactatgtacaaaagtactagcaaactctttttaattataaaaatcggtcttattttatagatgtaatcttttaaattataaaaattggtcttattttatagatg

SEQ ID NO: 445994 - DNA, 609 bp, Homo sapiens
ttggtcaaactgtattttctaatagaagaaatcattgttgtaaatgattttattatatagctattgatttttgttgttgctgttcagcaccaagtgtgtctgtgaaattatacaacagtttttgtactctaagtaagaaatatacaggcacatttcacrtcaaaacataatgggtatttgcatatacttctcttctcccacaggagaagtatgtggcacaaaaaaagaaatatatatatatacacacacacacacatatgtatatatatatgttttaatgaggcatactgttatatacaggcattgtatttagactctgttaatacaaatgggaataatgatgattcattaagtctataatctagctgtgtggtcaaaacgagtcccaaagaagtgacacttataggaagtgtgtcatctaagcagttctgagagggaagaaagagtaatctggaatttgggagtcaacagtctcaccttgacagggccacggggaatgcccattgtccgttaaccatggaaaggagttccagtgctcataataaaaatgatttaaagtgtgtgtagagtagctggagatgggtggaaagggggcttcatactaggtgg

SEQ ID NO: 445995 - DNA, 538 bp, Homo sapiens
  misc_feature (1)...(538): n = A,T,C or G
tattgatctactgtgtgtctctgctaagtaaaaactcacttttgaagataagatatgaagaactcaaaacacacccatacgataacagaaataaatgcctaaatgaattatattgttagaaaaagggtttggctygttttaatattttttaaatagtacgggaggcggttggcaggtgggcaatactagaggagccacatgaataacattgtatgagccactctgaatgaaatcattgcccaaggaatatgtccataattacttctgtttggacagaaaaagatctcctcttcagggattttaatttactggtttaacgtaatttatctgcctgaccttcaattacatttaagcattaatttctgagaaacctacttattttcttctaggtcattaactcagtgaactgagatgtgattctagtgcagcttgtacagatactgtagaaagatgtgtaagagttctcaatgttatcagggtttctaccagccacaaagggaaannnnnnnnnnnnnnnnnnnnnnnnnnnnnnnnnnnn

SEQ ID NO: 445996 - DNA, 538 bp, Homo sapiens
  misc_feature (1)...(538): n = A,T,C or G
tattgatctactgtgtgtctctgctaagtaaaaactcacttttgaagataagatatgaagaactcaaaacacacccatacgataacagaaataaatgcctaaatgaattatattgttagaaaaagggtttggcttgttttaatattttttaaatagtacgggaggcggttggcaggtgggcaatactagaggagccacatgaataacattgtatgagccactctgaatgaaatcattgcccaaggaatatgtccataattacttctgtttggacagaaaaagatctcctcttcagggattttaatttactggtttaacgtaatttatctgcctgaccttcaattacatttaagcattaatttctgagaaacctacttattttcttctaggtcattaactcagtgaactgagatgtgattctagtgcagcttstacagatactgtagaaagatgtgtaagagttctcaatgttatcagggtttctaccagccacaaagggaaannnnnnnnnnnnnnnnnnnnnnnnnnnnnnnnnnnn

SEQ ID NO: 445997 - DNA, 557 bp, Homo sapiens
tatgtaatatgctgtcttagggctttggaaagggaaaatacaaagaaaaataaaacattgtcctcaccctcagagaaatataaaattctttccttttatatttccycaggtctattattttcctattttttttctctcataggttggtctgtcaataatcctataattcaaattcatttcacaccacatctcaacaaaaccagactgtcctacctcatggttattatgagattgaatatgataatatttatgaaaagtctaccaaacaaaagcactctttaagtgtagggaataataattttattttcctgtcaactctacaaaaatttatatttattaaggcaggagccttacttttttcagacttcgtttgttctgggctttaattaataactgtgtcactttgaacagcttgctgaaacttgcttagggaaattttctcatcagcaaaatgtagattataataggacccacctcctaggactgctgtaaggattaaacgggctaatccatgtaaagtgctgagcacagcacatatggaaacactaaataaatta

SEQ ID NO: 445998 - DNA, 557 bp, Homo sapiens
tatgtaatatgctgtcttagggctttggaaagggaaaatacaaagaaaaataaaacattgtcctcaccctcagagaaatataaaattctttccttttatatttcctcaggtctattattttcctattttttttctctcataggttggtctgtcaataatcctataattcaaattcatttcacaccacatctcaacaaaaycagactgtcctacctcatggttattatgagattgaatatgataatatttatgaaaagtctaccaaacaaaagcactctttaagtgtagggaataataattttattttcctgtcaactctacaaaaatttatatttattaaggcaggagccttacttttttcagacttcgtttgttctgggctttaattaataactgtgtcactttgaacagcttgctgaaacttgcttagggaaattttctcatcagcaaaatgtagattataataggacccacctcctaggactgctgtaaggattaaacgggctaatccatgtaaagtgctgagcacagcacatatggaaacactaaataaatta

SEQ ID NO: 445999 - DNA, 538 bp, Homo sapiens
  misc_feature (1)...(538): n = A,T,C or G
gtattgaagaaagtttactgaaagacgtttaaaagaagcacacagaaaaattaagttaaacttaaactttctgcttcaactatttgctttagcacaaattattttagttttcttctttcatgaaagttctattttaaagggaacagcaaagaagrtaattctaaagcatctaaaaaccccatcttctattaatttgctactcacaaatgaggcactgtatttatttgttcttaatttgacatatatgtgtatatgtatttgttcttaatattgacatacgtgtttgtgaaaaacaaaaaataattgtttcataattaaagtgttgaattttgacatttttcagatgaattcaagttatttatgaaaaggctacctatgaattatttcctcaacacatctactataatgcatttgtggacaatggattctaatattcagcgccgttatgaacaactggagaacagcatgaaacaacttttcctaaaggcgcagaaaattgtacacaagctttgtagccttcgcagaggtgnnnnnnnnn

SEQ ID NO: 446000 - DNA, 574 bp, Homo sapiens
gtgattacagcaattgtattgtctgcttccacactgctataaagaactacctgagacttggtaatttctaaagaaaagaggcttaattgactcacagttcttcctggctggggggactgcaggaaacttagaatcatggaataaggcaaaggggaagcaagacacatcttgcatggcacccagaggagagagagagaaaggaagctaggggggaagtgctatacttttaaaacatcagatcttgtgagaacttactcactcaggagaacagcacaggggaaactgcccctacaattacctcacactaggtccctccctaatgtggggattataattcgaggtgagatttgagtaggggaacagagccaaattatgkcagcaattattgaaaactatcatagtataattcctaaaacgtaactgagctatactatgttgtgctgccattcacagagcagcaaggatccatagaaatactacatttaatgaagtgttggtaaaagtttagcaaacaactctttaggaaaaaggaaagctttgatgaacaatatttaacaatttttgttcactacca

SEQ ID NO: 446001 - DNA, 519 bp, Homo sapiens
ttcatgtagaaaagaaaaaaaaaatcaaaccaataatatgctccctcctcaaagatctttaaaaagcaaaattaacccacacaaatgaagaaaacataaagataatagcaaaaatcaatgaagttgaaaaaagagaaacaatagattaaatcaatgaacaaaaacctagttctttgaaaataataacaataaaaataaaattggcaatattctagcaagaaaaaaagacagtagacaaattaccaaagtcagaactcttaacagtggttagcactacacaactcgtggatataaagaattaattaagaggatacttaggaataccgtgaaaactctatacacttatatttgacaactcakattaagctgaccaatttcttaaaaagcacaaacgaccacagattatatcattgactagccctataattattgaaaaccttgtggttgcaattttaaaaactccaaataaatcttcaggcccagatgatttcactggaaaattctaacaaatatttgaat

SEQ ID NO: 446002 - DNA, 530 bp, Homo sapiens
tgcacctcaagaaatgtagagaagtaaatgcaaaccaatcccaaaattagtaaaagaaaagaaatagtaaagattagagcagaaataaatgaaagtgagattaaaatattacaaaagatcaacaaatcaaaaataatatttttaaaaagatgaacaaacatttatctagtataagaaggaagaagacacatataagcaaaatcacagataaaaagaagacattacaataaataacacaaaaatacaaaagattgttagagactactatgaattcctatatgctawcaaattggaaaacctagaaaaaatggatacattcttggaaaaatacaacttacctatactgaatcacgaattacatgaaaacctgaataaaccaatagtgagtacaaagattaaagaagtaccaaaatttctcccatcaaaaatagactttactcttctgtttatttatttatttagagacaggatcttgctctgtcacccaggctgaggtgcagtggtgcaatcacagatcaaggtagactaga

SEQ ID NO: 446003 - DNA, 586 bp, Homo sapiens
aaaaaatgtaattgtaccatcttatagcagagaaaatgaagctattcaactatactatttcacagatatttacatgaatattacatatttttctactgagtggttgtggatataatgagattacacctattcctggtacctttctggataataagaagacactactgtacaagatcattttcaaagtcattgaaaagtagaaaatgactacggygtaccaataatgacagcacaagtaaaattgctattaatttttttcactatatagtatcacactgtatgaagggaaatgaagagataccactattattattattattatttagctaatgagaaaatacatgagaaaaaagaattctattggccatttttactaagaaataaccatgacttttacttcagaaaacaatataaaagattcatactttaaaatagggcaccatttttatttagcagaataagtagtcctgatttaaccttggtatggagttgaaaactgaaaagatgataatatatttcacatttataatagtgctacccttcataagtgtattatcagctaaattcagtaaatatagttaaattc

SEQ ID NO: 446004 - DNA, 569 bp, Homo sapiens
tggggtggagccttgggaaattcatgctgttcgcagcggggaggagcctagctcctcctcttcctatgtggaacctgggattcaaactacagagtgggaaatgccctagtggagrgactatggccatgggagagtccttgtttcccccatgtttcccttttccacccaataaaatcctgcttcactcaccctttaaatgtctgagagcctgaatttacgtggctaggaaacaacgaaccccgtttttagctgaactaaggaagagtcttgcaacaatttctgacacaacatttaaggctgagtatgtactctctgaagccatacgtctaaggaaatatgttggaaagtggaatgctagttatctctttttttcctagtaaaaaataaacctttgatttttgagcatgaataaaacagctctctagtattaaacttgcaaaggctaaaagctgactgcaaacgtttacatcacctcctaaaggcacacgttcctacttcgacttcagatgttgccaaggagaataaagcacaaaggagaattgtctcttgtctgcatagcagaacaaaga

SEQ ID NO: 446005 - DNA, 586 bp, Homo sapiens
aaaaaatgtaattgtaccatcttatagcagagaaaatgaagctattcaactatactatttcacagatatttacatgaatattacatatttttctactgagtggttgtggatataatgagattacacctattcctggtacctttctggataataagaagacactactgtacaagatcattttcaaagtcattgaaaagtagaaaatgactacggtgtaccaataatgacagcacaagtaaaattgctattaatttttttcactatatagtatcacactgtatgaagggaaatgaagagataccactattattattattattatttagctaatgagaaaatacatgagaaaaaagaattctattggccatttttactaagaaataaccatgacttttacttcagaaaacaatataaaagatycatactttaaaatagggcaccatttttatttagcagaataagtagtcctgatttaaccttggtatggagttgaaaactgaaaagatgataatatatttcacatttataatagtgctacccttcataagtgtattatcagctaaattcagtaaatatagttaaattc

SEQ ID NO: 446006 - DNA, 579 bp, Homo sapiens
tcctaggccgactaagaatccctaagcctagctgggaaggtgaccatccacctttaaacacggggcttgcaacttagctcacacccgaccaatcaggtagtaaagagagctcactaaaatgctmattagacaaaaacaggaggtaaagaaatagccaatcatctatcacctgagagcacagcaggagcaacagtgattgggatataaacccaggcattccagctggcaacggctaccctcttttggacccctccctttgtatgaaagctctgttttcactctattaaatcttgcagctgcacactgttctggtccgtgtttgttatggttccagctgagctttcgctcaccatccaccagtgctgttggccgctgtcgcagaccctccgctgacttccatccctccagatccagcagggtgtcagctgtgctcctgatccagcgaggtgcccattgccaatcctgatccagctaaaggcttgccattgttcctgcacggctaagtggctgggttcgtcttaatcaagccaaacactagtcactgggttccacggttctcttctgtgacccatggcttct

SEQ ID NO: 446007 - DNA, 511 bp, Homo sapiens
acacaaaaaacagctgggacaaatcttatgaatcatgactgtgcatgttccagctgagctctctacttgagctctagaagatgaaaaagagaacacaagtcaacaatgcacagacctctaaacacttcttgggctgcaggtagatagtcccataactaaacctcaaaaaagtayaatttattcacatcgtacttgggttcagtgaaatgagtttactaaatatatatgacacaaataatctacatagttacttttcaaaaagaaaaacaataaaggaatttttttaagttccaataaaaaaattcattaaaggagaaaaattatccagggagtataatttttcacaacaaatgcagttttctaaatgaaaaagagattattaaaggaaaaaaaaatcagacacacaattttaagtgtgtgcttagtgaggtatagcatgatatttctaagcttgataaacatgaagaaaattttttaaagaaatataacaagaaggaaatgtttacgttgc

SEQ ID NO: 446008 - DNA, 522 bp, Homo sapiens
actgacacacaatgcatttcattggactaaaattaatttagtaaaatttttaaaaatgcccatagcacttttaaattatgcagactaataatgggcttgatgattcagttttgggcaaaaagtactgccttagaacatagatcatgtcagttcttcccttctctctttcttaaactctcacttcagatctcatgattctataatctgagaacatgaagtaggcacagagagtgcctggtcatgcattaatttattacttcaacaaaacattgaacagcggctatactccagacactcctctaggcataaagtcagcactggaagctttaaaaaataataatayaattttttactgagagaaattagggcactgcatatcaatggttagaaactattcactacacttcctaatgtcagcatactcaatactagcagtctaaagtatatgatttttcaagcaacaacattgcattttacagagcaagagttttgcagattaacagattaggcttttatccattt

SEQ ID NO: 446009 - DNA, 591 bp, Homo sapiens
ttgccactattacgttctgtgacattctgtgacatcatctcccaccactccctgctctcattcaccttattccagccattctggcttttttgctttcttcttggaacattctaggcrttctcttaccttaatcccatttggtgtttcttctgcctgaaatgctttgctctacatagctgcatgtttgaatacttcccatctgaattttgtgtgacaatgaattcttgacaaattaatgtatttcaactttgtagcatgaatctaatgtcatctggaaaatgtaggctagaatagataaaagattaaaaatatgagaaattttgcctaataaatgttgaaatatattattaagtatcaatgattaaattaatgtagcctaaacagaccattgtatacaatatatgataccttagtgtagaaaaaatgatgtcatctcaaatcagtaggaacgaatgttcaaagaagctacattaatggcttgatttttcataaaataaaaatttgcttgaacctttgcctcagcatgcccatgaagatattcattaaatgggttaaagaaagttaaatttaaaataaaaatcagattaaaca

SEQ ID NO: 446010 - DNA, 545 bp, Homo sapiens
tatcttatgtttctattaccacatgaatgttacttgcatctttattgtccttgaccatgtcctttacttctctcctaatcaatgtaatacatttggaaggtgaatactatattagaagacatttaaagcatagcatacaagaattaagttgccagaatgagaatatcctggcattaaattccagattcttaattagtgaagatttacttatggaartcacttaacatttccatctccaaaaagatttcattataataatatttatctcatagttatttagaagctattaaaataagtgcaaagtgtttggcaattaataagtgccacggtgtacaacctgtactatttatttcttcttgtcagatttccacaagcaaattggcacactggaaagagtaccaccattttgtattttcagccattcttggcattaagtctttttaattgaacagatgtgcatatgcacgcctttcttcaaatttaagctcccttctacaaaaaaaacagttttgtttcttctctatcaaccttctaaacagaggagg

SEQ ID NO: 446011 - DNA, 621 bp, Homo sapiens
ggatgtatatattgctttttttccacgygtaattcaggggaataaaagatagattaaaacaatggacatcagagattcatgatttcacagtaaataagagacactttacagaacaaaaatcagacaacactgtaattatatatatattttttgagacaggatcttgctctggtctcccaggctggagtgcagtggtgcagtcatggctcactgcagcctcaaactctcagcctcaagtgattctctcatctcagcatcccaagtagctgagacttgaggcatgtgctactgcatccaggtaattaattttttttcatttttactggagacaaggtctcgctatgtttcccaggctagtatgaaactcctgaactcaaatggtcttcccaccttagcctccaaaagtgctgggattacaggcataagccaccacacctggccaacaccataattgtattattctactaaaatattgtttaaggtaggctacactattaactatattcaaaacaggcttttttctgcttagataggtcgttaaattctattaactgtgactgtctgtaaaaatgtattgtgatatgttaatgtggaattagaaaataaagacatgaagacaag

SEQ ID NO: 446012 - DNA, 621 bp, Homo sapiens
ggatgtatatattgctttttttccacgcgtaattcaggggaataaaagatagattaaaacaatggacatcagagattcatgatttcacagtaaataagagacactttacagaacaaaaatcagacaacactgtaattatatatatattttttgagacaggatcttgctctggtctcccaggctggagtgcagtggtgcagtcatggctcactgcagcctcaaactctcagcctcaagtgattctctcatctcagcatcccaagtagctgagacttgaggcatgtgctactgcatccaggtaattaattttttttcatttttactggagacaaggtctcgctatrtttcccaggctagtatgaaactcctgaactcaaatggtcttcccaccttagcctccaaaagtgctgggattacaggcataagccaccacacctggccaacaccataattgtattattctactaaaatattgtttaaggtaggctacactattaactatattcaaaacaggcttttttctgcttagataggtcgttaaattctattaactgtgactgtctgtaaaaatgtattgtgatatgttaatgtggaattagaaaataaagacatgaagacaag

SEQ ID NO: 446013 - DNA, 621 bp, Homo sapiens
ggatgtatatattgctttttttccacgcgtaattcaggggaataaaagatagattaaaacaatggacatcagagattcatgatttcacagtaaataagagacactttacagaacaaaaatcagacaacactgtaattatatatatattttttgagacaggatcttgctctggtctcccaggctggagtgcagtggtgcagtcatggctcactgcagcctcaaactctcagcctcaagtgattctctcatctcagcatcccaagtagctgagacttgaggcatgtgctactgcatccaggtaattaattttttttcatttttactggagacaaggtctcgctatgtttcccaggctagtatgaaactcctgaactcaaatggtcttcccaccttagcctccaaaagtgctgggattacaggcataagccaccacacctggccarcaccataattgtattattctactaaaatattgtttaaggtaggctacactattaactatattcaaaacaggcttttttctgcttagataggtcgttaaattctattaactgtgactgtctgtaaaaatgtattgtgatatgttaatgtggaattagaaaataaagacatgaagacaag

SEQ ID NO: 446014 - DNA, 634 bp, Homo sapiens
aaatataatatttggaaataatgaatcatttttgaagtctctttcatagatgkaaagcatttgtaaagtatataattttgtaaaaaaacaaatatttaaataatataaattctgaaattatcttaagctataaaaggccctcagagtcaagctttatgtgtttttttttacacagttaataccaagaagatagattcaatatcatatactaacttctctatgcgtagaacagattgacacagatataggtaataaatatgagcctgaatctctgggctaaatgcaattcacttttaaatggcagtgtccataataagtagtatacaccaacataatatacaaatgagcagtggatttaattcaaagtcacactccacccttagcaaataggcagagagaatctcctatacatacattggagtatattatggatatatcaatggtgattcactacagggtagattttcatatgttgatgaaaatgttcagaattttatattttatacaactgtttacagcacagggatttgtactgcaaaaggctcagtaggaggaaaattattttcaattccatatacaagcggcctactaacactactatggcatcatcaaaataagtccatacagttgtgca

SEQ ID NO: 446015 - DNA, 618 bp, Homo sapiens
gttgcatgaaacatagggtggtggggaagtgggaagtgatattggtaaaggaggggggtaaaaaaataaattattattaagccagttcccattgtgggaaagtggagcttaatcccctatggaaattctgggaaatgctgcaaaacaccctaaaaaccagggtatttaggttgaagytacttaggtgggttgggaactgaggagatgtgaggatgaagggtgaaggaagagcttgggtagcgggtgggagttgtaattcacaggcatttgcctttctggcctctggacaaagcagccatctactgttctaaaaagaatgtagagagacagatgcagacactagatctttgaagtgagctgcagggatactaccagggcatagtcatcttcttctacagattgaatagtgtctttaatctgtgtgtttatactagaagtgctttcctggttaatgaaaaagaatctaaagaatggagaacattaatctgagagttaagactttaaactctgattccacattgatgactataatgggcttcggtagtcttatttgtatgtaatctctgtttctgagatactattaatcttgattcacatacatatttaataatggaacac

SEQ ID NO: 446016 - DNA, 618 bp, Homo sapiens
gttgcatgaaacatagggtggtggggaagtgggaagtgatattggtaaaggaggggggtaaaaaaataaattattattaagccagttcccattgtgggaaagtggagcttaatcccctatggaaattctgggaaatgctgcaaaacaccctaaaaaccagggtatttaggttgaagttacttaggtgggttgggaactgaggagatgtgaggatgaagggtgaaggaagagcttgggtagcgggtgggagttgtaattcacaggcatttgcctttctggcctctggacaaagcagccatctactgttctaaaaagaatgtagagagacagatgcagacactagatctttgaagtgagctgcagggatactaccagggcatagtcatcttcttctacagattgaatagtgtctttaatctgtgtgtttatactagaagtgctttcctggttaatgaaaaagaatctaaagaatggagaacattaatctgagagttaagactttaaactctgattccacattgatgactataatgggcttcggtagtcttatttgtatgtaatctctgtttctgagatactattaatcttgattcrcatacatatttaataatggaacac

SEQ ID NO: 446017 - DNA, 640 bp, Homo sapiens
tatgtgtgtgtgtatatatatgtgtatatatattatatatatatatgtatctgagctctctaacacaagatacttaaaagtccttgatggacttaagattaaccctgtgtgtgtgtgtgcacacgtgtgtgtgtatgtgtaayaaaataaaagtcaaaaggtcttggatgtttcatcatcaaccaatgtcaatacattattagatattactatgctcagagtaccaaatctgaatttctagactagatcctctttttagctccaaaattctatttctaaaacctaccaagcttccccacctatgggcagaacaagcaaaatatttcaaaaataactaccataatgctcttccaaccctcacctccagaaagatttgcttctttttctgactccagcactccagtatcacaatagcacaattacgtacccaatttcctttgcctggaatttaaaaatatgttgtggagtattgtcagctcttcctactatatatcgctttaattcccaccgctttctacattgctactgcctttactaaacctcatgttatctttttacctagattttgttatgggaaacttgatgtgactagcacacctttctgattcatttagaattttgtgttctaaatttggtaaaa

SEQ ID NO: 446018 - DNA, 640 bp, Homo sapiens
tatgtgtgtgtgtatatatatgtgtatatatattatatatatatatgtatctgagctctctaacacaagatacttaaaagtccttgatggacttaagattaaccctgtgtgtgtgtgtgcacacgtgtgtgtgtatgtgtaataaaataaaagtcaaaaggtcttggatgtttcatcatcaaccaatgtcaatacattattagatattactatgctcagagtaccaaatctgaatttctagactagatcctctttttagctccaaaattcyatttctaaaacctaccaagcttccccacctatgggcagaacaagcaaaatatttcaaaaataactaccataatgctcttccaaccctcacctccagaaagatttgcttctttttctgactccagcactccagtatcacaatagcacaattacgtacccaatttcctttgcctggaatttaaaaatatgttgtggagtattgtcagctcttcctactatatatcgctttaattcccaccgctttctacattgctactgcctttactaaacctcatgttatctttttacctagattttgttatgggaaacttgatgtgactagcacacctttctgattcatttagaattttgtgttctaaatttggtaaaa

SEQ ID NO: 446019 - DNA, 640 bp, Homo sapiens
tatgtgtgtgtgtatatatatgtgtatatatattatatatatatatgtatctgagctctctaacacaagatacttaaaagtccttgatggacttaagattaaccctgtgtgtgtgtgtgcacacgtgtgtgtgtatgtgtaataaaataaaagtcaaaaggtcttggatgtttcatcatcaaccaatgtcaatacattattagatattactatgctcagagtaccaaatctgaatttctagactagatcctctttttagctccaaaattctatttctaaaacctaccaagcttccccacctatgggcagaacaagcaaaatatttcaaaaataactaccataatgctcttccaaccctcacctccagaaagatytgcttctttttctgactccagcactccagtatcacaatagcacaattacgtacccaatttcctttgcctggaatttaaaaatatgttgtggagtattgtcagctcttcctactatatatcgctttaattcccaccgctttctacattgctactgcctttactaaacctcatgttatctttttacctagattttgttatgggaaacttgatgtgactagcacacctttctgattcatttagaattttgtgttctaaatttggtaaaa

SEQ ID NO: 446020 - DNA, 640 bp, Homo sapiens
tatgtgtgtgtgtatatatatgtgtatatatattatatatatatatgtatctgagctctctaacacaagatacttaaaagtccttgatggacttaagattaaccctgtgtgtgtgtgtgcacacgtgtgtgtgtatgtgtaataaaataaaagtcaaaaggtcttggatgtttcatcatcaaccaatgtcaatacattattagatattactatgctcagagtaccaaatctgaatttctagactagatcctctttttagctccaaaattctatttctaaaacctaccaagcttccccacctatgggcagaacaagcaaaatatttcaaaaataactaccataatgctcttccaaccctcacctccagaaagatttgcttctttttctgactccagcactccagtatcacaatagyacaattacgtacccaatttcctttgcctggaatttaaaaatatgttgtggagtattgtcagctcttcctactatatatcgctttaattcccaccgctttctacattgctactgcctttactaaacctcatgttatctttttacctagattttgttatgggaaacttgatgtgactagcacacctttctgattcatttagaattttgtgttctaaatttggtaaaa

SEQ ID NO: 446021 - DNA, 577 bp, Homo sapiens
ttctttataggaccttttttcaatggctctatgtgataaatcaaataaatgactctatcaccagggcatataggaagtctcttttagaagatatttatagatgcctcaattaccccttacaacatatgttctaagtgaaaattcattccacttatgtatatagccaaacctgattacaccactatttacytgtctaatcaccctaataccctagtgagttattttaaataatgccatgcagagcagttaaaatttaaatgcttcttcaatgtgctcctttagctttcaaggatcctgttactagaatcatataatgtcagtagtcacatagtgtttccctgattatctggctattccatttataccactaaaaagaatgtttagtgctgtaaacttttgtttttgaaatattaaaatgtgcagaatataaaatgaattttatattattttgctaatagatgcaagtggttacatcaaaaaaagaaggcaactctaattccttgaatagaagagaagcattccaaaatttttggataatgctatttttctttgcatatgtagataaaaaagatcaaaa

SEQ ID NO: 446022 - DNA, 577 bp, Homo sapiens
ttctttataggaccttttttcaatggctctatgtgataaatcaaataaatgactctatcaccagggcatataggaagtctcttttagaagatatttatagatgcctcaattaccccttacaacatatgttctaagtgaaaattcattccacttatgtatatagccaaacctgattacaccactatttacctgtctaatcaccctaataccctagtgagttattttaaataatgccatgcagagcagttaaaatttaaatgcttcttcaatgtgctcctttagctttcaaggatcctgttactagaatcatataatgtcagtagtcacatagtgtttccctgattatctggctattccatttataccaytaaaaagaatgtttagtgctgtaaacttttgtttttgaaatattaaaatgtgcagaatataaaatgaattttatattattttgctaatagatgcaagtggttacatcaaaaaaagaaggcaactctaattccttgaatagaagagaagcattccaaaatttttggataatgctatttttctttgcatatgtagataaaaaagatcaaaa

SEQ ID NO: 446023 - DNA, 402 bp, Homo sapiens
atccatacagtaaagtgaaagaaagtttataagaaagtaaaggaatggaagaattgctactccataggcagagcagccccaagggctgctggttgcccatttttatggttatttcttgattatatgctagacaaggtgtgaattattcatgagtttcctgggaaaggcatggacaattccaggagctgaagtttcscctctttttagaccatatagtgtaacatctggacattgccatggcatttgtaaactgttatgatgctagcaggagtgtcttctatgctagtgcattataattagcatataatgagcagtgaggactaccagagttcactctcctcaccatcttggttttggtgggttttggctggcttcttcacaaccacctgttttatcagcaag

SEQ ID NO: 446024 - DNA, 467 bp, Homo sapiens
aattgggcaattgagggtcatgacgtgggtagagtctgctctgggatttagggttctgttatggccaggcatagcttcagggtttgaggctsaaacatgggcagaagttgcatagagatatatggggtcttgaggcaggcagcgtttgtttcggatcttggcatccttgtgtggacatggttgtggaggattcggggttctaatagtcacataattagtctggcaatttgggatttcagatttagccaggtttgttcttggttttggggtcctaaactggacagagtttgtttcagctttgacctctttgcctggacacagttgttgaaggatctggggttctgaggtagtcatggttagcctggagattaggggttgagtcttgggctggtttgttgattttggggtcctgagatggacagggtttgttttgatttggcatccttgcaagacaaaagtggctggaa

SEQ ID NO: 446025 - DNA, 467 bp, Homo sapiens
aattgggcaattgagggtcatgacgtgggtagagtctgctctgggatttagggttctgttatggccaggcatagcttcagggtttgaggctgaaacatgggcagaagttgcatagagatatatggggtcttgaggcaggcarcgtttgtttcggatcttggcatccttgtgtggacatggttgtggaggattcggggttctaatagtcacataattagtctggcaatttgggatttcagatttagccaggtttgttcttggttttggggtcctaaactggacagagtttgtttcagctttgacctctttgcctggacacagttgttgaaggatctggggttctgaggtagtcatggttagcctggagattaggggttgagtcttgggctggtttgttgattttggggtcctgagatggacagggtttgttttgatttggcatccttgcaagacaaaagtggctggaa

SEQ ID NO: 446026 - DNA, 617 bp, Homo sapiens
cccaagaaaaaaagtactggtttcttccccctaaaaggatttagatggaataacatctgtgctgagaatattgtgaatatgttgaactgacaggcagtctctaaggcactccgctcattaatgtgctgtgcataaaattaaaacttgaaatatatttttaaatccattttgaatcatttaagcaaagaaactattgtgctgaaataatatatttggagcaaggaatatgaaagctattaaaatgtcttagacctcctgcctttcatgggagaggaagaaggggggaaatgctctctctgatttgaaacaggctttgcataaaatatacccaccccacctcaccatctcccaaaaaaaaaatctactctgaagtaacactaagagtttcacttaaatccacaggagccaaggaacacgaagttgggtctttatatttctcctgcttccactgtgcatagctgagctggggagcagctcaatgagggctgtgagggcccaggtatggtgggcaccttccctgggtctgcagcattcacggctgtgagcaagaaaccctaaaggarggaggaagggaagacaaagacacaaagatagggccttgttttgctcccgccttg

SEQ ID NO: 446027 - DNA, 469 bp, Homo sapiens
tgactatggggagatgtcattgccatggttatgttagggtctatggcatctttgaccttaagacagggtgatgagcctggattatccaagtgcaatcatccggtgtcatcctatgagctcttaagagtggagcgttttctccggctggtggcagaaagggaagtcagagacattgaagcatgagaggggcgtgacctgtcattgatactctgaggctggagcagagctcatgaggaggcagcacagcctcaggaagctgaaaacacccctggccaasaaccagcaaggaaacagggcctcaatcctgcagtcaccagagctgtgttctgccaaacacctgaatgggagagaagtgggctctcccctagagactccagctaagaagtcaagccagctcacaccttgattgtggcctagtaagaccctaagcagagaacagcaaggtccatctggatttctgacccacaga

SEQ ID NO: 446028 - DNA, 543 bp, Homo sapiens
atctcctaaaatgtacaccttatgctgtgaaggatgtagtggaatcttttggttctagcttacgactagctgaaaaaaaatttttgtactatcacattaagcaagaaccagttatttcatagttttattttgcacattaaggcacaggagataaatcttactgtctgacgaaatccttttcaagttttgttctacagtttccaagtcctgatgcagctttcttcttaagtaaaactatttccttaatttgagcaattcgccaggttgaaraaaacttgtaagcactgttagtacttgtcaggagtaaatgggactctagagagttctttgaaataggaaacatttgaacagaatatcatcttgctttcagctgtttgtatagatgcaatttctgcaattctatacctcacagctctaatttttcttcttctgtgtctcaggcttccatcaataatccttccactgaaacacacttgacaagagaggtagagtagacgcccttgcaatatcttctgaatgtcactcagcagtgatttgtaatcg

SEQ ID NO: 446029 - DNA, 577 bp, Homo sapiens
ataagcaagcaacagtagttccaactattaaaatgaagatttcatagctttaaagtgaaaataacctaaagcaatgattcacaattacactccgcgttttcctccctttgttaccctgcggtattcagtaaagaccctttatacatgacaacattgtctccattacagcatgcgctatctattcttagattaatgtgttaaagtgatatcagcacccatttctccaaaagataaacttggtagctagcagctgtaatcagcaaaaatccaccaagaaattgtgcccttggaattgtctataaaccacctgatccagtcacattcctggaastaaactggaaggtgtgggcaaaatggtgagcagatgaagtatgtgtagttttagaagggaattgtttacagcagctcaaagagaacttccagaggaagataaaaatatctcaacagaaaagaaaatttgaatatcatgaaaaacctaagaaaactctaaaactctttccagacagctcttttgactgaaaaaatatgaatatgttttgtaattattgcagaagtctatgtcataaagctacataaa

SEQ ID NO: 446030 - DNA, 536 bp, Homo sapiens
ttttctctttgtttcatagttttggaagtttctatctatgtatttccaagcgaaactcagatactctttcctcagttatatcttctactaataagcccatcaaaggtatttttcatttttgttacaatggtttttttgtacactctagcatttttaatattcttttttataattctcatctctctacttgcattatctattagattttgtatgttgtctacttcttctactagatttcattgcatggtaatcatacttcttttaaattcatgatgtgataattctaacatcactgctgtatttgtgtctggttctcacgttgttctatctcttcaaactgtgtttttgcattttagtatgtcttgtaacttttccttgaaaggtggacatgatgtactggataaaaggaactgcagtcactargcctttagtgatgtggtagtaaagtgtgaggtaggggaattgctctgcagtcctatgattaggtttcagatttttatagagtctgtgctaataggctgtgaacttcacaaatg

SEQ ID NO: 446031 - DNA, 536 bp, Homo sapiens
ttttctctttgtttcatagttttggaagtttctatctatgtatttccaagcgaaactcagatactctttcctcagttatatcttctactaataagcccatcaaaggtatttttcatttttgttacaatggtttttttgtacactctagcatttttaatattcttttttataattctcatctctctacttgcattatctattagattttgtatgttgtctacttcttctactagatttcattgcatggtaatcatacttcttttaaattcatgatgtgataattctaacatcactgctgtatttgtgtctggttctcacgttgttctatctcttcaaactgtgtttttgcattttagtatgtcttgtaacttttccttgaaaggtggacatgatgtactggataaaaggaactgcagtcactaggcctttagtgatgtggtagtaaagtgtgaggtaggggaattgctctgcagtcctatgattargtttcagatttttatagagtctgtgctaataggctgtgaacttcacaaatg

SEQ ID NO: 446032 - DNA, 575 bp, Homo sapiens
ctttggttgtctcctatcataaaactcatatactttattaacagatctaaattttaaacttctaccatggtaggaattgyctaaaaaaaagttgagtaagtgaatatatggatattcctctagagtgagttgtctaagggcaggaactaagaataccattttatccatgtgttttcagcacagcacagttcaggcaactaggaagtgctcaatacttgattgtcaacaagtactgcatgaatagatgaatagactagtatggaattaagacccaaatgcatatatccacctgcagagttgattcattcatatctcatgaaagattcatttgttagatccagatatgaatttttaatccagtacaatatgtgctttttactaatatattgtggtaaccagtctgattaatgtcaacaataggggatatttagataaaaatctcatacaaattatgaaatctatccttaatttttcaaccaaatcttatattttatatttattttctctcttatgcaaaaatgaacatagtcacccagcccaacatactcaatttctgtcaagctccaacgcctaag

SEQ ID NO: 446033 - DNA, 607 bp, Homo sapiens
attgtgtttttctgaatcttctcttttttcttctttattagtataggaagcagtctatctatcttattagttttttcaaaaaactagctcctggattcgttgatcttttaagtggttttttttgtgtgtctcaatttcctttagttcagctctgattttggttatttcttgtcttctgctaacttagggatttgtttgttcttggttctctagttcttttggttataatgttaggttgttaatttgagatctttctaactttttgatgtggtcatttagtgcagtgccataaatttccctcttaaccctgcctgtattagtccattttcatgttgctgagaaagacatacctaagactgggtaatttataaagaaaaagaggtttaagggactcacaattctgtgtggctggggaggcttcacaatcatggtggaaggtgaaaggcatgtcttatatggtggcaggcaagagagaatgagaaccaagtgaaagkggtttccccttataaaagcttcagatcttgtgagacttattcactaccttgagaatagtatgggggaactgcccctatgattcaattatctcccaccagttacctctcacaac

SEQ ID NO: 446034 - DNA, 538 bp, Homo sapiens
gaattataaagatcttcccagacaaacgaaagctaagggagttcatcgtcactagatgagccttacaagaaayggtaaagggagttccttcaattgaaaaacagtacactagctaagaacataaaaacatatgaaagtatagaaatcactgtaaaggtaagaatatcatcaaagggtcagactctagtactatcaatagtactagggtcagaagaccctagtactattatggtggcatataaattacctttaacactagcataagagttaagatacaaaattatcaaaaataactttagccataacaatttgttaaagaaagcacaatataaaaaagataacctgtgatcttaataacataaaaagtgaggagaggaaaagtaaaagtgtagaatttttgtatgtaattgaagttaagttgttagattaaatagactattataactgaaaaagatattttatgtaagccctgtggtaaccacagagaaaattacctgttacaggtccagaaaagataaagaaaaaggaatcaaagcat

SEQ ID NO: 446035 - DNA, 538 bp, Homo sapiens
gaattataaagatcttcccagacaaacgaaagctaagggagttcatcgtcactagatgagccttacaagaaacggtaaagggagttccttcaattgaaaaacagtacactagctaagaacataaaaacatatgaaagtatagaaatcactgtaaaggtaagaatatcatcaaagggtcagactctagtactatcaatagtactagggtcagaagaccctagtactattatggtggcatataaattacytttaacactagcataagagttaagatacaaaattatcaaaaataactttagccataacaatttgttaaagaaagcacaatataaaaaagataacctgtgatcttaataacataaaaagtgaggagaggaaaagtaaaagtgtagaatttttgtatgtaattgaagttaagttgttagattaaatagactattataactgaaaaagatattttatgtaagccctgtggtaaccacagagaaaattacctgttacaggtccagaaaagataaagaaaaaggaatcaaagcat

SEQ ID NO: 446036 - DNA, 645 bp, Homo sapiens
atcaataatcacttaaaacgtaagtgcattaagttttccagtaaatgacataaagtggttgaacagcttaaaaaaaataaaccttgatgtaattctatactgcctagaatggagtcagttttactttagaaacacatacagaattaaagtgaagagatgagaaaagatattctaggcaaatagtaaccaaaaaagagcaggagtggctatacttatgttgaacaaaatggactgtaagtcaaaactgtcaaaataaacaaagaaggttattatttaaaaataaaagggtcaattaaacaataggatatagcaattataaataatattcacccaacatcagagcacctaaatatataaaacaaatattaatagatctgaagggagagatagacaataaaataatagtaggggactttaatgtactactttcaacagtgtacaggttgcctagactgaaaatcagtaaggaaacaacagacttgaacaacactatagaccaaatggacctaacaagtatttatagaacataccaaccaatagcagcagaatacacwttttttttcaagtgcacacagatcattttccaggacagatcacatgtgaggctatgaaccaagtcttaataaatttaagaagattgaaatc

SEQ ID NO: 446037 - DNA, 574 bp, Homo sapiens
tgtccttgtgggcgctcaccgccccctcctctgccgtaggttaccaccagcagtgccacatccccatagcgggcagtgctgaccagcccctgctcacaccttggttctgccgacgctgcatcttcgcactggctgtgcgggtgagccttccatcctccccagtccctgcctctcctgcctcctccagtggggcagaccagagactcccatcacagagyctgagctccaagcagaagggccacacctgggctttggagacagatagcgcctctgccactgtccttggccaggatttgtagactccctgagcctcagtttcctcaactgtaaagtggagatgggtttggtgtcgggaataacgggaccaataaatgatgctttactattaaaaaagaaaatccatgtaaatacatgttggtaattgttgcctttattgcgcttattactcttaattctgttatcaacggagttccttctgggatagaggggatgggtttggaattaatgagaaaaagctccttgcttttctgactatattggaatatctgcgggtcccccaagccctggcagcact

SEQ ID NO: 446038 - DNA, 571 bp, Homo sapiens
gtttctttgttatgagaggtccaaacaatattatctctggggcagctccatctggacttttcaatttgattcatcaaactgtactggggttgagaatgtttgctccaaagagatatgggtgcttgattttcttgattaccctggtactgccttccctttcatagagagtatccaatctgtatatctgtcttcctaaatgtcttataatgctgtgatcagtcacgttctgacttagaagtctagagtgacatcctgttgcttagcaaatcaaatttgctctcttgagaccttacttttaggacaccgtagttgacttccaccccacataatcaatttttatttcccatgtttcaagtacyctaaatgaagtcaggatgcttggaaccttggccatgctctaccatctactggatatgtgtctctcttattgtctatattattggactgtgctatcaagcatggtagccattagcctcatgtggctattaaattaaaattaaataaaattaagaatttagttcatttacatcaggtacttttcaaatgttcagtagccacaagagactagtga

SEQ ID NO: 446039 - DNA, 604 bp, Homo sapiens
gcctgtttcccccgttgtatcttggaagaaacaaacttgcttttgattttacaggatcctaggtagaaggatgcctcagatgagacattgaacttggacttttgagttaatgctgaaataagttaagactttgagggactgttaggaaggcatgattggttttgaaacagtagacaaaaactattttaaaattcctatggaacctttaaaaaagcctgaatagccaagtcaatactaagcaaaagaaacaaagctggagacattgcattacctgacttcaaacaatactataaggctacagtattcaagacagcaaggtactggtacaataaaagacttacagaacaatggaacrgaatacagagcccagaaatactgccaaaaacctacaaacatttgatcttcagcaagacctacacatggccgacaagcatataaaaaaatgctcaacatccataattattagagaaacgcaaatcaaaaccacagtgaggtaggaatggctgttaattataagtcaaaaataatagatgctagcaaggttttggagacaagggcacacttgttgcactgctggtgaaaatgtaaatcagttcagtcattt

SEQ ID NO: 446040 - DNA, 562 bp, Homo sapiens
acttttggcattgtatattytgtgagtttgaacaaatttataatgatgcatttctaccatcatagtatcatacagagtaatttcactgccctaaaaatcctgggctctgtttattcatccttccctcccctcaacctctgtcaaccactgatcttttactatttacatagttttaccttttacagaatgtcacatagttggattcatacagtatgtatcctttgtagactggcttctttcactcagtaacatgcaggaaagatttctacatgtctcttcatggcttgatggctcatttcttttcagctcccagaaatattacattgtctgtatgtatcatagtttattagtccattcacctcccgaaggacgtcttggctgcttctaagttttggcaatgataagtgaagctgctatagacatctatgtgcaggtttttgtgtaagatgtaagtcttcaactcttttgggaaaattccaaggagcacaacttaatcgtgtgtttagttttgtaagaaactgccaaactgtcttccaacatagctgtaccattttgcatccct

SEQ ID NO: 446041 - DNA, 562 bp, Homo sapiens
acttttggcattgtatattctgtgagtttgaacaaatttataatgatgcatttctaccatcatagtatcatacagagtaatttcactgccctaaaaatcctgggctctgtttattcatccttccctcccctcaacctctgtcaaccactgatcttttactattyacatagttttaccttttacagaatgtcacatagttggattcatacagtatgtatcctttgtagactggcttctttcactcagtaacatgcaggaaagatttctacatgtctcttcatggcttgatggctcatttcttttcagctcccagaaatattacattgtctgtatgtatcatagtttattagtccattcacctcccgaaggacgtcttggctgcttctaagttttggcaatgataagtgaagctgctatagacatctatgtgcaggtttttgtgtaagatgtaagtcttcaactcttttgggaaaattccaaggagcacaacttaatcgtgtgtttagttttgtaagaaactgccaaactgtcttccaacatagctgtaccattttgcatccct

SEQ ID NO: 446042 - DNA, 591 bp, Homo sapiens
agctggtgatgtgtgttgatataaggaagtatataatgtctgattgtctctctttttgtcacattagcagctatggatgaccattgtctaggtccattatttcctaaggcatgtaaaatgatgacattctatcattccttcttcagctattagctaaacacttgtataagttatttcgcaaatatttttgtttactctgagttgcagttcatacagtaatgttaggataaattatgcattatttttctttttttataccagatctcaaaacaatatagttgctctatatgtctatcatcrtaccctggcatcctccactgtgatcacacaggctctgtgcagtatcagtatgaagtcatgggttttacgcatttgatctattttaacccatgtcagttattattcttatttgtgttcaaattgtcccatctttggccaacgggagtttttcaggatggcttccacgtcattttgatatgacttcatcgtctttgatagttccttgctgctcatatgacaaaatatcccagattcattttagatattttctgaacagatctggaattagccttgtatatcttatttcagtgc

SEQ ID NO: 446043 - DNA, 509 bp, Homo sapiens
atggcggaaggtgaagggggagtccatgtaaaagagggagcaagggaggggtaggagatgccacacgctttgaaacaaccagatctcatgtaaactcatagagcaagagctcactcattaccatggggagtgtactaagccattcatgagggatccatccatatgactcaaattcttcccatcaggccccacctctagcatggggaatcacatttcaacctgagatttggaagggacaaacgtcaaaactgtatcagtatccctgtgacaagtgaacaaaacatatggagaaggtctcctttaggttggaagaacagaaaagtcgccaggaggaggtgatatttaagctgattaacttagagaagcttaaagtccattcttgtctctgtaccctgaaccaaactcactattaagccactctgggcatttgagaactacgcttactsaatactttcaaataaaaacagaatatatttagtatttatttttctcctaaagaagataaataa

SEQ ID NO: 446044 - DNA, 610 bp, Homo sapiens
ataggaaacaggagccagcataacagagatgcaaagtgaatcagtccccaaatgatggtgaagagagagcccaaggtaatagctgtgcatcaaacatcaagagcaaccagtctggactggcaaagcaggtaagaaagctgtgatagaaataaaattgattcaaatagctgttgcattggacatcttgagggaagatttagacaactaacaaagaacttgtggttaaattggtgaaaactttgcaaacacagagagacaactctggaaaaaaacaaggaagaaagcttttaatagcatgtagggaggcataataatgttgacctaactaaatattgacctaaccaaaaattatgagataactatattcagaggatctatggaaggaataggtaggatgcatgtaagtggtagtggcaggaaaacagaaaagagttaaatccacacatttcttgcaggaaagtcaatgcatgatgactaaacctcaaaaaccaagaaggagcaattataaggaatatctagagatacasacaaatagtaactagttaaaagagatgaacatgattacttctcttaaaaagcaggaagtgatggagggttctactgtttttag

SEQ ID NO: 446045 - DNA, 583 bp, Homo sapiens
caggctgaaatgagctaacgtttgctaagctgcctggactattcctgaaatacaatgtgctcaattatacttatttttcatacacagtgtgagaaagtccagacaaaataggcgagaccaagaaattaccaggatctccactactctcccaagcgtctccagtgctctcccaacagccaggagcaccctccctctccaagcccccagaacttcctgttgcgccatatgccagcggtggagaggagccagcggggactcctgaggttgcaagtccgggcggcgccgcgttggggaaggaagcggactgcggcggggcgggtgtttaccgtaaccggcgctrtcatcgctccgggactcctgcacggggaacactgggcgcacggggacgcgcaggggcgcggagggacggccgtctgggcacttctccagccgcctcggaaagccgcgacccccggctagtcagcgtccgggtctgagatctgtgcccgtggcagctcaaaacgcgccttctctcctccggattctcagctcaagccacctccgaactcctctccctccggcccggagcggaatcagagctgcc

SEQ ID NO: 446046 - DNA, 583 bp, Homo sapiens
caggctgaaatgagctaacgtttgctaagctgcctggactattcctgaaatacaatgtgctcaattatacttatttttcatacacagtgtgagaaagtccagacaaaataggcgagaccaagaaattaccaggatctccactactctcccaagcgtctccagtgctctcccaacagccaggagcaccctccctctccaagcccccagaacttcctgttgcgccatatgccagcggtggagaggagccagcggggactcctgaggttgcaagtccgggcggcgccgcgttggggaaggaagcggactgcggcggggcgggtgtttaccgtaaccggcgctgtcatcgctccgggactcctgcacggggaacactgggcgcacggggacgcgcaggggcgcggagggacggccgtctgggcacttctccagccgcctcggaaagccgcgacccccggctagtcagcgtccgggtctgagatctgtgcccgtggcagctcaaaaygcgccttctctcctccggattctcagctcaagccacctccgaactcctctccctccggcccggagcggaatcagagctgcc

SEQ ID NO: 446047 - DNA, 439 bp, Homo sapiens
ttaaggcagtaccagcaagctcttgccctgtctgctgacacagaaagcttctgtgccttctcatcttgtgtttggcctcactcaggtacagtaacgtcctgctggtccagctgtgatcaagacactcaccccagcctccatcttgagcctcccagccccagctaggatttgaactcatggtcccgagagcagaatggattagtgctcaagggctcccaygctgacttcatcaaagcttttctgtgcacatctccattgtgtgaacagctctgttaaccaaacctattatctttcccccttggttttcaacttgagaaagggaaagcaacttctttaatggcccacagattgatgattaacattttacatgtccctgctgctaagtaaaagaactgctttgtggacagtgaaaatgcctaggagaaggaagcgggagtca

SEQ ID NO: 446048 - DNA, 439 bp, Homo sapiens
ttaaggcagtaccagcaagctcttgccctgtctgctgacacagaaagcttctgtgccttctcatcttgtgtttggcctcactcaggtacagtaacgtcctgctggtccagctgtgatcaagacactcaccccagcctccatcttgagcctcccagccccagctaggatttgaactcatggtcccgagagcagaatggattagtgctcaagggctcccatgctgacttcatcaaagcttttctgtgcacatctccattrtgtgaacagctctgttaaccaaacctattatctttcccccttggttttcaacttgagaaagggaaagcaacttctttaatggcccacagattgatgattaacattttacatgtccctgctgctaagtaaaagaactgctttgtggacagtgaaaatgcctaggagaaggaagcgggagtca

SEQ ID NO: 446049 - DNA, 584 bp, Homo sapiens
gtgatatctcttactattttttttaggcttatcaagtctgacaagatttcccccccacttttatggtacattttaatctttattttatctgaaccgtattgaactccacaacccagattttggtatgttcttttcaaggagttggtgaagcttatgtgaaatcatggatacaaaattttttttattcctttagttcccatagagacatgttggtaactataattgataatctaattaaccaatttgttttttaactgcactatttcttcagtggcatctctgcttggaagtcctattcttagtctcagcttcagtacaccctcaagctatcttatttgcttctaaaaatctcttctagtacttctgtttcagtctttgtatagttcctatctgttctktggatattaattatgtatagtcacgtatatatactgtgcagacttatttagaggctttttgtcatattttgcttaaacctgctactgtgcaatcttacattccagttctttcattagtatggtctttttttttcctttctcctctcttctacacttctattctacttttccttcttggtccctttg

SEQ ID NO: 446050 - DNA, 633 bp, Homo sapiens
ctctcgataggtgactcgtcctaaatcagctctgaattcccgcaaagacttctggaagctgtgctggggttgaaactrgtagaccaaaaccagaatcaagtctgttgggaggggcctttcccctgggacgggaattccagtggtaatgtcttcctggggcttctccggaaggtccaatttccactccaccctgctcattctttcaccatgtatttctcacaaacactttgagctggattgaaggggaaacatttgataatgcaatcattaatggagtatctgggtattcggcaggaagtcagtatatctttcacactactgtttagacttattcaaaagaaatttaaaagaaacatgaaaaagcctcatctactgttcaacactacttcttaaaactatttttcgaagttttttcctagtgccaggcacagagcagtttcttcataactgttcattgcatgaaaacaccaagtgtgtatttctgacaactcacttgaggggaagggtaagaatcagttctgtaagcacaactctgagctcgcacagagccccacgatgggggcggggagctgaagactcctattctaaggtctccaggagcaaggccaaaaggaggttgtcagcagtatgcac

SEQ ID NO: 446051 - DNA, 269 bp, Homo sapiens
ccctatctggctccacccatcttgtgcccccaatccccctacycctagggctgagggagctcagattaatgtgtactcaggaaatcagcccattcctggggcagcagagagctcctcccaataaacaaggatcaagtacacagccagcagcactggcaacagccagctcttacccatggcgccatctactggcttgtaggtcaaaccacacacccaatataaaacctgctggcagaagtgcatagggctacagaagcaaagccaaaaga

SEQ ID NO: 446052 - DNA, 269 bp, Homo sapiens
ccctatctggctccacccatcttgtgcccccaatccccctacccctagggctgagggagctcagattaatgtgtactcaggaaatcagcccattcctggggcagcagagagctcctcccaataaacaaggatcaagtacacagccagcrgcactggcaacagccagctcttacccatggcgccatctactggcttgtaggtcaaaccacacacccaatataaaacctgctggcagaagtgcatagggctacagaagcaaagccaaaaga

SEQ ID NO: 446053 - DNA, 269 bp, Homo sapiens
ccctatctggctccacccatcttgtgcccccaatccccctacccctagggctgagggagctcagattaatgtgtactcaggaaatcagcccattcctggggcagcagagagctcctcccaataaacaaggatcaagtacacagccagcagcactggcaacagccagctcttacccatggcgccatctactggctygtaggtcaaaccacacacccaatataaaacctgctggcagaagtgcatagggctacagaagcaaagccaaaaga

SEQ ID NO: 446054 - DNA, 269 bp, Homo sapiens
ccctatctggctccacccatcttgtgcccccaatccccctacccctagggctgagggagctcagattaatgtgtactcaggaaatcagcccattcctggggcagcagagagctcctcccaataaacaaggatcaagtacacagccagcagcactggcaacagccagctcttacccatggcgccatctactggcttrtaggtcaaaccacacacccaatataaaacctgctggcagaagtgcatagggctacagaagcaaagccaaaaga

SEQ ID NO: 446055 - DNA, 550 bp, Homo sapiens
cagtctttgattgcccttttgtcttctaggaataatggccttatattctggactgaaacctactatgattcgagcattccctgacaatggagcactctttttggcctaygaatatagcaggaatttgatgatgagccagttggaagcatactgaagtgtcttggagggcctgagccaagcacaggtgtttgaggactacagttcatttcagggtttcttgtagtacaagaccagcgtgaagtcattctgatttcttgggaattttgcctttctgtcttctcttataccctatatcttaacttgtttggaagaacctctattttacatcatgtcatttctgcccataattgtactgaaatagagaagtcactgctctttcccttggtaaaatagagagtggtcagtagccttatgcacctaattcaaaagactgagtacagttctgtcagggcttttacataaacctctacttgcacattcaatttggacagttatgtgttgagggaaatacagtttggttccatgtttatttcaaatattaccagaaaaa

SEQ ID NO: 446056 - DNA, 550 bp, Homo sapiens
cagtctttgattgcccttttgtcttctaggaataatggccttatattctggactgaaacctactatgattcgagcattccctgacaatggagcactctttttggcctacgaatatagcaggaatttgatgatgagccagttggaagcatactgaagtgtcttggagggcctgagccaagcacaggtgtttgaggactacagttcatttcagggtttcttgtagtacaagaccagcgtgaagtcattctgatttcttgggaattttgcctttctgtcttctcttataccctatatcttaacttgtttggaagaacctctattttrcatcatgtcatttctgcccataattgtactgaaatagagaagtcactgctctttcccttggtaaaatagagagtggtcagtagccttatgcacctaattcaaaagactgagtacagttctgtcagggcttttacataaacctctacttgcacattcaatttggacagttatgtgttgagggaaatacagtttggttccatgtttatttcaaatattaccagaaaaa

SEQ ID NO: 446057 - DNA, 550 bp, Homo sapiens
cagtctttgattgcccttttgtcttctaggaataatggccttatattctggactgaaacctactatgattcgagcattccctgacaatggagcactctttttggcctacgaatatagcaggaatttgatgatgagccagttggaagcatactgaagtgtcttggagggcctgagccaagcacaggtgtttgaggactacagttcatttcagggtttcttgtagtacaagaccagcgtgaagtcattctgatttcttgggaattttgcctttctgtcttctcttataccctatatcttaacttgtttggaagaacctctattttacatcatgtcatttctgcccataattgtactgaaatagagaagtcactgctctttcccttggtaaaatagagagtggtcagtagscttatgcacctaattcaaaagactgagtacagttctgtcagggcttttacataaacctctacttgcacattcaatttggacagttatgtgttgagggaaatacagtttggttccatgtttatttcaaatattaccagaaaaa

SEQ ID NO: 446058 - DNA, 294 bp, Homo sapiens
actcatacctttcatcatatacaataattaactggrgatagattaaagatttaaatgtaagacctcaagtgataaaaatcctagaagaaaacctcagaaatacccttcttgacattggccttgggaaagaatttttaactaagtccccaaaagcaattgcaataacaacaaagattgacaagtgggacctaataaagctaaagtgctttggcacagcaagagaaatgatcgacagagcaaacagataacccacagaacaggaggaaacatttgcaaactatgcattcaacaaag

SEQ ID NO: 446059 - DNA, 294 bp, Homo sapiens
actcatacctttcatcatatacaataattaactggagatagattaaagatttaaatgtaagacctcaagtgataaaaatcctagaagaaaacctcagaaatacccttcttgacattggccttgggaaagaatttttaactaagtccccaaaagcaattgcaataacaacaaagattgacaagtgggacctaataaagctaaagtgctttggcacagcaaragaaatgatcgacagagcaaacagataacccacagaacaggaggaaacatttgcaaactatgcattcaacaaag

SEQ ID NO: 446060 - DNA, 578 bp, Homo sapiens
gatggtaaacgaagttcttggtaaggctttttcttttaataaaagcaacccccaaaccatttcttttctaacagaaaaacgacttgaagggccaagctggcaagctttgatatgcaaatgcaggccattagaaacagtccacctaatatggcgattcccacctttttcctcttgtcacgatgtgtgccaagtgtcatggccaactccagataacaccatgtgttcagaacatcatggcgacccacatttgcatattaaaggactaaggtgggagggccaggttctttgtgggctacgtaaacgacgcacctggtcaaaccaatcccctgggccctrtgcaaaccggacaccgcctcctccaacatcccaatataagcaaccacttttccgctgcacacggggtttctctttgtttgaattcccccctccctgtctctgtatgggtgatctgttctcttcttccttccttctttcttgcctaaccagctctctgctccttaaaaccactccacgtgtgtctgtgtcattttctctaaatcagcgtgagaccaaggaccctggtgttcttctaatcatcg

SEQ ID NO: 446061 - DNA, 600 bp, Homo sapiens
tgctattaccactattattttgagtcctgttccatgcatggtcaaagcaattccaagctagtatataacacacaaagaatggatgctttaaacaatcttttttttttttttaaggattcaaaagcaaactctggatcctgagcttaactgttacgcaatagatgacatcccacttatttttgtatgttttatttgtcctggcacagtagctcacacctgtaatcccagcactttgggaggccaaggcaggtggatcacgaggtcaggagtttgagaccagacttataaacatggtgaaacccygtctctactaaagatacaaaaattagccaggcgtggtggcacgcgcctataatcccagctactcagcaggctgaggcagaattgcttgaacccaggaggcagatgttgcagtgagccgagatcacaccattgcactccagccaggttgacagagcaagactgtctcaaaaaaaaaatattttatttcttccttgatgatttagaaggactatcttcaaaccagtacaagtatttcatatataatacctcgccattttctgagtaatttgttgcacaataagctacctcatgtccttc

SEQ ID NO: 446062 - DNA, 589 bp, Homo sapiens
agaccttgtttcaaggaggagggaatgatgagccaagtggaaggatgctggtgtggaagtgcacccagggtgctcagtgcggagtgcagggctgagagcaggaggctgggagagggcggctgtggatggggtgcatatgtgtgctagacttgacaagagaaagagaagtctcgtgwtggaggaattcagtggtaagagtgaagagcatgtaaggcagtgggtcgggagagccaagcctggcatggtaaatgggtaaaccttgcatgggcaggtgaccgggaaggagaaggagtgaggaagaagagaaaatgcgagtgcagatcttattgaggagctagtttaatctcttttaaatacattttgtggagacttaagataatttttgtgatttgcaagaatgaataaaattaacattttacggcactgagaaaaaggtgctctgcatgttccataaattttccatttaaaaaaaaaaagttcccaagcctatcaagtaatgctacgcagcatgttttcctttccacagtccttgagaagtaattttcagtgcttctgtgttgatcattttttgctgagtgagtaactgacc

SEQ ID NO: 446063 - DNA, 586 bp, Homo sapiens
taggtgaattcttagataatgataaattagctgccggttactactgagcactttacacgggccaagcattgctgagttctttgtagacattacctcagctacgaaagtgttcacccctattttacaaatgaagatgagagatgaaatgtgggtgtcccagctagtaagtggcagagcctatgtcaaatttaggtcaatgattataaagcctgggttcccctctcttctaccctatatacgttcgtagtaaataatcagaaatgtgaagtggcttgagatttctgatagttaaatagatgrtgtttgagatacaccatcacggaaaatttggttgacaagaaaggtttaattcacataaaaatgtaaggctgttttattgtgttctccactaaattatcttctagttagtaattacatgcccttggcattctaaattgggttctacagatagagtgtggtagaagtcctgttgtgtttttatattctcatagagaaagggtactagtttggattctcgtatcaagttctgctccttaagagttttgatgttatagaacttgggcagttttgccaaaagaccttactt

SEQ ID NO: 446064 - DNA, 646 bp, Homo sapiens
agactaatttataaaaattagttacttttatataccaacaatgaaaaagtggaatttgagattgaaaacacattaccatttattttagcacacacaaaaatggaatagtcaagcataaatctaacaaaatatgtataagatccatatcaggaaaactataaaactttgataaaaaatatcaaagaagatctaaacaaatggaaagatatttcatgttaatgaataagaagactcattaatgtcatgatttcagttcttcctaacttaaattatagacttaatacaatcctaataaaaatctcaataactcattttgtgaatattgacaaactgattgtaaagtttawatgaagtggcaaaagacccagaatagtcaacacaatattgaaggaaaaggtggagggctgacatatccgacttcgagacttcctataaagctagttatcaagacagtgtagctattggcaaaatgacagacaaatagatcaatggaacagaaaagagagccaagaagtagatccacatacacataatcaagtaatttttgacaaaaaatcaaaggcaatacaatagagaaaaaatagtcttagtgctggaacaactgaatacgcacattaaaaaaagaatttatatacagatcctacac

SEQ ID NO: 446065 - DNA, 658 bp, Homo sapiens
gttaccataacatttttactttatacacttttygggtttttttaaaaaactctttgactcttttgtaataacactcagcttaaaacacaaatgtagtgtacagttgttgaaaaagattttctttctttatattcttatcctgtaatattttttctattttttaattttttatttcttccttaccttttaaagttctttgttaaaaactaagactcaaacatacacattagcctaggtctccacagggtcaggaccaccaatatcaccatcttcttcctccgcgtcttgtcccactggaagaccttcagggcaataacacacgtggggctgtcatctcctgtgataacagtgccttctggaacgcttcccaaaggatctgcctgaggctgtttttacagttaaaaaaaataaataggagtacactctaataataaaaaataataataaatgcataaataataataatttaaaaataataaaaatactaggcagtaggactttttctgcttcattataatcttctgagatcactgtcatatatgcagctaattgttgaatgaaatgtcattatgcatcccataactgtatttgctttatctttctgcatatttatatgtcttttggtataaaaattaagtcgcatgtggaagacaacatg

SEQ ID NO: 446066 - DNA, 658 bp, Homo sapiens
gttaccataacatttttactttatacacttttcgggtttttttaaaaaactctttgactcttttgtaataacactcagcttaaaacacaaatgtagtgtacagttgttgaaaaagattttctttctttatattcttatcctgtaatattttttctattttttaattttttatttcttccttaccttttaaagttctttgttaaaaactaagactcaaacatacacattagcctaggtctccacagggtcaggaccaccaatatcaccatcttcttcctccgcgtcttgtcccactggaagaccttcagggcaataacacacgtggggctgtcatctcctgtgataacagtgccttctggaacrcttcccaaaggatctgcctgaggctgtttttacagttaaaaaaaataaataggagtacactctaataataaaaaataataataaatgcataaataataataatttaaaaataataaaaatactaggcagtaggactttttctgcttcattataatcttctgagatcactgtcatatatgcagctaattgttgaatgaaatgtcattatgcatcccataactgtatttgctttatctttctgcatatttatatgtcttttggtataaaaattaagtcgcatgtggaagacaacatg

SEQ ID NO: 446067 - DNA, 658 bp, Homo sapiens
gttaccataacatttttactttatacacttttcgggtttttttaaaaaactctttgactcttttgtaataacactcagcttaaaacacaaatgtagtgtacagttgttgaaaaagattttctttctttatattcttatcctgtaatattttttctattttttaattttttatttcttccttaccttttaaagttctttgttaaaaactaagactcaaacatacacattagcctaggtctccacagggtcaggaccaccaatatcaccatcttcttcctccgcgtcttgtcccactggaagaccttcagggcaataacacacgtggggctgtcatctcctgtgataacagtgccttctggaacgcttcccaaaggatctgcctgaggctgtttttacagttaaaaaaaataaataggagtacactctaataataaaaaataataataaatgcataaataataataatttaaaaataataaaaatactaggcagtaggactttttctrcttcattataatcttctgagatcactgtcatatatgcagctaattgttgaatgaaatgtcattatgcatcccataactgtatttgctttatctttctgcatatttatatgtcttttggtataaaaattaagtcgcatgtggaagacaacatg

SEQ ID NO: 446068 - DNA, 601 bp, Homo sapiens
ttgggtatgtaagaaaagcattaaaaggggttaaatgcaaagttttataaactgcactggtaactatttctcaggctgctgactgtgtaaaaccttcatttaatgtttgtgctaaagtctgccacgcactggataaattcctgcctttagtgaccttggactttggaatcagatggatctgggttgaatcccgcctagctctgccacttacttgctggataattttcggaaaagtatttaacttctcagagccttagttcttccctctgaagatagtcgtgatgagaaagaatccaggtgccctatgtgcaatgttcagcccaggatgagttagcgctcagcatcctagatccttctgcttcccttgaagaaggtgaaggtcccaggaagaggagctgcctgagctgaatttcaaaaccartaaagaattggggctcttcagacacctatgatcatgtccaagaagaccaagtcacgattcatactggcttattgttccttcatttatctatctggtggttactgagtggtgtctctatggaaggtagcatgccgtggactgcagagtgaagggggctagccctcatttgtgttgctgttg

SEQ ID NO: 446069 - DNA, 547 bp, Homo sapiens
acagccccaggtcctccttggagtgcagattatgatctggaggcatgggtttgtgcacgatgccttccagcattagagaggggatgagccatgtatgtatttctccacaacaaacctcatcaaaggagtatcaactggctggggctgccattacaaagtaccatagcctgggaggcttaaacaacagacatttattttctcacagctctgggggctggaagtccaagatgaasatgccggcagagtttcttctcccaaggcctctctctttggcttgtagatatcccccttttccctgtgtcttcacaccatcttccctctgcatatctctgtgtctaaacctcctcttcttataaggacactagtggtattggataagggtctgccttaatgacctcattttaattcatgtacctctttaaagacccagtctccaaacacagtcacattctgaggtgctgggggttaggactccaaaatgtgattctggagggggacacaattcagtctataacagaaggcaagggctttatttctggcatctatt

SEQ ID NO: 446070 - DNA, 467 bp, Homo sapiens
ctattgttgaagtgtctccttactacctcgccctttctggtttcttttcttttcagwtgaatgcattgcttcttattcttttcctcctactcaaaaaagtccacgcttgtgttcctttcagagtttccactagaaaccatacttgttttccagagcaacacttctcccattttttttttttttttttgcccaaatgcctgagcatttgattaagccagaagtggttccaggattaaaaatgaaaggtttctgggtttcaatcagagactaagttgttcacttttttttttttttttttgagacagggtctctctgtcacccaggcacgtgcagtgtcacggtcatggctcactgcaacctctgccttgtgggctcgggtgatcctcttgcctcagcctccccagtagctgggaccaaaggtgcatgccactatgcctggttaatatttttttaaattttttgtagag

SEQ ID NO: 446071 - DNA, 619 bp, Homo sapiens
tttgtcatctcctaaatacctccaacaaatgtagtaattaccgtagcaacttaaaagactagactttttgggcaaaggaattttgacaagttactcggttattttccaagtttatgatggattgccgtctagagaattttgttattctgcacagtcatcaaccctatgacattgtgatcattttttaatgacataaagctgcattatgactcttaaatactcatcccagaggtttatttctttagcatattggcacttagatagtgaagactacacttaaagcagtttttatcagcagacaygttagcatttttctaaaattcaattacctctaggccttggggtgtttagcagatatgataagattattcacataaatagcatagtgtattttccatcaaatcttcatttaagctttaactaaatgaaagtatgttctttaattcaagtttcctctcattctaggaggtggcataaagtaatttaaagtgttgatttaagatataagaaagagctatgaactacatagtagaatcatcctttctcactctggctcctagagctcggctatttctctgcttcttgatgatccagctgccttcttaaaaattgaggaatt

SEQ ID NO: 446072 - DNA, 419 bp, Homo sapiens
atcactctgttccaagatgtaaatataccctcaaactccatttcactaagttataaacttctgtaatacaatctgtttgtaatttagggactgtctctaaaaggctttcaataattatctttaaatgtcacagtcacaagacatgaacagagtgtttagtagttagttacgtatatacaatctgattacaaagtccaaggcaaattctaaaaataagcctcttatatagaaaaagttcagttttacagtttcctatgtcagtactaatatccattccaactccttcctaccaccaccataactacygcaatatgattcaggcagtcctatagacagtaatccagtgactcttaatcctcttgcaattctgggatacccaaaatttcatatctactttctttgcagtggaaccaagacta

SEQ ID NO: 446073 - DNA, 573 bp, Homo sapiens
cagagccagaaagatctgtctttaaaatgcagattataaaaatagttgccttttggggaagaatcaaatgagataaaggatgtgaagagcttattacagtaccaggtgcaaaaatattattagttctttccttcttcctgccgtcccatcccaatgcacatatttgcattgaggacattacacagcttaaaacaatttgaaatattgctgtatctacttgcaactacagtgagataagtgggttcacaaactttaatcatatgttgctttttctggacaccgcatccgacctcataaggaattattactcactagatcataacatcataggctgttttgtcagataagacacttgcgaaatctaccagttgaaatgtgaycttggtcattatccagaattggcctatattaaaaattgtctatctctctcctcttgtaactgtatatggaggtttgaattgcttgctaggaattatccctgccaacctatgacagatacagcgaagtgactcagaggaaccgtgggaatgtgcctcagtgccccactccattttaggagccaaggcgtacaca

SEQ ID NO: 446074 - DNA, 622 bp, Homo sapiens
cttaatttgttatgtgttgttggtgtgacttcctgcatagtttcttagatggaataatgctttggcaatcaccttacccttcaaggtacaaaaaaattctaagtactaaaatatacgggaattacaagtaaggagacgaataaattcattaaagatgaggtaccttctgttagaggagaattttgaatcctaaaattataagtacattaattttaaaactactcacttgaatttgcacttctatttcataccaactgttcattagcaaaggtttctttaccatacatttgccaatacggggtagctcatgaagagagcactggctttgagtatctagtcaagttttgtataagaaaacttctaggctgagttattctttttcaaaataaagttgaactctgaasctacatagtatcttgaggaagtggttagtactttgtgtatgtggtgggaggggaggtcattctgaggacataaaagacattactgctaaaatatgaatgttgattcttaaatatttttaacataaaatttcagataaacagatcttaaaaaaaaccacgcactctctctactcaagggctatttttaatcgttacaagtctcaacgagcatggtattt

SEQ ID NO: 446075 - DNA, 504 bp, Homo sapiens
atcttgtccttagggaggccctttataaaaaagggagatattttaaaataacaaaagcatatgattaacacagaaaagtgtaaaatgttgtacgcccagacaaaaaacatacaaaaaatctacaatatgtaaacaaagcattgatattcatactctataagggttgtctacaaaacaatgagaataaacacctaatccaatagaaaaatagacaagatataatcatacaaaaaacgcaaaactccaaatggctaatgaaaaaaatatatatgttattcattaagctaatattttgttccccttattagattggtaaaatttaaaaagaatrgtactatgctgacagatgtgaagaaaaattgatactattgatacccactgttggtggagatgcaaattattgtttttttgttttgtttttttgacagagtcactctgttgcccagatggagtacagtggtgctatcacagctcactgcagctttgacttcttgagcttaagca

SEQ ID NO: 446076 - DNA, 548 bp, Homo sapiens
taataaaaggtttattacaagaagatataattattataaacattgacacacctgatgatagttcatgaaaatatatcaattttgacagaattccaggtagaagtaaaaaattctacaataatatttagagacttcaataccctctctcaagagcagacagaataatcttcctttaagtaatgaaatagaggacctgggcaacacaataagccaattagatctaacagacatatrcagagcactctacccaacaataacagaatacacatttttctcccagtgaacatgggacattttcagggtagaccacgtgttaggtcacaaattaattcttaataaatttaaaaatattgatatcatacaaagtatcttttctgaacacaagaggatgaagttggaagtcaatatgaaaagcaaaatggaaaaatcacaaatttgtgaaaattaaacaacgtacttttaaccaacggatcaaagaagaaagacaagaaaaattagaaaataaatattaatgaaaataaaaatacaacataccaaaatttatgaga

SEQ ID NO: 446077 - DNA, 578 bp, Homo sapiens
actctacccaacaataacagaatacacatttttctcccagtgaacatgggacattttcagggtagaccacgtgttaggtcacaaattaattcttaataaatttaaaaatattgatatcatacaaagtatcttttctgaacacaagaggatgaagttggaagtcaatatgaaaagcaaaatggaaaaatcacaaatttgtgaaaattaaacaacgtacttttaaccaacggatcaaagaagaaagacaagaaaaattagaaaataaatattaatgaaaataaaaatacaacataccaaaatttatgagacacaaggatagcagagctaagggggaaatttatgcctataaatacttayattaaagaacagaaagatctcaagttgaaagtttatttttacaacttaataaattggaaaagacaagcacaaagctaacagaagaaaggaaataagatgaaagcagagataaacaaaatagagaatagaaaacagagacaatcaatgagaccaaaaagctggttcttcaaaatgatcaataaaattgacaaactttcagtgagactgactaaaataaatag

SEQ ID NO: 446078 - DNA, 506 bp, Homo sapiens
tctgggggtatgcccaaaagaattgaaagtagggtgttgaagaatatttgtattctcatttctatagcagtaygatcaccatagctgaaatatggaagtaaccaacccaagtgtccttcagtggatgactggataggcaaatgtggtaaatacatacaatggaatattgtttagcattaaaaaggaaggaaaaatctggcatttgtaacaacacagatgaactttgaggacattaggctaagtgaaataagccaatcagacaaaggcaaatatataattccatttttatgaggtaattagtcaaaattataaaggcagaaactggaatggtggatgccagagactgaatatctatattcattaaacactaactcctcatttccccttccttccagttttggaagatggaagcagttctagagtggatcgtagtgatggttgcacggtatgaatgcaattaatgccactcaactacacacacaaaatggttaagatagtaaatttta

SEQ ID NO: 446079 - DNA, 613 bp, Homo sapiens
ctagagtttaaagtgctagacagagacatattggcaacaatagtcaatgaagaaatgataaaacataagtaaaaccaaaatgataaaagatgaaaaaatacattaaaaaaattaaaatgcttcaatacaacaatatctrttatattttaataactagtacagcttcctaggcatttgaactttaatcacacaatcagtgctatgtgaataatatttttggaaatatttgttggaccagatgaatgtcaaactgtataagagataaaaatgaaatgcaatcaatcaatattatttaaattgttttatcaagttttatgtcaaatattcctttcattaaaatagttaaaatcaaacaaaatgattttattttgtatatgtttgcctaaatattatcgaagtagtacgtccctttccccacctccaaaggagctagctactatttcttttttctttccccatatagcatttaccttcattgtatgcatagaaggcagtcaacaaaaattatatgtgaagctttgttatttttctcctcaccaatggtcaagttattcctcaacataaaatctcttagaagaactgccatcaaggtattatacaaatgggttgtttg

SEQ ID NO: 446080 - DNA, 471 bp, Homo sapiens
gctcacagatcaaaattaatataattaaaaatgatcttactgcctgaagcaactacggattcaactaccaatgtcatttttcacaaaattagaaaaagcaattgtaaaattcataggaaatgaaaaacaaaacaaaacaaaacaaaatgcccaaataatcaaagcaatcctgtaatcccaacattttgggatgccaaggtgggtggattgcttgagctcaggagtttcaggccagcctgggcaacatggcaaaaccttgtctttacaaaagattcaaaaattagccccgtgtggttgcatgtacctgtggttccagctacctgggaggctgaggtgggaagatcacttgagcccaggagacagaggttgtaatgaaccaagacagcaccaatgcgctccagcttgcatgacagagtgagacccagtcccaaaamacagcgagcctaagaataaagtcacttctgttgcatt

SEQ ID NO: 446081 - DNA, 580 bp, Homo sapiens
caaggaaccatggaggatgggcttagtttgctccttctgtgcatgcagagggcatgccactccgtgttccctaacactccaaaggagaaagggaatagggtgtgaaacaaaaaccacagagctatgtgatcgctttccctgttctatgccacctagaagccatttgtaaacacacagcttcasaattcagcttcagcatcatgaactgccaaattatagcacaggcattatcaatcctagagagttttactgtgtgtcttttgtttctaaaaattcaaacataaaataattaacctctatttagaaaaattatgactatgtctaacagggtgaggaataagtaaaaacattccctctcacatgcataatttatgagaactcaagcagaagtttatatctcaaaatcaacaaaagtttcttgcgaactataacgtttcagtttcataaacttccaaaagacaatctattggctttctgtatttttccaggaaatatattgaatggaataagctgttaaggccgcaactctaaaagctggcaattctggtgttttgtgatgaatgacagagaaaatatcagt

SEQ ID NO: 446082 - DNA, 580 bp, Homo sapiens
caaggaaccatggaggatgggcttagtttgctccttctgtgcatgcagagggcatgccactccgtgttccctaacactccaaaggagaaagggaatagggtgtgaaacaaaaaccacagagctatgtgatcgctttccctgttctatgccacctagaagccatttgtaaacacacagcttcacaattcagcttcagcatcatgaactgccaaattatagcacaggcattatcaatcctagagagttttactgtgtgtcttttgtttctaaaaattcaaacataaaataattaacctctatttagaaaaattatgactatgtctaayagggtgaggaataagtaaaaacattccctctcacatgcataatttatgagaactcaagcagaagtttatatctcaaaatcaacaaaagtttcttgcgaactataacgtttcagtttcataaacttccaaaagacaatctattggctttctgtatttttccaggaaatatattgaatggaataagctgttaaggccgcaactctaaaagctggcaattctggtgttttgtgatgaatgacagagaaaatatcagt

SEQ ID NO: 446083 - DNA, 552 bp, Homo sapiens
caagatctcaattttagctcagtgagacttgcatcrtatttttgacatattgccctataaaataataaagttgtgttgctttgagccactatgcaaaaatctgttacagcagcaagagaaaactaattaatgtatacattgaaattctgaaagcaaccactaaaatataaggtgaaaaggtatagctatctagggcagatcctagaacgaaagagaatgccagatacttgccattcctagtaatgggacgcctaagtctgtccgttgttttggacatgagaaaccgagcaatgaggttattattagtagtagtagtattattttgctttttcctagaatcattttttctgcgttctgaacttttctgtgtttctggtgttctgaattatctagtgaggatggatttaaatagtcattttattttatactaaaataatcagtatttaagtgttttacaaataaatatttatttctcaatacctcagataatgacagatacacctaaatattggcaaaactaatcttttgcacttgtactgttatacaagtttt

SEQ ID NO: 446084 - DNA, 608 bp, Homo sapiens
gttgtaaccaattgtagttatagtagagatgaaatgtaaaggaaaactgtggccatattttgggatatgtatgaaaatgtttgttgaggacatgcttgagtctaaattgttgcaactcaaattgtgggctgagtccagtaacattgaaatcaacaggaaggctgttagagatggagaatatcaggccccacttcaaatctgctgaataaaaatctgcatagcatgattcctatgaatgttaaaacttgataaacgctggtttaaaggatttgatgtctaacgaaattacctatagctccattgtatctgataaatatwcaaagagtagttttaattcagtgtaaatatatattccaatgtctataaagtaagaaatatacagctgaccttgaaactctgggaatgtctgtgtgggtatatgtgtatgtgtgtgagcgtgcatgagttcttgagtgatagggacaagccatacagtggtggttctcaaaattgagcaagcagcaggatcacctggaggctgttaaaacacatgagccccaccccagtatctgattcagtaggtacaaggtgaggccctaaactctgcatttttgcccagttctcaaggt

SEQ ID NO: 446085 - DNA, 608 bp, Homo sapiens
gttgtaaccaattgtagttatagtagagatgaaatgtaaaggaaaactgtggccatattttgggatatgtatgaaaatgtttgttgaggacatgcttgagtctaaattgttgcaactcaaattgtgggctgagtccagtaacattgaaatcaacaggaaggctgttagagatggagaatatcaggccccacttcaaatctgctgaataaaaatctgcatagcatgattcctatgaatgttaaaacttgataaacgctggtttaaaggatttgatgtctaacgaaattacctatagctccattgtatctgataaatatacaaagagtagttttaattcagtgtaaatatatattccaatgtctataaagtaagaaatatacagctgaccttgaaactctgggaatgtctgtgtgggtatatgtgtatgtgtgtgagcgtgcatgagttcttgagtgatagggacaagccatacagtggtggttctcaaaattgagcaagcagcaggatcacctggaggctgttaaaacacatgagccccaccccagtrtctgattcagtaggtacaaggtgaggccctaaactctgcatttttgcccagttctcaaggt

SEQ ID NO: 446086 - DNA, 443 bp, Homo sapiens
ttatcaacaagcaaatttagctcagtaaagattcctttaaaaggaattgcatagaagtcacacaagcagatattctatggtgtagttttagtataatatctaattaygggaataaacacaaaaatctcaacaataatctccaccaaatcactgaactcttgtgcaagtggaaaagccgaacacagtgtaatcgcaggcaaaggatgctagctggctaattcaccattaagcacgatgccaataggggacttaaaccagtgttaaacagactgggattcagtgggcatgagaaacatgagtaggtgataaagatcctggataaaaaaggaagaaaatacctatacctagtttctcacagatatttaccctatgcaccaccatatgccttcatcatgactccaaagttatatggcaaatttaccgtactttgtattatatatttg

SEQ ID NO: 446087 - DNA, 588 bp, Homo sapiens
tcaccattaagcacgatgccaataggggacttaaaccagtgttaaacagactgggattcagtgggcatgagaaacatgagtaggtgataaagatcctggataaaaaaggaagaaaatacctatacctagtttctcacagatatttaccctatgcaccaccatatgccttcatcatgactccaaagttatatggcaaatttacygtactttgtattatatatttggatattgtagggattaagagcacataagccttagagaaatcccattgggatttgaatcttggatctgctgcttcctgattgtgtgagtattaataaattattaaattcttattgtgtctttttcccaatttgtaaaatggggatagtagaaatacttatctcatagggttattgaaaaattagatgaattaatatgtgaaaagtatgagttcctaggtcatagtatatgttcaataaatattaggtatcaccattattgcatataaacacaggtttacacacacaaggatatatgtatatacacgtatgtgcatatacatatacaatcacttatagacatatatacacaagtatgtaatatgtg

SEQ ID NO: 446088 - DNA, 588 bp, Homo sapiens
tcaccattaagcacgatgccaataggggacttaaaccagtgttaaacagactgggattcagtgggcatgagaaacatgagtaggtgataaagatcctggataaaaaaggaagaaaatacctatacctagtttctcacagatatttaccctatgcaccaccatatgccttcatcatgactccaaagttatatggcaaatttaccgtactttgtattatatatttggatattgtagggattaagagcacataagccttagagaaatcccattgggatttgaatcttggatctgctgcttcctgattgtgtgagtattaataaattattaaattcttattgtgtctttttcccaatttgtaaaatggggatagtagaaatacttatctcatagggttattgaaaaattagatgaattaatatrtgaaaagtatgagttcctaggtcatagtatatgttcaataaatattaggtatcaccattattgcatataaacacaggtttacacacacaaggatatatgtatatacacgtatgtgcatatacatatacaatcacttatagacatatatacacaagtatgtaatatgtg

SEQ ID NO: 446089 - DNA, 402 bp, Homo sapiens
tccagcatttccacttgccacacgtgcaagtgttgcttgttcccatcctggtctctgtggcccttcatgctagcttcctgagaaaatgcacatcccagtaagtaaggacaaatcatgaggcagggtgaaggatgacctgaaaataaggaacaaactactgtacgtgagcatattagtcactgaaaacagacctataaccatcaatagttcaaagaaactcaamctgcaacccaaagaatctgcgtatgaataaggacttcactgattattttctgacccaaggtactgctattattgtggatattgaaatgttttatacataaactatatctccatatggtattgagattttgttaaaatttatttgctcattgtgttagttcctaagggctgccataaaaa

SEQ ID NO: 446090 - DNA, 456 bp, Homo sapiens
tccttcaataatgtcttggaaaagttagcaaatatagtagtaagctcaatttattttattatttattatatttttaatttcaaaacacttgtccagtaagtcatttattgaaatgcaaaagattgttaataaaattattcccaagggatgttgtgaagtggcattcaaaatatatttcagcactaatgttaaaatttagggctttcaaagaggctaycttagggtttatactatgccatttttagtagaatattgcaaaggtgtttctacccattgctcttggccctactatgtatccatgaacattataaagcagtttagaatgaggagccaatcagataggtagatttggctgaacattgcaaaccttgtaattttgcctttgaaaagtgaaactaaatgttcgaagattgtttaactttatctttaaactgattcatttataaataacttaga

SEQ ID NO: 446091 - DNA, 596 bp, Homo sapiens
gtgaaataagccagacatagcaatgcaattacagcatgatctcactgatatgtggaatcttaaaagtttgaattcacagatgcagagagtagaatgatgattaccaggggccggatggtgggggtggagttgaggaagatgttggtcaaagggcgcatcatttcagttagataagtttaagacattttttgtataatgtggtgactatagctaataacaatgtattatattcttgaagatcattgagagtatattttaagtgttatcaccacaaaaaaagataaggaaatgargtaacgcatatgttaattagctcaatttagccattgcataatgtatgcacatttcaaaatattatattgtaatcaataaatatatgcagtttttatttaattaaaaaaagaaatgaacctcttttacaaaaagaaaatcgtatgcatgactctaggcctaactcaaatcagtctttgagttcctctccttctaacccatggaccattctgctgagatggtaggccttccagcatgcatatttacctgcatctttctcatttaaaactctgaactatttcatagtcctcaggaaagagccccag

SEQ ID NO: 446092 - DNA, 581 bp, Homo sapiens
actgcaatggctaatgtagaaaaaagaggggtatcccacgttaatgattaagtaattctggagacctccttagaattgtagctaaaagtttgggaaatacattttgatggaactgtgatgtaccacccagctcccccttccataaacacttgattgcttcaactattaggagtgcagacaagagacatccttcagttgccagtccttcaggtattgtcttgtagaactacaggaactccatccaaagctacaccagttggggtagggcacatccgatgactagttgatgcaggaatataaagtccagtcattgtgctccaartaagggaaatacaaagggctctgctagcacctaagcatggtatgagatcagccaaggttactctattctgggatcatgatcaccaagaattcaatctcttgctcttaccagtcctgttacctttctctcccttccacagatgtagattccaaaggcattccttaataaatacccagcatgctaacttccatctcaccgtatgtacaatagagaaaccgcctgaaagccccctgaaaccgccatctaagtggcatgaaat

SEQ ID NO: 446093 - DNA, 581 bp, Homo sapiens
actgcaatggctaatgtagaaaaaagaggggtatcccacgttaatgattaagtaattctggagacctccttagaattgtagctaaaagtttgggaaatacattttgatggaactgtgatgtaccacccagctcccccttccataaacacttgattgcttcaactattaggagtgcagacaagagacatccttcagttgccagtccttcaggtattgtcttgtagaactacaggaactccatccaaagctacaccagttggggtagggcacatccgatgactagttgatgcaggaatataaagtccagtcattgtgctccaagtaagggaaatacaaagggctctgctagcacctaagcatggtatgagatcagccaaggttactctaytctgggatcatgatcaccaagaattcaatctcttgctcttaccagtcctgttacctttctctcccttccacagatgtagattccaaaggcattccttaataaatacccagcatgctaacttccatctcaccgtatgtacaatagagaaaccgcctgaaagccccctgaaaccgccatctaagtggcatgaaat

SEQ ID NO: 446094 - DNA, 581 bp, Homo sapiens
actgcaatggctaatgtagaaaaaagaggggtatcccacgttaatgattaagtaattctggagacctccttagaattgtagctaaaagtttgggaaatacattttgatggaactgtgatgtaccacccagctcccccttccataaacacttgattgcttcaactattaggagtgcagacaagagacatccttcagttgccagtccttcaggtattgtcttgtagaactacaggaactccatccaaagctacaccagttggggtagggcacatccgatgactagttgatgcaggaatataaagtccagtcattgtgctccaagtaagggaaatacaaagggctctgctagcacctaagcatggtatgagatcagccaaggttactctattctgggatcatgatcaccaagaattcaatctcttgctcttaccagtcctgttacctttctctcccttccacagatgtagattccaaaggcattccttaataaatacscagcatgctaacttccatctcaccgtatgtacaatagagaaaccgcctgaaagccccctgaaaccgccatctaagtggcatgaaat

SEQ ID NO: 446095 - DNA, 590 bp, Homo sapiens
ggaatcaaatgggatttcctcaatcttgtaaaggacatctaggaaaacacacagctaaaatcatacttactggaaaatactgagcatttcatccctgagatggkgaacaagacaaagatgcccactctcaccatttcttgtcaacaatatactagaggttttgaccagggcaattaggtaagggaaaaaaaaggtatcaaagtagaaaagaaatgaatataactatatctatttcaagatgacatgatcttcaaaaataagtaatccataaaaattctattaaagactaatgaatggattcagtaaatttataggatataacatgaacataaaattaattatatgtttataaaataaggaataattccaaaacaaaactatagaaacagttccatgtaaaacaacatcaaaaagattaaaatatttaggtatatgtttaagtgaaagacttgtagtcttgcattctttcacttgtagtgaatgacttgtacacaaaaactgcagaatgtcattgaaggaaattataggagatcaaataaatggaatggcattttgtattcatgtattggaaatcttaatgtaaaaatgac

SEQ ID NO: 446096 - DNA, 581 bp, Homo sapiens
attaaatctcctacactctcgtgaatgtgctgttctcgcctcccccttcccagaaatttctcaatgtgccagcagtgtctcccttattastgccagtctcttcctacaacaatctaagaggaattgagaaaatcagataaccagttttgttaaatcagtaacttaatgcactcaagcttcagtcaggggcaaagattcagtcaggggcctctggctgaaggaatttcaggacacttgctccatcaaaagcatggaaagaactctctatactgcttggtggccaagttttacttctagacctgttcaaaagagcttaggtttctagacatgtcagggtcaaaatatccaggcaatttggcaaaataagaataaaagccaggaaaacagagaaacctacactcaaatctcacttgagcaagttaatctctctgagccgcaatttttttatccataacagttcaatatacgtggaaggaatctaccaaataaatgtgaaaatacataccaaacagtcaaagaaaacattttctgtattccccactcatgcacatgcatttattcctcacttactgaacccctgt

SEQ ID NO: 446097 - DNA, 581 bp, Homo sapiens
attaaatctcctacactctcgtgaatgtgctgttctcgcctcccccttcccagaaatttctcaatgtgccagcagtgtctcccttattactgccagtctcttcctacaacaatctaagaggaattgagaaaatcagataaccagttttgttaaatcagtaacttaatgcactcaagcttcagtcaggggcaaagattcagtcaggggcctctggctgaaggaatttcaggacacttgctccatcaaaagcatggaaagaactctctatrctgcttggtggccaagttttacttctagacctgttcaaaagagcttaggtttctagacatgtcagggtcaaaatatccaggcaatttggcaaaataagaataaaagccaggaaaacagagaaacctacactcaaatctcacttgagcaagttaatctctctgagccgcaatttttttatccataacagttcaatatacgtggaaggaatctaccaaataaatgtgaaaatacataccaaacagtcaaagaaaacattttctgtattccccactcatgcacatgcatttattcctcacttactgaacccctgt

SEQ ID NO: 446098 - DNA, 639 bp, Homo sapiens
  misc_feature (1)...(639): n = A,T,C or G
tattaacatgttatgtattcaagtaattacagtgtttatatgacttactattattcctaaatgattaatatttcagtattatggttaatgaaattcaattaatatactgctcactgaaacataatgctattaactttagatttaatcatgttaataatggattagagggctctaataaaatgaccccacaaaacctttcgacaaaacccacrtatgaaagattcatttgtctctttcttattattaatgtaaactcatactttatactagcactaaaacttcacagggtatttgctntgaggaatatttagcctcttcaatgcacacatgcgttattaatttaatcaaatataataatataaagtgctttagggtaagaatataatcactttcaaatggtatcagagttttctatttaccatgctctttcaatgctaggcatagaacctggtgactggcagccgtaatccccttctttttcttttgtttagatttttttgctatttattttatttatttgtttttttttaatttccaacttttaagttaaagggtacatgtgcaggtttgttacacaggtaaacgtgtgtcacggtggtttgctacacagatcaccccatcacctaggtattagcccag

SEQ ID NO: 446099 - DNA, 639 bp, Homo sapiens
  misc_feature (1)...(639): n = A,T,C or G
tattaacatgttatgtattcaagtaattacagtgtttatatgacttactattattcctaaatgattaatatttcagtattatggttaatgaaattcaattaatatactgctcactgaaacataatgctattaactttagatttaatcatgttaataatggattagagggctctaataaaatgaccccacaaaacctttcgacaaaacccacgtatgaaagattcatttgtctctttcttattattaatgtaaactcatactttatactagcactaaaacttcacagggtatttgctntgaggaatatttagcctcttcaatgcacacatgcgttattaatttaatcaaatataataatataaagtgctttagggtaagaatataatcactttcaaatggtatcagagttttctatttaccatgctctttcaatgctaggcatagaacctggtgactggcagccgtaatccccttctttttcttttgtttagatttttttgytatttattttatttatttgtttttttttaatttccaacttttaagttaaagggtacatgtgcaggtttgttacacaggtaaacgtgtgtcacggtggtttgctacacagatcaccccatcacctaggtattagcccag

SEQ ID NO: 446100 - DNA, 639 bp, Homo sapiens
  misc_feature (1)...(639): n = A,T,C or G
tattaacatgttatgtattcaagtaattacagtgtttatatgacttactattattcctaaatgattaatatttcagtattatggttaatgaaattcaattaatatactgctcactgaaacataatgctattaactttagatttaatcatgttaataatggattagagggctctaataaaatgaccccacaaaacctttcgacaaaacccacgtatgaaagattcatttgtctctttcttattattaatgtaaactcatactttatactagcactaaaacttcacagggtatttgctntgaggaatatttagcctcttcaatgcacacatgcgttattaatttaatcaaatataataatataaagtgctttagggtaagaatataatcactttcaaatggtatcagagttttctatttaccatgctctttcaatgctaggcatagaacctggtgactggcagccgtaatccccttctttttcttttgtttagatttttttgctatttattttatttatttgtttttttttaatttccaacttttaagttaaagggtacatgtgcaggtttgttacayaggtaaacgtgtgtcacggtggtttgctacacagatcaccccatcacctaggtattagcccag

SEQ ID NO: 446101 - DNA, 445 bp, Homo sapiens
caaagcgattatttacctataatttgctggtcttcaagacaaaaaccatgtcaatgagactaaggaggttaaatgatgtattaatatatgagtcagaatagccaagtagcttaaaccactttatcatactaatagtgcarcatgatccatcttttaagaattctttctttcaggagagaatttttcaggtctcttatgactgccatttgccagctgactaaacacaatctatgctctattctgtaacagcctttaaactccctgctgtggactaataagattcaatttaatttttagacattcaaagtatttgtttatattgactacattgaaaatatcaaatttggggatccttttcagctttttaatcttaacggcagaataagaaaatagtctaagaaactttcctattgataaatcgatatataaagaaacataattgata

SEQ ID NO: 446102 - DNA, 550 bp, Homo sapiens
tatttttgcttttatagtatgttgtgctgagaggaaaaagcaacagaacatgtttcaaagcgattatttacctataatttgctggtcttcaagacaaaaaccatgtcaatgagactaaggaggttaaatgatgtattaatatatgagtcagaatagccaagtagcttaaaccactttatcatactaatagtgcagcatgatccatcttttaagaattctttctttcaggagagaatttttcaggtctcttatgactgccatttgccagctgactaaacacaatctatgctctattctgtaacagcctttaaactccctgctgtggactaataagattcaatttaatttttagacattcaaagtatttgtttatattgactacattgaaaatawcaaatttggggatccttttcagctttttaatcttaacggcagaataagaaaatagtctaagaaactttcctattgataaatcgatatataaagaaacataattgataactcatctagctatgtctcaatatgggataagtattttatggggagaaat

SEQ ID NO: 446103 - DNA, 661 bp, Homo sapiens
tttaattgactcacagttccacaggctatacaggaggcatggctgggagggctcagaaaacttacaatcatggcagaagagtgaaggggaagcaagcatgtcttcacacggcagcgggagagagaaagagagtgaagggggagctactacacactttcaaacaaccagatcttgtgagaagtctatcacaggacagcactagggagatggtactaaaccattagaaatcaccccatgattcaatcacytttcaccagctcccacctctaatattggggattaaattcaacatgagatttgggtggggacacagagccacaccatatcaacaatggtggcatttttcaaatgaaaaaagaggtcttgaactctagagggtaaattgctgatgcttaatcttttcacatatttgtgttatttgtacatttgtttgtcaataggaagacagagataatggcataacacagtaataatgccaacactattattacatgataccttataaaaacacttttacagaatttgaacatcactagactttgagaagtaggtaagattcagaccacaggcctgattaacagccaagaaaaaaccaaggctcagagagattcagacacttgtccaattagtaagtggtgaactggactggaagccagcattg

SEQ ID NO: 446104 - DNA, 661 bp, Homo sapiens
tttaattgactcacagttccacaggctatacaggaggcatggctgggagggctcagaaaacttacaatcatggcagaagagtgaaggggaagcaagcatgtcttcacacggcagcgggagagagaaagagagtgaagggggagctactacacactttcaaacaaccagatcttgtgagaagtctatcacaggacagcactagggagatggtactaaaccattagaaatcaccccatgattcaatcacttttcaccagctcccacctctaatattggggattaaattcaacatgagatttgggtggggacacagagccacaccatatcaacaatggtggcatttttcaaatgaaaaaagaggtcttgaactctagagggtaaattgctgatgcttaatcttttcacatatttgtgttatttgtayatttgtttgtcaataggaagacagagataatggcataacacagtaataatgccaacactattattacatgataccttataaaaacacttttacagaatttgaacatcactagactttgagaagtaggtaagattcagaccacaggcctgattaacagccaagaaaaaaccaaggctcagagagattcagacacttgtccaattagtaagtggtgaactggactggaagccagcattg

SEQ ID NO: 446105 - DNA, 577 bp, Homo sapiens
tgatttatgaaggactaccttaaatatgaaagaaaatatttaatgatctatacccatctatttatctggaaagacctgcatcttttcattacatgctgcattgagaaaatcatttaatatactaaaaatcacaaatctgtaaaacatgtataaggtcaaaaagaaaaccaatgtcagaactgcaggaagataaggtgattttatttgcttcaatgtcctccttatcatctacataacaatcccagaccccattcttaaatccaacatttstaactaactcctaggtattaatactaacaaatcaaaaaactacgcatgtccaatttggtctcataagtcttttcttataggctttatctcagttaatggtgttaattttttcaaggtataaacctatcaacattcttcccctttttccttcaagcccttctccagccctctacccactaacattttgtgtttgccaaatccagatgatttaacttcatcattttctgaggattcattttcatctcttcagttctgacagcctttattcatattcccatgatacttttcttttctgtattcacaatcg

SEQ ID NO: 446106 - DNA, 577 bp, Homo sapiens
tgatttatgaaggactaccttaaatatgaaagaaaatatttaatgatctatacccatctatttatctggaaagacctgcatcttttcattacatgctgcattgagaaaatcatttaatatactaaaaatcacaaatctgtaaaacatgtataaggtcaaaaagaaaaccaatgtcagaactgcaggaagataaggtgattttatttgcttcaatgtcctccttatcatctacataacaatcccagaccccattcttaaatccaacatttctaactaactcytaggtattaatactaacaaatcaaaaaactacgcatgtccaatttggtctcataagtcttttcttataggctttatctcagttaatggtgttaattttttcaaggtataaacctatcaacattcttcccctttttccttcaagcccttctccagccctctacccactaacattttgtgtttgccaaatccagatgatttaacttcatcattttctgaggattcattttcatctcttcagttctgacagcctttattcatattcccatgatacttttcttttctgtattcacaatcg

SEQ ID NO: 446107 - DNA, 577 bp, Homo sapiens
tgatttatgaaggactaccttaaatatgaaagaaaatatttaatgatctatacccatctatttatctggaaagacctgcatcttttcattacatgctgcattgagaaaatcatttaatatactaaaaatcacaaatctgtaaaacatgtataaggtcaaaaagaaaaccaatgtcagaactgcaggaagataaggtgattttatttgcttcaatgtcctccttatcatctacataacaatcccagaccccattcttaaatccaacatttctaactaactcctaggtattaatactaacaaatcaaaaaactacgcatgtccaatttggtctcataagtcttttcttataggctttatctcagttaatggtgttaattttttcaaggtataaacctatcaacattcttcccctttttccttcaagcccttctccagccctctacccactaacattttgtgtttgccaaatccagatgatttaacttcatcattttctgaggattcattttyatctcttcagttctgacagcctttattcatattcccatgatacttttcttttctgtattcacaatcg

SEQ ID NO: 446108 - DNA, 563 bp, Homo sapiens
tcagtctaaagctgaaatattgatatgaccagggtcctgcttgtggctctttcctttatctatcactctccctattcttatcatcacttgctgtttaaaatgttccctgaaaaacatacatatgttttaaaatatcctataaaatctacgttgccagaccacacatctcccttaagatctggacttctgctatccaagatggtagccattagtcacatgtgcctatttaaatgtaaattaactatagttaaataatattaacaatcatttctatgtcttactgggaagatttcaacggctcagtagcattccctcactaaaatgttgatgttcatcatcttttacacgagctacagcaatatctttccaaacgatgttactgattttagtcatgcatacttcctgtttatcctccccagtgccacatacctaatctttctaasacgcaaatctcatcaaatcactttcttactgatagtctctaaaaggctgataaccattcacaggtaaaacacaaacttattatggaatactgattactccatgatctggcttccaagact

SEQ ID NO: 446109 - DNA, 552 bp, Homo sapiens
aagaaaaaacaaaaaaccttctgcaggtaaaataaattaaaaactgtatttttgcaggtacctgtttttctccactaggttttttgtggttcaataacagctcaacagctccgacgacttcttttctgatagcatgtaatagagcatctccaacatagacattaaagcttaagagtagttcgatgagctccaagttctcattttcaattgcaatgaggagagcagttcttccgagaggatcaatgcaattaatattgattttaaaataaatttcagcttcctctagggatttcttgacactggcataatctcccttttccacagcattcaagtaggctttttctgatggcgagagttctgattctgctcttactatccttagagggatgcggtctctatagggagcattaacatttcttttgtaatagaactgagccatrtttcatgccatgctatttcttcgtctctgaaagtagaaacaaaaaacacaaagattagtgttaatatgcttttaaaattgttaagcatcatacttctccaactcacagtgat

SEQ ID NO: 446110 - DNA, 636 bp, Homo sapiens
acctgagagctttaactcaattttaataattcggtttcaataataaatcattagatattatcctgtcatttaatgagggatcattatgtaccaagcattgtgatttattttctatatcttaccaactgcactgtcagatagatattcttagtttcagtttatagatgagaaacctggggattacagatattaggtaacttatactaggttactcagctcctgaatatgaggatcaagattcaaactggaatctatgtagcatcaaatctgaggcttttaatcaactcccctagaaaaattggggtggcttcaracaagtcaaatgaaagacattgtgaaagtgtctgtcacagaaaaattatcatgctattatttttctcaaatgctgttaaccctaatattccatcaaccaagtattctatcctcctgccataatttactgtaaaaacaatcacatttgggtctgaaacatgatccttttattggatcatcaataattaattttcagacacaaattttactctaaacagaatttttgcaagcagaaaataatatgcattttttgtgttttcctctgaaaatttgtttactggttatgtcagtggaaactccaggaagatatatcaaattgaatat

SEQ ID NO: 446111 - DNA, 508 bp, Homo sapiens
cttggagaacttttctgtctagccggaggattgtatatacaccaatcatcactctgtatctagctcggggatcatggaagcaccaaataagcactctgtatctagctaatctggtggggacttggagaacttttatgtctagctaaaggattgtamatgcaccaatcagcaccctgtgtctagctcaaggttggtaaacgcaccaatcagcaccttgtgtctagctcaaggtttgtaaacgcaccaatcagtgctctgtgtctagctaatctagtggggacttggagaacttttacctctagctagaggattataaatacaccaatcagcactctgtgtctagctcagggattgtaaatccctgcacaatcagcactctgtgtctagctcagggattgtaaatccctgcacaatcagcaccctgtcaaaacggaccaatcagctctctgtaaaacggaccaatcagctctctgtaaaacggaccaatcagctctctgtaaaatgggcc

SEQ ID NO: 446112 - DNA, 529 bp, Homo sapiens
aaacgcaccaatcagcaccttgtgtctagctcaaggtttgtaaacgcaccaatcagtgctctgtgtctagctaatctagtggggacttggagaacttttacctctagctagaggattataaatacaccaatcagcactctgtgtctagctcagggattgtaaatccctgcacaatcagcactctgtgtctagctcagggattgtaaatccctgcacaatcagcaccctgtcaaaacggaccaatcagckctctgtaaaacggaccaatcagctctctgtaaaacggaccaatcagctctctgtaaaatgggccaatcagcaggatgtgggtggggtcagatgagggaataaaagtagactgcaggagccagcagcagcaaccggcttaggtgtgtttgaatagcatgggagatttgttcttttgctgtttgcaataaatcttgctgctgctcactgcttgggtccacactgcgtttatgagctgtaacactcactgagaaggtctgcagtttcactcttgaggccagcg

SEQ ID NO: 446113 - DNA, 529 bp, Homo sapiens
aaacgcaccaatcagcaccttgtgtctagctcaaggtttgtaaacgcaccaatcagtgctctgtgtctagctaatctagtggggacttggagaacttttacctctagctagaggattataaatacaccaatcagcactctgtgtctagctcagggattgtaaatccctgcacaatcagcactctgtgtctagctcagggattgtaaatccctgcacaatcagcaccctgtcaaaacggaccaatcagctytctgtaaaacggaccaatcagctctctgtaaaacggaccaatcagctctctgtaaaatgggccaatcagcaggatgtgggtggggtcagatgagggaataaaagtagactgcaggagccagcagcagcaaccggcttaggtgtgtttgaatagcatgggagatttgttcttttgctgtttgcaataaatcttgctgctgctcactgcttgggtccacactgcgtttatgagctgtaacactcactgagaaggtctgcagtttcactcttgaggccagcg

SEQ ID NO: 446114 - DNA, 529 bp, Homo sapiens
aaacgcaccaatcagcaccttgtgtctagctcaaggtttgtaaacgcaccaatcagtgctctgtgtctagctaatctagtggggacttggagaacttttacctctagctagaggattataaatacaccaatcagcactctgtgtctagctcagggattgtaaatccctgcacaatcagcactctgtgtctagctcagggattgtaaatccctgcacaatcagcaccctgtcaaaacggaccaatcagctctctgtaaaacggaccaatcagctctctgtaaaacggaccaatcagctctctgtaaaatgggccaatcagcaggatgtgggtggggtcagatgagggaataaaagtagactgcaggagccagcagcagcaaccggcttaggtgtgtttgaatagcatgggagatttgttcttttgctgtttgcaataaatcttgctgctgytcactgcttgggtccacactgcgtttatgagctgtaacactcactgagaaggtctgcagtttcactcttgaggccagcg

SEQ ID NO: 446115 - DNA, 608 bp, Homo sapiens
tcttgctagctttgaaaagtaaatgactctttaaaagtactcatttcaggccgggagcggtggctcatgcctgtaatcccagcactttgggaggccgagacaggcagatcacgaggtcaggagattgagaccatcctagctaacacggtgaaaacccatctctactaaaaatacaaaaaatgtagccaggcatggtggtggaagcctgtagtcccagctacttgggaggctgaggcaggagaatagcatgaacccgggaggcggaggttgcagtgagccgagatcgcgccactgcactccagcctgggagagagagtgagacttcatctcaaaaaaaaaaaaaaaaaaaaaatcctactaatttcaaaaatgaaatttaacccaaatacatttatttataaaagtcaaacttcacatatgatatttggcataatatattgagttatggaaaaggaaaatttttactttttctcaatgttttataattctataagaacaaagtcttatgctatttgtagacttaaattcttaaaattagaagaagtaaatttatamatatatatttttatgcttattttaataattctcatttaataaagctatgatat

SEQ ID NO: 446116 - DNA, 563 bp, Homo sapiens
caactaaacctctttcttttataaaattgcccagtctcaagtatgtctttattagcagtgtgagaacaaattaatacactatgcataaatctaaataattaaaatrccagaaagaagtgtttagtttaaaaatattatgaatattgctagctcctagaatcagggaagaaatgatcaagaaataaagtgcaattttcatgagccttgatgagaggctattatcattgttacagcatggagagaataatttagttagagacttggaacctgaagtaaagtcataaaatgcaaatgagaagtgacgtttctagtaaatggcaagcattacagagtttcactggtgtctagaatgcataaatgggatgatataagagaaaatattttaaaacatgtgggagctaaagtaataataatttaacagccctataaatggctgtttaaaagtttgtctttgttttggtcaaatagttttcacaaagtaaaaaactcatccagaaactttcagagattaacctcacagcacctcagagaataaattagagtaaaaaaaacacatgtggtaa

SEQ ID NO: 446117 - DNA, 590 bp, Homo sapiens
tatgtgaggagacagtgtcttctatgaagtaggggaaaaacaggactaatgggaattagagtctgagcactgctcagcaggtattcaaagatcagctttctagtttcttgtaactcattctcacaacaaaagtgagttccataaaactgtgagacccataaaaacaaagacagtgtgtcccaagcatttttcttgaacaccattcatttcgtgaataaaactgatttttaatatttctctggttwattggaatgccctctggtacaggtttcaataatgatatttaataggtacaggaaagcacatctgttacattgattctgttaatgtatttcaaatgttaattaatcacctcaaggtgtagattaaagttaatacaatcatagagtataatgcttagacataagcatttttaatcattttttccatcagaaaaaaaaatcaagtcctaaatagagacaaagattttcttataattaagggatgaagaggaccatgcccccagaatcactataacagatgtggtaatatgttgtatatactatttcataaggccatgtccattcattccatttcaccatctgattatt

SEQ ID NO: 446118 - DNA, 384 bp, Homo sapiens
tcataatacaattaccaaactcagaaaagttaacattaatactgccaaaggaaaaatttcaccagtctaaagtaaatagttaagaaaaactctactcaatttctattgcaatcctggagagagatcagaacatagactgaattcccctccaccgaagcaatggcagggtttttaaaagctggggtcraccttctgtgtttgctgattattcttaaccaaagtaaaagtcaactttcttttatcttcatgacagaaggtggttttaccgcttggagcaaaacacataaaaattaggtgtctactctcctacaaagactcagagataggaacactatattccttgatgattacattgcaaaggaatggctcccaggtccttaaaaa

SEQ ID NO: 446119 - DNA, 555 bp, Homo sapiens
gtaaatagttaagaaaaactctactcaatttctattgcaatcctggagagagatcagaacatagactgaattcccctccaccgaagcaatggcagggtttttaaaagctggggtcaaccttctgtgtttgctgattattcttaaccaaagtaaaagtcaactttcttttatcttcatgacagaaggtggttttaccgcttggagcaaaacacataaaaattaggtgtstactctcctacaaagactcagagataggaacactatattccttgatgattacattgcaaaggaatggctcccaggtccttaaaaaaattgtggtttcatgaaaaagctagaaaaatctcaaacctacatcctaatttggcaaaccgaatcatacacaaaagaactagagaaccaagagcaaacaaaccccaaagctagcagaagacaagaaataaccaagatcagagtggagctgaaggagatagagatgaaaaaaaataaaaaacccttcaaacaaataaatgaatccaggagctgtttttttgaaaaaaataataaaatagatat

SEQ ID NO: 446120 - DNA, 555 bp, Homo sapiens
gtaaatagttaagaaaaactctactcaatttctattgcaatcctggagagagatcagaacatagactgaattcccctccaccgaagcaatggcagggtttttaaaagctggggtcaaccttctgtgtttgctgattattcttaaccaaagtaaaagtcaactttcttttatcttcatgacagaaggtggttttaccgcttggagcaaaacacataaaaattaggtgtctactctcctacaaagactcagagataggaacactatattccttgatgattayattgcaaaggaatggctcccaggtccttaaaaaaattgtggtttcatgaaaaagctagaaaaatctcaaacctacatcctaatttggcaaaccgaatcatacacaaaagaactagagaaccaagagcaaacaaaccccaaagctagcagaagacaagaaataaccaagatcagagtggagctgaaggagatagagatgaaaaaaaataaaaaacccttcaaacaaataaatgaatccaggagctgtttttttgaaaaaaataataaaatagatat

SEQ ID NO: 446121 - DNA, 472 bp, Homo sapiens
tataaaatcttcttagtaattttatcacaaaatcctcatgaatactactgcctttccataatccaatataaaagaaatcaaatcactacagtaagcgcttttctgctataagttcaataagttctcagatatgaagagtaaaaaargaagggtttgggaggagaaggaatttcttcagagctgctcaccagtaaggtagtttcaaacagaacagaaaatctttaaatttgtattgcttatgaattcactaatttttgagccaaaatgactactgatttatataatcattttttattcaatcatatattctattttggggggataccatattttacacaaatgtgttatgtacatattatataactatatattacatacccatacaatttcatgtaaaatatttatcaatttatacatgtaatttcatttttaagctttatataatgtatttgctactatatattattcaaaa

SEQ ID NO: 446122 - DNA, 472 bp, Homo sapiens
tataaaatcttcttagtaattttatcacaaaatcctcatgaatactactgcctttccataatccaatataaaagaaatcaaatcactacagtaagcgcttttctgctataagttcaataagttctcagatatgaagagtaaaaaaaraagggtttgggaggagaaggaatttcttcagagctgctcaccagtaaggtagtttcaaacagaacagaaaatctttaaatttgtattgcttatgaattcactaatttttgagccaaaatgactactgatttatataatcattttttattcaatcatatattctattttggggggataccatattttacacaaatgtgttatgtacatattatataactatatattacatacccatacaatttcatgtaaaatatttatcaatttatacatgtaatttcatttttaagctttatataatgtatttgctactatatattattcaaaa

SEQ ID NO: 446123 - DNA, 578 bp, Homo sapiens
ctatcagaatgcccttttctcaatcctccccatgattggctacttttaaaatcctgctgataggtgcattttacagagcactgattggtgcattttacagagcgctgattggtgcgttttacaaacctcttgtaagacaggaaagatcctgattggtgaattttgcaagcctcttgtaagacaggaaagttcccaaagtccccactcgacccaggaagtccagttggcttcacctctcaaaatcatttcctctaaaattgtgagsactgaaaagtcaacaaatagataataaagtgtggaaaatatagcttaactttttgtcaaaggagttgaaaactttgggttggtatataagaattgaccatgccagtaaactttctgaggacccctccaaaagtacgagtgagatgcaaattaaaagtatgagcactttagaatcaaagcttatttttcttggactactgacataaatatgccaaaatatgcccttcaacaatatgtattaaagacaatggatatcggccgggctgtgattattcttacaccaatagcttgaaatgcaactctcttaaagttat

SEQ ID NO: 446124 - DNA, 604 bp, Homo sapiens
tgtttgtttcctccaaatctcatgttaaaatataactcccactgttgcagatgggggctgggtcttgggggcagatccctcatgaatagcttggtgctgtccttgtggtaatcagtgagtctcgctccgagttaacrtgagatctgattatttaagagtgtggcacttctcccctctctcttttgctcccattcttatgtgatgcacttgctccatcttcgcattctgccatgattagtagcttcctgaggccctcagcagcagcagaagccagcattatgctttgtgtgcagcctgtggtaccatgagccaaataaaactcttttctttataaattactcaatctcagatatttctttatagcaatgcaagaagggcccaaaacaggtgactatagttaacaataatgtattatatattacaaaataggtaaaagagatttagaatgttactaacagaaagaaataatacatttttgaggtgatgaatatcacaataacccagatttgatcattatacattttatgcttgtatcaaaatatcatatgtaccccataaatatgttcaataactatatatccataaacattaaaaataaaaatag

SEQ ID NO: 446125 - DNA, 631 bp, Homo sapiens
aaatctttattatctatatactgtggcataacaatccatacagtgcttagcaatttaaagcartaaatatttattaattcacaaagcttcatattgtgaagaatttatgagtaggttctctgcattgcactggctcaggattcatcatatagctggagtactatgtaagaggaaaatatgtatgttgtagataccaagaattggggatcatgggacaatcttgaggactgcctgccacagaagcaaaatgataccagctgggtattcagatatacctaatggaaggaagaatatcagaaatggtaaaaacataattaaatatataagacttttcttattattaaatacctttagaggacaattgactttaattaaacatagtaacaatatagtgtccttaatatgacatattatttgatgcttatgtaggcccatttcttacattgagtctaattactctatttaaaatgttaactaaacactccaagatgtaaataaaggtaatatatttaaatattatatgacaaaaataatgcaagggctaggagtagagtaactgaataaaattttgaagttttattttaggaatgtagtagatcatcacagtaagaaggaaaagattaataaatta

SEQ ID NO: 446126 - DNA, 631 bp, Homo sapiens
aaatctttattatctatatactgtggcataacaatccatacagtgcttagcaatttaaagcaataaatatttattaattcacaaagcttcatattgtgaagaatttatgagtaggttctctgcattgcactggctcaggattcrtcatatagctggagtactatgtaagaggaaaatatgtatgttgtagataccaagaattggggatcatgggacaatcttgaggactgcctgccacagaagcaaaatgataccagctgggtattcagatatacctaatggaaggaagaatatcagaaatggtaaaaacataattaaatatataagacttttcttattattaaatacctttagaggacaattgactttaattaaacatagtaacaatatagtgtccttaatatgacatattatttgatgcttatgtaggcccatttcttacattgagtctaattactctatttaaaatgttaactaaacactccaagatgtaaataaaggtaatatatttaaatattatatgacaaaaataatgcaagggctaggagtagagtaactgaataaaattttgaagttttattttaggaatgtagtagatcatcacagtaagaaggaaaagattaataaatta

SEQ ID NO: 446127 - DNA, 525 bp, Homo sapiens
tttgccatctgttgcaaatatttttaacactatataatttgcatatgacaataaaagaatgtggacagcttatttcctgattgccttaaattatccatctctctgtgccttcmtggatgtcctggaggctgagcctgtgggttacatcatctgggctccattgctctctggctttctgttatatgtacaatgcaagttactgacagatcagagagagaggaaggtcagccattccttcccattctcttcatgttttagcactgcctgtcagagaatagttgttcccttcctggactacagcatttctgagtacacttctcagatttttctaacaccattttctacccttaatgatacagacataggtgatataatagctccttgtagttgcttttctctgaatagctcttcatctcttctatattctgctaaacctgctcataaatctgtaaatattcccttcatttgaacgattaggagaatcctgtttactgtagcaaacctgtctgataaagtgtattacta

SEQ ID NO: 446128 - DNA, 525 bp, Homo sapiens
tttgccatctgttgcaaatatttttaacactatataatttgcatatgacaataaaagaatgtggacagcttatttcctgattgccttaaattatccatctctctgtgccttcctggatgtcctggaggctgagcctgtgggttacatcatctgggctccattgctctctggctttctgttatatgtacaatgcaagttactgacagatcagagagagaggaaggtcagccattccttcccattctcttcatgttttagcactgcctgtcagagaatagttgttcccttcctggactacagcatttctgagtacacttctcagatttttctaacaccattttctacccttaatgatacagacataggtgwtataatagctccttgtagttgcttttctctgaatagctcttcatctcttctatattctgctaaacctgctcataaatctgtaaatattcccttcatttgaacgattaggagaatcctgtttactgtagcaaacctgtctgataaagtgtattacta

SEQ ID NO: 446129 - DNA, 649 bp, Homo sapiens
cctttacccctttttaaattaggctatttgtttttctactattgagttgtaatgattctttataaattttgatgctaaccccttatcagatacatggcttgcaaatattttttcacagtctgcagtttgccttgttttgtttatttttgtttgggtgtgcagaagcttttattttgatatagtcttatttatttatttttgctattgtagcctgagctttttctttgatatttaraaagtaattgccaagacctaatgttgaggtgcttttctcctatgttttacttgaagacttatgtggtttcattttttatatttaggtcttttatccattttgagttgattgcagtgtatgacatgactccgatttcactcatttcatgaagaaattcagtcttcctagtaaagactatcctttccccatcgtgtctttttggttgtcttgtcaaaatttagttgcatttatttcttggctctctatttgggctatttttttttcacccctgaggccatacctctctgtgttgtctactcaatggtccacaaattgcatatttattattcgtattaaagtggttataaattattcagggatagaggttggagagatgcttaaatgaggtttcatcaggttctctacaccaaatgc

SEQ ID NO: 446130 - DNA, 543 bp, Homo sapiens
catcacacccggctggtaaatttttatcctaaaataaaataatggttgactaagaaagaagaatgtctaagttaaaactgaaagtccaagcatgttatragttatttgtatcaagttgtccataatggaagggaaattatttatactagtctttctagagattgagttttgatgttaaaaacaaaacaaaacaaaacacttatacacttaggaattggttagaacagtgaagttttcttaagggattgatttactcttaataaattataagaggttttgatctttttttaaccctaagtacaacttctattgcatctcacagtgctcacttttctcttcccttttaaaagtcacaaaatattaactctctccttcaattcattttcagctcatttaagttttttttccttgggttctaactgtttgttgtggcctaatgttaaaaatgtttccttaaaggtctaaaggaaatgttttcttccaacataatattctgtgcactgcagaaggtcttttattttgcctgttggtaactggcctaac

SEQ ID NO: 446131 - DNA, 543 bp, Homo sapiens
catcacacccggctggtaaatttttatcctaaaataaaataatggttgactaagaaagaagaatgtctaagttaaaactgaaagtccaagcatgttatgagttatttgtatcaagttgtccataatggaagggaaattatttatactagtctttctagagattgagttttgatgttaaaaacaaaacaaaacaaaacacttatacacttaggaattggttagaacagtgaagttttcttaagggattgatttactcttaataaattataagaggttttgatctttttttaaccctaagtacaacttctattgcatctcacagtgctcacttttctcttcccttttaaaagkcacaaaatattaactctctccttcaattcattttcagctcatttaagttttttttccttgggttctaactgtttgttgtggcctaatgttaaaaatgtttccttaaaggtctaaaggaaatgttttcttccaacataatattctgtgcactgcagaaggtcttttattttgcctgttggtaactggcctaac

SEQ ID NO: 446132 - DNA, 543 bp, Homo sapiens
catcacacccggctggtaaatttttatcctaaaataaaataatggttgactaagaaagaagaatgtctaagttaaaactgaaagtccaagcatgttatgagttatttgtatcaagttgtccataatggaagggaaattatttatactagtctttctagagattgagttttgatgttaaaaacaaaacaaaacaaaacacttatacacttaggaattggttagaacagtgaagttttcttaagggattgatttactcttaataaattataagaggttttgatctttttttaaccctaagtacaacttctattgcatctcacagtgctcacttttctcttcccttttaaaagtcacaaaatattaactctctccttcaattcattttcagctcatttaagttttttttccttgggttctractgtttgttgtggcctaatgttaaaaatgtttccttaaaggtctaaaggaaatgttttcttccaacataatattctgtgcactgcagaaggtcttttattttgcctgttggtaactggcctaac

SEQ ID NO: 446133 - DNA, 543 bp, Homo sapiens
catcacacccggctggtaaatttttatcctaaaataaaataatggttgactaagaaagaagaatgtctaagttaaaactgaaagtccaagcatgttatgagttatttgtatcaagttgtccataatggaagggaaattatttatactagtctttctagagattgagttttgatgttaaaaacaaaacaaaacaaaacacttatacacttaggaattggttagaacagtgaagttttcttaagggattgatttactcttaataaattataagaggttttgatctttttttaaccctaagtacaacttctattgcatctcacagtgctcacttttctcttcccttttaaaagtcacaaaatattaactctctccttcaattcattttcagctcatttaagttttttttccttgggttctaactgtttgttgtggcctratgttaaaaatgtttccttaaaggtctaaaggaaatgttttcttccaacataatattctgtgcactgcagaaggtcttttattttgcctgttggtaactggcctaac

SEQ ID NO: 446134 - DNA, 423 bp, Homo sapiens
ctagaaaggctgtaacactgtggccctctgcccttgctagtggaggcagctgccccatacaacagaagcagcagtggggctgagccagtcctggagtcatgggccagagcaaggcaaggggctgaatgatttgctaacatgctgccatgtgtcagactctggacagcagaactaaaagagctaattaacacactgtagcacctgctcttgtgttttatggtcaagggaacmcctgcatgggtgccaccacattccccttggggcaacatgcctggtcaggctgcagggcccacatggaaccttctcctgcgttggcactcatagcagccagctggaccccacactcattcattcacatgctccctcccactagggcctgagtgcacagttgtggcagctgccaaatccacaagggaggcttgc

SEQ ID NO: 446135 - DNA, 479 bp, Homo sapiens
agtaggtaacgttttaaatcatgtccccacaaggaggcaggtggggtccttaacaaatcgttcataggcagaaaccacgttttggcttccttagacaaataaaattggcaaatcctttcatgatatcccttcccaggtaagattcattgaatcttaatggattagttactgatacattctgccccatatcacagtctttacatctcagtcccctgcacacagtagcactctgtaggtaatggtcatgtctgactcactcctatccctagttttcagcacagaaaaacaatgtttgctctgtktaagttacagttcaattcctgaatcatatgcatgaatctagctcatttcatactctcatagccacagatgtgatctaactcctagctgactatctgtaaatgtctatcactgatcacaaaggaaggttggagagggagcaaattaaagttgtgtcatgcaaggaataagagcagggg

SEQ ID NO: 446136 - DNA, 615 bp, Homo sapiens
cctttttctagtttattgatgtggctygggttattagtttgagactttttcatctttttgaatatatacatttagtgctgtaaatttctctctcagaactgccttaaaaatagcccatagattttgatatgttccatttctttatttagttcaatgtattttttaatttcctttgagagtttctctccaattcttgaattatttagaagtgtgttgtttagtttccagatatttgaaggtattcttatctttttgttatcaatgtgtatttgattccttaaggtataagaatctattctgtgtgattttatttctttcaaatgtgctcaagtgtgttttatggtccagaattttatctatgttgagtgagttgttctataaatgtcaattagatcctgctgtttaatggtggtgttgaggttttctacatccttgctgattttctctctagaacagaaatatcaattgttgagagagggatgttgaagtcaccaactataatcatgggacatctctgtttcctttcagttctatcagtttatgcttcacatattttgcaattctgttgcttgatgcatacacattaagattcctatgtcttcttgacagattgac

SEQ ID NO: 446137 - DNA, 517 bp, Homo sapiens
gaagtgaattgtctaaaataagcatgcaacacagcgaaagcatatrgtaagctctcattaaatgtaatttttataattatttcaactattattactatcatcattactgttgcaattgttgccattattactacaactcttactacttacaaacacttccttttcattctttctgtgagcacaaaatgttttcagtgatttacctcttagagcctggtttcttgaaataacaatcaacggggaggtcaggttaatcccctttgagaaatgagggtaatggtaaagatgttagaatttcttgctcctttggtcaaagactatgatatgttcaaggacacccaagcccagttggtgactggactctcataattgcaaaatttgctcctgaactgcaaattttattccacagttgcatcccccagccttttgctcttgcctcattacgtgcctggtttttattgttttctctctgtttcatgatttgtctcttcctccttggattattctcactctctct

SEQ ID NO: 446138 - DNA, 400 bp, Homo sapiens
tttgttatggtaaattaaatgattcacatttttgggaggcagcaataacaaagctttagtttttttttttttaacattgatgtagatcaatcatttctaactaatgtgggtgttttcctgtttgtagagtagggataacaattacccttacttcatagagttgctttgaagactaaaataatgataacatttaccataaagaatacgatcacacaggagtttgtgattactattgttgatgttgctrttgttattacatcatccaatcaatgtcctttaaccaacatagtaagagaaatgaggttagtaaaattgttccaaatccaatgattatttttcttactgtgtgagaattcacaaatttctggcaaatagtttccccttaagacagcaactgtgt

SEQ ID NO: 446139 - DNA, 610 bp, Homo sapiens
atttagctttaaatatcattcatctctttgtgaatatatgtctcagataatttcccaatcacaagttttaaagacaagaaggatgtagactgaaaatcttggtgttatagaacacctgcaaagctggaggagagactattttcaaaaatgactccaactttttacccatttctgtgtctatactctgcaatgtgactgtgcaattcttcccatgaggagaatagatctctttttccacctcttgcatccgggctgtcttgtgaatagcttcagctgatagaatgtggtggaagtgattggcagcaagttcggagcctgggcgtcaagagcccttacacacttctgttctctmttctgctcttccatcttcatcatgagaacatgccaggctggcctgctggcatatatgacatggggagcagagcaaagtcaaccaagttgtcccaactgaggccccagatacatcaaagaacccagccaagatcaacaaagtctcctggtcaatccataactcaactgacgcaggaatagtcaactcagatcagcagaactgcccagccaactcataggttcatgagaaataataaatggttgttgttttaagccacta

SEQ ID NO: 446140 - DNA, 610 bp, Homo sapiens
atttagctttaaatatcattcatctctttgtgaatatatgtctcagataatttcccaatcacaagttttaaagacaagaaggatgtagactgaaaatcttggtgttatagaacacctgcaaagctggaggagagactattttcaaaaatgactccaactttttacccatttctgtgtctatactctgcaatgtgactgtgcaattcttcccatgaggagaatagatctctttttccacctcttgcatccgggctgtcttgtgaatagcttcagctgatagaatgtggtggaagtgattggcagcaagttcggagcctgggcgtcaagagcccttacacacttctgttctctattctgctcttccatcttcatcatgagaacatgccaggctggcctgctggcatatatgacatggggagcagagcmaagtcaaccaagttgtcccaactgaggccccagatacatcaaagaacccagccaagatcaacaaagtctcctggtcaatccataactcaactgacgcaggaatagtcaactcagatcagcagaactgcccagccaactcataggttcatgagaaataataaatggttgttgttttaagccacta

SEQ ID NO: 446141 - DNA, 610 bp, Homo sapiens
atttagctttaaatatcattcatctctttgtgaatatatgtctcagataatttcccaatcacaagttttaaagacaagaaggatgtagactgaaaatcttggtgttatagaacacctgcaaagctggaggagagactattttcaaaaatgactccaactttttacccatttctgtgtctatactctgcaatgtgactgtgcaattcttcccatgaggagaatagatctctttttccacctcttgcatccgggctgtcttgtgaatagcttcagctgatagaatgtggtggaagtgattggcagcaagttcggagcctgggcgtcaagagcccttacacacttctgttctctattctgctcttccatcttcatcatgagaacatgccaggctggcctgctggcatatatgacatggggagcagagcaaagtcaaccaagttgtcccaactgaggccccagatacatcaaagaacccagccaagatcaacaaagtctcctggtcaatccataactcaactgaygcaggaatagtcaactcagatcagcagaactgcccagccaactcataggttcatgagaaataataaatggttgttgttttaagccacta

SEQ ID NO: 446142 - DNA, 602 bp, Homo sapiens
gtaaaaagattatttttaagtaagtgaagataatagggactgggaataatggaagccacatttcactacttcaaaaaaattgtttagggttggtcatctggrcgtattacatataacctgaatgagccagcatttatttactttctcaaaaataaattatatcacattggggtctctgaaatgacattttttgtgatattttctggtaatatagttgaagaataggtgaggggcgtgtgtgtgtgtgtgtgtgtgtgtgtgtgtgtgtgtgtgttaaatttagtcaacagtccgtagacacccaggaagtctccaggagggaagacttcctggaagattctgttccagacaagaaacagatgacatttctagtgtgtaggtcatagacaaggctaaagcaacaatagatagtgccagtttcctattttaggcttataagatttatcagaagctaccagttacaggcctatcagcaaagtcacccaagtagtggggattgaggaaaggtggcagcaaggaaactactaattgtgctttttaaagcaactgcctcccaggaacatggacacgtagcatttatcttcatagagctattggaaggc

SEQ ID NO: 446143 - DNA, 602 bp, Homo sapiens
gtaaaaagattatttttaagtaagtgaagataatagggactgggaataatggaagccacatttcactacttcaaaaaaattgtttagggttggtcatctggacgtattacatataacctgaatgagccagcatttatttactttctcaaaaataaattatatcacattggggtctctgaaatgacattttttgtgatattttctggtaatatagttgaagaataggtgaggggcgtgtgtgtgtgtgtgtgtgtgtgtgtgtgtgtgtgtgtgttaaatttagtcaacagtccgtagacacccaggaagtctccaggagggaagacttcctggaagattctgttccagacaagaaacagatgacatttctagtgtgtaggtcatagacaaggctaaagcaacaatagatagtgccagtttcctattttaggcttataagatttatcagargctaccagttacaggcctatcagcaaagtcacccaagtagtggggattgaggaaaggtggcagcaaggaaactactaattgtgctttttaaagcaactgcctcccaggaacatggacacgtagcatttatcttcatagagctattggaaggc

SEQ ID NO: 446144 - DNA, 602 bp, Homo sapiens
gtaaaaagattatttttaagtaagtgaagataatagggactgggaataatggaagccacatttcactacttcaaaaaaattgtttagggttggtcatctggacgtattacatataacctgaatgagccagcatttatttactttctcaaaaataaattatatcacattggggtctctgaaatgacattttttgtgatattttctggtaatatagttgaagaataggtgaggggcgtgtgtgtgtgtgtgtgtgtgtgtgtgtgtgtgtgtgtgttaaatttagtcaacagtccgtagacacccaggaagtctccaggagggaagacttcctggaagattctgttccagacaagaaacagatgacatttctagtgtgtaggtcatagacaaggctaaagcaacaatagatagtgccagtttcctattttaggcttataagatttatcagaagctaccagttacaggcctatcagcaaagtcacccaagtagtggggattgaggaaaggtggcagcaaggaaactactaattgtgctttttaaagcaactgcctcccaggaacatggacacrtagcatttatcttcatagagctattggaaggc

SEQ ID NO: 446145 - DNA, 498 bp, Homo sapiens
ggaaggcccacaaaggaaggtactgtgaggtcatgagctagtgtcactgtgcacttatcagtgctgaaatcccaggtgatctcatccamccctcatagagataataagaactaccaacattcttcttcaacagagtccttttgtaaatgtgctttaactgttcaactctgtaagacaagtgcctaagagtgtagtatctaattattccacaaaaaattgagttggtatttaatcttgttaaagtctgtaaataagtttggcaagcaagcttacggatggcaacttgacacataaaatatttcattttggggtgttgtcggtgtatgtgatttgatttagatacttcacaatccacaatgtgggagacagggacaactaagcaataaaatttttctctcaggttagtttgatcacaatgcctataacaagaatgtcctaaccacaggagtcatgatgactgggcatgtgatttctaggttgtaatggatatttactgag

SEQ ID NO: 446146 - DNA, 583 bp, Homo sapiens
atcctcagctttctgttctctcctcagcccacacccattagcccttcattcccaccactccgcagaaactgttcttgcaaaggtcaatacccaccaccatcttgcaacccaatggtaaattttcaatccttattctatttagcttctcattagcttttgacacagttgcacattcccttttctagatgtacttttctacccttggattccaggataacactctttgcttgttttcctcctacctctttggccactctttacaaaatttatgtggggatactcctcctttttcagacctctaaatattggagtcccayagcactttctttttgtctttgcttttattcactctctacatggttttatcagttctatcaccttaaataccacgtgtatgctaataatatccaaatttaaatttccaggtctgttctctcttctgactgcaactgccaacttaacacctccaggtatatgtctaatggataaacataaattgtttgtgatttaaaattcagtttctcccatgtctactccccaaaattgctcttcctccatctttattatgttggtaagtgacatc

SEQ ID NO: 446147 - DNA, 612 bp, Homo sapiens
ggagtttgagaccagcgtggtcaacatggtgaaactgcgtctctactaaaaatacaaaaattagcccggcgtggtgacgggcacctgtaatcctagctactcaggaggctgaggcaggagaatcgcttgaacccgggaggcggaggttgcagtgagcctagatcgcgccactgcactccagcttgggtgacagagtgagactttgtctcaaaaaagaaaaaaaaaaaaagttgctgtatccttccctgtccacattgcatggacaaaaatagcagccaggacttcctcctagagctcttaagtagagtgaaagctgtaatgttcactacagaggactctcaagttgcagggcttggcgattgtcactggggtgggatggactcccctacagatatgccgcaggttccctgaaccttgaggcggtgggggaaagtcagtccctctggcagagtgatgggcctgaacaggctgaatcctctgtgaccttgggaagtggggaagactccatgtgccatgctgcgtgggggctccatcccattgtaggagctgattgactgcttgcttggatcagcaggccttcyctccctataaggctttcagctcccagccaca

SEQ ID NO: 446148 - DNA, 585 bp, Homo sapiens
atccaggtgtatagggaatttattatttgaccaagagtgcatttttactcagaatagtttcctgtctatatgctgaaatgattgctgaaataattgctacktatatggaagaaataataccatgctgaaataattgctacctatatggaagaaaacatgaggtcctttcctcactccacatacatatgtaaatttcagatagataaaagacctaaataaaaacaaaaataataatcttggaacaaattacaggggaatactttcataaccttgaggtcatggggcattcttaaccagggcaggaatctcagaaaccatcacgaaatggaaatatttgactatctaaataccaaagtaatatgtcgaatgtatcattagtaaagtggaaatgtaaaccgtatagattgttaacataactacaacagaaatgacatgataaaggttactggtactgctgttcaaataactccttcaattgttaaaattaaaaataatatacatgagtccaataagatgcttaaccatatgcaggaaattgcaaattacaaatgaattaccattttttcagtcatcataattacaatc

SEQ ID NO: 446149 - DNA, 602 bp, Homo sapiens
tttcagaaacaaatgtgacttcagatttcaggagcgttggattcagtgtcccataacttgagatacataccgtttggttagttcttacctgccaaaaaaagaatgtgttggcaagggtgtcagagctaggggaagcaagaggagagaataattagaaaaatctgttagactcaagtttgtttttctgtatcagtattgggagagagagagagcttgaacttagtctttggaataaaatgtgatattcaaaatactatttggcaaagaggaaccctgtattaaagtcaccgtgaaagcagagtgagcagcttcatggaatgaataaagctggctttgagtcaagaaaaacttgttcctgtctctcagcaggctttttggaggcttsttctgctagctgatgtgtggatgctcacagaatgcaaactgattcttttactagattaagaaaaagccaaacaggaaattagatattttgtaaaacaactacacacatctcatcttctacacaactgtaagttatatttgatgaattggtgttcctatcaattaaatatgcctcataagaagaaagaagagacacacggcagtgccaaggagtgggg

SEQ ID NO: 446150 - DNA, 558 bp, Homo sapiens
tcctctttgctgagtaacttaccattgcctctcaattttgtttcatttcaggcattacacctaaaagtaatttgagcaccttgagcttagagcctaccttggctaatgtgaaacactccagctgtgctaagatggtcctcaatagtcaacaagcacttctgaaagtctggtaggtgtgtgcatttgaatgaatcctcagtcttctctaattctgtctggaaggattcattaaaggcctttctcatgtcttgattaattgcccttcaaggataaattttcaygacatatagaagccgtttttatctacagcatcaattttactgctataaatgagcaaaatgagtgtcccatctctggacatacctggttatgcaagaacttaacatcccctgatgctttgtgaaaagaacatttaagatcttttgcccatgtaaaatggaatccatctattaaaattgtaccttgaattgctaagtttgaaaagatcatacaatatctcatctttggtttttgaactgcagaaagttaatctgaaatagttcaatttgggtagtagaa

SEQ ID NO: 446151 - DNA, 558 bp, Homo sapiens
tcctctttgctgagtaacttaccattgcctctcaattttgtttcatttcaggcattacacctaaaagtaatttgagcaccttgagcttagagcctaccttggctaatgtgaaacactccagctgtgctaagatggtcctcaatagtcaacaagcacttctgaaagtctggtaggtgtgtgcatttgaatgaatcctcagtcttctctaattctgtctggaaggattcattaaaggcctttctcatgtcttgattaattgcccttcaaggataaattttcacgacatatagaagccgtttttatctacagcatcaattttwctgctataaatgagcaaaatgagtgtcccatctctggacatacctggttatgcaagaacttaacatcccctgatgctttgtgaaaagaacatttaagatcttttgcccatgtaaaatggaatccatctattaaaattgtaccttgaattgctaagtttgaaaagatcatacaatatctcatctttggtttttgaactgcagaaagttaatctgaaatagttcaatttgggtagtagaa

SEQ ID NO: 446152 - DNA, 642 bp, Homo sapiens
caccggtaatcaaccattaactttgtttagtttcgagaagactgaagaaaaccagagaagaagatggaagagatcaggtgtggtgggagtagagatacgattgagtgggcaaataaaaactaccttcagagagacacagtgatttgagtaactgcttatcaattaacagcaatcatggatgaggaccctgttgttttttctcaggagtttcctgggtatttttttttaacttgtagattttaaatgcttcaaacttaggacatgtctttgtggkagattgaaaaaattcctcttcctatatccatgctcacttgtcatgtgactgtagcttttcctgttgagaggtgaaacctaattccccatcctgtaaatttgacctggctggtgacttgctttaatgaatgcagcagaagtaactgtgcgtcagctctgagtccggatctcaggagaccttgcatgccctgtctctctcttgaaaccacaaaacagctgagaacaagtccaagctatcctggtggaagatttatttatttatttattttaagtatgaagcagaaataatctgttccaagcaagatcattccagaacagtcacccttgtcaaatatctggtacttgactgtacacatgtgagttatccag

SEQ ID NO: 446153 - DNA, 642 bp, Homo sapiens
caccggtaatcaaccattaactttgtttagtttcgagaagactgaagaaaaccagagaagaagatggaagagatcaggtgtggtgggagtagagatacgattgagtgggcaaataaaaactaccttcagagagacacagtgatttgagtaactgcttatcaattaacagcaatcatggatgaggaccctgttgttttttctcaggagtttcctgggtatttttttttaacttgtagattttaaatgcttcaaacttaggacatgtctttgtgggagattgaaaaaattcctcttcctatatccatgctcacttgtcatgtgactgtagcttttcctgttgagaggtgaaacctaattccccatcctgtaaatttgacctggctggtgacttgctttaatgaatgcagcagaagtaactgtgcgtcagctctgagtccggatctcaggagaccttgcatgccctgtctctctcttgaaaccacaaaacagctgagaacaagtccaagctatcctggtgraagatttatttatttatttattttaagtatgaagcagaaataatctgttccaagcaagatcattccagaacagtcacccttgtcaaatatctggtacttgactgtacacatgtgagttatccag

SEQ ID NO: 446154 - DNA, 509 bp, Homo sapiens
tgttccaagcaagatcattccagaacagtcacccttgtcaaatatctggtacttgactgtacacatgtgagttatccagctgacaccagaacaacaaccccgttgagcccaaccccaattactgactcacaaaatgatgtactaaattgatgattagctttggcatggtttgttacgcagcaaaagctaacctatagagagcccttgaattcttttatttccctctcacacaatagaacctaagtttctaaggttgggtgactactattgattagctcctttgtaacttttaagtggcaagactacttaaacattgaaaacatatttcttgttcaaaaaataatttaatgttagatgatactgacaatttagaagacaagaaagtgggaggctataaatagtctagttttacgtgcttttaatgtcagctsattttccagattctaaaacaattttctctctagataagttatcactgaaaaagcctgttataaaatatatatatatta

SEQ ID NO: 446155 - DNA, 572 bp, Homo sapiens
tatttctttttccatttggccctattaggataagttgagaaacctaggaataaaaagcaaatgtaggcatgtcaaaaatattaataataacaataaccatattctaccaataatagttccttttattcatgaaatatcattaatttttcatcctactrtatattctgtatataaacttctgttcatgcccgtgaactaagagcaaccacagccttgtacatcctggagctaagaatgtttttcacatttctaaaagattataaaaagaggaaaaaaaaatgaaggaaaaaagaagaaaagacaaaaaataaaaagcaaagaaaaggaagaatgtacatcatgggcattcaaactctacatgtgaccctcaaaccctaaaatattgactctctggtccttcatagcaaatttgcccactcctgttaatctaaaccaaaaagttaacataattgaagttaataaagatgtatcacttgttataaattatataaaataattttaaaaaagaataaagtaatagttcatctttcactttaaagattacccttactccaggcttagtgcagtggcaa

SEQ ID NO: 446156 - DNA, 507 bp, Homo sapiens
tgggctggacatctaagatggtttatctgcatggacggcagttgactgggagctcctctggcactgctggctagaaaatctacaagtggcccctctatgttgcttgggcttcttacagaatagagttggcatccaagcagaagtatccgaaagtcccaagtggaattttccagagacctagcctcagaagtccagaacgtcacttctatagcattctactggtcaagcaagtcattaaggccaactcagttttgaggggaggagaataacatgagggcacagagagggaaataattgttacttgwatctttggagttcatctaccatgctccacagctagatggtgcctgttcatctaagaagctccgtcatttccagtctataaagaataaagggatgacatgtcccttttaatttctcactgacaagatattgatgccactatttccagtggaaactacaaactacggagcactatgatttttttttttaagaggagctgcatta

SEQ ID NO: 446157 - DNA, 590 bp, Homo sapiens
ttttcattgtggtgtttatgaatcgtgatgcagttccactgcagctcctgacacactcattaatttgttcccagcggcagttcattaccaacatcacaagcaaaacatgcgctctccctgggcattgaaggtccaccggaaattaagcagacggggctgcaaagcacctcagagtgaagccagccagcttcatctgctgcagcaggctggaggcaagcacaaggagcggcaggaatgaaaggcttcrgcgccttccctggtgtctctgtgccttctgagttttcagctgacatggagcagtgattccctgaaaaggatgggatcttgctccctcaaagatcagccttctttgatgagcctgctccaggtggagtggagcaaccactttagccttttagtgcagagaagacttaggaagtttcattttccttgactggggttctgctttctgtactgacccttcctggtcagtggggagctcggagctctgagttggagcaccttaccaaaatcttctctgagtggggttaagtaagccagcagactctgcaagaacagagccttgctgaatttagctttccagaaagccc

SEQ ID NO: 446158 - DNA, 590 bp, Homo sapiens
ttttcattgtggtgtttatgaatcgtgatgcagttccactgcagctcctgacacactcattaatttgttcccagcggcagttcattaccaacatcacaagcaaaacatgcgctctccctgggcattgaaggtccaccggaaattaagcagacggggctgcaaagcacctcagagtgaagccagccagcttcatctgctgcagcaggctggaggcaagcacaaggagcggcaggaatgaaaggcttcagcgccttccctggtgtctctgtgccttctgagttttcagctgacatggagcagtgattccctgaaaaggatgggatcttgctccctcaaagatcagccttctttgatgagcctgctccaggtggagtggagcaaccactttagcyttttagtgcagagaagacttaggaagtttcattttccttgactggggttctgctttctgtactgacccttcctggtcagtggggagctcggagctctgagttggagcaccttaccaaaatcttctctgagtggggttaagtaagccagcagactctgcaagaacagagccttgctgaatttagctttccagaaagccc

SEQ ID NO: 446159 - DNA, 493 bp, Homo sapiens
aacattacttctctgcaattacctatgtgacaaagaaaagtcaaaggaaactctcagaaaaagaaatgcaaaaactgccagctggaagtcaggccaaatacaattttcagcaaaaggaccagracccagagtacatactataagcatagagatcgggtttcggtatcctccatcggctacaactacccaaaaagaggcagttcctcaaataaacgcataggtccaggtgagaagggaaaagagacaaaatgaatttcaggtaggcactcaaaccagtgtctactgcacactcaaaccaggagtcagacatcaaacaatgaaataatcaaaagtgaaaacaacatactgttgcttatctctgggtcctctccaaggatggccaacctgggtgtctacactcatctctggacagctcactttccaattccctggttaatgcttagaaagaaagtaaccctacaatcttccccactgggcgatttgaacccgaaat

SEQ ID NO: 446160 - DNA, 541 bp, Homo sapiens
caggccagatatggctcattagccagcttgccaacccctgctcctgagcaagattgtccattagaaatacaatgcgggccacaaacgtaattttaacttttctagtagccacatgaaaatagtaaaaagaagtggataaaattaattttattcatatttaatccaatatttccaaaatattattacttcaacattattatgatatttggccttgkcaacttttaacgtgcacttgaaagagaattggccctttagctatttcataaatgatactctttttatttcatgttttatgcgggggatttcaacgttagcagttaattctaattgagaaatctctatgggttttattcaatatattcctatgtccagattatgagaaactttagagacatcatcttctacccatattgtttcaaaatatcacagtttgtagcaataaaactctatcaaagggaacacaaagtcattaggcactttcagcccctatggtgaaataaccaataatgggcatttagatgtccctctccctcagcttgga

SEQ ID NO: 446161 - DNA, 541 bp, Homo sapiens
caggccagatatggctcattagccagcttgccaacccctgctcctgagcaagattgtccattagaaatacaatgcgggccacaaacgtaattttaacttttctagtagccacatgaaaatagtaaaaagaagtggataaaattaattttattcatatttaatccaatatttccaaaatattattacttcaacattattatgatatttggccttgtcaacttttaacgtgcacttgaaagagaattggccctttagctatttcataaatgatactctttttatttcatgttttatgcgggggatttcaacgttagcagttaattctaattgagaaawctctatgggttttattcaatatattcctatgtccagattatgagaaactttagagacatcatcttctacccatattgtttcaaaatatcacagtttgtagcaataaaactctatcaaagggaacacaaagtcattaggcactttcagcccctatggtgaaataaccaataatgggcatttagatgtccctctccctcagcttgga

SEQ ID NO: 446162 - DNA, 563 bp, Homo sapiens
tcccccttggccctctgactcaaaaacggaatatgtcattgcggcctttaaaggccattaagatgggtggctggaaaacctacccaagctgctttcatcaacaaggtggaaatgtgagacctgttcttcaacgctgtgctggtcaagtgtgcatggtgagtgcctgcataattacttgttcccttacagcagagcctatgatccagcagcatggaaatgctttctgtcctctcagcagtccaattatcaagataatcatgcataaggagcaaatggcctggaccagttgtcactgatggtggtgatgcacccaccatactgagccgcaaccctgcagaacctggccctgcagctggcagaaaggagaaaatgagttagtgattgctcacaagcaggtcacttctatgggagtgctttgtctaagaccggaggactggctctgcaaaaacacaggctacgcacatagaggtggtggctgacagcagcaacttcagacaccctgttgatcactccacctmtattgccatgactcagactgctcaacttgtaagggataaaccgtg

SEQ ID NO: 446163 - DNA, 602 bp, Homo sapiens
gtgtgtgtgtgtgtgtgtgtgtgtgtgtgtgtgtgtgtgtgtgtgtgtctaatctgtctttatgggtcaaaggcagaaagttttcaggcagaaaacttttttgatctaagaggaggcactatggcatcctaagagggggataatgaaagttaagtattggaagatgctgacctttagactgaccacagaaagatggggtcagtgaggacagaaggccctcagaggatgggcaggccaagtcctgatagcagctcccaactaaaaggacccctgtcagcactgctctctctaagcatgggttaacatgtaaaagacaagtgttaccctactcttgmttcccccaatatatccatactctgggcatgtcatctgaatgtcctccaggtgcctggaggcatagctgcattctgtgcctcagagatgctccaggggcatagaaagatgtacaggatttcttaatatttaacaaggtggaaggcttggtgtattcattttgatatcagaaatcccaagttcctaaatcctggtcatagtttggggtatgttgagaaacagagggtatgggcaatctttgttaccaatgcagaccttgataacaatgt

SEQ ID NO: 446164 - DNA, 602 bp, Homo sapiens
gtgtgtgtgtgtgtgtgtgtgtgtgtgtgtgtgtgtgtgtgtgtgtgtctaatctgtctttatgggtcaaaggcagaaagttttcaggcagaaaacttttttgatctaagaggaggcactatggcatcctaagagggggataatgaaagttaagtattggaagatgctgacctttagactgaccacagaaagatggggtcagtgaggacagaaggccctcagaggatgggcaggccaagtcctgatagcagctcccaactaaaaggacccctgtcagcactgctctctctaagcatgggttaacatgtaaaagacaagtgttaccctactcttgattcccccaatatayccatactctgggcatgtcatctgaatgtcctccaggtgcctggaggcatagctgcattctgtgcctcagagatgctccaggggcatagaaagatgtacaggatttcttaatatttaacaaggtggaaggcttggtgtattcattttgatatcagaaatcccaagttcctaaatcctggtcatagtttggggtatgttgagaaacagagggtatgggcaatctttgttaccaatgcagaccttgataacaatgt

SEQ ID NO: 446165 - DNA, 576 bp, Homo sapiens
ggggaagttataaatacataaggagaggagagtcaaatgctccacatggtaataaattagagtaggagacatcagtgctaactgatayttagcttaatatagatacatatggctacatatataaattttataaatatgtaaatatactactggaagcaatgacaccacagtagcaatgagcacacctatgacccagatattggtttgtcataccattcaccattaacagtacagtgcttcttgtaaaaatggtagctcctaggattgtcaaatgaaatatataggatgagccttaaaaatgtggtattgccagaaagtacgaaagtacctggaaaaatacctcactctgatggggatatggcaaagggacacagaagccaacttaaagagttctcaatggtcaaagctagagaaatttaaacaataaaatcaatagaaaaatattggattataacccaaagtataaagtatttatgagcccatattaacataaataaatgattgcataaataattaaatgaaggaaatggacaaatatcaagtacagaataattccaaataatttatttaaattct

SEQ ID NO: 446166 - DNA, 576 bp, Homo sapiens
ggggaagttataaatacataaggagaggagagtcaaatgctccacatggtaataaattagagtaggagacatcagtgctaactgatatttagcttaatatagatacatatggctacatatataaattttataaatatgtaaatatactactggaagcaatgacaccacagtagcaatgagcacacctatgacccagatattggtttgtcataccattcaccattaacagtacagtgcttcttgtaaaaatggtagctcctaggattgkcaaatgaaatatataggatgagccttaaaaatgtggtattgccagaaagtacgaaagtacctggaaaaatacctcactctgatggggatatggcaaagggacacagaagccaacttaaagagttctcaatggtcaaagctagagaaatttaaacaataaaatcaatagaaaaatattggattataacccaaagtataaagtatttatgagcccatattaacataaataaatgattgcataaataattaaatgaaggaaatggacaaatatcaagtacagaataattccaaataatttatttaaattct

SEQ ID NO: 446167 - DNA, 576 bp, Homo sapiens
ggggaagttataaatacataaggagaggagagtcaaatgctccacatggtaataaattagagtaggagacatcagtgctaactgatatttagcttaatatagatacatatggctacatatataaattttataaatatgtaaatatactactggaagcaatgacaccacagtagcaatgagcacacctatgacccagatattggtttgtcataccattcaccattaacagtacagtgcttcttgtaaaaatggtagctcctaggattgtcaaatgaaatatataggatgagccttaaaaatgtggtattgccagaaagtacgaaagtacctggaaaaatacctcactctgatggggatatggcaaaggkacacagaagccaacttaaagagttctcaatggtcaaagctagagaaatttaaacaataaaatcaatagaaaaatattggattataacccaaagtataaagtatttatgagcccatattaacataaataaatgattgcataaataattaaatgaaggaaatggacaaatatcaagtacagaataattccaaataatttatttaaattct

SEQ ID NO: 446168 - DNA, 594 bp, Homo sapiens
tttacaaatattgactcactaaatcagcataacaattctaatatgtagaactaacttccacgtttagaaatgaagtaactgtggcacacagtggttagtgattgcctgaagcttccactgatagaaatggctctgctgagattaaaacctagaaatcctggtttcagaatctggattcttcactcttttgctctgccaatcctccctccctccttaatctttcattttaccctttgctggttaaaaggtggagcttaacagaaaaggtcagctcatgcttcggcagattttgctaaatttggacaaagcaaaaccctctttagtccttgcaaaccattttctgccaagaagactatgactaacttatctgtttttcttcactctcactcaacatcaatggaaccaccttaggttgtgagtcttagtggaggcgtagttgaaaattcaagcctcccctttagagataaagttcaatgaacsactgagccagagcaaggagttaggagattcgacatttttcaatggagatataattcacgcaccatacagttaaacccttatgtagtagacgattcagtgatgttcaatatagtc

SEQ ID NO: 446169 - DNA, 574 bp, Homo sapiens
cagaatctggattcttcactcttttgctctgccaatcctccctccctccttaatctttcattttaccctttgctggttaaaaggtggagcttaacagaaaaggtcagctcatgcttcggcagattttgctaaatttggacaaagcaaaaccctctttagtccttgcaaaccattttctgccaagaagactatgactaacttatctgtttttcttcactctcactcaacatcaatggaaccaccttaggttgtgagtcttagtggaggcgtagttgaaaattcaagcctcccctttagagataaagttcaatgaaccactgagccagagcaaggagttaggagattcgacatttttcaatggagatataattcacrcaccatacagttaaacccttatgtagtagacgattcagtgatgttcaatatagtcacaaagttgtgcaaacattaccacaaccttgtcccagaatattttcatcactccaaaaagaaacccccacctccctatattctttagtggtcaatctagtctctcctcccctcagcccatggcaaagactgatctattttcagt

SEQ ID NO: 446170 - DNA, 617 bp, Homo sapiens
catacaaacaagaccttcctcttttcttagaatctgtttccagtctgctgaactacagacagatgagattatccccatgcatagaagcccctagatggagggcatctaattactgttgggctaaggctggaggcctcgtggagatgatgcccttcatgtgttttcttgccctaatcataccacaagttccttgaagccacgattatctcaggtcatttataatgctttcatatggaagattacacatagtaggagctctgtaaggccacctcactaaaagtaaataatatcaactaaaaattatacaacaattttaggaaataattgtaataatttaaaatataaaaattttcctaagaaaggctgctggcacaatctttagatgaacagatgcagcccatctcatgtgcaaactgggtgacagcctgaaaatgtgcatctcaatgtccagcaacagccacagaaatgttctctgaaagtgaggctccccacaacctctaggcatgaaaggctgtgkgtggaagacttgctctttcaggttcctttaggtccacaagaagtttccattgatcacagtctcccccaacccccccgcaggttcacagattgggcataga

SEQ ID NO: 446171 - DNA, 584 bp, Homo sapiens
gccatttttatagggtactaatctcactcatgagtgctctgccctcatgacctaattacttccyaaggaccccgtttcctaataccatcactttggacgttaagatttgaaaatataaattttggtggcccataaacattcagaacatggcaatgctgttggtgcctcatccagattccctttactagccagtgcacccttcccccaccacccgctgtgagagttgactgctaacacctcacagttgctctgcttcctcagataacttagctgaactcagccatttggccagaaatttgtgtcccatacttccacccaggagcagcccatagcaaatgtctgcaactcattttctcacatggagaacaagaggcttattcccttgccttgaggcaatatcagctctgtggcacaattcacactccagagctgcctatgtgattaggcccaagctgagatcttcattccgctcctctcctgccccatctatatttagagaacatacttttaaaatcagctttcttttctcttttctttctctcacttttatttttcttctcctgagagcttctctcagtaagtca

SEQ ID NO: 446172 - DNA, 550 bp, Homo sapiens
aagaaatgaaattactgttgaaaagattaagtctcttaaaatgtatattcaaaaacagcttttaaatcttatatttcaatggtgaatagttataatgaacatatagatattactttggattttatattattttgcttttcccaggatttggtccctttttcatgttactttttttagtggaatgaacatactcctgcagatttttatccttaagggcaatttgtggtgactgcctctacattggaagccaaggaaatcaagtttttacctctcctttccacttatataatcagattttaggcaatggaattgagtgtatccaatttgagtaactggatgtttgccccccaaacatcatgttgaaattcgatccccagcattggcagtagggcctaatagaaggtgtttgagtcgtgggagtggatttcttataaacrgattgatgccagccctgggatggggaacagggagtatgagtgagttattactgttgatttccgtgagagctattttagaaaaatagcttagcacatctttccagtctctcttt

SEQ ID NO: 446173 - DNA, 413 bp, Homo sapiens
ttggcttcgtgtgaatactcctcaggtcagtggagaagaagcgttatttttattcccgattattaactacaaccgcagtctggccttcataaagccagcacaaaagrtgactaatttcagaaaaacagctactcctaaaataaaattgtgctgtaaatacgtttattattttctccttagataagcagagtgttgtctctaaaatataaaatacagcattaggaatactgatcttcttggttggcaatttttaacaataatatctcaatgttgaaaatttcccatactagttaactaatttatttatagagcacagcaatatctctaactctgaaaaaaattatcttacaattgcttattccaaaattctacctccaagaagctattatgttgagccagtaactggttagttt

SEQ ID NO: 446174 - DNA, 606 bp, Homo sapiens
ctgtcaggggtacctggaaaacccaatacttcagatgtcagccattataatattgcaacaaattaaaccagtagatggcagtatcactcagcaaaatttaaagttgatttttttaggcctttgtacaataatcatagtatcctaaaacttccccaatagtatgagctgacaaaggccttacttaaccataatcaatctttattctctgatagattaaaatggttaaatatacttgatkgtatcaaactcaagataaaacttttttttttttaataggttgaacatttgtacctttggcttattgctatgtttggtgttcattttataaatatataattctagagacactttacacattttttaaacattgaatttcataatttaaattacatttctgaaaatagtgttctcgatttagaaaaagtgtagtttagctattttatatgattataagtgctgcatactgctatattaaaccctcagaagcatgagggctctgatagactttgcctatattattgaagtaagttactaggctttttttttttttctttctagctaacttgtttgctcagataactaacaatatacctagtcttgtggatc

SEQ ID NO: 446175 - DNA, 400 bp, Homo sapiens
tctattgcttagtttctttgatttttgttgttttattttgcattcattagttcaagaggttagagaaaaacagaagtcatctcaacactggcctgttcagatgcaaaattaacccctcagccaccttacacacacacacacacacacacacacacacacgcacactctcacgtccatgtatatgtacatatacagacatagaacttatctctatggyatatgcgcaccttagaaaagtaaaaatctcacgtgaagagtctaatgttccttatttctatttttgtagtagaaaagaatcagtggaagtaaagaaaaataagtacattttgttcacaagtctggtactcatggtgattgacaagatttcaaataaagggtactgcatctcagattgactgct

SEQ ID NO: 446176 - DNA, 645 bp, Homo sapiens
tataatatttagctaaagattatataatagaagaatatagcatttaacttttaatatacatttcaaaaactagcaaaatgaaaaatatattgtaaaatatgttgattatatatttatatgtacatatatgtggggtttgtatgtatacatagataatatgtgtagtaaaaatgaaaataaaagcaaagaaaatgacagcaatttttttttttttgagacagagtctcgctctgttgcccagrctagagtgcagtggtgcaatctcggctcactgaaacctccacctcccgagttcgagcaattctcctgcctcagcctccctagtagccaagattacaggcatgtgccaccacacccggctaatttctttttttatttttagtagagacagggtttcaccatgttggctaggctgctcttgaactcctgacttcaggtgatccgcccgccttggcctcccaaagtgctgggattacaggcatgaaccaccacgcccagccaacagcaaaaattttaagacctctagagagcaaagcaaggaacaccagtgggtttcaaaggtaagtaaaattctcaaattatcaatgtcgttactgaaagttggaatttgtgttagtaattattttagctatcatatatattaca

SEQ ID NO: 446177 - DNA, 645 bp, Homo sapiens
tataatatttagctaaagattatataatagaagaatatagcatttaacttttaatatacatttcaaaaactagcaaaatgaaaaatatattgtaaaatatgttgattatatatttatatgtacatatatgtggggtttgtatgtatacatagataatatgtgtagtaaaaatgaaaataaaagcaaagaaaatgacagcaatttttttttttttgagacagagtctcgctctgttgcccagactagagtgcagtggtgcaatctcggctcactgaaacctccrcctcccgagttcgagcaattctcctgcctcagcctccctagtagccaagattacaggcatgtgccaccacacccggctaatttctttttttatttttagtagagacagggtttcaccatgttggctaggctgctcttgaactcctgacttcaggtgatccgcccgccttggcctcccaaagtgctgggattacaggcatgaaccaccacgcccagccaacagcaaaaattttaagacctctagagagcaaagcaaggaacaccagtgggtttcaaaggtaagtaaaattctcaaattatcaatgtcgttactgaaagttggaatttgtgttagtaattattttagctatcatatatattaca

SEQ ID NO: 446178 - DNA, 542 bp, Homo sapiens
ggatggaaatattaaagatttttgaacagattcttttatattttcttgtaatttctcttcccttgaacacatcaagactaaagctttaaaactttcatttactttgatttctaagattcaaacttcatttctacagagatagaaattgcaagtttggctggtagctagtaaccaggtgttagctattcacttttttgtttctgccaaaaagctagaagcaatataatgaaatgtctgtttgcaggggagaacttataaattcaatcacagggtaacactatcaaattgaaaatctatttttaaaaactcaaatatctatggtaatattttggtaatgtaacttcctgttgtacacacatcagaaattttcagrcttcctattctgtgtttgatgttacattaaaagacatggctcaaataaggatattttttaaaattaaatataaaaactcaatttaaaaaattggtttatttggaagaaatttgtgtagtatatgaaaaggtaattgttctgttaaacacttaaaacattttgtgtttaa

SEQ ID NO: 446179 - DNA, 542 bp, Homo sapiens
ggatggaaatattaaagatttttgaacagattcttttatattttcttgtaatttctcttcccttgaacacatcaagactaaagctttaaaactttcatttactttgatttctaagattcaaacttcatttctacagagatagaaattgcaagtttggctggtagctagtaaccaggtgttagctattcacttttttgtttctgccaaaaagctagaagcaatataatgaaatgtctgtttgcaggggagaacttataaattcaatcacagggtaacactatcaaattgaaaatctatttttaaaaactcaaatatctatggtaatattttggtaatgtaacttcctgttgtacacacatcagaaattttcagacttcctattctgtgtttgatgttacattaaaagacatggctcaaataaggatattttttaaaattaaatataaaaactcaatttaaaaaattggtttatttggaagaaatttgtgtagtatatgaaaaggtaatygttctgttaaacacttaaaacattttgtgtttaa

SEQ ID NO: 446180 - DNA, 618 bp, Homo sapiens
cgtggtaatcatttcacaatgtatacatatctcaaaatattccattgtacaccttaaatatatacaatttttgttagttatgcctcagtgaacctcgggaaraaagaaactaagcaattaaactttgtcttcttaagtaaatacattagaatgtttaatcaataatgtataaccatgtattaagaaagtcctatgaataatatgtagaacataatttatatgttaagttcataatataaaaatagccacatgtgatattagacgtccaataataatttggcccctcaacgtctcataattttctggatctttatcttttacctaaggggattttcaatgtcacactgatacctgtcctacttttttaaagagtaaacaaattcatcatttttctctttgtaggagagatttgtgatcttacttagatgatgtgtgagacagtaaatgaaatgaggagcattcacttaaatgttgctgagcatttctgtcttctgggctccagtatctgagagttgattatgagtttcttctaatatcataagaatgaaggcatacaaacatcttgaagtacaatatgaaatttgtaagtatttctagtgagactgtgggagaaagcca

SEQ ID NO: 446181 - DNA, 618 bp, Homo sapiens
cgtggtaatcatttcacaatgtatacatatctcaaaatattccattgtacaccttaaatatatacaatttttgttagttatgcctcagtgaacctcgggaagaaagaaactaagcaattaaactttgtcttcttaagtaaatacattagaatgtttaatcaataatgtataaccatgtattaagaaagtcctatgaataatatgtagaacataatttatatgttaagttcataatrtaaaaatagccacatgtgatattagacgtccaataataatttggcccctcaacgtctcataattttctggatctttatcttttacctaaggggattttcaatgtcacactgatacctgtcctacttttttaaagagtaaacaaattcatcatttttctctttgtaggagagatttgtgatcttacttagatgatgtgtgagacagtaaatgaaatgaggagcattcacttaaatgttgctgagcatttctgtcttctgggctccagtatctgagagttgattatgagtttcttctaatatcataagaatgaaggcatacaaacatcttgaagtacaatatgaaatttgtaagtatttctagtgagactgtgggagaaagcca

SEQ ID NO: 446182 - DNA, 618 bp, Homo sapiens
cgtggtaatcatttcacaatgtatacatatctcaaaatattccattgtacaccttaaatatatacaatttttgttagttatgcctcagtgaacctcgggaagaaagaaactaagcaattaaactttgtcttcttaagtaaatacattagaatgtttaatcaataatgtataaccatgtattaagaaagtcctatgaataatatgtagaacataatttatatgttaagttcataatataaaaatagccacatgtgatattagacgtccaataataatttggcccctcaacgtctcataattttctggatctttatcttttacctaaggggattttcaatgtcacactgatacctgtcctacttttttaaagagtaaacaaattcatcatttttctctttgtaggagagatttgtgatcttacttagatgatgtgtgagacagtaaatgaaatgaggagcattcacttaaatgttgytgagcatttctgtcttctgggctccagtatctgagagttgattatgagtttcttctaatatcataagaatgaaggcatacaaacatcttgaagtacaatatgaaatttgtaagtatttctagtgagactgtgggagaaagcca

SEQ ID NO: 446183 - DNA, 560 bp, Homo sapiens
gctaatcaattctctttctttatgacaaatagctgaggaaatacagttattatcaatgatgtatttttgaccgataatctctaaatattttcaattaagtttcacaagtcttaactttacatttttctttaaaatgagcataatgaaatcactaataacaatttgatctctaacaaattgtgtgtgtatgtttagagttataacacatacaaaatatatatttaatttctcacctsttgtttttaactgtattttatcctatggtagcattcactagtgagacccacatgcacacaattttagatgttaagagaaaatattaataaattatctagttcattctcataacttttaaagaaggcttctaaaatacagccagatttgaggtactttaatcagtattactttttatttaatagatatacatatttattttcagctaatattttaagtcaatctagacaggtagatgattgtttgcaattactctactataaccatacatttatttcttcttttagtaacctttacttggtaagtgaaataggaggtgactgtga

SEQ ID NO: 446184 - DNA, 582 bp, Homo sapiens
ccaaaaaactacaataagtgttcaaaataagtgtaaatggcaagataaggaatgctggttgccttggcaactaagaaacacatttaaagcaagattaccctgggtaaaaattatagaaaaggtaatacatttttattgtctgaagtgaaaatcacaactcaataaagactgatgtctgtatcaactcagattgtaaaattcagttayagtgcttacatccagaagtcaagatacttttttgataattgttttcttattattttttcctggagaaccacttctctttgacgtctgatagcattcaacttaaactttatacaattgtcatcatataattatttataaggcagggtttagaggacacttttagatttgtgacatagaaattttaagaaggccgattcacacacacacatatatgtataagtcaactcaactctctatactttgattttattacctcttaaatataattttgtattgacctcttaacaatatccaacgagaagaggaaagactaggataaattttcttgccatggcatcaatactcaataggtgaatttctatattcattcttata

SEQ ID NO: 446185 - DNA, 582 bp, Homo sapiens
ccaaaaaactacaataagtgttcaaaataagtgtaaatggcaagataaggaatgctggttgccttggcaactaagaaacacatttaaagcaagattaccctgggtaaaaattatagaaaaggtaatacatttttattgtctgaagtgaaaatcacaactcaataaagactgatgtctgtatcaactcagattgtaaaattcagttacagtgcttacatccagaagtcaagatacttttttgataattgttttcttattattttttcctggagaaccacttctctttgacgtctgatagcattcaacttaaactttatacaattgtcatcatataattatttataaggcagggtttaraggacacttttagatttgtgacatagaaattttaagaaggccgattcacacacacacatatatgtataagtcaactcaactctctatactttgattttattacctcttaaatataattttgtattgacctcttaacaatatccaacgagaagaggaaagactaggataaattttcttgccatggcatcaatactcaataggtgaatttctatattcattcttata

SEQ ID NO: 446186 - DNA, 582 bp, Homo sapiens
ccaaaaaactacaataagtgttcaaaataagtgtaaatggcaagataaggaatgctggttgccttggcaactaagaaacacatttaaagcaagattaccctgggtaaaaattatagaaaaggtaatacatttttattgtctgaagtgaaaatcacaactcaataaagactgatgtctgtatcaactcagattgtaaaattcagttacagtgcttacatccagaagtcaagatacttttttgataattgttttcttattattttttcctggagaaccacttctctttgacgtctgatagcattcaacttaaactttatacaattgtcatcatataattatttataaggcagggtttagaggacwcttttagatttgtgacatagaaattttaagaaggccgattcacacacacacatatatgtataagtcaactcaactctctatactttgattttattacctcttaaatataattttgtattgacctcttaacaatatccaacgagaagaggaaagactaggataaattttcttgccatggcatcaatactcaataggtgaatttctatattcattcttata

SEQ ID NO: 446187 - DNA, 582 bp, Homo sapiens
ccaaaaaactacaataagtgttcaaaataagtgtaaatggcaagataaggaatgctggttgccttggcaactaagaaacacatttaaagcaagattaccctgggtaaaaattatagaaaaggtaatacatttttattgtctgaagtgaaaatcacaactcaataaagactgatgtctgtatcaactcagattgtaaaattcagttacagtgcttacatccagaagtcaagatacttttttgataattgttttcttattattttttcctggagaaccacttctctttgacgtctgatagcattcaacttaaactttatacaattgtcatcatataattatttataaggcagggtttagaggacacttttagatttgtgacatagaaattttaagaaggccgattcacacacacacatatatgtataagtcaactcaactctctatactttgattttattacctcttaaatataattttgtattgacctcttaacaatakccaacgagaagaggaaagactaggataaattttcttgccatggcatcaatactcaataggtgaatttctatattcattcttata

SEQ ID NO: 446188 - DNA, 477 bp, Homo sapiens
aactgggtaatttataaagaaaagaagtttaattgactcacagttctgcagagctggagagtcctcaggaaacttacaattatggtggaagggcaaacaaacacattcttcttctcatggtggcaggaaggggaagtgccgagcagagagaaaagccccttctaaaaccatcagatctcataggaactcactcactatcacaaaaatagcaggagggtaactgtccccatgattcaattacctcttactgggtcsctccacgacacatggggattatgggaactgcaattcaagatgagatttggatagggagacacagccaaaccatatcaaagtctctagtaagttccaaactttctcacattttatgtcttcttctgagctctccaaactgttccaacctctgcctgttagccagttccaaagtcacttccacattttcaggatctttacagcagtgtcccactagctggtacc

SEQ ID NO: 446189 - DNA, 609 bp, Homo sapiens
tctacagctgcctttcagttacatccatgaaaaaatatacatgtttaaaagtgtttgccaaacttgtatattgaaaatcatactatactctaaattcaggatggttattagacaaaaataacacacatctggatatgcaagaactggaagttaagcatgcatttagttcaatggtctaaataataattttatcacatacktggaataaagtaatctcatactgtctgaaggaagagcaaactggtaataccttccagaaggtgatcagaaaatggtataaaagcctttaaaatgttcgtgcccttcgactttgcaatccttttattgggattctaccccaatatgatagagttacaaacaaacatttgtaaagaatactatattgtaatattcaagaaactttgaaaactaatcattcataaatatcttacacaagttgtattacataagcaccattaaaagcatgtaaaattatatcacattttaaaaatatttaactatttaagttataaaacatgctccagtgaagcacccagatatataaagcaaatattattagagctaaagagagggataggcccagatacactatctattggagacttcaac

SEQ ID NO: 446190 - DNA, 540 bp, Homo sapiens
tacagagctaagtaaaatggaaacaaaccagtttgcatgtgtgttcattattttttaatgcatttgttcagacrcataggtaaatgcctgaaactggtaactgaaggctatactgctaacagctgttgcacctggggaagatggtagaattaaccatcaacgcaggaagcccttcattttgatctctatagaactcttgaaatagtttcattgatggcaaacatgtatttgtttgcaaaatgcaatttttaaaagaggtaaaaggcagaggaggatgagatgaaggaagagaaggagtgggaggaagaacagaggtgaaaattaaatcaggtcaaagtccaaaactgcacagtggtttcagaaaaaactcaaacattgtctggcttattcagtgtctgctctttgtattcctttttcagtggagataattttatcaccagctcacctcagcatcttccaaacataccatcactttttttcttccttttctagttttcttcttaataacatatattattagagtttttattttaaagaaat

SEQ ID NO: 446191 - DNA, 540 bp, Homo sapiens
tacagagctaagtaaaatggaaacaaaccagtttgcatgtgtgttcattattttttaatgcatttgttcagacgcataggtaaatgcctgaaactggtaactgaaggctatactgctaacagctgttgcacctggggaagatggtagaattaaccatcaaygcaggaagcccttcattttgatctctatagaactcttgaaatagtttcattgatggcaaacatgtatttgtttgcaaaatgcaatttttaaaagaggtaaaaggcagaggaggatgagatgaaggaagagaaggagtgggaggaagaacagaggtgaaaattaaatcaggtcaaagtccaaaactgcacagtggtttcagaaaaaactcaaacattgtctggcttattcagtgtctgctctttgtattcctttttcagtggagataattttatcaccagctcacctcagcatcttccaaacataccatcactttttttcttccttttctagttttcttcttaataacatatattattagagtttttattttaaagaaat

SEQ ID NO: 446192 - DNA, 541 bp, Homo sapiens
cagatatatttactacatcaatgattaggaaaaaattgctaaactgtattttaattcaacaaaagcaacttgccaagatgaggtttggggagctcaagtttaaatcagtcagtgctgactaatgacactcttctagccaattggattaggttgagaatgggaatgtgacctaattcagacaatgaggcaagagggacgttttcaaagtgtgtatggaaaatatttctctagcagcatgtggcaaaatgaatagtgtcactcccaaattattgcttgtctggaactcagaatataatcttaattggamgtagaatttacgcagatgtaattagttaaatatgttcgtaataatatcctgccgggtttagggtgggccttaaattcaatgacttgtgtctttataagaataggagacagcacacaaacatacagagcaacggtgtcaaagcaaaaattgcagtggtcaaagttaagcaggtgagaaaaactttatttgattatatttcaatagggtagagaggctaaaactcaggctgagatc

SEQ ID NO: 446193 - DNA, 646 bp, Homo sapiens
ggctcctactctcccagatagaccaattttccttgataattacatttcaaaatatggctctcaagtatttgagaaagataactcaggattttaaaactgtctagtgactttgaaaaagatttatatgtcaaagaggcagagaacaaatttgcaattgcatgttttctaaagtaaatgctctaagaaaagggaggaagagcaatctccctggttaggtcacctggattctgtaggggccagagtaggagggaggtgaggtcttrgaggcagaaagaagactgtctaaggtttattcaagctgagggaaaccctgaggctggcttgagcaaagcccatgtgttggcagagataggatttacgctgccacaaactaaggatgccaggacctacaagaggcataggaagaatacttccttaaagctttcagggggagcatggctctgccagaaacttaatttaggcttctggatgcttgatctgtgagagaatgcatttctgaaattttaaaccacccagtttgttgtgataggtgatggcagtcatagaatatgaatatactatgggccataagtcttctttctccccaagtttggatgtagccctggaagtaattggtaaaaatcttactttgggattaattacaccc

SEQ ID NO: 446194 - DNA, 586 bp, Homo sapiens
caggtctgtgttccatgagggaaaaaaagagattaaccatatgatcatctcttttttttaaaacctgggagcatttaccacatccctaacacagaaagagtgaatccaaccagacctttgcagtcttgcggggctgggaaagagataaaagttaagaaagattagatagttggacttttaggagcagatttctagagtgattactctagaaatctgcactagagggccgggcatggtggctcaagcttgtcatcccagcattttgggaggccaaggcaggcrgatcacttgaggtcaggagcttgagacctgtctggccaacatggtgaaaacccatctctattaaaagacaaaaattagctgagcatggtggtgtacacctgtaatcccagctactggggaggctgagcagaaggattgcttgaacccgggaggcggaggttgcagtaagccaaggttgcaccactgcactccagcctgggtgacagagcaagactccttctcaaaaaacaaacaaacaaacaaaacccagaaatctgtactagattcccttcaaccttggtcttaattctaagctacatgtgtg

SEQ ID NO: 446195 - DNA, 586 bp, Homo sapiens
caggtctgtgttccatgagggaaaaaaagagattaaccatatgatcatctcttttttttaaaacctgggagcatttaccacatccctaacacagaaagagtgaatccaaccagacctttgcagtcttgcggggctgggaaagagataaaagttaagaaagattagatagttggacttttaggagcagatttctagagtgattactctagaaatctgcactagagggccgggcatggtggctcaagcttgtcatcccagcattttgggaggccaaggcaggcagatcacttgaggtcaggagcttgagacctgtctggccaacatggtgaaaacccatctctattaaaagacaaaaattagctgagcatggtggtgtacacctgtaatcccagctactggggaggctgagcagaaggaytgcttgaacccgggaggcggaggttgcagtaagccaaggttgcaccactgcactccagcctgggtgacagagcaagactccttctcaaaaaacaaacaaacaaacaaaacccagaaatctgtactagattcccttcaaccttggtcttaattctaagctacatgtgtg

SEQ ID NO: 446196 - DNA, 609 bp, Homo sapiens
aaaaggaacaactacaaaaatcgcatgtgctgctttttatttttaaaaactgcagagcaaataacaatggtaccacatccttaaagggcttaaaaagtaagctgttaaatcaggattctatagaatatttgactaaatatccataaaaatcaaggaataataaacacttttttcagacacaattactgagagaatctgttgagaatatttgtatactgcaaaaatgtgttcccaccrtaatttgttttcaccataaagacacatgcatgtgaatgttcattgcagcactattcacaataacaaagacatggaatcaacctaaatgcccatcaatgacagattggacaaagaaaacatggtacagatacactatggaaaactatgcaaccatagaaagagaccgagatcatgtctttcacaggaacatggctggagctggagactactatccctagcaaactaacacacaaacagagaatcaaataccacacgttcctacttacaagtgggagctaaatgataagaacttatgaacacaaagaaggaaacaacagacactggagccgacttggggagggagtgtgggaggaaggagaggagcagaaaaaa

SEQ ID NO: 446197 - DNA, 632 bp, Homo sapiens
tagagaatgaacagggtgctggctggctgttatccaagaagaacaacagattgctgtgaaaaggattaaaaaaaaatctttggataaccatgtccctgaaggagtactgaccccaccctttctaaatcaaatctgccttcctggttagtcctgtctaattatgttccccaataatctactttgtaaaaaaatctcactttttatactttataactctgcacacactttttacattagggattgtctgaaatgaagctccttaccagctctctctacaggagttaaatgccttgtgggccatgggattttgccctgtttgcatgtaactcttcctactgggaaaagcaatatcccccacttccagtttcctctagtgaaccaaaagtgatctcccaaggttatttttggagaatcttccttatttcactatcgtagacatgtaatgaaaaaataattcawcttggacatatttaactgcaattattttgaataaaaaagtgggaaatttttgaaaggagttatccaatgagagaaaataaactattcactgaatagatacagagagcccttgatgaagcagaataaatctttaaaactacattgacataaagaaaatactttcagaaatgtac

SEQ ID NO: 446198 - DNA, 622 bp, Homo sapiens
tctgtatacatttaggttttgtttatttgccaaagaacagacaaacttagagcaactgcagcctgctatactccctcactcaaaaaacacaagaagtttatctggtatatttattcttcattctcctaaaaatatgtaccatatcctatattcatttatgtacatttagtaaaattgactcaaaaattaagttttattagacataaaatataaacatatgtataatattgaactatatttaaccatgtaaaatataaaacttcgctagccattggtgtttaaaattgttgcaccttcattaattgtatggacactgccaaaagcacaggtttgaatggctaattgctttttcatttgaaggatgaaacaggcaatctgtgttgaatttggtcatgagatgttctcatttacatttgtaatttgtgtgagctctagtcaacacaggaaccaaatgtcaactctctaaaagaaggccagaaatctaagtgaacacaggacaattatgggaaggtgwgcacattttcatttctctatatttcagagaacagagcactgttaggagtataaacaagttgcagcagaggctggagcatcaaatgcactgtgagtgcaatgtcttctg

SEQ ID NO: 446199 - DNA, 506 bp, Homo sapiens
tgagctaagaaatagacagctaggtttcaaatccatcatcagatacaggatttcatacaagtcactgaaattctatgagcttctataaactcatagaattatccacctttaggccaggcatgatggytcacacctgtaatcccaacacttctgggggccacactgggaggattacttgagcccagggatttgagagcagcctgggcaatatagtgagacctcatgtctaaaaagaaattaaaggttagccaagtgtgatggtatgtacctgtagtcccagctactcaggaggctgagatggaaggattgcttaaggccagaaggcagaggttgcagtgagccaagattgcaccactgcactccagcctaggtgacagagtaagaccctgtctcaaaataaataaatagaaataactccacctttacaatgtggtatatctactaacttaaatacttttgtgtgataaagttatgtttaatccctacatttagcctggcatctgtaa

SEQ ID NO: 446200 - DNA, 631 bp, Homo sapiens
atatatagtaatattaatggttgtagtaatgtaaaaaatacatttataaaatttgcattaacagacaaaataataagtcataaatctgatatatttgaatttagttctatctcttcagattttggacaaatatattttatttattggcacacatttccttttagttttaacaccaatttgtctctatttctaattattgtgcagaagaattaagaaagcatatctaaatatgcattataaactgtaataactataatgcagtagaaaaccatacaattggtgacagtcaatatataatatttatcaaatatatgtatgtacaagtatacacacacacacaaacacacattgtcttacagaaactcttaaattgctatctggctcttttatttaacttgtcttgaatmttttcacaaatctccaacaagacagtaaaatactttaaggtatttggagttataagagactgagaatgctaaacacacagtcaattctcaataaatatttgttgaatgagtaaacagggtcagctggtggaggagatttcatgcctggctgaggaatttgaatttatcccacaaggacaaccgtagaaagtttttttgcagagaagtagcatgatgaaaacagt

SEQ ID NO: 446201 - DNA, 595 bp, Homo sapiens
ctcaaaaaaaaaaagacatacaaatggcaaacaagtatgtgaaaaggtgctcaacatcactgatcrtcagagaaatgcaaatcaaaactacaatgagatatcatctcaccccagttaaaatgacttttatccaaaagacaggcaatgctggtgaggatatggagaaaagagaacccttgtacattgttggtggaaatgtaaattagtacaaacattatagagaatagtttggaggttcctcaaaaaaaccacaaatagagctaccacatgattcagcaatcccactgctaagtatatacatgaaagaaaggaaataaagcatattgtcaaagagactgcactctcctgtttactgtaacactattcacaaatggaatggtattcacctgcacaaagccagtacacaaagactggaaaagatggctgttttcaaattcccaaatcccagtaaaaagaaattacaaggcatgcaaaaaaaaaaaaaaaaaaaaagaaaaagaaaacatagtcaatcaaaggaacaaaataaaactctaggaactgaccctaaaggaatgtggatctaagagctgcctaagaatttaaaataactatt

SEQ ID NO: 446202 - DNA, 479 bp, Homo sapiens
ccaaatgttagaggtagggcctggtgggaagtgactggatcaagggagtggatttccctcttatgctgctcttgtgacagtgagtgagcgctcctgagatgtggttgtgtgaaagcacgtggcacctccccactttctctcttcctcctactctggccatgtaagacacgcctacttcccctttgccttccaccatgattgaaagttttctgaggcctccccagaagycatcatgcttcctgtacagcctgtggaaccgtcatccaatttaacctcttttctttataaattacccactctcaggtatatatatagcagtgcaagtatggacagcaagtaaggaggttgaataagtaatgaaaaactttccaagaaagaaaagcccaagatcaaatggcatcactggagaattccatatataatttgaagaggaattaacactagtattcctgaaataatttcaaaaatttaaacaggag

SEQ ID NO: 446203 - DNA, 522 bp, Homo sapiens
ttatatgatcttcgcaaggatgccaaggccactcaatgggaaaagtatatcctctttaacaaatagtgccatgaaaactggatattgacattaaaataatgaagttatttttgtgatggttaatttttcatgtcaacttgactgggccacaaagtgccgaaattaaacattatttctgggtgtgtccatgagggtgtttctggaagagattaacatgtgaattggtaggcacagtaaagtaggttgctcttccmagtgcgggtgtggcatcattcaattcttgaagtcctcaatagaatgaaaagcagaggaaagaaagattcgtctcctacctgcctgcttacttgagctaaaatattgtccttctcctgcccttggactaaaatttacgccatcagctcctgtggctttcagccttcagactttgcctggaattacaccaactcccctgggtctccagtttgcagatggcaagatggtggggcttctcatcttccacaatcaaacttaaacacttttatt

SEQ ID NO: 446204 - DNA, 522 bp, Homo sapiens
ttatatgatcttcgcaaggatgccaaggccactcaatgggaaaagtatatcctctttaacaaatagtgccatgaaaactggatattgacattaaaataatgaagttatttttgtgatggttaatttttcatgtcaacttgactgggccacaaagtgccgaaattaaacattatttctgggtgtgtccatgagggtgtttctggaagagattaacatgtgaattggtaggcacagtaaagtaggttgctcttcccagtgygggtgtggcatcattcaattcttgaagtcctcaatagaatgaaaagcagaggaaagaaagattcgtctcctacctgcctgcttacttgagctaaaatattgtccttctcctgcccttggactaaaatttacgccatcagctcctgtggctttcagccttcagactttgcctggaattacaccaactcccctgggtctccagtttgcagatggcaagatggtggggcttctcatcttccacaatcaaacttaaacacttttatt

SEQ ID NO: 446205 - DNA, 522 bp, Homo sapiens
ttatatgatcttcgcaaggatgccaaggccactcaatgggaaaagtatatcctctttaacaaatagtgccatgaaaactggatattgacattaaaataatgaagttatttttgtgatggttaatttttcatgtcaacttgactgggccacaaagtgccgaaattaaacattatttctgggtgtgtccatgagggtgtttctggaagagattaacatgtgaattggtaggcacagtaaagtaggttgctcttcccagtgcgggtgtggcatcattcaattcttgaagtcctcaatagaatgaaaagcagaggaaagaaagattcgtctcctacctgcctgcttacttgagctaaaatattgtccttctcctgcccttggactaaaatttacgccatcagctccygtggctttcagccttcagactttgcctggaattacaccaactcccctgggtctccagtttgcagatggcaagatggtggggcttctcatcttccacaatcaaacttaaacacttttatt

SEQ ID NO: 446206 - DNA, 522 bp, Homo sapiens
ttatatgatcttcgcaaggatgccaaggccactcaatgggaaaagtatatcctctttaacaaatagtgccatgaaaactggatattgacattaaaataatgaagttatttttgtgatggttaatttttcatgtcaacttgactgggccacaaagtgccgaaattaaacattatttctgggtgtgtccatgagggtgtttctggaagagattaacatgtgaattggtaggcacagtaaagtaggttgctcttcccagtgcgggtgtggcatcattcaattcttgaagtcctcaatagaatgaaaagcagaggaaagaaagattcgtctcctacctgcctgcttacttgagctaaaatattgtccttctcctgcccttggactaaaatttacgccatcagctcctgtggctttcagccttcagactttgmctggaattacaccaactcccctgggtctccagtttgcagatggcaagatggtggggcttctcatcttccacaatcaaacttaaacacttttatt

SEQ ID NO: 446207 - DNA, 591 bp, Homo sapiens
tagtttcggctaatcttcttggacaatttctaaatatcttgaaaatatttatgtgtrttgtacagtttcttgtggctgttgtaactagctaccataaactttgtggcttaaagcaatgcagattttgtctcaacagttccagaaatctgtaattggttacactggactgagactttggtgccagaatttatttctttgcctttttaaatttctagatctgcattttgttttgttttgttttgttttggagatggagtctcactctgttgcctaggctggagtgcagtggcgcaatctcggctcactgcaacctctacctcccagattcaagcgattctcctgcctcagcctcccgagtagctgggattacaggaatgtgccaccacgtctggctaatttttgtatttttagtagatggggttttgccatattggccaggctggtctcaaactcctgacctcaggtgatccgccaaccttgccctcccaaagtgttaggattacaggcatgagccactgcgaccagcctagatctgcattttttgattcatgtcactttcctccattttcaaagccaacggaattgcatttc

SEQ ID NO: 446208 - DNA, 591 bp, Homo sapiens
tagtttcggctaatcttcttggacaatttctaaatatcttgaaaatatttatgtgtgttgtacagtttcttgtggctgttgtaactagctaccataaactttgtggcttaaagcaatgcagrttttgtctcaacagttccagaaatctgtaattggttacactggactgagactttggtgccagaatttatttctttgcctttttaaatttctagatctgcattttgttttgttttgttttgttttggagatggagtctcactctgttgcctaggctggagtgcagtggcgcaatctcggctcactgcaacctctacctcccagattcaagcgattctcctgcctcagcctcccgagtagctgggattacaggaatgtgccaccacgtctggctaatttttgtatttttagtagatggggttttgccatattggccaggctggtctcaaactcctgacctcaggtgatccgccaaccttgccctcccaaagtgttaggattacaggcatgagccactgcgaccagcctagatctgcattttttgattcatgtcactttcctccattttcaaagccaacggaattgcatttc

SEQ ID NO: 446209 - DNA, 591 bp, Homo sapiens
tagtttcggctaatcttcttggacaatttctaaatatcttgaaaatatttatgtgtgttgtacagtttcttgtggctgttgtaactagctaccataaactttgtggcttaaagcaatgcagattttgtctcaacagttccagaaatctgtaattggttacactggactgagactttggtgccagaatttatttctttgcctttttaaatttctagatctgcattttgttttgttttgttttgttttggagatggagtctcactctgttgcctaggctggagtgcagtggcgcaatctcggctcactgcaacctctacctcccagrttcaagcgattctcctgcctcagcctcccgagtagctgggattacaggaatgtgccaccacgtctggctaatttttgtatttttagtagatggggttttgccatattggccaggctggtctcaaactcctgacctcaggtgatccgccaaccttgccctcccaaagtgttaggattacaggcatgagccactgcgaccagcctagatctgcattttttgattcatgtcactttcctccattttcaaagccaacggaattgcatttc

SEQ ID NO: 446210 - DNA, 623 bp, Homo sapiens
ccttcctggcttcaaagctagcacataaagatgaaaggtgggttcctggatgatcgcaaattaataaattaataagtgctattgagctccatcttcatgttggtccagtccaaaggatcaggtttctggcaagaatcatgtttagtagttactttgattagtactccaaatacgcttctctaagtataaagttctgatgggaaacccagattgctgttagtagtgatcctggtaagctactgctgctactactttctacttctatgctttctactactaccattaatttaataagagtaaagtcctcttgcttccygccagtatccctttccaggaaatttccaaaaaaaatggctacaagcctatgcaaattaagtgatatttttctgtcttttgaatcttaaatatcaactagaatttgtaacccctaatatgtgatctgaaagcctcattgactaaaaggacattgacagtttcttggattatgacaggttgccatagccattggagatcacaccatgacttgcttcccgaccacctggattttatgtgaagtcacatgttcttagaaaaacagacttttaagacactcttctgcgatctgacattttcaaggtaagcct

SEQ ID NO: 446211 - DNA, 496 bp, Homo sapiens
ctaatacttcagctatcctcatatgatttttctgattaaagaaaaaaaaaagattcggccaggcgcagtggctctcacctgtaatcccggcactttgggaagccaagatgggcggatcacgaggtcgagagatcaagaccaacctggctaacacagtgaaaccctgcctctgctaaaaatgcaaaaaaaaaaaaaaaaaaaaaaaaattagccgggcgtggtggcgggcgcctgtaatcccagcactttgggagaccgaggctggcggatcatgacatcaggagatggagtccatcctagctaacacggtgaaaccctgtctctattaaaaatacaaaaaattagccgggcgtggtggtgggtgctgtagtcccagctactcgaatggcatgaacccgggaggcagagcttgcagtgagccacgatggcgccactgcactccaggccgggcracagagcgagactccatctaaaaaaaaaaaaaaaaaaaaagatt

SEQ ID NO: 446212 - DNA, 516 bp, Homo sapiens
aaatatgggaaatagggcccagggaatgaagtgtgaacaaaaataggtatgagaatttcttcattctcattacggaataayatttgtgtggaagaatgatatattttcattgtgttctaacatttattttaatggcaaaataggttttgcatagtaatgacttcagacccatttctctctacaattatctgcactctgttttcagaatgaaatcagtgtacctacagactgccagttaatgacaagcatagtttacatatttcagtgatgaagaaatggtttgtgcaacaagcattctaacacatggagtttcttcttccaaatattcgtattctcaggattataagccaatagtttttggggttattaaaagcaatctttagaaatataggaaagttctttatatagaagattaatttagaataagtaagatttaacttctgttttatggaaacacaaatatatttagccttcttccttttatttttattatattaaaaatggtaagtgctaact

SEQ ID NO: 446213 - DNA, 562 bp, Homo sapiens
gaaactttaaaataaaagtttgtaaaacatgatgacaattttcaacacaagatatttgtttcaacagtaagcatacatgtgaacaatttcattcattaaaaaaagacatacgttcatattagccccgtatcaacacccaaatacatatctgtaagacaggcatatgaggaagtctcctgtattttgcatatgtgtttgaactaacgtatttattaaaataaaaattcttggattatttttaaatgctgttktaagataggaaattgttcttgctttttaacatattgcaacatttggaaaattacagctcacatcaaagaaaaatctactttatgtttggaatataataataaaagtctgaactcttccttctaactctgaactttctgataacatagaatagatgattatcagttcttgctcatgatgaggagtaacttgatggcatcacgggctcagaagaccacattcctgcattattttaaggttctttatttaatataattggtggctacaggaagctttaaactagggccttgttacaaactcaatggaatttata

SEQ ID NO: 446214 - DNA, 567 bp, Homo sapiens
tttttgtttccaggtttcggctaatacaaataatgctactttgaatgttactgtgcttgccttttagtgggtatctgcatgaattcctatcgaagttgcttttttatttatgtatacacatacccacagctttagcaggtgttgctagttttcagaagtgatttttacaatttatattttcccaccagcagcaaaaagagaggagcatcgctctccactttctgctaatacttggtactgtcgatctttctaattttagccattctgctgagtgttaatattatgtctttacagtttgaactgactgctcaaatctctttcccatttattctattgggktgtctgtcctttatactgatgtaggagtttacatagtatggatataagccatctgtcagatatatatattacaagtacctgctggtactgttttgtttttctcttatcagtaacttttgatgacagaaattcttgaactgtcaacagcccaggttatcaatcttcccctttatacctgtgagttgtgtgtcctgtttaagaaacattttcctacttcaagattataaa

SEQ ID NO: 446215 - DNA, 552 bp, Homo sapiens
cagttattgtagtaaataatctaggggtcagggttgctatacttatactctctggctctggctcaggtccagaaactgaacaaggatcatagcattttattgagatatctgcctcagcttcctaatctttctcattgatttctgttggttatacagaatgaacagtacacttgctggttgtctgtctaccttgtcccgagggattacatgtattatcaaccagcgctctgtagggaaggctcccctagttgccacttgaccttggcacttctaatgatcattttattcacttgcttttggctattcagcacctccaacttgcctcaattatttcaatattctattgtccttgccgctatcagggacagagttctgtgacagcatcacctatcatcaccctggcctagagaacacagacaccactgagcttctcggcaagactggtttcttctgggtcctgccattgaatataaagtcaacttgkgggcttttaacttctatatagcatgtaagcattttttttctaatatgcctacttccttgagtattttg

SEQ ID NO: 446216 - DNA, 540 bp, Homo sapiens
atgtgataaagccgagtataatgattakcccaggtggaaagcaaagatgataggtcttggagatcacaatgcctttctaaatgagctatcaaaaaaggcaaaacttccaccacgcaagattcttcagcaaataaaacttgaagtttccagggccacaattccttcctgaatcctctgcatgggatgtggctgcatgtgcatttctatatgcaatggttgcctctaaatgagtgggttggcatctgaatgaatgtggatggttagttccaccgagtgagttatggttacaattgactctctttggggtgattcactcttgtgtaacaactgaggtctgaaaacaaaatcacagtgctaactgtgatgatttttctctcgctttctctcacttatgctcttaataatctcgtgagttaatattatttttcccattgcagataggcaagttgaaacttagagcagttatgcaacttgaccaaagtcatgtctctagtgttccttcaattacatattccattcccaaatagtgtttggcactga

SEQ ID NO: 446217 - DNA, 589 bp, Homo sapiens
gtctttgcattggtagccatggggctaaaaccgtgctcaggactaagttgcagtggtggaggggccttcaagtgacctcatcgctgggagacctcatctctccaagaccttgtccttagaaatataatccacctgttttcttccctcaaccagagtccacacctggaatagtcactggataagtcaatgctccacttttccctttcatcaggatggcatcccatatgtgcaagggaagaagtgagtaggagcaaggttaggagtaaggaagtgatggagaaagtagatattgcttccaagaggtgtgtccaggagtcctaagaaccacatcaccagggagggacccggattgcagagggagttttgtttttagtctccacaatgagaattggtgtgtcrtttaccttttaagtgaggctataatttagagttcatttttagagtgttatcagtgcagaattcagccctcacattgtagcaattataatcggagtatatacttattttacagaaattactaggcagttataacattattctactgatagaacattctggatctaagctcagaaaatgtcacactgaaaaa

SEQ ID NO: 446218 - DNA, 636 bp, Homo sapiens
tgtccgcttgacacccttgcattcccttcagttgccaatatggcactactgggctgcagaatttggagaatctgaaagccctctgtgtctccaactggcctgacccacactggttcactggcagccagacagaaaaacaacagacagaaaaactcccacagaactattatttgacacaaattccaaaaaatgggagttagaattcaaagagccttgcaasttttgatctacggcagaaagagggccacatgagaatgcctctgacttttaagcagtggcttcttgaaagagattagaggctctggaagcaatgatgaatacttatactgactgaggaaactgatcattgccgacatccattttttatattaaagtccctgctaacatttcgtttaaaaaagggcttccaacaagctcaaaatacttccagctcaatgttctctgctctggttagtgtttacaacaagagtattccttgcttagtttactagattagatctccaagtaggctctgtgataaggtttgaagagtaatatcttgacaagaaaacaaagagaaagcctcttaattatgtcacttttttcctggaaattatgaaaaaagtcatttctgctttattttctgggcacgcttag

SEQ ID NO: 446219 - DNA, 636 bp, Homo sapiens
tgtccgcttgacacccttgcattcccttcagttgccaatatggcactactgggctgcagaatttggagaatctgaaagccctctgtgtctccaactggcctgacccacactggttcactggcagccagacagaaaaacaacagacagaaaaactcccacagaactattatttgacacaaattccaaaaaatgggagttagaattcaaagagccttgcaagttttgatctacggcagaaagagggccacatgagaatgcctctgacttttaagcagtggcttcttgaaagagattagaggctctggaagcaatgatgaatacttatactgactgaggaaactgatcattgccgacatccattttttatattaaagtccctgctaacatttcrtttaaaaaagggcttccaacaagctcaaaatacttccagctcaatgttctctgctctggttagtgtttacaacaagagtattccttgcttagtttactagattagatctccaagtaggctctgtgataaggtttgaagagtaatatcttgacaagaaaacaaagagaaagcctcttaattatgtcacttttttcctggaaattatgaaaaaagtcatttctgctttattttctgggcacgcttag

SEQ ID NO: 446220 - DNA, 638 bp, Homo sapiens
ttcaagttcctgaattactccttccaaggagctgccacttggggttattcaagaaaaaacattagctgccccaaggcctccagttgcacttcagaaacaaatcagagaatttttgcagtcaaagagagtagaatctgaacctgaccttcagtgtagcatgcagagagcctgaacttcccccgtgtagcatggaaggaagatgtaggcaatgctatatgccatgagcttgcaaatggctcaagacaagttggtacttgacaattattatgttccatttgcgaaatatcagttatttcctactagttagaggtaggaagggtctgtaggtcttcttccccaccgtatcagcaccaggtgatgatacactgacagagaatctcagatgtagttctaacacgtgaaccaatttttcttagcaagcaggcacaaaaaccaatcacaatttattttgtaagctcagtgaartgccagctctctgtctttttaggcatcccaatagacactttgtctggaagattcactcagcaaaaatctaacaggattttcctgtgtgaaaattcctgggtgagaggtcacagatgagatggattagaatcctaatctatggctgcctctcggaaagatttgggctactgagc

SEQ ID NO: 446221 - DNA, 549 bp, Homo sapiens
agaatctgaacctgaccttcagtgtagcatgcagagagcctgaacttcccccgtgtagcatggaaggaagatgtaggcaatgctatatgccatgagcttgcaaatggctcaagacaagttggtacttgacaattattatgttccatttgcgaaatatcagttatttcctactagttagaggtaggaagggtctgtaggtcttcttccccaccgtatcagcaccaggtgatgatacactgacagagaatctcagatgtagttctaacacgtgaaccaatttttcttagcaagcaggcacaaaaaccaatcacaatttattttgtaagctcagtgaagtgccagctctctgtctttttaggcatcccaatagacactttgtctggaagattcactcagcaaaaatctaacaggattttcctgtgtgaaaattccygggtgagaggtcacagatgagatggattagaatcctaatctatggctgcctctcggaaagatttgggctactgagcttgctgaattctcatagtgcttgcctgacatttttggcca

SEQ ID NO: 446222 - DNA, 548 bp, Homo sapiens
ggattagaatcctaatctatggctgcctctcggaaagatttgggctactgagcttgctgaattctcatagtgcttgcctgacatttttggccaatccacataccttaaataccacttatttcatcagcgaaaaagtttttctaacatctgttatgctaatattaattcaagagagtctttgatgttcattggaggtaaagatagctaaagttcttatagctgcctctaatgtaagcctttcattaagaatcttttaaatgtttattaatctcctatggkatttctattccagattagagtatgtcaattattaacaattgcccctatatctagagtcaaaaatacaaatcacaaattccattctcaactactgaagataagttacagagaatataaaagatgggttagagagccacagaaccatgagacaggataatgtcactcccaaaatgaataagtcaagcagagacagcagcattttatggtatacatttgaaggctgctcctaaaaaaacaaatagtccaggaagatggaagaaggtataaca

SEQ ID NO: 446223 - DNA, 529 bp, Homo sapiens
agtccctcttcccttatgtgctcctggggaggggtattctgtctgaatcactagtatagcgtgtgaagaatagcattaaatttggagtcagaaagctttgatagagtaggcatctgttggttcctctgacaccatgtggtaattcaaaatatttcagtacgaaaagagtaataaccgggtacaaattcattctcatttataccataggggaagttaatcagaactttgaattatctttttgttgtcattttaacttgttttattttattttccaacttttattttagattcaggggtacatgtgcaggatgtgcaggtttgttacatagttaaatgtgtgccatggtgatttgctgcacagatcatcccatcacccaggtattaagcccagcatccatgaggtattcttcctgatgctctccctcctcccaccccaacyctccatcaggccctagtgtgtgttgttctcctccatgtgtgttatcattcaactcccacttataagtgagaacatgcagtatttggtttt

SEQ ID NO: 446224 - DNA, 572 bp, Homo sapiens
gtacagaaagtttattggcaatcacactcagaaacaagacacttaagaaaatgatggaataaaaattgcgtagagatagaagctgacctgcgatacatactcaaattaaatcttagttaataacatgaagttctctgcagctgagatggctaatgagaattgttctaaattcagaagaggaagcttggcctttgacccttatatcaacatggcaaggggcatgatcttgagtgaggcgtctcccagagggcagcccccggagaagggcgcaggactagccatcaggagccaacactcctagcagctgggtgaacaaactccagaatgggtcctgtagagaggacctgggtgatgcaccacaatgcctgcgacagggacgatatctctgggttagagaggatggggatgaaatcgtgaaaactggaagcttagaaatgtttacgactgggtgaaaggaggtagtcagtggttatacattatttacatgatcamttcatcccagatcatggaaccccctgacgctaaatcaaacagagatcaaacaaatgtgttttattttctgccagctaatg

SEQ ID NO: 446225 - DNA, 622 bp, Homo sapiens
ttttgttttggtgacagagtcttgctctgtcacccaggctagggtkcagtggtataaacattgctcactgcagccttgccctcctgggttgaagtgatcctcctcccaagtagctaggaccacacgtgcacatcacttacaacacttgagctcactgcaatagcaagaggaggtagctataaaattcttagtagtacaacatggactacagttaattttatgccattttcatttaatactgcttcttcatgtttacttttctcttgactgtgaatagagccctgtacagtctataagggtgtgtgtaagttttgataaattttagctttttatataagatttgtgtttactttatggtaggagatgataaaatagactcatatttgcattttctacttcgccagctgcagcttcgacctccccagctcaggtgatcttcctagctcggcctcccaagtagctaggactataggagtatgtcaccatgcttggctaatttttgcattttttgtagagatagggtctcaccatgttgcccaggctggtcttgaactcctgggctcaaaccattctccgccttggcctcccaaagtgctgggcttataggcatgagccatagcac

SEQ ID NO: 446226 - DNA, 328 bp, Homo sapiens
gtcattctgctgcatggggtaaaggaggaggacacactggctctaactgctacttattttaagctttcaaacccacttactacttgcagatttaaccatacccctggcttcagaggtatcttgtgccttcagttttgaatctttgggagactgagggttcaagttgatgtgtttcagacttctccccactgtttgcttagatttctttctttggtctagaaattttagatatacattcttctgytttgcagcttccaataaaaattgttttcttgaggcagggccttgctctattccccaggccagagggcaatagtgtgatcatagc

SEQ ID NO: 446227 - DNA, 558 bp, Homo sapiens
gctgttctttgatgcagaatttgcctttgattcatcttctaataattttcactttgttaacagatatatgcagccaactgcaggaaaaagaaagttgcatttgcagtgcttccagctctcacattggccattgcctcaagaatggatgataaatgtgtcactttctgttcttgttgtaatctctgtaataagagctgattcgtgtttttctgttttgcattctccttgtattctctgtcaggagaaatggtsatttgtgtttttcaaaatggaatatgagcacctatgcacttttaataggctgataaacagttgtattccacttggtaaatatttcctgctttgagtgactgtccattccagctcatccccattcatgtagcatgaggaaaggcaagagctaggtgagctggaaatagacaatgcatcaacacttaaaaagctgaggtcaaagcattagtttattaccatcatgtttcacggaatgtatgaaccattaaaattctagcattgtgccatattatcgtgataaaatttgtaatgggaaaaaggaatgat

SEQ ID NO: 446228 - DNA, 617 bp, Homo sapiens
ttgcccacatgaatgggtcagatggtgagctgggcaagcttccagagctcagttgaggctaactcccaaggaggcaattgatggacaaagtgctaactcttgaagttcagtggtcataagtggccactaagaccagggtactgtgctagattgcacctgccccgtggtcctgctagtgagggagacttccagccctctgtgccctcttggcctctcacatgctgctcatgcacacgggctcccyatcttccacacttccttctcctagacactgaaagtcatttagcttcttggtgtggaaaaacatcactatacaagtatacaaccaaatatttatttcttttaggtcagatagctgtttgcttgtccattttgttttactgtttttgccttgctttggggcctcttttctgactctgctgtgaatgactgaaactgattgtggaggaataaaataattttcagtgaactcagagacatgcaaaaaattctccatgttaatactttaaatatgatcccatgataataagaaataaagatttctaccttcaatccagatcaaaaaccaaatataaatatcctctttaacatatatttggtattttgacatatggaca

SEQ ID NO: 446229 - DNA, 485 bp, Homo sapiens
gtccattttgttttactgtttttgccttgctttggggcctcttttctgactctgctgtgaatgactgaaactgattgtggaggaataaaataattttcagtgaactcagagacatgcaaaaarttctccatgttaatactttaaatatgatcccatgataataagaaataaagatttctaccttcaatccagatcaaaaaccaaatataaatatcctctttaacatatatttggtattttgacatatggacaaccccttgtaacaggattttaaaataactttcccccctaatcttaagagtaatacatgttcattgtttcttaatttgaatcccccaaagctgaccccgatgcaagaattgagatgcaagttgtttatttgggatgtgattttaggaagtgggagtgatcctgagggagtaggggaagaaggccggtgagggatcccaagttatttatttgggatgtgatcttaggaagtgggg

SEQ ID NO: 446230 - DNA, 485 bp, Homo sapiens
gtccattttgttttactgtttttgccttgctttggggcctcttttctgactctgctgtgaatgactgaaactgattgtggaggaataaaataattttcagtgaactcagagacatgcaaaaaattctccatgttaatactttaaatatgatcccatgataataagaaataaagatttctaccttcaatcyagatcaaaaaccaaatataaatatcctctttaacatatatttggtattttgacatatggacaaccccttgtaacaggattttaaaataactttcccccctaatcttaagagtaatacatgttcattgtttcttaatttgaatcccccaaagctgaccccgatgcaagaattgagatgcaagttgtttatttgggatgtgattttaggaagtgggagtgatcctgagggagtaggggaagaaggccggtgagggatcccaagttatttatttgggatgtgatcttaggaagtgggg

SEQ ID NO: 446231 - DNA, 485 bp, Homo sapiens
gtccattttgttttactgtttttgccttgctttggggcctcttttctgactctgctgtgaatgactgaaactgattgtggaggaataaaataattttcagtgaactcagagacatgcaaaaaattctccatgttaatactttaaatatgatcccatgataataagaaataaagatttctaccttcaatccrgatcaaaaaccaaatataaatatcctctttaacatatatttggtattttgacatatggacaaccccttgtaacaggattttaaaataactttcccccctaatcttaagagtaatacatgttcattgtttcttaatttgaatcccccaaagctgaccccgatgcaagaattgagatgcaagttgtttatttgggatgtgattttaggaagtgggagtgatcctgagggagtaggggaagaaggccggtgagggatcccaagttatttatttgggatgtgatcttaggaagtgggg

SEQ ID NO: 446232 - DNA, 461 bp, Homo sapiens
tgagggatcccaagttatttatttgggatgtgatcttaggaagtggggtgawcctgagggattggggcaagaaagctaggggagggagggaagccaataaggagtgcgttcatgagtcagtttctcacgtgggcaactggacttaatctcactgaggactctctcggagatggtatcaagccccagaatcaatccagagggacaagaaatgtggggtctttacccacttatcgtcactcatagaacatcatctctccagcagttctgacccaccacattcaagccaagcatattcccacgttagaggcttgaggtaggaagctgtaggtgtgttatgaaaccgtttattgaaaccacaggtgatcccaggtgggccaatcaggtataaacagtgaacctacagcatctgctacatttgttaaaacaagcacacaaagcaccgtcatttcattgcacaaaga

SEQ ID NO: 446233 - DNA, 461 bp, Homo sapiens
tgagggatcccaagttatttatttgggatgtgatcttaggaagtggggtgatcctgagggattggggcaagaaagctaggggagggagggaagccaataaggagtgcgttcatgagtcagtttctcacgtgggcaactggacttaatctcactgaggactctctcggagatggtatcaagccccagaatcaatccagagggrcaagaaatgtggggtctttacccacttatcgtcactcatagaacatcatctctccagcagttctgacccaccacattcaagccaagcatattcccacgttagaggcttgaggtaggaagctgtaggtgtgttatgaaaccgtttattgaaaccacaggtgatcccaggtgggccaatcaggtataaacagtgaacctacagcatctgctacatttgttaaaacaagcacacaaagcaccgtcatttcattgcacaaaga

SEQ ID NO: 446234 - DNA, 633 bp, Homo sapiens
ctaaatctacatgattcaatcaattatttgttagagcactgcattcatattttttttctaatttgttgttttataaacttgttattatggaaaatttccaacatccacaaaagtagagagaatagtataatgcactctgaatgtacttaatgttcagagtcattcttccttcatttttcccctcattgtcccataccactggaatattttatagccaaacccagccaccatcacacttgaaaataacaaattccttaacatcacctaatgaccgccattgcttaaattgytttttttcttcatttggtttatttgaaccaggatctaaacaaggtccacacattgcatttggttgatatttctcctatgtttcttttaatctgtgaaagtgcccttctttcttttttctcttgtcatttatttgttgaagaaatggggtcatttgtctgatagcatattcccctgttctggattttgccttagtgtttttggcatgttcctctatccctgaatttcctgtgaagtagtaactaaatattttaccaatagttcgttctgtgtacttcctattgcaacacattgagagtcacacaatgtctatctcactttgtgacagagagttcatgtattgtc

SEQ ID NO: 446235 - DNA, 519 bp, Homo sapiens
ggtttttctttctttctttgtctgattttttgagatggagtctcgctctgtcacccaggctggagtgcagtggcacaatctcagcgcactgcaacctctgcctcctgggttcaagcaattctcctgcctcagcctcccgagtagctggggcaacaggtgtgtgccaccacgcccagctaattttttgtatttttagtagagacgaggtttcaccgtgttagccaggatggtcttgatcycttgacctcacgatccgcccacctcggcctcccaaagtgctgggattacaggtgtgagccaccatgcccacctgctttttcatttgtaactgtcctattttaaaaaaggactttcccttatcaatgaattgccctgaaatggagttcacacaggaaagcaagcaatgtattttattacttttctcatcaattgtcagcataatgacttgatctggcaacttcaaagagtcactatttttaagtgttattattaacttatggattttaacatgtttgactg

SEQ ID NO: 446236 - DNA, 285 bp, Homo sapiens
ccagaccatgaaggataaagagaagaaggagctaaaggaggaggagaaattttagcagtctttttaaatacaggaattgttttaggtcatctttttttgtttccttcctgaagagaaaggactttatcagaaccccttttggaagtttccaaataccrttgaaaacaattttcacaattgttctatttcagagtcagctttttctaattgagcatgcaagttaactaatttaggcattaaaggtagtgcattttggccgttgtaatttggggtcatcaggagtta

SEQ ID NO: 446237 - DNA, 600 bp, Homo sapiens
cagcaaaaatgagactaaacctggatccagttgacagatgttaaatgtaatcttgacattggaagtacatctagtccaacaccctcactttagtttaatttaattgtaaatacagtggggagatgtgcatgtttgttacatgggtatattgagtactggtggggattgggcttctagtgtatctattacctaaatagcaaacattgtacatgatagcttatttttcaaccctaattcccctcccagcctccctgcttttggaatcctgtgtctattatttccatctttatttatgtttacccattggtttcttccacttgtatgtgaaaaaatgcagtatttgactttctatttctgagtcagttcacttaggataatggcctccagctccatccatgtggctgcaaaagacatgatttcattattttttatggctgtgtagtattccatggtgtatatatatcatattttctttacccagtcaactgttgatggttccctgactaagtggtagttatccagtcaactgytgatggttccaacctaagttggttccatgactttgctatggtgaatagtgctgtgatgaacatacaagcg

SEQ ID NO: 446238 - DNA, 629 bp, Homo sapiens
gtaaaatgcctttggaaaagttttatcaatttgccagtccatcaatatttaatgagagtacccaattcattgtgctcttgtcagcataatgaaatacacagcaaaacagtataaccagacctgtggaaatttgatgccaaaaatgaaaagattttaatttacatttctttgattttaaaaggttgtatatttttcaaatgtttattgaccatctgtatttcttattttgtaacttatgtctctatgctttcttcattaactttttagagttacaacttggtatttaggattccaactaatatataataacaacatacatttccttgcatatagatttataagtttagatacataagaaatatgagaagctattgaaattacaggagtgagtggctaaggagattttcaagcttacatgaaatattttaattgtctatgtatttaactaattaaaaattgattgttcaaargaatattctagttcattgtatgacttcagctgctagtttggcttctgtaagttatgaatggctctttgttctttagtagcaataactgcagagttcagcaaccttccccccatctgactaaaacattgtagctcaaggaggtctgcgaggtttcatctc

SEQ ID NO: 446239 - DNA, 571 bp, Homo sapiens
atcacatcggcatctttgaggggagatttttcctgcatatcctcttctgaacaaattaagtaataaaaagtaaggcagatgggaaatcaaaacttcatctttataactagaagtgaaattgggagatcatagtttagtgggagagcctgrtatagctgctggctgaacccactaattagaaacacttacccacccaatcaaaagagcactgaggcagatcttttgccctttcacccttcatgggcagagcgtgtcccaggaggagcagagcagaatgcatgtttcctgtaaatggcttgctttcaagagaagggtaaaactgggctatgtatgctcaatgtagttatccataattaaccaatagaacaaatcaccacaccactgccaccttggggtgaaatgagtaaatggcagacagagaccaggagtgagcatattttgtcccacaatctaggacagagtcagagtcatttaactgtgttcccagcataggaaggaaacatcaaaagtagattaggaaacatccctcgtaacaattctctttttgatctcttgaccccttgggcttaac

SEQ ID NO: 446240 - DNA, 571 bp, Homo sapiens
atcacatcggcatctttgaggggagatttttcctgcatatcctcttctgaacaaattaagtaataaaaagtaaggcagatgggaaatcaaaacttcatctttataactagaagtgaaattgggagatcatagtttagtgggagagcctggtatagctgctggctgaacccactaattagaaacacttacccacccaatcaaaagagcactgaggcagatcttttgccctttcacccttcatgggcagagygtgtcccaggaggagcagagcagaatgcatgtttcctgtaaatggcttgctttcaagagaagggtaaaactgggctatgtatgctcaatgtagttatccataattaaccaatagaacaaatcaccacaccactgccaccttggggtgaaatgagtaaatggcagacagagaccaggagtgagcatattttgtcccacaatctaggacagagtcagagtcatttaactgtgttcccagcataggaaggaaacatcaaaagtagattaggaaacatccctcgtaacaattctctttttgatctcttgaccccttgggcttaac

SEQ ID NO: 446241 - DNA, 571 bp, Homo sapiens
atcacatcggcatctttgaggggagatttttcctgcatatcctcttctgaacaaattaagtaataaaaagtaaggcagatgggaaatcaaaacttcatctttataactagaagtgaaattgggagatcatagtttagtgggagagcctggtatagctgctggctgaacccactaattagaaacacttacccacccaatcaaaagagcactgaggcagatcttttgccctttcacccttcatgggcagagcgtgtcccaggaggagcagagcagaatgcatgtttcytgtaaatggcttgctttcaagagaagggtaaaactgggctatgtatgctcaatgtagttatccataattaaccaatagaacaaatcaccacaccactgccaccttggggtgaaatgagtaaatggcagacagagaccaggagtgagcatattttgtcccacaatctaggacagagtcagagtcatttaactgtgttcccagcataggaaggaaacatcaaaagtagattaggaaacatccctcgtaacaattctctttttgatctcttgaccccttgggcttaac

SEQ ID NO: 446242 - DNA, 604 bp, Homo sapiens
tgctctctcacactcaagggtgcagtgaatctcaatcggtccacagtcagctttagttttcttaggcaagaattgggcctcctgaggttgctactgaggagaacacatttcaaagctctccaagtggctttcctaaaactctcctccctaggcttggagctgaaccacagcacccattgcacagcacagaaaggctttagctttcttcaaagaagtctgtctacgagtctcatctcaaagttctccctgggacttctatctctggtctggctgaggcagtcaagrgttgagttgtggaaaggggtcttaaaaccgtttgctttgggtatctgaatatatatggtggaggcctgttgtattctgactttgatatcttgatatctatcctgtgaggccttggtatctcctgaagcagggaggagccccagtaacacctccttctacactataatgagtaaagttgccagtggaatctggtggtcagtgaagggctgttggacgggctgagagcttgtgttcagatccagctaccacatacagagtctctccattgcaatctcctttccgagtacatggagttcttagcttccatgccagccaaata

SEQ ID NO: 446243 - DNA, 604 bp, Homo sapiens
tgctctctcacactcaagggtgcagtgaatctcaatcggtccacagtcagctttagttttcttaggcaagaattgggcctcctgaggttgctactgaggagaacacatttcaaagctctccaagtggctttcctaaaactctcctccctaggcttggagctgaaccacagcacccattgcacagcacagaaaggctttagctttcttcaaagaagtctgtctacgagtctcatctcaaagttctccctgggacttctatctctggtctggctgaggcagtcaagggttgagttgtggaaaggggtcttaaaaccgtttgctttgggtatctgaatatayatggtggaggcctgttgtattctgactttgatatcttgatatctatcctgtgaggccttggtatctcctgaagcagggaggagccccagtaacacctccttctacactataatgagtaaagttgccagtggaatctggtggtcagtgaagggctgttggacgggctgagagcttgtgttcagatccagctaccacatacagagtctctccattgcaatctcctttccgagtacatggagttcttagcttccatgccagccaaata

SEQ ID NO: 446244 - DNA, 604 bp, Homo sapiens
tgctctctcacactcaagggtgcagtgaatctcaatcggtccacagtcagctttagttttcttaggcaagaattgggcctcctgaggttgctactgaggagaacacatttcaaagctctccaagtggctttcctaaaactctcctccctaggcttggagctgaaccacagcacccattgcacagcacagaaaggctttagctttcttcaaagaagtctgtctacgagtctcatctcaaagttctccctgggacttctatctctggtctggctgaggcagtcaagggttgagttgtggaaaggggtcttaaaaccgtttgctttgggtatctgaatatatatggtggaggcctgttgtattctgactttgatatcttgatatctatcctgtgakgccttggtatctcctgaagcagggaggagccccagtaacacctccttctacactataatgagtaaagttgccagtggaatctggtggtcagtgaagggctgttggacgggctgagagcttgtgttcagatccagctaccacatacagagtctctccattgcaatctcctttccgagtacatggagttcttagcttccatgccagccaaata

SEQ ID NO: 446245 - DNA, 610 bp, Homo sapiens
gcttacaataaaggcccgaaggtgaaggagaagcaagcaccttctttacaagacagctggagagagaagtatgaaggaggaacttccaaacacttataaaaccatcatatctgatgagaactcactcgctatcacgagacagcttaaaggaaaccaaccccatgatccaattacctccctcccaggacacatggagattataggtccctccctcaacatgtagggattacatttgacaagtgatgttggggggggacacayagccaaactgtatgattctgaccctggctcctcccaaatctcatgtcctcacatttcaaaaccaatcatgccttcccagcagtccctcaaagtcttaactcatttcagcacaactcataagtccacagtccaaagtcttatgtgagacaaggcaagtctcttctgcctgtaagcctgtaaaatcaaaagcaagtaagttatgtcctagatacaattggggcacagacattgggtaaatgctgacattccaaatgggagaaattggccaaaacaaaagggctgtgggccccatgcaagtccaaagtccagcagggctgtctttaaatcttaaagctccaaaataatctcc

SEQ ID NO: 446246 - DNA, 653 bp, Homo sapiens
agcacctgtagttgtttttgacaaattccctgaggcatgagctttttgtactcagcaaacttcaagtcatatcaaatacagacaactttgtaaatgaggaattatcagataggtaaaataataattctctataaatgactttaaaagaatttcaacctcattctttaacctccagtrctagttctggaaaaaaacagtaagtgctgtttctttcctggctaccatagaaatagaaaggggaaatgagagaagacaaatcaaaaggctataatcctcagtatttttattacaattcagccagttttcttaagtaaatgattcctggatggttacatgctatgggtcagtttttagtgtcctgaaaaatttgattctaatgattttcataagtctatatttttcttttatgggaaagttttttaaaggttcttattccaaatgttttatgattttactacgatcactacatttcgtttctttgctctctactccatcactttcttcagtgtaaatacatgcagatattctcccattctatgagataaattcctttcaagtgattttcttgaatcctattctccaaagtctttgttaaagcttctcaaaattactttccttccttgatcttgtcaatcattcacctcttatcttct

SEQ ID NO: 446247 - DNA, 497 bp, Homo sapiens
atatatacagaatgttatacatgtatgcaaatgagtaaactatagctatgagcaaaatataatgactcacatatattatgttgagtaaaggagcatgtcacaagggattattggtttattacctattctattatactaatttaaattaaaataggcaaaaatcccaaacatttactaaccaaatacactagaaatgataatccagaacaaaagctgatacaaaatatatagatttgccaggcatagttttctccaacaagatgactgctcaagtcattcacctaactttaaattgggtttcatgtttttttaaacattgatttataggagtttctaatatattctgaattgttatatttaaaaaatttttatgtgtatgtctggttcattttatgttttattttcaaagaagattttcttgaatataattttagtgaaaaccaacataatctattgggaggarcatacattttgttattcaaagccatggatttaaa

SEQ ID NO: 446248 - DNA, 573 bp, Homo sapiens
accatccctacctgatatgtatacaaagctgtaaggaatatctggatcttcttgcctcttagataatctcatggcaaaggactgaaggcctccaagatatcacagtgcagcgccatgaagtgtagaggctactgtcattttggaaagaaaaactgactgaacaagaatgtattacattatgaatkcattttttacattccaaaaatatgtattgagcttctatactatgggctgggatgggacacagcatagaagaaataggatggaatctcagatttcaggagccttgcaatttagcggagggaagagcagaggatcaagaatgacagaaaaaaagagaaatataaacatattctatctgggaataagaagtgttcagatttaaaaaactatagtatatggggtctaaaattatactattttgctatttttaacagaatacttaagaaatcctatctaataaagtgatattggaacagaagtaaatagagagtgagcatatgtagtcaaatagaactggtggaagggacacacacatataaagatggttcaaataaaggagatccaagtaac

SEQ ID NO: 446249 - DNA, 626 bp, Homo sapiens
agaaataaaacaggtgctatggttaatggtgctgtaatttagcagattcctgttaattccatctcactatatcagcataacattgaattgctgatttttagaggtcttcatgaagctataatttcacatgaaatcttggtagtgtgaggctaccacatgtcttctacaaactctatttagagacatgctattttcaatttcttaagcaaataataaggcacattgctttcctttttaataagaatatagcattcaaaaaagtgtttcttaaaaatggcaaaattgatggatttcytctgtcaattatttctaacacaaataaagtagaattgaagattatactccaaaatcttatagctgttagtatattgcattcagtgattttttttctaaaattgccttaaaatatgaactatttagaaaatgtcacagatgtgtgatatagtattttgaaattaaaaatgcatcaatcttcaacaataccataagcagttttactttcaatttttaaaattctatactgtaaaaacttttttcttgaaatcattagaatgataaatattttttctcagatcctttctaaaatgattaagatcatgattcttggttaatgttccttttaacca

SEQ ID NO: 446250 - DNA, 571 bp, Homo sapiens
gctaaactgaggaattatgtctgacagaagggaagaaatgactgaggtggccttctcagaccctgtaggaaaggactctacctatccagtgaaagtgtctacctagactaagaggtattttagttatctgacttggggcatgttgagtaaagctaatttkccagtcctgggtgggggcaaatcctcgagcttgatgtgtagggaagggagggggggcctgaataatccttgaggagtagtagcatagcagatggaacactgagaagttatttccttgaggatagatttccacgatggaaaggaaatgagaggttttaagaggtgggctagtgacttgtactatagcatagcctgcctttgctggtgtgtggcgattaggcctggtggaaccaccattaataaatcaagtgtgatcagggtgaggaacaggaaagaaggaaatatggggaaatggggtgaatgtcaggtggatcagagagatacagtcatgagggtcaggtgtggtatccagaataatgtgggaggccagattgaggtcccggccagtaacaatggtaattgtgggacttaa

SEQ ID NO: 446251 - DNA, 571 bp, Homo sapiens
gctaaactgaggaattatgtctgacagaagggaagaaatgactgaggtggccttctcagaccctgtaggaaaggactctacctatccagtgaaagtgtctacctagactaagaggtattttagttatctgacttggggcatgttgagtaaagctaattttccagtcctgggtgggggcaaatcctcgagcttgatgtgtagggaagggagggggggcctgaataatccttgaggagtagtagmatagcagatggaacactgagaagttatttccttgaggatagatttccacgatggaaaggaaatgagaggttttaagaggtgggctagtgacttgtactatagcatagcctgcctttgctggtgtgtggcgattaggcctggtggaaccaccattaataaatcaagtgtgatcagggtgaggaacaggaaagaaggaaatatggggaaatggggtgaatgtcaggtggatcagagagatacagtcatgagggtcaggtgtggtatccagaataatgtgggaggccagattgaggtcccggccagtaacaatggtaattgtgggacttaa

SEQ ID NO: 446252 - DNA, 606 bp, Homo sapiens
atgactgcctttgcctttatactaaaatagaactaaaaaggtgcaacagagactatttagcacacagagcctaaaatatttactatttgsccctttagaagtatagtgtgctaagccctgacataaacaaataatctcagagaatagtcattcaggagaatcttgctgctgtataatacgtgaaatgcaaacaatctcgttgttcaaactgctccaaagtttcatttctacagggatcacaacacaatgctaacaactgatatttatcactttctaagacctttgggtttacttttcctcattatgtctttaaaaatgtgccatgcttatagttcatgttatagaatgtgttgccttatttccttgggtgacaggtacttaggtggaaatggtttggacattaaaatcagatatgtctcttaataaatgtgtgacttggataactcatcagtcctccaaattttacttcctaatttgtaaaaaaaaaatacatacacacacacacacacacacacacacacacacatatggttcccagtacatggtggggctcattagttttacttttaccccacatttattttaacaataaatttgttaagcaaa

SEQ ID NO: 446253 - DNA, 606 bp, Homo sapiens
atgactgcctttgcctttatactaaaatagaactaaaaaggtgcaacagagactatttagcacacagagcctaaaatatttactatttgcccctttagaagtatagtgtgctaagccctgacataaacaaataatctcagagaatagtcattcaggagaatcttgctgctgtataatacgtgaaatgcaaacaatctcgttgttcaaactgctccaaagtttcatttctacagggatcacaacacaatgctaacractgatatttatcactttctaagacctttgggtttacttttcctcattatgtctttaaaaatgtgccatgcttatagttcatgttatagaatgtgttgccttatttccttgggtgacaggtacttaggtggaaatggtttggacattaaaatcagatatgtctcttaataaatgtgtgacttggataactcatcagtcctccaaattttacttcctaatttgtaaaaaaaaaatacatacacacacacacacacacacacacacacacacatatggttcccagtacatggtggggctcattagttttacttttaccccacatttattttaacaataaatttgttaagcaaa

SEQ ID NO: 446254 - DNA, 630 bp, Homo sapiens
ctatcactggaaacagtttcaaccgtaattttttcactcttgatcacgactcactcatatgacccagtgaaacaaattacagtgttctctttgcattgatttgacttctgggcctttgtaaatcttacttctctaattaggctgtaaaaagaaactgcaatatatagattcatggaatagaatcaggacaggggaaacatttttaacagttttgaagcccaaggggattttagaactgtcactgtgatgagttgggtttaaaaattctatggtctatattaaaataaatagtcttatgacaacacagttcctgttctaggcatctcagagtcactgtagttttgtatatttggaaatgcttaaatacactggaaataaaaaaaatgctacattttcatattacaatattaaacattctattacttttcattcctacaactactgttccatttcatgtcctaatcattgcttgtctgtagaatttcaataatttctcgaatggtttttattactaggaatctgtcctttgtcagatgactttcctagaaaacaatatccattttatatgactttaatatttkggaatcacatggtttcctcatatctattcaattgttttaaaactagtga

SEQ ID NO: 446255 - DNA, 606 bp, Homo sapiens
ataacaatatggtcaaaaaataaggcttatgatactaatttttcaataagatatgaccagcacatgattacttatccaaatatatcatgggtttttgaaaccgtgtatatgctttagtttggaagagctgtgatatggtttggctctgtgtccccacccaaatctcatctcgaattgtatccccatgtgttgagggaaggacctagtgggaggtgattggaccatggggggagatttgcccgttgctgttctcctgatagtgagtgagttctcaggagatctgatggtttaaaagtgtggcacttcccccttcactctttctctttctcctgcctctgtgggaagatgtgccttgcttccccttcgccttccaccacgattgtaggtttcctgaggcctccccagccatgcaaaactgtgagtcaattaaacttcttttcttcataaattatccaatctcagatagttcttagtagtactgtgaaaacagactaatacaggctgcattctatgcattttattcagcttaaacttactaattttgttrcttaaatttttatatgtatatagaactatatatgcatttagtctatcattgacttatag

SEQ ID NO: 446256 - DNA, 613 bp, Homo sapiens
attattagggtgtacccatcatattaggccatttatctttggacctattgcagtctcaaatgacagagtatgcaaccaagtcggattattcctaatatacaattctatggaagaattctgaacacatctttttcaagataaaaacacataaaaaaggagactagtcctatgtaaaataaaaaaaaagcatttttttttctacactgtgctttgggacagaagtgtgtgatatgatgcttggaactgccacaaacctgttttgaatgtaagacaaacttcctttctctagctattttgccatgtgagataatggaatatcttgaacgagtgagccactgtaagtccaatggtcagctatttactgccaaaaccttatcactaatgaagaacattaatttatttgagcagcttcrtttaatctttcttaaaaggaaaaagagctgtttggctgagctaaagtggtctcaaaaatatgatatgcatacagaataggcaaaatatatggtatgacatttcactgaatgggtctgtgtgtgcatttctatattgtgtccatttgtagacagggtgaggaagttgcccccgaccctagtgtatttttcttctcatctca

SEQ ID NO: 446257 - DNA, 475 bp, Homo sapiens
tgattcctaatgttagaggtaggacctggcaggaggttattggatcatgggggtggatccctcaggaatggctttgaaccattcccttggtgataagacagttcttgccagttagtttacatgaaatctaattgttcaaaagtctgggacctcccctcaacccctttctctcgctcttgctcttactatgtgactcacttgttccctttcaccttctgccatggttgtaagcttcctgaagmccttaccagaaggcaagcagatgttggtgccttgcttgtacagcctgcagaaccatgagccaattaaacctctttccttcttaaattacccagtctcaggtatttctttatagtaacacaaagacagcctaacaccgtcacctactctgcagtttttcccagcagcttgtctgatgccaaagccacccctttcatagatggaagcaaagatgccattctggacagtgaacaaa

SEQ ID NO: 446258 - DNA, 475 bp, Homo sapiens
tgattcctaatgttagaggtaggacctggcaggaggttattggatcatgggggtggatccctcaggaatggctttgaaccattcccttggtgataagacagttcttgccagttagtttacatgaaatctaattgttcaaaagtctgggacctcccctcaacccctttctctcgctcttgctcttactatgtgactcacttgttccctttcaccttctgccatggttgtaagcttcctgaagcccttaccagaaggcaagcagatgttggtgccttgcttgtacagcctgcagaaccatgagccaattaaacctctttycttcttaaattacccagtctcaggtatttctttatagtaacacaaagacagcctaacaccgtcacctactctgcagtttttcccagcagcttgtctgatgccaaagccacccctttcatagatggaagcaaagatgccattctggacagtgaacaaa

SEQ ID NO: 446259 - DNA, 581 bp, Homo sapiens
ttctgggtgctttggaaggttccaggaataaacaggaagtcasgttgcaattaaaaaatatttctttggaagcatttctgttaaattgcctaaagggatttcagaagaaaggaatttaaaatttcagagactccaattttttttgtaatatgtattctcatttttaaaacatactcatttatatattaattttgaatttataaatttgtattattttttccagaaagggcccctggatccatcccttttcaaaactctatatctttgcccatgattttttcgtcttagtttacttccctttttttcaattgaaaaaaaatcctactggactttcaagactcagtttaaaattcctttcctctgttctctcacctcccagcattctagaaatcattcagaagttcttcatttgtaccagcctgggcaacatggcaaaaccccatctctacaaaaaatacaacaaaaatagccaggcacagtggtgcatgtctgtagttctagctactctgaaggctgaggtgggaggataacccgagcctgggaggtcaaggctgcagtgaaccatgttcacgccactgcac

SEQ ID NO: 446260 - DNA, 552 bp, Homo sapiens
aaagccataaaatttcatggaaattaaacaacctgctcctgaatggcttttgggtaaacaatgaaattaaggcagtatttgagaaattctttgaaactaacgagaacaaagataaaacataccagtatttctgggacacagaaaagcaatgttaagagggaagtttatagcacttgatagccacattaaacagtttggaagatctcaaattaacaacacaacatcacacctagtagaactagayaaacaagagcaaaccaaccccaaagctaacagaagacaagaaataaacaaaatcagaggttaattgaaggaaactgagatgtaaaaaaacctttgaaaagatcaatgagtccaggagttggttttttgaaggataaatcagatagctagaccactagctagattaataaacaagaaaagagagaagagccaaataaacacaatcagaaatgacaaagggtatgttaccatcaaacccacagaaatacaaaaagccctcagaaactactatgaacatctctatgcacacaagctagaaaacctggaaga

SEQ ID NO: 446261 - DNA, 552 bp, Homo sapiens
aaagccataaaatttcatggaaattaaacaacctgctcctgaatggcttttgggtaaacaatgaaattaaggcagtatttgagaaattctttgaaactaacgagaacaaagataaaacataccagtatttctgggacacagaaaagcaatgttaagagggaagtttatagcacttgatagccacattaaacagtttggaagatctcaaattaacaacacaacatcacacctagtagaactagacaaacaagagcaaaccaaycccaaagctaacagaagacaagaaataaacaaaatcagaggttaattgaaggaaactgagatgtaaaaaaacctttgaaaagatcaatgagtccaggagttggttttttgaaggataaatcagatagctagaccactagctagattaataaacaagaaaagagagaagagccaaataaacacaatcagaaatgacaaagggtatgttaccatcaaacccacagaaatacaaaaagccctcagaaactactatgaacatctctatgcacacaagctagaaaacctggaaga

SEQ ID NO: 446262 - DNA, 552 bp, Homo sapiens
aaagccataaaatttcatggaaattaaacaacctgctcctgaatggcttttgggtaaacaatgaaattaaggcagtatttgagaaattctttgaaactaacgagaacaaagataaaacataccagtatttctgggacacagaaaagcaatgttaagagggaagtttatagcacttgatagccacattaaacagtttggaagatctcaaattaacaacacaacatcacacctagtagaactagacaaacaagagcaaaccaaccccaaagctaacagaagacaagaaataracaaaatcagaggttaattgaaggaaactgagatgtaaaaaaacctttgaaaagatcaatgagtccaggagttggttttttgaaggataaatcagatagctagaccactagctagattaataaacaagaaaagagagaagagccaaataaacacaatcagaaatgacaaagggtatgttaccatcaaacccacagaaatacaaaaagccctcagaaactactatgaacatctctatgcacacaagctagaaaacctggaaga

SEQ ID NO: 446263 - DNA, 610 bp, Homo sapiens
gttcaagcgattcttctgcctcagtctctcaagtagctgagactacaggcatgtgccaccgcacccagctaatttttgtatttttagtagaggtggagtttcaccatgttggccaggatggtctcgatctcttgacctcatgatccacctgcctcagcctacaaagtgctgggattacaggcatgagccaccatgcccggcctgtggacaatttttaaagtaatccttagaaaataagtagatatattgagattcctctaagtgaaaacctctcagcaatttttaaaaaataaattgttaaattaactattgaagatatacaaaataatttttatgaaatatacataagttaagaaaamacaagcacctagttacccatgaccaattttaattaacagaaaattaccatcacttttgaatccctgtgaatcccaggacatctcacttaattgcattaaccttcaaaagtaaccatatacattatttaattatgtacagttttggctttatattaatgtgtatatactgtgtgtcttctgtagaattctttctgcagcattatgttcctgaaaatcaattttttgcttcaaattgcaatccattcatcttc

SEQ ID NO: 446264 - DNA, 610 bp, Homo sapiens
gttcaagcgattcttctgcctcagtctctcaagtagctgagactacaggcatgtgccaccgcacccagctaatttttgtatttttagtagaggtggagtttcaccatgttggccaggatggtctcgatctcttgacctcatgatccacctgcctcagcctacaaagtgctgggattacaggcatgagccaccatgcccggcctgtggacaatttttaaagtaatccttagaaaataagtagatatattgagattcctctaagtgaaaacctctcagcaatttttaaaaaataaattgttaaattaactattgaagatatacaaaataatttttatgaaatatacataagttaagaaaaaacaagcacctagttacccatgaccaattttaattaacagaaaattaccatcacttttgaatccctgtgaatcccaggayatctcacttaattgcattaaccttcaaaagtaaccatatacattatttaattatgtacagttttggctttatattaatgtgtatatactgtgtgtcttctgtagaattctttctgcagcattatgttcctgaaaatcaattttttgcttcaaattgcaatccattcatcttc

SEQ ID NO: 446265 - DNA, 662 bp, Homo sapiens
ttctcttcccctaggtcagttaggctctggtaaaatcccaccaagttaggctttggtaaaatagtttatcttgatgatatgccttataaagaaggagagaatgctctggcatatttcaaaatggttacttttcttcttcccctattggaagcccagtgagatttttctcattgaaaatgagtgtgatagagcctggtagagctcctggaggtagaactcacaaaagtgttaggccccctgtttattactgtgccccttggggtttttatctctcaggcttgtytacattaagacttcagcaattcatcaattacagtgtacgtttctctaccctggtaatggttcccacaaaggttcctgctcaggtaagttgtgattctctgtatctgcctgtctcttcaatttggggagcagcagtttgccatgtgatcttacttctctgacagatctaagatgagttgctaatttttcagtttgttgggctttttacttgttgttaggtatgatgacagcttctaagctcctttcatgccagaccagaaaccagaagtctcagaatttaacttattttgtacattgatttcatatctagcagatttatgaaaccattttattcattttaatgaggtattattattttatttgagttttctttacagatg

SEQ ID NO: 446266 - DNA, 662 bp, Homo sapiens
ttctcttcccctaggtcagttaggctctggtaaaatcccaccaagttaggctttggtaaaatagtttatcttgatgatatgccttataaagaaggagagaatgctctggcatatttcaaaatggttacttttcttcttcccctattggaagcccagtgagatttttctcattgaaaatgagtgtgatagagcctggtagagctcctggaggtagaactcacaaaagtgttaggccccctgtttattactgtgccccttggggtttttatctctcaggcttgtttacattaagacttcagcaattcatcaattacagtgtacgtttctctaccctggtaatggttcccacaaaggttcctgctcaggtaagttgtgattctctgtatctgcctgtctctycaatttggggagcagcagtttgccatgtgatcttacttctctgacagatctaagatgagttgctaatttttcagtttgttgggctttttacttgttgttaggtatgatgacagcttctaagctcctttcatgccagaccagaaaccagaagtctcagaatttaacttattttgtacattgatttcatatctagcagatttatgaaaccattttattcattttaatgaggtattattattttatttgagttttctttacagatg

SEQ ID NO: 446267 - DNA, 542 bp, Homo sapiens
tcattttaatgaggtattattattttatttgagttttctttacagatgatcatgttgtctacattatatctttctttctggcttataatccttttctattttctttgtcttagtgctaggaactccatgtaattttaaataaaagtgatgatattgaacaccaatgccttaggcaaatgcttttaacatttcactattaagtaagatatttgytgtacattttttaatttatcctttttcatgttaaggaagattgcttctggtcctaggtttttcccactaacttttggtttgagaaatctaaaacatccgaaaggataaaatttcaacaaaaatttcaagcataataatagtacaattagtgttcatatctcttctactttaaacatattaaaatacttattttatattatctgcctaagaatttcactatttgatgttacctgagcttcagggtactatttctacattacctttataccgcatgtatagttttttgtggtacctaaattatctggggattcttttgctagatgcccacc

SEQ ID NO: 446268 - DNA, 552 bp, Homo sapiens
atgccttaggcaaatgcttttaacatttcactattaagtaagatatttgctgtacattttttaatttatcctttttcatgttaaggaagattgcttctggtcctaggtttttcccactaacttttggtttgagaaatctaaaacatccgaaaggataaaatttcaacaaaaatttcaagcataataatagtacaattagtgttcatatctcttctactttaaacatattaaaatacttattttatattatctgcctaagaatttcactatttgatgttacctgagcttcagggtastatttctacattacctttataccgcatgtatagttttttgtggtacctaaattatctggggattcttttgctagatgcccaccttgggctggccctgaactatgcctctgaccccaaatgccctgtgaagggatgaagaccaaagctcgacgtctccctattcagcaaatgcccttctgacaaaagccaacttttactccatttatagcctctaaatatttcttactaatttgacagcttattaattcgtttacaa

SEQ ID NO: 446269 - DNA, 526 bp, Homo sapiens
tgataaacatgctaataacactatagtgggttttatttttcttgtagataatagctcatagataatatacctcagagataattattgaactatctcttatagatatcaattgaaatatgactacctccatagccataaataaataatagagagctgtttaatggtctattatatattaggtgtttacatatgtttccatggactttgtcaatgttagtaatattaataatttgaaaaaaaggaaatacttgaaaacttcactgtggtgtcaaatttcttcctggcaatagccctgtgagataggtattattagcctattttatacaattagatacattcagtcctaaatccatctgataccaggcaatgtgatagagtgatggtgatgttgggatggttcatgggaaaaataattttgarcatgaggcctctgcaaactgcttttaatcccactctgcaggcatagagctcaggccacagtcagttcaatgctagcccctcagatgttatgccctggtgaccagtt

SEQ ID NO: 446270 - DNA, 542 bp, Homo sapiens
atttctgtaagtatagttttaaaatgtagttgattttaatatctaaaacacaaaattgtgagaagcaattcatttttgcatacaatatacagtagaaaaatatacccagctaagaaaatacagatatagaaattttttaaagagagggagaaagaaaaggtcaagagtggaaagggatatgaaaaacaaagaaagaagacagaaaaaggcagtggagatgctggccttaaaatccacattcagatgctagaattcaagttatttaaactgtgagaagttaacaaagcctattaaagccattcaggccaagatctgcttgatattcacaatttcatgatttttgtttttcctatgcacctaagaagactattgtattagtccactttcacactgctgttaaagacataaccgagacyggcaagaaaaataggtttaatggactcactgttccacatgactggagaggcctcacaatcatggtagaaagtgaaaggtacattttacatggcagcagaaaagagagagcttgtgcagggaaactc

SEQ ID NO: 446271 - DNA, 582 bp, Homo sapiens
gactattgtattagtccactttcacactgctgttaaagacataaccgagactggcaagaaaaataggtttaatggactcactgttccacatgactggagaggcctcacaatcatggtagaaagtgaaaggtacattttacatggcagcagaaaagagagagcttgtgcagggaaactccctcttataaaaccatcagatatcgtgagacttattcactatcatgagaacagtatgcaaaagacctgctatcatgattcaattacctcccaccaggtccttcccacaagacatgggaattcaagatgagattwgctagacaaatagccaaagaatatcaactacgttccctggcctctcttgcaattaggtggggtcatataaccttctggataatgcaatatgaatggctatgtgacctgggcgtgctgttaaaattatctttgacattctcagctcattcttatccactccttagtgtccccaaagacatggcttgaaatggcagcctgacaaattggaaagaacagaatcactggaacagagaggagctctgccaaggagatattggttctgttcattac

SEQ ID NO: 446272 - DNA, 582 bp, Homo sapiens
gactattgtattagtccactttcacactgctgttaaagacataaccgagactggcaagaaaaataggtttaatggactcactgttccacatgactggagaggcctcacaatcatggtagaaagtgaaaggtacattttacatggcagcagaaaagagagagcttgtgcagggaaactccctcttataaaaccatcagatatcgtgagacttattcactatcatgagaacagtatgcaaaagacctgctatcatgattcaattacctcccaccaggtccttcccacaagacatgggaattcaagatgagattagctagacaaatagccaaagaatatcaactacgttccctggcctctcttgcaattaggtggggtcatataaccttctggataatgcaatatgaatggmtatgtgacctgggcgtgctgttaaaattatctttgacattctcagctcattcttatccactccttagtgtccccaaagacatggcttgaaatggcagcctgacaaattggaaagaacagaatcactggaacagagaggagctctgccaaggagatattggttctgttcattac

SEQ ID NO: 446273 - DNA, 582 bp, Homo sapiens
gactattgtattagtccactttcacactgctgttaaagacataaccgagactggcaagaaaaataggtttaatggactcactgttccacatgactggagaggcctcacaatcatggtagaaagtgaaaggtacattttacatggcagcagaaaagagagagcttgtgcagggaaactccctcttataaaaccatcagatatcgtgagacttattcactatcatgagaacagtatgcaaaagacctgctatcatgattcaattacctcccaccaggtccttcccacaagacatgggaattcaagatgagattagctagacaaatagccaaagaatatcaactacgttccctggcctctcttgcaattaggtggggtcatataaccttctggataatgcaatatgaatggctatgtgacctgggcgtgctgttaaaattatctttgacattctcagctcattctyatccactccttagtgtccccaaagacatggcttgaaatggcagcctgacaaattggaaagaacagaatcactggaacagagaggagctctgccaaggagatattggttctgttcattac

SEQ ID NO: 446274 - DNA, 651 bp, Homo sapiens
tgcaacaaatacattgaatgaatgaataaaataatggatgatgtgacaagcagacatttgtacatataaatttcaaggaagcaatctgaactgagaagttaaaattagagttcttcaaccttaaacaagtaaattaaatcttgaatgaggatgaaatcctcctggagtaaagctggaatgaaaaaaaatactgagctgatgagaacacatgkgataaagaataatttttagtttttcagaggagaggatttcttcacatgctgagcaaaagaaaatggttgagaaaaaaatgaaaaagttctggaagggtagcagctatcagatgatggaccatttagactattaatgaatgaagaaaacacagtgactgctggtaaagagattatccaacaataatattacatggttctgcaataaagtcattgattttctacagagtttgattttttaatgtacttttgaattgacaatttgaaagatttttcaatgatatgcttgaaaatatatacttttataagctggtactgacaattacatcatgaataattaaaatttgctttctttttaaaagacacgtaagagagtaaggaagactgtatagccctgtataagagagaaaaagacacctgtggatagattggcttaaacaga

SEQ ID NO: 446275 - DNA, 545 bp, Homo sapiens
ggtactgacaattacatcatgaataattaaaatttgctttctttttaaaagacacgtaagagagtaaggaagactgtatagccctgtataagagagaaaaagacacctgtggatagattggcttaaacagagaaggagcacctgtcttcttagcctggaggagagaawggcagggtgtttgtgggtatgggtaaatttgtaggtgatggaaattaacttgaaaaagattataaaatcagaagcatataggttggatcagttggtgagaagaattagggacatttgatatagtgatttagaaaagaacaggacaggaaaagagacaaaagcaacaagatatctagaaagtactaaaggcagggcttaggttagggaccatgaatttgtggaccatgaaaaaaggaaggccacatataaaattcttcatttattcagcaaatatttattcgtcaccgtccattgtacagcactgtgctacctgcagggataaaagtgtgttaatgatgttagtgctttgtatttcttgtcgcggaggcaccattggt

SEQ ID NO: 446276 - DNA, 566 bp, Homo sapiens
ttaaaatttgctttctttttaaaagacacgtaagagagtaaggaagactgtatagccctgtataagagagaaaaagacacctgtggatagattggcttaaacagagaaggagcacctgtcttcttagcctggaggagagaaaggcagggtgtttgtgggtatgggtaaatttgtaggtgatggaaattaacttgaaaaagattataaaatcagaagcatataggttggatcagttggtgagaagaattagggacatttgatatagtsatttagaaaagaacaggacaggaaaagagacaaaagcaacaagatatctagaaagtactaaaggcagggcttaggttagggaccatgaatttgtggaccatgaaaaaaggaaggccacatataaaattcttcatttattcagcaaatatttattcgtcaccgtccattgtacagcactgtgctacctgcagggataaaagtgtgttaatgatgttagtgctttgtatttcttgtcgcggaggcaccattggtcattccaataaaaacaaaacatcttattagttggtggcatgtagaca

SEQ ID NO: 446277 - DNA, 587 bp, Homo sapiens
cttctgtgcctctgtttcccccccaaagggaaaattcccaaagcagaatttttgcatttctcattccctttccttcacggctaatcttcatttcaatagtctgataaatatgttaatttagcatcattgtaaagctgagaattgctcttacaggtaatagaaatgctattaatgcactkgcctgtattgttgaggggagggttgagtcagttttctggagccaccagattagaccaaaaggccggcctgctcaatacatctataacgtcagaggttgctaactggtaataatatttaaactagtttgttgattttttttccccaaaaaactaaaattgcagcatgaatatgttaaaaacttgactaaatttatttgctagaaagaaagggactaagaatccatccttcattcatcataacctaaaattccactggacatagtaatccagacaacatgcatttcctgttgtatcccagaatatttttgacttaattttatcaaagtagttttgttggtctttaaagacatgcagattttttcagaataccaacgctgctcactattgcagaaagggtattatgcaaat

SEQ ID NO: 446278 - DNA, 556 bp, Homo sapiens
tgacttaattttatcaaagtagttttgttggtctttaaagacatgcagattttttcagaataccaacgctgctcactattgcagaaagggtattatgcaaatattgttcactgataacctcattttctacattatagagtgttgttttgagaatgttaaataaaattccatgttaagatatacaacttgggaggaggctttggggaaaattattgaactgtagtggtgattcttsctctgcataccttatctatctgctccattagtgaatcaacttgaatgaccagtgaattattccagtgaaatagcagaatggtaataacagtcaattaaactaatttataaattcacctacttgcttttaccaaggtcattcaagcaaacgagatttcagaaaaattaatattctgtttcctttttattaagtcatctctgatgggcttaggaaaaagaagtgttgaatgccaatctggttttatcttttaaatcctcctagtctacttaactgaatctactgttaggcttatttaaaaagtgacagcctgcgtaacccaca

SEQ ID NO: 446279 - DNA, 607 bp, Homo sapiens
ttaggtactgtttaaaacactgagcagagaatagcaaacaacattaaaaataaaaaccctgtcctctgggagcttacagagcaaattttctacattgcaaatccgcttacactatcctcttccttaatatctttcaatggcttctcacaacattaataatcagttcaaagcatgttaacatactttgaggggtcttccataacttggtttctcatacctctgttttaatactccttcatcggtcatacttcttagttgcaaacaacaaaatctgactctagctgaagttatacaagaagrgtttattaaaagggcacagggtagctcctaaaatgttccatgggttggagaactagtcatgaaccttagcttccaggaacaatgatcaaaatatcactgcagaagtggcctgacatggaaacacttagtaacaagtgccaaatgtttacttgctctacaggcttagtacatttcatctctgcagccactgctaagttcaagttggatgggagagagacagaaagaaagagacagacagggagggagaatgaatgattggtcttctgatttatctctttctctcttttattgctggtttatgagttga

SEQ ID NO: 446280 - DNA, 526 bp, Homo sapiens
tttcctgtgctgttctcatgatagttaataagtctcacaagatctggttgttttaaaaatgggagtttccctgcacaagctctctctctttgcctgcctccatctacataagatgtgattttctccttcttgccttcttccatgattgcgagaccttacccagccatgtggaactgtaagtccattaaacctctttcttktgtaaattgcccagtctcaggtatgtctttatcagcagcatgaaaacgggctaatacacctcctacctaagcaatgcttagccagtagcagacaggtgaggagcaaaaactgaatcatcctatccctcagctttgaagtatgaacaaaatgggttattttatgtgtcaacttgggccctgggatacccagacatttagttacacgttattctggtgtgtctttgagagtatttctgggtgtgactagaatctgaatgggtacactgaataaagcaggttgctcttcccaatgcagatggagctcatacagtccattgaaggcctga

SEQ ID NO: 446281 - DNA, 526 bp, Homo sapiens
tttcctgtgctgttctcatgatagttaataagtctcacaagatctggttgttttaaaaatgggagtttccctgcacaagctctctctctttgcctgcctccatctacataagatgtgattttctccttcttgccttcttccatgattgcgagaccttacccagccatgtggaactgtaagtccattaaacctctttcttttgtaaattgcccagtctcaggtatgtctttatcagcagcatgaaaacgggctaatacacctcctacctaagcaatgcttagccagtagcagacaggtgaggagcaaaaactgaatcatcctatccctcagctttgaagtatgaacaaaatgggttattttatgtgtcaacttgggccctgggatacccagacatttagttacacgttattctggtgtgtctttgagagtatttctgggtgtgactagaatctgaatgggtacactgaataaagcaggttgctcttcccaatgcagrtggagctcatacagtccattgaaggcctga

SEQ ID NO: 446282 - DNA, 520 bp, Homo sapiens
ttaaaattgtcagaactggattatacttagctattaaaaattttgatttgccactgggtgcggtggctcacacctgtaatcccagcactttgggaggcccaggcaggcagattgcttgagctcaggagagaaagaccagaagaccagcctaggtaacatggtaaaasctcctctctacaaaaaaatacaaaaattagccagatgtggtggcacacacctgtggtctgtgcttctggggatgctgaggtgggaggatcacttgagcccagggaggccaaggctgtggtgaggcatgattgcaccaccacactccagcctgggcaacagattgagagcctatctcaaaaatatatatatactgatttgctaatttttcatgcagttatgctctgatctttgttacttcttttattctgctagctttggttttggtttgttgttgtttttctggttcctcaaggtatgatgttaggttgttaatgtgtgatccttctatttttttcatgtagatattggatgc

SEQ ID NO: 446283 - DNA, 520 bp, Homo sapiens
ttaaaattgtcagaactggattatacttagctattaaaaattttgatttgccactgggtgcggtggctcacacctgtaatcccagcactttgggaggcccaggcaggcagattgcttgagctcaggagagaaagaccagaagaccagcctaggtaacatggtaaaagctcctctctacaaaaaaatacaaaaattagccagatgtggtggcacacacctgtggtctgtrcttctggggatgctgaggtgggaggatcacttgagcccagggaggccaaggctgtggtgaggcatgattgcaccaccacactccagcctgggcaacagattgagagcctatctcaaaaatatatatatactgatttgctaatttttcatgcagttatgctctgatctttgttacttcttttattctgctagctttggttttggtttgttgttgtttttctggttcctcaaggtatgatgttaggttgttaatgtgtgatccttctatttttttcatgtagatattggatgc

SEQ ID NO: 446284 - DNA, 520 bp, Homo sapiens
ttaaaattgtcagaactggattatacttagctattaaaaattttgatttgccactgggtgcggtggctcacacctgtaatcccagcactttgggaggcccaggcaggcagattgcttgagctcaggagagaaagaccagaagaccagcctaggtaacatggtaaaagctcctctctacaaaaaaatacaaaaattagccagatgtggtggcacacacctgtggtctgtgcttctggggatgctgaggtgggaggatcacttgagcccagggaggccaaggctgtggtgagscatgattgcaccaccacactccagcctgggcaacagattgagagcctatctcaaaaatatatatatactgatttgctaatttttcatgcagttatgctctgatctttgttacttcttttattctgctagctttggttttggtttgttgttgtttttctggttcctcaaggtatgatgttaggttgttaatgtgtgatccttctatttttttcatgtagatattggatgc

SEQ ID NO: 446285 - DNA, 520 bp, Homo sapiens
ttaaaattgtcagaactggattatacttagctattaaaaattttgatttgccactgggtgcggtggctcacacctgtaatcccagcactttgggaggcccaggcaggcagattgcttgagctcaggagagaaagaccagaagaccagcctaggtaacatggtaaaagctcctctctacaaaaaaatacaaaaattagccagatgtggtggcacacacctgtggtctgtgcttctggggatgctgaggtgggaggatcacttgagcccagggaggccaaggctgtggtgaggcatgattgcaccaccacactccagcctgggcaacagattgagagcctatctcaaaaatatatatataytgatttgctaatttttcatgcagttatgctctgatctttgttacttcttttattctgctagctttggttttggtttgttgttgtttttctggttcctcaaggtatgatgttaggttgttaatgtgtgatccttctatttttttcatgtagatattggatgc

SEQ ID NO: 446286 - DNA, 590 bp, Homo sapiens
aagtaattccagaaagaaaattggatctgagaatctttagaatgaggagagtaagtcttttttttttttttagatggagtcttgctctgtcccccaggctggagagaagtggcaccatctcrgctcactgcaacatctgcctcctgggtttcagcgattctcctgcctcagcctcccaagtagctgggattacaggcgcccgccaccacgcccggctaatttttatatttttagtagaggtgggatttcatcatgttagcgaggctggtctcaaactcctgatctcaggcaatctgcccacctcagcctcccaaaagtgctgggattacaggcctgagccaccatgtccagcctcatttttacccttggtgatttgcctccttaagcccaaagttgagacacttttttcatcttaaattattgccttagcccattgcaaatatacaggtagattttccatttagtgggccaaatttgtgtatcaatatatgtacatgatgacttgtatctgatttaaatgcatatataggaagcttccattagataacttccaaaggaacttcattacagcctggggtagtttacacaca

SEQ ID NO: 446287 - DNA, 618 bp, Homo sapiens
gctaaatgacgagttaatgggtgcagcacaccagcatggcacatgtgtacatatgtaactaacctgcacaatgtgcacatgtaccctaaaacttaaagtataataataataaaaaaataaataaataaaagaataactgctgctgagaataactgggagtgtttcttcaataagttcaaagttaaactagatctcagtggttgggaamcaatttgagaaaaggaggagagacgttataggtggggtatgcaagactaagcataggctgtttctgaggtagtaccagatagctacgagctagtgagcaaaatgaagtctacatgctcatttggttatcaattcagcaaatatttacagagatcctactacgctagatactgacagcacagaaagaaagaaagaaaagaaagaaagaaggaaagaaaaggaaagaaagaaagagaaagaaagaaagaaagacaaaattcctattttatgtatggccccagcgggaagcacatggcatacctaaacagagtaagagaggagagcataataaaaaggtttatttacaaagatgctagtgggttttagggaaaccagcaaaggatagtataatgctgtatggctagcaatagt

SEQ ID NO: 446288 - DNA, 619 bp, Homo sapiens
gcttgctaacttctgttttggaagttcttataattcattcaagttccccttagtttaagaaaaaaagattttatgaactttctctcattagctaatgtggaaggctctgatttttaaaactttttgccataagaaaactttgagaacctcgaactttaaaaaatgtcatatattcatgaattgagtttgcagaggacaagttaatatgaggattaacaaaatactttttatcctcactggttctattatatttttgaccctttgatgaaaaatcatttatcagaaccataggcttcayagaaaagagcaagagagcaaaactatctactgctagataattatagagctaattcctagaaagaaatgttagtgtctatgaaatttgttcctcaatttagtcccctatggatttttttttaaattcagtctatttactgaggcttttcaggtatgcaacatgctgaaaaaggcataattagaatgttcactcaacacaaagatagttttgagggctttcaatcttgcattttcaaagcaacttttaatgttgctattttctggaattcgatcaatggttgtattagtgttttccattgctgctataacaaattaccacaaa

SEQ ID NO: 446289 - DNA, 554 bp, Homo sapiens
ttgaccctttgatgaaaaatcatttatcagaaccataggcttcacagaaaagagcaagagagcaaaactatctactgctagataattatagagctaattcctagaaagaaatgttagtgtctatgaaatttgttcctcaatttagtcccctatggatttttttttwaattcagtctatttactgaggcttttcaggtatgcaacatgctgaaaaaggcataattagaatgttcactcaacacaaagatagttttgagggctttcaatcttgcattttcaaagcaacttttaatgttgctattttctggaattcgatcaatggttgtattagtgttttccattgctgctataacaaattaccacaaaatttgtggcttaaaacaacaaaaaattatttacagttctaaaggtcagaaggccccaatgtgtcatatgggactaaaattaaggtgttgtaagactgcattccttctgcagattctgggggagaatccagtctttgtgtggtccagcttctcaaaagcacctccattccttaatttgtggttcccttc

SEQ ID NO: 446290 - DNA, 562 bp, Homo sapiens
ataccaataggacagagtagagagcccagaaataaatccacaagtttgcagtcaactgattttcaacaaaggtgccaagaacacacaatggggaaaggacagtctctttaataagtggttttggtaacactggatatctacaggcagaacaaggcaatttagacacttctctctcatcrtatacaaaaatcaagtcaaaatgggattgagacttaaatgtgtaagacctaaaactataaactactagaagaaaacatggggaaagttccatgacattggtctgagtaatgattttttggatataaccacagaagcacaggcaacaaaagcaaaaataaacaaattgtattatattgaattaaaaagcttctgcacagcaaaagaaaccatgaacaaagtgaagagagaacctacagaatgagagaaagtatcttcaagctatacatctcataatggctaatatccaaaatatataagaaatgtaaacaactcaatatcaagagaacaaataacccagtttaaaaatgtgcaaaagacctgaatagacattgctcacaaaaag

SEQ ID NO: 446291 - DNA, 562 bp, Homo sapiens
ataccaataggacagagtagagagcccagaaataaatccacaagtttgcagtcaactgattttcaacaaaggtgccaagaacacacaatggggaaaggacagtctctttaataagtggttttggtaacactggatatctacaggcagaacaaggcaatttagacacttctctctcatcgtatacaaaaatcaagtcaaaatgggattgagacttaaatgtgtaagacctaaaactataaactactagaagaaaacatggggaaagttccatgacattggtctgagtaatgattttttggatataaccacagaagcacaggcaacaaaagcaaaaataaacaaattgtattatattgaattaaaaagcttctgcacagcaaaagaaaccatgaacaaagtgaagagagaacctayagaatgagagaaagtatcttcaagctatacatctcataatggctaatatccaaaatatataagaaatgtaaacaactcaatatcaagagaacaaataacccagtttaaaaatgtgcaaaagacctgaatagacattgctcacaaaaag

SEQ ID NO: 446292 - DNA, 600 bp, Homo sapiens
gagagaaagtatcttcaagctatacatctcataatggctaatatccaaaatatataagaaatgtaaacaactcaatatcaagagaacaaataacccagtttaaaaatgtgcaaaagacctgaatagacattgctcacaaaaagacatatgaatggccaaccgatatatgaaaaaaatgctcaacatcactaataaccagagaaatgcaaatcaaaaccacaacagaataccacctcactccagttagaatggttattatgaaaaagacaaaagataagtgttggcaaggatgtagaaaaagggartctttgcctgccgttggtggaatgtaaactagtataaacaatatggaaaacagaatggaagcttctcaaagaattaaaaataggactactgtatcttcaagaagtcccactactgggtaaatatctaaagcagaggaaatgagtatatgaaagagatatctgtgttgccatgtttattgcagtactgttcacaatagccaaggtatggaatcaaactaagataaatggattgagaattaatagatgaaaggattaagaaactgttataaatatactcaatggaatactattcaga

SEQ ID NO: 446293 - DNA, 600 bp, Homo sapiens
gagagaaagtatcttcaagctatacatctcataatggctaatatccaaaatatataagaaatgtaaacaactcaatatcaagagaacaaataacccagtttaaaaatgtgcaaaagacctgaatagacattgctcacaaaaagacatatgaatggccaaccgatatatgaaaaaaatgctcaacatcactaataaccagagaaatgcaaatcaaaaccacaacagaataccacctcactccagttagaatggttattatgaaaaagacaaaagataagtgttggcaaggatgtagaaaaagggagtctttgcctgccgttggtggaatgtaaactagtataaacaatatggaaaacagaatggaagcttctcaaagaattaaaaataggactactgtatcttcaagaagtcccactactgggtaaatatctaaagcagaggaaatgagtatatgaaagagatatctgtgytgccatgtttattgcagtactgttcacaatagccaaggtatggaatcaaactaagataaatggattgagaattaatagatgaaaggattaagaaactgttataaatatactcaatggaatactattcaga

SEQ ID NO: 446294 - DNA, 563 bp, Homo sapiens
tgggagagtattgaggactgttggtcaaaggatacaagatggattgtatagcatagtgactatattagtgatgctgaaaaaatgctaaaagtggatgttatgtgttttcatcacaaaaaatggtaactatgtgaattaatgaatatgctaattagctagatttagctattccacaatgtgtatatccttcaaaacagcatgttgtacacaataaatacatacaattgtattacatctgtcaattaaataaatttgaaaaaataataktttcaatatgcatgaaagtgttactaatagtaacacgtacatgtgatccttaccatttcccagcaaacttattacatttcttagaaatgaattgtaatagcacacattaattcatttgtgaaattgaagctcacctgttgaaccataacactcttctgaaaatctaagataagttttttattctaatttaaacttcattttcttgatcataccactactttttattaatcaaaattaataacatattttaaaaaatagaaaactgataatttcagattcttttgcaaggcaacagc

SEQ ID NO: 446295 - DNA, 563 bp, Homo sapiens
tgggagagtattgaggactgttggtcaaaggatacaagatggattgtatagcatagtgactatattagtgatgctgaaaaaatgctaaaagtggatgttatgtgttttcatcacaaaaaatggtaactatgtgaattaatgaatatgctaattagctagatttagctattccacaatgtgtatatccttcaaaacagcatgttgtacacaataaatacatacaattgtattacatctgtcaattaaataaatttgaaaaaataatattttcaatatgcatgaaagtgttactaatagtaacacgtacatgtgatccttaccatttcccagcaaacttattacatttcttagaaatgaattgtaatagcacrcattaattcatttgtgaaattgaagctcacctgttgaaccataacactcttctgaaaatctaagataagttttttattctaatttaaacttcattttcttgatcataccactactttttattaatcaaaattaataacatattttaaaaaatagaaaactgataatttcagattcttttgcaaggcaacagc

SEQ ID NO: 446296 - DNA, 639 bp, Homo sapiens
cataaattataatgtggctcatattttcattaaatatatattatatagattaattggattgaagtggtaccctttcaagaaataatggtcaaacctacatttttaagtatgcttgagattaaaawtgttaaagccaggatctctgtatttgtttgcccttcttgaggccttttactatactaccttttatttcttgtccaatttaatttttaaataattttaaacatgaaaggaatctgaattcaataaagctctagagtggaggctcatgagggcagagacacagcctgtagtttcacaattttataacaagttctagcataatgattctgggaatgaatggctgaatgaacagtctatttagagaagtcagaatggcaacaaattgtgtagttgaaatcatagactgaggaagactgccagtcctgccataacattgcagaacctgaggcaagtgtacaaatgggagtccacagaaggtattgcctgtagattgacaatcagagctcctgtcctattcactacaccaaactgcagagtcctctgggtttccaaatgtctttttcaaaattttctgtcttcctctagtatctcagatgaccaggactggcgtgcccctttaggtatggtgtcccaaac

SEQ ID NO: 446297 - DNA, 639 bp, Homo sapiens
cataaattataatgtggctcatattttcattaaatatatattatatagattaattggattgaagtggtaccctttcaagaaataatggtcaaacctacatttttaagtatgcttgagattaaaattgttaaagccargatctctgtatttgtttgcccttcttgaggccttttactatactaccttttatttcttgtccaatttaatttttaaataattttaaacatgaaaggaatctgaattcaataaagctctagagtggaggctcatgagggcagagacacagcctgtagtttcacaattttataacaagttctagcataatgattctgggaatgaatggctgaatgaacagtctatttagagaagtcagaatggcaacaaattgtgtagttgaaatcatagactgaggaagactgccagtcctgccataacattgcagaacctgaggcaagtgtacaaatgggagtccacagaaggtattgcctgtagattgacaatcagagctcctgtcctattcactacaccaaactgcagagtcctctgggtttccaaatgtctttttcaaaattttctgtcttcctctagtatctcagatgaccaggactggcgtgcccctttaggtatggtgtcccaaac

SEQ ID NO: 446298 - DNA, 639 bp, Homo sapiens
cataaattataatgtggctcatattttcattaaatatatattatatagattaattggattgaagtggtaccctttcaagaaataatggtcaaacctacatttttaagtatgcttgagattaaaattgttaaagccaggatctctgtatttgtttgcccttcttgaggccttttactatactaccttttatttcttgtccaatttaatttttaaataattttaaacatgaaaggaatctgaattcaataaagctctagagtggaggctcatgagggcagagacacagcctgtagtttcacaattttataacaagttctagcataatgattctgggaatgaatggctgaatgaacagtctatttagagaagtcagaatggcaacaaattgtgkagttgaaatcatagactgaggaagactgccagtcctgccataacattgcagaacctgaggcaagtgtacaaatgggagtccacagaaggtattgcctgtagattgacaatcagagctcctgtcctattcactacaccaaactgcagagtcctctgggtttccaaatgtctttttcaaaattttctgtcttcctctagtatctcagatgaccaggactggcgtgcccctttaggtatggtgtcccaaac

SEQ ID NO: 446299 - DNA, 415 bp, Homo sapiens
acacactcttgtgtgtgcaggaagtctaggtcaacagaggggtagtgcaacctaggatacagtgtagactagacagccagggactggacaaaaatccacttctcagagaatgccagtctagaacatagcaatgaccaagaattagatgattgatgtgtttkcaccaatgtctggctgtctcatcatatcctcatgggaaaaaagaactctctctgggaaggcaggtatgtctgaaaaaattcttatgtgactaaatctacctggaattggcaagacaaaattttctcctactgagtagaagagagatctgaaatagaactcaaattctgttacaggaaaataaaggaggttccatttcttatacctgagtttgtggcctgtgaaaatgcatgaccattgtacaaatataaaattt

SEQ ID NO: 446300 - DNA, 557 bp, Homo sapiens
ctttgtcactcttacatttacatatctgatttggaaacacttcaaaaatgtgtgagcttcaaataatggcattgtcaaacgcatctattaatatygtgagccttcaagtcaaaatgaaactcttcctgctatgcaatacactttcctaatgatgttatgaaatgatgcttagccagtagtacatttgtcaagattgttcctaggcatagtcttaacagcaatttttgaaagtaaatatttggttactcaatatttaaatatatttaatacctaagatgtagttctaggcatgaaaatcacttagaatcaatgaagagtagactcctgggtcattaatatatatgaaaatttaaaaatagtattttatttaattttagtttttgtgatgggctcttactgtcacccaggctggaatgcagtgcactgtcaccactcactgcacccttgacctcccaggctctggtgatcctcccacctcagcttcccaagtagctgggattataggtgcaccccaccacacccagctaatttttgtgtattttgtagaaataggattt

SEQ ID NO: 446301 - DNA, 557 bp, Homo sapiens
ctttgtcactcttacatttacatatctgatttggaaacacttcaaaaatgtgtgagcttcaaataatggcattgtcaaacgcatctattaatattgtgagccttcaagtcaaaatgaaactcttyctgctatgcaatacactttcctaatgatgttatgaaatgatgcttagccagtagtacatttgtcaagattgttcctaggcatagtcttaacagcaatttttgaaagtaaatatttggttactcaatatttaaatatatttaatacctaagatgtagttctaggcatgaaaatcacttagaatcaatgaagagtagactcctgggtcattaatatatatgaaaatttaaaaatagtattttatttaattttagtttttgtgatgggctcttactgtcacccaggctggaatgcagtgcactgtcaccactcactgcacccttgacctcccaggctctggtgatcctcccacctcagcttcccaagtagctgggattataggtgcaccccaccacacccagctaatttttgtgtattttgtagaaataggattt

SEQ ID NO: 446302 - DNA, 557 bp, Homo sapiens
ctttgtcactcttacatttacatatctgatttggaaacacttcaaaaatgtgtgagcttcaaataatggcattgtcaaacgcatctattaatattgtgagccttcaagtcaaaatgaaactcttcctgctatgcaatacactttcctaatgatgttatgaaatgatgcttagccagtagtacatttgtcaagattgttcctaggcatagtcttaacagcaatttttgaaagtaaatatttggttactcaatatttaaatatatttaatacctaagatgyagttctaggcatgaaaatcacttagaatcaatgaagagtagactcctgggtcattaatatatatgaaaatttaaaaatagtattttatttaattttagtttttgtgatgggctcttactgtcacccaggctggaatgcagtgcactgtcaccactcactgcacccttgacctcccaggctctggtgatcctcccacctcagcttcccaagtagctgggattataggtgcaccccaccacacccagctaatttttgtgtattttgtagaaataggattt

SEQ ID NO: 446303 - DNA, 550 bp, Homo sapiens
tcattctctttttatgtccactcattcttccctgaagttttagaaacttctggaaagcattcctgactacctctctgccccttccacatacagttaccacattctaatcagytttacctggtatttccatattctttccacctacttcacacacgattccatgtggtttagcatccacccagtttactatactaaaatgtttctctcaaaatttccagtaagcttccttatcattgtccaagtaccattatctccatctctttcttgtccactgcaatttgttttatgtttgaaaatctcctcacctgggttccacgatgctacctaatgtttttgttctcttcttacctttgcaactattcactgtctcttgcctttaaattttcttattattcattgagtttggtgtataggttaagttgcttttacttgtaaacagtagaataaccaactaacaatggtgtaaacaacaggatatttattgattatttaacaagaagtccagaagttggaagtcctaaggctggtttggtgactcaaataggaactc

SEQ ID NO: 446304 - DNA, 550 bp, Homo sapiens
tcattctctttttatgtccactcattcttccctgaagttttagaaacttctggaaagcattcctgactacctctctgccccttccacatacagttaccacattctaatcagttttacctggtatttccatattctttccacctacttcacacacgattccatgtggtttagcatccacccagtttactrtactaaaatgtttctctcaaaatttccagtaagcttccttatcattgtccaagtaccattatctccatctctttcttgtccactgcaatttgttttatgtttgaaaatctcctcacctgggttccacgatgctacctaatgtttttgttctcttcttacctttgcaactattcactgtctcttgcctttaaattttcttattattcattgagtttggtgtataggttaagttgcttttacttgtaaacagtagaataaccaactaacaatggtgtaaacaacaggatatttattgattatttaacaagaagtccagaagttggaagtcctaaggctggtttggtgactcaaataggaactc

SEQ ID NO: 446305 - DNA, 534 bp, Homo sapiens
tgagagggaaggaatcacctcccttcccccattatgtccctttatgcacctctgacccttgtgctctccttttcttgttgcttctgtggtctggttgttagctttcccgatcctccacacattrgaaacctaagcataatgatttctgatcgaaggctatgagatatttgaaataaaaaaaggggaaattgttgagtctagaaccaaacctttaaaaattaagaactaccagtctgtaatgtgtgcctttagaaaaaaacaaagtcaaacagaaattaggcaactagttagagccgtgattgtgctctgccacccatgaactcccgtctatgactatttccactctggctttgtgtttcagtaggtcagggacacatattaagagcaacaattggaactgcgttatcctttacctccataaaaatacagcttaataacatgttaatgacttaaaattaccttgtctttctagattgtttattgatgtcatttcagatcggtataaaggatgtgaagtgaataagaaaataggta

SEQ ID NO: 446306 - DNA, 608 bp, Homo sapiens
tctgaatagtattccattgagtatatttataacagtttcttaatcctttcatctattaattctcaatccatttatcttagtttgattccataccttggctattgtgaacagtactgcaataaacatggcagcacagatatctctttcatatactcatttcctctgctttagatatttacccagtagtgggacttcttgaagatacagtagtcctatttttaattctttgagaagcttccattctgttttccatattgtttatactagtttacattccaccaacggcaggcaaagattccctttttctacatccttgccaacacttatcttttgtctttttcataataaycattctaactggagtgaggtggtattctgttgtggttttgatttgcatttctctggttattagtgatgttgagcatttttttcatatatcggttggccattcatatgtctttttgtgagcaatgtctattcaggtcttttgcacatttttaaactgggttatttgttctcttgatattgagttgtttacatttcttatatattttggatattagccattatgagatgtatagcttgaagatactttctctcattctata

SEQ ID NO: 446307 - DNA, 579 bp, Homo sapiens
taaaggtgcatatgactacttccagctaaagtaatcatgggccactctataaaagaagtaagattggaatgggaacttcaagaataattaatctttttaacatataattgaggaaccacattttagacaatcaaaatatgaaggtgtagtaagtattctaacatggctagtatacagggaataaatcaggaagtataatagtaggagataagactggccttgaatacctaggtaaacatatgaatgatatttaatgggtaatattaataagtattaatattatttagaagactcttttgtaagtaatagaaaatccaactaaatcttaaacrctgaggaatgtattagtacctggaggtccagctatcagatggactatggggatgacaactctgcgtgaggctccatcctggctccttgctatctcctagctctatcctcatactggatgttaaagagctgctgctgttgaagatttcacatccgcagagtccagcatgcagggcaaaggaaatggtctccctgtatgccactctttttttttttttctcgagacggagtcttactctgtcacccaag

SEQ ID NO: 446308 - DNA, 549 bp, Homo sapiens
ctccctaaaggctacccatttcaacttcttacatggatacatttctttgtttatagtttatagcttatcccatatagtttcatatatagatgatgattggaaaaagcaattggaaaataatataaagcttagctcatccctaagaagcagaaaaatcattatataatatgtaaaattttgcacacagtaaatacccgtttaatatttaaagaaagagagtagaattcagaatcagtcttgccaacatatatccaagctactacaaaagaacatttatgattgccataaaatttaccaagaatttctggagaatatatttttatccaaaatatcctttcattttcaaaatattctttggtgctttataattatctaaacaattatatkatatcagaatatgagacatcacgttgtagctctacagtttttcacttcttctctaattcttatttatagaacttatcaaatttgagtttcatcacaaatctaagttcaaatactaagaatttttactggagaataagaggccttagctcaaatactaactat

SEQ ID NO: 446309 - DNA, 549 bp, Homo sapiens
ctccctaaaggctacccatttcaacttcttacatggatacatttctttgtttatagtttatagcttatcccatatagtttcatatatagatgatgattggaaaaagcaattggaaaataatataaagcttagctcatccctaagaagcagaaaaatcattatataatatgtaaaattttgcacacagtaaatacccgtttaatatttaaagaaagagagtagaattcagaatcagtcttgccaacatatatccaagctactacaaaagaacatttatgattgccataaaatttaccaagaatttctggagaatatatttttatccaaaatatcctttcattttcaaaatattctttggtgctttataattatctaaacaattatattatatcagaatatgagacatcacgttgtagctctacartttttcacttcttctctaattcttatttatagaacttatcaaatttgagtttcatcacaaatctaagttcaaatactaagaatttttactggagaataagaggccttagctcaaatactaactat

SEQ ID NO: 446310 - DNA, 593 bp, Homo sapiens
gtgattttgtccctaataaccacatggggaggggtgatattactcccaatattgcaaggggtgtacataccgcctgtaacattgtttcttgtatccgggaagggaaaagatagtattaccaccaacattgaaaggatgtacaccccccatgtgatattgttcttaatatccaggttgaaagaagataacattactcaaaatataacaaggggggtacacccccctgtgatatgattcatagaatctagaagaagagagaatgatattacttccaataatacacggggtgtacaaccccctttgatattgttcctaacatctaaaagaagagatgatgacattactcccaataccgccaaggtatacaccctcctgtgatattgttcctaataagtggtgggggagggcatratattacttcaaatatcgcagtggctttacaccccttctgtgatatggctcctaattttcagggggtagagtacgaagatactcccaatatagtagtgggtgtacacccacgctgtgacatttctacaaatattcagggaaacacagcatgatataactccaaatctcgcaaaaagtgtaca

SEQ ID NO: 446311 - DNA, 593 bp, Homo sapiens
gtgattttgtccctaataaccacatggggaggggtgatattactcccaatattgcaaggggtgtacataccgcctgtaacattgtttcttgtatccgggaagggaaaagatagtattaccaccaacattgaaaggatgtacaccccccatgtgatattgttcttaatatccaggttgaaagaagataacattactcaaaatataacaaggggggtacacccccctgtgatatgattcatagaatctagaagaagagagaatgatattacttccaataatacacggggtgtacaaccccctttgatattgttcctaacatctaaaagaagagatgatgacattactcccaataccgccaaggtatacaccctcctgtgatattgttcctaataagtggtgggggagggcatgatattacttcaaatatcgcagtggctttacaccccttctgtgatatggctcctaattttcagggggtagagtacraagatactcccaatatagtagtgggtgtacacccacgctgtgacatttctacaaatattcagggaaacacagcatgatataactccaaatctcgcaaaaagtgtaca

SEQ ID NO: 446312 - DNA, 622 bp, Homo sapiens
tactcaacctctattaataaatctagagttgacttttaatttgtgcaatatccctttgagtgagtttgatgtaataatcctgagctggaaaaagaattagtgaatttaccgaacatagacagatatcattttaaaaataatatgcttttatttcaaagtctcaaagttaaatcaatttttcaaaaaaaaaaaaaaaggaagaaagaatcagcttggtaagggtagatgcaactagtaaaggaaagtgctttytttcttttttttttttttctgccgcccaggctggagtgtagtggcatgattttgcctcactgaaacttccacctcccaggttcaagcaattctcctgcctcaacctcccaagtagctgggattacaggcacccaccactatgcccagctaatttttgtatttttagtagccatggggtttcaccatgtctgccaagctggtcttgatctcttgatctcaggtaatccacctgcctctgccatctaagtggtgggattacaggagtgagccactgcgcccggccagaaagtgctttcttaatacttggttttgtggttagaaaatgtttaagtatgtctgggacaagttgaatataaatatgtaaatctac

SEQ ID NO: 446313 - DNA, 583 bp, Homo sapiens
tggtagcattaacaaatcatacttgcttgctgataggcatgatctaagaaaaaggaaaaaaaatgatgatgcaggagacaagtgagagaattgctggagtattatccttgagtgagtaagtgagaaaagaatagcgagcccaatgcagaagttgtccttagtgaagagcatggagtttattcaatataacaggaggcaaaatattatgtatacgaacctctatagatacctttgtggatgtggtggttggagctgttggaaattttttttcctattgcttccatttttttaatgaagaaagaaaataagtcatcggctgataatgaggatagggaagccatgcaccacgtgtgaggagaggggaaagaatgagaagtatgagaaagagaaaatcaactaggaaaataaattatgatcgatgagcagcatgaaaaaccctcttagtttactgatcataaatgaaaattaagattggtaaatackttttatttcattttgttttttgtgtttttgttttgttttgttttgttcattcttagtcacagtctgggcacaaaatatgcagagttgtatttaatcgatg

SEQ ID NO: 446314 - DNA, 574 bp, Homo sapiens
ttatcatgcctgttagaatatttaaaaagatgtacaatttccagaatgcatgtcatgggaaagcacccctctctgatttgtagctggagtattcctgagaggcatctcagtggaagcctccaaacacggttgtgcaaaaaagcctacataaaattaccaagggctgtctgcctcctaaacaccatatttagaaataatgaaatgctagtgtgaagtattaggtctgaggaccaagatcctgtccagagactgggatgagtttcccgtgcatagagattcacaaagagaactttggcgggtggggcttgggggaagactgagaagctgaggaggggtgggttagacatctccataatgcytccttgtccttggatgatttcccattgggagcttggggaaagttcaagttgtcaagaactttaactcttcattctcaaattgttactctatcgataaagaggcaaactggtaagagaaatgaagcgggttccactttcttccgttttccgctctcctgcagagaagaaagatgtatttcaggagatctattgcttggtgtgagagttgcctacta

SEQ ID NO: 446315 - DNA, 475 bp, Homo sapiens
tgattcctaatgttagaggtaggacctggcaggaggtkattggatcatgggggtggatccctcaggaatggctttgaaccattcccttggtgataagacagttcttgccagttagtttacatgaaatctaattgttcaaaagtctgggacctcccctcaacccctttctctcgctcttgctcttactatgtgactcacttgttccctttcaccttctgccatggttgtaagcttcctgaagcccttaccagaaggcaagcagatgttggtgccttgcttgtacagcctgcagaaccatgagccaattaaacctctttccttcttaaattacccagtctcaggtatttctttatagtaacacaaagacagcctaacaccgtcacctactctgcagtttttcccagcagcttgtctgatgccaaagccacccctttcatagatggaagcaaagatgccattctggacagtgaacaaa

SEQ ID NO: 446316 - DNA, 583 bp, Homo sapiens
gcttgggctcaggagttcaacgccagcctgggcaacacagcaaaacctcttctctattaaaatatttcttaaaattagctgaatgtgtcggcctgcccctgtagtcctagctactcgcctgtagtcccacctcctcggaggctgatggggaatgatcacctaagcctcggaagttgaggctgcagtaaagctatcgtcatgccactgcactctaggcccagtgacagcacaagaccctgttataaaaaaaaaaaaaaaaagcccaatatttctctcaaaccccagttttataatctgtgaaataaagtaacccacccaattcactgggaagttggtaccaaggacccctacatagatgacacagtcatgatacctgaagtcacttattctcatgtgccatctggctacccaccacagcaccacaccacarggccaatcaagaagtatccaccccatcaccctccacaattcagaatgcgtttggggaattgctcagtgcctctaggtcatgagtacatgtaccactgtcatcctacagtagaagctgggcccttggcatagtaagcagaattatcagaagagt

SEQ ID NO: 446317 - DNA, 558 bp, Homo sapiens
cacctggccctgggggagctgtgatggagctggctccctctgcagcggttttcctggtgacctggcagatggctgacactttccaggagtgggaaaaccccttaggaacccaagcggctggattctgaaacccccaaaatacaaggcaaaggggagcacktcattaaatgacttgcccatcatgcagggccgggaggtgaccgctccagagggaggagctgatgaaacacctcctgtaagggtctgggtacacaggggaggtgaaaataggaagggaggatcccccagcagcctcaggggtaaggtccgggatggaacctccctttgtgtgggaggatggagcaaaaataaacgggaagaacctggcgttctgcagaggaggaggcggggaaccggctgcagtctctgagtctgagtcatatccagttttcacagagtgaaatgtaattaggtggtgggtgcctaattaaacagcgactgggcgtccctggctaggtgtcagggagtaactgatggagtggaggcagcatgagattcccgggcaagctaaaggcctgc

SEQ ID NO: 446318 - DNA, 535 bp, Homo sapiens
aagccacagttgaattaggctttatagttggcagtaatcagaaatgtgacaatttcttcctcttcaatactttgagtatatgacacacacacacacacacacaaacacacacatacatatatatatayacacacacacacatatacacacacatgtatgtatgtaagtatgtatacacatacactctcttctggataaaaccagggtaatttcccatagagcccaactggctttttgatggatggtgtctgtaccaacatgatctatttgtgctttcaggtcagggcagttgaggtgggcaggttgaagcaaggtctttcccaaactgaaaacctgggtggaaggttagacgtcatttggatttgctgttcacttttggacatgaaacaatcccatgcacaagtaaatcatttagtgactgtttaattttattgatcctcatatttttctactgagacataaaatggaattttttttaacatatgtaagcctctctcataatttattcagcccttgtaagcatttaatctagtca

SEQ ID NO: 446319 - DNA, 535 bp, Homo sapiens
aagccacagttgaattaggctttatagttggcagtaatcagaaatgtgacaatttcttcctcttcaatactttgagtatatgacacacacacacacacacacaaacacacacatacatatatatatatacacacacacacatatacacacacatgtatgtatgtaagtatgtatacacatacactctcttctggataaaaccaggstaatttcccatagagcccaactggctttttgatggatggtgtctgtaccaacatgatctatttgtgctttcaggtcagggcagttgaggtgggcaggttgaagcaaggtctttcccaaactgaaaacctgggtggaaggttagacgtcatttggatttgctgttcacttttggacatgaaacaatcccatgcacaagtaaatcatttagtgactgtttaattttattgatcctcatatttttctactgagacataaaatggaattttttttaacatatgtaagcctctctcataatttattcagcccttgtaagcatttaatctagtca

SEQ ID NO: 446320 - DNA, 535 bp, Homo sapiens
aagccacagttgaattaggctttatagttggcagtaatcagaaatgtgacaatttcttcctcttcaatactttgagtatatgacacacacacacacacacacaaacacacacatacatatatatatatacacacacacacatatacacacacatgtatgtatgtaagtatgtatacacatacactctcttctggataaaaccagggtaatttcccatagagcccaactggctttttgatggatggtgtctgtaccaacatgatctatttgtgctttcaggtcagggcagttgaggtgggcaggttgaagcaaggtctttcccaaactgaaaacctgggtggaaggttagacgtcatttggatttgctgttcrcttttggacatgaaacaatcccatgcacaagtaaatcatttagtgactgtttaattttattgatcctcatatttttctactgagacataaaatggaattttttttaacatatgtaagcctctctcataatttattcagcccttgtaagcatttaatctagtca

SEQ ID NO: 446321 - DNA, 580 bp, Homo sapiens
aaacattccaatttctttttcttccaaatgcataactgataatcccaacattactaactaatccttattgctttttgaaatgtcattttcattatattttgacttcccatataaaccgaacagacttctaatcggtatatttttccagtatcatggtgatgtatcatattgttatgatttcttttctttctttttttttttttttgagagggagtcttactctgtcacccagactgcagtgccgtggtacaatctccactcactgcagcctccaccctctgggctcaagcaatcctcccacctcagcctcccaagtaacwgggaccacagatgcgtgccaccatgcccagctgagtttttgattttttgatagagacagggttttatcatgttgcccaggctggtctcaaactcctgagctcaagaaatccacacaccttggcctctcaaagtgctgggattacaagtgtgacccaccgtgcctggtcatattgttatgatttctattgttatggtttctttctaatttggtcttgaggtattcctcttgggtgtggccaaaagccaagatagacctctc

SEQ ID NO: 446322 - DNA, 580 bp, Homo sapiens
aaacattccaatttctttttcttccaaatgcataactgataatcccaacattactaactaatccttattgctttttgaaatgtcattttcattatattttgacttcccatataaaccgaacagacttctaatcggtatatttttccagtatcatggtgatgtatcatattgttatgatttcttttctttctttttttttttttttgagagggagtcttactctgtcacccagactgcagtgccgtggtacaatctccactcactgcagcctccaccctctgggctcaagcaatcctcccacctcagcctcccaagtaacagggaccacagatgcgtgccaccatgcccagctgagtttttgattttttgatagagacagggttttatcatgttgcccaggctggtctcaaactcctgagctcaagaaatccacacaccttggcctctcaaagtgctgggattacaagtgtgacccaccgtgcctggtcatattgttatgatttctattgttatggtttctttctaatttggtcttgaggtattyctcttgggtgtggccaaaagccaagatagacctctc

SEQ ID NO: 446323 - DNA, 479 bp, Homo sapiens
aattttaggattgtttttctatttatatttctgtgaagagtgtcattgatattttgatagaaactgcactgaatctatagattgctttgggaaccacggacattttaactatatcgattcttgtaatttatgaacatggaatatccaaaattttctgaaaactgcaaacactggtgagagaaatacaagaaaagctatacaaatggagaggtatttatggattagaagagtcatattgtttttttgagacagagtctcactctgttgcccaggctggagagcactggtgcaatcttggctcactgcaacctctgtctcctgggttggagcacttctcctgcctcagcctcccgagtaactgggattacaggtgttctccaccaygcccggctaatttctgtatttttagtagagacagagtttcatcatgttgaccaggctggtctcaaagtcctgacctcaggtgatccacccacctc

SEQ ID NO: 446324 - DNA, 578 bp, Homo sapiens
atgaatcccaaggtaattatgattgggatcagagtattttcaatgtattatttacttctgtcgaatagtaatttaccagagcagtgatgaataattaatataaacatttatttatgatttttaaagcaacagtgttttgattttactaccgtatagcagacaaaataacatttataattatctaaataaaagcttggttctctatggcatgagatgataaggttgatatttcatattatcatatatttcagctgttttgaaattccttgaacatttgagaaaatgaaagaaactctaccccaaacttagtatctaattgttctctatatagaatcacagcccaccctccccactcccgcccccgctcatctttccttcctcttgtacccccaacctaggtaaaaaaagtttccttggaagtgaaaattctggagcttgtctttattctcctttaccccttacccccttcattggttcaccaactcttattaatgctacctcctagattgagtctcctaagttaytttcctactggtctctttctgctgcagtttactatagcattgtttcttaaataa

SEQ ID NO: 446325 - DNA, 600 bp, Homo sapiens
atctcattgcataattatatatttatacatttgatttcctttctaggcttctttggaaccaggactgagtcttacttatatgtgcattttccatgtccaattttatgtgctttcaattaaaaaaatcaatgtgtaatgaataaaggaagcctaaggaaacawagtttgatgaggtctttggtcttgcagagtctctgtcagttactcaaaacctttgccagcctcctgaggcctcctcatctcatctcatgatattgagaaagttgggatcttaatgtgcatctcctctcgtaaatcaccactcttctataaacttgtttatgttcacagcactttctcttctcacatgaactctactcatccacttctgtttcccaacaaacttggctcttctgcttaacacatgaacttgctccagtaactcccatctgaaaatattaataaaccctccaaggcactgttgattttctctctccatcccttttcatcttaaatttgcagaaaggcatctgttctgattcctcccactccctcatctctcttttgtttctcaaacaactgctatcatctgttgcaagcacttttctgaaactgctcttg

SEQ ID NO: 446326 - DNA, 536 bp, Homo sapiens
ctctgatgattctgaaaaatgttaagcttatctggatagtgtactctaaaagaagggccaagagtgtggctgaacaatcatttgctgaagagattagatgtgtgactcatgaatccaaccagccatctcaacagagkccagaaagagagaggggatttatccattatccatcagagatatgtggagggctctcttgtctcatgatttggagtcttgtgaattgcacaagagaacaatataatttttgagtttcataccagcagaaacactgctgacttggactgaaagggacagggagaggatgaaatgaaggaagaattaccctgaagaaagagccacagatgcagagccctatccaacagcgcctccttggactgagaggtttggggctgccaccccagtgggccgagagggtacagctgccatccctgcaagccaagaagacagagcatttaatcaaggaggattaataatcaaggaggattactctcagcccttgaaacctaatgtaacttaccctgcttgattccagactt

SEQ ID NO: 446327 - DNA, 588 bp, Homo sapiens
gtcaaagggtgcaaagtttcagttacacaagatgatttagtcctagagatctactgtacagcatagtgcctattatagacaatrctgtatcgtatacttaaaattctctaaaaccagagatcttgtgttcttatcacatgcaaaaaaaataataaagaggatgggaataaacttttggagtagatgtgtgtttatgatgtagaatgtggtgatggtttcacaggtgtatacatatttccaaactcatccaatcatacacattaaatatatacagctttgtgaatgtctgtcatacctcaataaagcattttttttccaaaagaattgtgaccatttctgatttctgatggtaatgttttagaaaaaaagaagaaattccttctaggagaataaaacagatagcagggaagaataaaagggtttcttcttcttcctaaagaaaccttgggtgggagggggaggaggaagaaggaggaaagtaaaattggatctttcaaggacactgtggagacctctccagggcagatgggacttgagagccatcaaagtagcttgtccatgtagtactcatgcaggtggggacctggt

SEQ ID NO: 446328 - DNA, 525 bp, Homo sapiens
caccatctggcccatcctcttgtcacagtggatgataggaacaaaagaaacagagacattgcatgcacaacaattaaagcttctgctcagatatggtgtgtgtcatgactggtaagcatccgttggcttaagtgagtacacttcctcttcaggggtgtggaaatggacatgagcagaatgaatgatgggaaaattgtaggatgaacaataactgggtctcctccaatttctctgactgtgcctgagtcacagaagctggttcttctctgtctgagcctctcaaaatgctgcatgctcttgagttctgtccttgctgccttttcctcyccctctgcctgttttcctgagtccagcctgtccatatctgtggtatcagctgccaatatctctgcatctacatctttagttccacttctctccttgactttaggcccactttccctatatattgaatacttctatctaaatatctttccaataccacaaactgaagttatacaaaaactaacttattatctgaatgtc

SEQ ID NO: 446329 - DNA, 607 bp, Homo sapiens
atttgattctccagaaatatgtctttgcagaagtgccaataagcccttcaaatgctgttgtacaaatatctagttctgcctctgctatcaactctgtaactctgggaaattaagtatcagggagaagaaaggagagctgaccttaaagccattatgaagaaaacaatcatatttaaaagtgtcttcttagagaaaaataaaataatcaaagattaatgtatggtggtacaaccatgtgccaagcaaataatggaaaattatttcaaaacaaactaaaaggatctactatcacttctatgaaaggtaccaagaggcataattaaaatacacattctactaagaattcagagaagtcagaaaacagcttttctcatctccctctcccttctattcatttatagagtaagtttagtaatcacaaaattctccactcagaataaaaatgctagttgcaaatgaacaaaagactctgaccttctgttctcaattaatgcagtttctctgaacaaataaaccctacaactatttcaaamcttttcctgtcaataattttcactttcatctctcataagacttgtgcaatagcctctgacaagtagcaaaattg

SEQ ID NO: 446330 - DNA, 572 bp, Homo sapiens
tgtgaatgtggtcacttttggtatccacgtggtccccagctcttttcatcatttgccaaggtctgcaaggttctccgtatgcttgcccttctcactgcttcagcgaaacaatgtggacgtagggtcaaactggtggcctttagctaatgcaaagctaaccactgcaccaaaagctgttttctgtatgcagagacctcagggcctgagatacttacatagacataaaacagtgttggctccaaaatgtttgtcaaaggtaacgacatcaaaaaggaaagttaggagaggagatgaaaaatctaggtttcaggccactaattttatttaaaaatctataagaatacataacaaatttcttaggccacatcactgagggagtatcacaaagccactttaatagaatgaattcaaatgttgctgggccactatctcataccaaggcaggattctaaggwatgtttcccatgtacctgcaaaccagattattcctgtttccctggctgtgaaacttctctttctattgccctgcaccttcttggcttctccagcaaaaaactacccctttatgtccc

SEQ ID NO: 446331 - DNA, 598 bp, Homo sapiens
ctcacccacgtgcaccagttccttggttccaaagcaagagagtgctcagggttcctgtgaggggtgggtattgggtgtgaaggcatacagggaggctggcaaaggcagttcctgaaactgatggtccttggaaactatatacgtttctcatgttgccattttcacattaaaatcctaaaagtagaaagaaattcactcaggtttcttataattatgagttttcataatcaaaattatgatataagttaacttagtgtgtaggtacttttaaaataaaaggaaaagtgacctgtatgttatcattatgttgttattatgaaacagagtttgtatagttcttagaagaatgcaaaacactttcctacacttgaactcattcaagtctaccaatgagatagcaaakacaaggatgataatgatggtgaggacaatgcttatcttagaaaaagatactgagatccagagaagttcacaattggtaaatgtcagagtcataactgttgtgacttttaagaccattcttccccacttcacaccattgccttataccaacactttatagaataattcctattgtggagttctgtgggcaggctaa

SEQ ID NO: 446332 - DNA, 598 bp, Homo sapiens
ctcacccacgtgcaccagttccttggttccaaagcaagagagtgctcagggttcctgtgaggggtgggtattgggtgtgaaggcatacagggaggctggcaaaggcagttcctgaaactgatggtccttggaaactatatacgtttctcatgttgccattttcacattaaaatcctaaaagtagaaagaaattcactcaggtttcttataattatgagttttcataatcaaaattatgatataagttaacttagtgtgtaggtacttttaaaataaaaggaaaagtgacctgtatgttatcattatgttgttattatgaaacagagtttgtatagttcttagaagaatgcaaaacactttcctacacttgaactcattcaagtctaccaatgagatagcaaatacaaggatgataatgatggtgaggacaatgcttatcttagaaaaagatactgagatccagagaagttcacaattggtaaatgtcagagtcataactgttgtgacttttaagaccattcttccccacttcacaccattgccttataccaacaytttatagaataattcctattgtggagttctgtgggcaggctaa

SEQ ID NO: 446333 - DNA, 660 bp, Homo sapiens
ctctttgcctttgaggatcccacagaccacacatcacaacttacttggatgrtcttgccccaagggtttagggatagccctcatctgtttggtgaggcacggcccaagatctaggccacttctaaagtccaggcactctggtccttcagtatgtggatgatttacttttggctaccatttcagaagcctcatgccagcaggctactttagatctcttgaactttctagctaatcaaggatagaggggtctaggtcgaagacccagctttgcctacagcaggtcaaatatctagacctaatcttagccagagggaccagggccctcagcaaggaatgaatacagcctatactggcttatccttgccctaagacattaaaacagttgcgggggttccttggaattactggcttttgctgaccatggatccccagatacagcgagatagccaggcccctctatactctaatcaaggaaacccagagggcaaatattcatctagtagaatgggaaccagaggcagaaacagccttcaaaaccttaaagcaggccctcgcacaagctccagttttaagccttctgacaggacaaaacttctctttatacgtcacagagagagcagggatagctcttggagtccttactcagactcgtgggacaac

SEQ ID NO: 446334 - DNA, 660 bp, Homo sapiens
ctctttgcctttgaggatcccacagaccacacatcacaacttacttggatgatcttgccccaagggtttagggatagccctcatctgtttggtgaggcacggcccaagatctaggccacttctaaagtccaggcactctggtccttcagtatgtggatgatttacttttggctaccatttcagaagcctcatgccagcaggctactttagatctcttgaactttctagctaatcaaggatagaggggtctaggtcgaagacccagctttgcctacagcaggtcaaatatctagacctaatcttagccagagggaccagggccctcagcaaggaatgaatacagcctatactggcttatccttgccctaagacattaaaacagttgcgggggttccttggaattactggcttttkctgaccatggatccccagatacagcgagatagccaggcccctctatactctaatcaaggaaacccagagggcaaatattcatctagtagaatgggaaccagaggcagaaacagccttcaaaaccttaaagcaggccctcgcacaagctccagttttaagccttctgacaggacaaaacttctctttatacgtcacagagagagcagggatagctcttggagtccttactcagactcgtgggacaac

SEQ ID NO: 446335 - DNA, 555 bp, Homo sapiens
aaaaggcctagcttttgacccatctagtatttgacatgctatacacattaagcttaatcatttctagctttttaaaaaaatgattttaactctatagattcaggaggtacatgtgcaggtttgttacacaggtatattgcatgatgctgacgcttggggtacaaatgatcccatcatccaggtagtgagcatagtacccaataggtagtttttcagcccttggccccctcccctactctttcatctrgcagtttccagtgtctttttccccctatctttacgtccatgtgtaccaatgcttcgcccccacttataagtgagaacatgtagtatttggatttttgttcctgcgttaattcacttgggataatggcctctagttgcttccatttcattcttctttatggctctgtattgttccttggtatgtgtaccacttttttttatccaatcacctattgatgggcatctaagttgattctatgtctttgatattgtgaatactgctgtgatgaccatacaaagtgtatgagtctttttggtgggacaatttat

SEQ ID NO: 446336 - DNA, 555 bp, Homo sapiens
aaaaggcctagcttttgacccatctagtatttgacatgctatacacattaagcttaatcatttctagctttttaaaaaaatgattttaactctatagattcaggaggtacatgtgcaggtttgttacacaggtatattgcatgatgctgacgcttggggtacaaatgatcccatcatccaggtagtgagcatagtacccaataggtagtttttcagcccttggccccctcccctactctttcatctagcagtttccagtgtctttttccccctatctttacgtccatgtgtaccaatgcttcgcccccacttataagtragaacatgtagtatttggatttttgttcctgcgttaattcacttgggataatggcctctagttgcttccatttcattcttctttatggctctgtattgttccttggtatgtgtaccacttttttttatccaatcacctattgatgggcatctaagttgattctatgtctttgatattgtgaatactgctgtgatgaccatacaaagtgtatgagtctttttggtgggacaatttat

SEQ ID NO: 446337 - DNA, 558 bp, Homo sapiens
tcacagggttgaaaccaggtgatttgtatgaaggcgcctagcagggttcttcacacagtgtcactatttagtaagagttttgtcgttttctcactcagtccaccatctacctaaccaccatggtgaagcatgctaaagtggttcatgcaccatttcccaaaaggaataaattttgaaatgaacttttggctgagtgcatctgaatgagtcctgatcagtacaaaatacatattcagttcttgctatgcacgaaacactgttctaagccctcttgtctataaaaggaacgctgatgtttccatgttgccayaggagtattctttggaagaaggaaggccgattctctttgtacaactcttcctaaatcctttaagacagcagcagtgatgatgatattgaccactcccaccatgagcctacatgaggactactaaatgtgattgatgcagaggatgccaaattggaagtcaggacaattcccattgctattctgatcttggacagcctgggtggcaatttgctctttgcaatgacaatcctgttactattttaatttct

SEQ ID NO: 446338 - DNA, 470 bp, Homo sapiens
cagtgtaaatctttctttatatatctgtagatcattattttatcactagattaaataaactttgttcttttgaacacattcataaatcttttgtcaaactttcaaatattaaaattttccatctgtgtttcctgctttttggaaccaagaagaatataaacaactatataaaataataacktttaaaaatctattctaaattattcataaactgtgtaggtcatgggctccaaattagaatttatggtcttttagcttctagaatatgttacaagagatatatgcctataaaggcaaaataatatcatcatcatagtgccacaagtaacactgcaattttatgacttcacctacatttaaataagataatttcaacaattgttacatatatcatgaatgagcagcaatctttcacttattaattacatgcaaaaataataaaatgccatttgaaagagataaaaacataa

SEQ ID NO: 446339 - DNA, 635 bp, Homo sapiens
tcagggtgctatactttcttccttaacttcttttaaactcattttatgatctgcaacttgtggattaagctgtaaagttcattaccaccaaccaatatcccacatattaatttgaaatatgggtggatgcagtaggccctgtttctgcaacaggttacaaaactatttaagagtttccttcttcaccactcattctgggttcctgtattagtctgttttcacactgctgataaagacatacctgagactgggaagaaaaagaggtttaatggacttacagytccacatggctggggaggcctcacaatcatggtggtacgcaaggaggagcaagctgcatcttacacaatagcaacaggcagagagagcttgtgcagggaaactccccttttgaaaaccatcagatctcatgagacttattcactaccacgagaattgcacaggaaagaccagcccccatgattcaactacctgccactgggtccctctcataacacatggaaattgtgggagatacaattcaagatgagatttgggtgtggatataggcaaaccacaccagttctccttgtttttaggcagcacctcaacaattggggtcctttactccattgggttactcaaaccttcatttt

SEQ ID NO: 446340 - DNA, 635 bp, Homo sapiens
tcagggtgctatactttcttccttaacttcttttaaactcattttatgatctgcaacttgtggattaagctgtaaagttcattaccaccaaccaatatcccacatattaatttgaaatatgggtggatgcagtaggccctgtttctgcaacaggttacaaaactatttaagagtttccttcttcaccactcattctgggttcctgtattagtctgttttcacactgctgataaagacatacctgagactgggaagaaaaagaggtttaatggacttacagctccacatggctggggaggcctcacaatcatggtggtacgcaaggaggagcaagctgcatcttacacaayagcaacaggcagagagagcttgtgcagggaaactccccttttgaaaaccatcagatctcatgagacttattcactaccacgagaattgcacaggaaagaccagcccccatgattcaactacctgccactgggtccctctcataacacatggaaattgtgggagatacaattcaagatgagatttgggtgtggatataggcaaaccacaccagttctccttgtttttaggcagcacctcaacaattggggtcctttactccattgggttactcaaaccttcatttt

SEQ ID NO: 446341 - DNA, 615 bp, Homo sapiens
tttaaacgtctgcgattcttttttttttgagacagagttccactcttgttgcctaggctggagtgcaatcatgcgatctcagctcaccataacctccgcctcccgggttcaagcaattatcctgcctcagcctcccgagtagctgggattacaggcatgctccaccatgcccggctaaaaagtctgcaattctttaatctaaaattatgtcaaagaggattgcccaaacccaaattcataagcagtctagaaattggtaagtacatctatttacatgtaacaatgaaaatagcagtaaaaacttccaacattccttgacttttataactttccatttttgtgcttattgtaattaaaagaaagctaraaatccctggtatttagaacaagcacataatcaaggaatcacatgtagtttgccaaaaaggaatttattttattttctggtgttattgatagagttcagaaacatcatacagaaactttcagtggaaagctcacttaatttaccaattataaggtaactttttaaaatgtaatttactatgtatacaaaatggagcgtatatttcagatccattttaataggaagcaactgtgctacatgtagcacct

SEQ ID NO: 446342 - DNA, 598 bp, Homo sapiens
ttcatgctaattcttaagtcaagacagatcttaattatgaagacacaattgttaaactcaggaagaaacagattgttcctatakatttagaatccaggtaaataagcagccttctagatactatttcatggttaaaagaccactttgtttccttggtattatttatttaaaactccctatgtgtcaatatcccatcctagagcccagaattaatactgaaagctagaaatttgctagtgacctggatggcttaataaagctgaattcaaattatataaaataattcttaagacttaggaatgtgaagcaagggttttttccttaaagcaggacattttaacaattagtcaaaatacattcatacaaaatcttatatatagtttaacagataatatcctttgttatctataaaagaaaagtctacgcattattgtgcaggatgacagtaaatgccaaagagagaaagactataatggaaggcaatgaaagttggcttcttcggacttttaagactccaaacctatatgtcaggtctgctacataccagcttgccaagcttattccttttttttttttttttttttttgagatggagttt

SEQ ID NO: 446343 - DNA, 563 bp, Homo sapiens
tttaaaaataaaattaagacaacacaaagccttagtgcctgccctctgcaaacttagtgtctagaggaagatactgacaaatagatgattacaatacaacggggctgagaatgggaacgggagagcacagcaacatgccctttctagagatgtagctccaagagtccacaccaagcttcaatgcagctaagccagcctacactcagttcccggcacacctcagtcttccagtctctggttattggttcagaccactccttccacttaaatggaatgtttatattttatgtttatcaaataagcatccattttttaaaggattaatgagcattcrtctacaagatccttttctacccaagtcaaagccaccaattcgtattaccaaaatttcccagggcccagggccatgaggtttagagagagggagaatttcctctcaccccataaaaggcctgcttagcaagctcctctttccagtctcagaacttcccagagatgacaatgtgcaagtccatacccttcggtggaagtgttccaccccatgcccaggagctgtatcaggg

SEQ ID NO: 446344 - DNA, 622 bp, Homo sapiens
gaagtaaaataacatattttttcatatttggaaaaacgcttattgttctgataaaattgctgagtaagagtttttgtagaattacatttgcaacctctacaggattaaaaatcactaagcagggtgatgcacaccagcatggcacatgtatacgtatgtcactaacctgcacattgtgcacatgtaccctaaaacttaaagtataattaaaaaaaaatcactaagcagaaaagatgcaacatctgtcctcggtgttcctaagatttctaaacaaaatcccattatgtccactactcaccttacgtattttaggcatgatgygaaaataatatttgaaaaaatactttaacatagaggtcctcaataatacaaatactcctatgtcactaaaagcaatggaacagcagtcagattatgcagcccattataagcgataaagtggacattggctctccttgtaaacttggagatcactgaagaaaaaaaggaaattcttagaagatttaagagcatgggacagaagatgaccctatttgtgaataagagaaaaaatgcagccttttcggaaattatttttattggcgcagtttcccagactacatttgaaggcctggcttccttc

SEQ ID NO: 446345 - DNA, 622 bp, Homo sapiens
gaagtaaaataacatattttttcatatttggaaaaacgcttattgttctgataaaattgctgagtaagagtttttgtagaattacatttgcaacctctacaggattaaaaatcactaagcagggtgatgcacaccagcatggcacatgtatacgtatgtcactaacctgcacattgtgcacatgtaccctaaaacttaaagtataattaaaaaaaaatcactaagcagaaaagatgcaacatctgtcctcggtgttcctaagatttctaaacaaaatcccattatgtccactactcaccttacgtattttaggcatgatgcgaaaataatatttgaaaaaatactttaacatagaggtcctcaataatacaaatactcctatgtcactaaaagcaatggaacagcagtcagattatgyagcccattataagcgataaagtggacattggctctccttgtaaacttggagatcactgaagaaaaaaaggaaattcttagaagatttaagagcatgggacagaagatgaccctatttgtgaataagagaaaaaatgcagccttttcggaaattatttttattggcgcagtttcccagactacatttgaaggcctggcttccttc

SEQ ID NO: 446346 - DNA, 621 bp, Homo sapiens
acctgttttattaaaaaaaaattaacatgactattgctggggatactccaatgaccaatctattactatgctaagtagaataaagaaattatggaagactccagaaaattaatccaaaaattgtttcctgacagaatctttagaatactgaaatattttaaatctgtgggttctaagttccactacccagtactactgaatcaaaaataagtggtgcaaattagattttagatgtggaaaacaatattttacatcactgaatttctagaattactactatcctagagtgaaggacamaaattagctcaagaaaagagatggtttatgcaatgatgaaacatcctaaagattttctttttacaccagcaaatcccaatttttttcttgtagaaaggcactgaaattaattaatgcaaagcagaagcacccaagagacattctgcaaagaaagaaaatgaaactctgaggaagtattaggaattatgtattgaagttatcctcacccagggagaccaggttcctgtagttctccaacatcacatctctatacaaattctgctgggcagggtccagacatttccactcttcaggggagaattctatggccacatccctgaatgt

SEQ ID NO: 446347 - DNA, 551 bp, Homo sapiens
aagttccactacccagtactactgaatcaaaaataagtggtgcaaattagattttagatgtggaaaacaatattttacatcactgaatttctagaattactactatcctagagtgaaggacaaaaattagctcaagaaaagagatggtttatgcaatgatgaaacatcctaaagattttctttttacaccagcaaatcccaatttttttcttgtagaaaggcactgaaattaattaatgcaaagcagaagcacccaagagacattctgcaaagaaagaaaatgaaactctgaggaagtattaggaattatgtattgaagttatcctcacccagggagaccaggttcctgtagttctccaacatcacatctctatacaaattctgctgggcagggtccagacatttccactcttcaggggagaattctatggccacatccctgaatgttacgagttcctgaaaacacatatttatcatgtsacagagttcttaatttgactataagtgaaatcagagaactagttgtgacttatggggctgactggaattat

SEQ ID NO: 446348 - DNA, 569 bp, Homo sapiens
gcgcctgtgctaagttgggacagtccctttggagcaacatcctggcataagaggaagttcttaaccacatttcttcctgctagctacagakgtggtgcaggtgcggtcccacacgtgtttttcctctccccaggccctctctctatctgcctaaccagcgtccgactgcctcctctatcaaaggttcctcttcctttcaaatatcagacagcaaacaaagaatgttggggccacacaagcagagaacaccatgtcttcagatctcttcacagccttgtcctccagagtttagaagtggagggaaaagattaaaggcaatcttcttgttttgctatttgtccttggacctaatctggacttaatttggacacacaggctgtaactatgtgtttttctcctttggtgtggggcactgtgagtttaagcaccaatcacatgcatccacatctaactgcacttctgttcccagaacgaaggccgtgagtgtgagttgtccaggtccttgacaacaaagaattgaacaaaatgcacaaagtaacaaaggaacaaaacagagggaggaagcatca

SEQ ID NO: 446349 - DNA, 569 bp, Homo sapiens
gcgcctgtgctaagttgggacagtccctttggagcaacatcctggcataagaggaagttcttaaccacatttcttcctgctagctacagatgtggtgcaggtgcggtcccacacgtgtttttcctctccccaggccctctctctatctgcctaaccagcgtccgactgcctcctctatcaaaggttcctcttcctttcaaatatcagacagcaaacaaagaatgttggggccacacaagcagagaacaccatgtcttcagatctcttcacagccttgtcctccagagtttagaagtggagggaaaagattaaaggcaatcttcttgttttgctatttgtccttggacctaatctggacytaatttggacacacaggctgtaactatgtgtttttctcctttggtgtggggcactgtgagtttaagcaccaatcacatgcatccacatctaactgcacttctgttcccagaacgaaggccgtgagtgtgagttgtccaggtccttgacaacaaagaattgaacaaaatgcacaaagtaacaaaggaacaaaacagagggaggaagcatca

SEQ ID NO: 446350 - DNA, 569 bp, Homo sapiens
gcgcctgtgctaagttgggacagtccctttggagcaacatcctggcataagaggaagttcttaaccacatttcttcctgctagctacagatgtggtgcaggtgcggtcccacacgtgtttttcctctccccaggccctctctctatctgcctaaccagcgtccgactgcctcctctatcaaaggttcctcttcctttcaaatatcagacagcaaacaaagaatgttggggccacacaagcagagaacaccatgtcttcagatctcttcacagccttgtcctccagagtttagaagtggagggaaaagattaaaggcaatcttcttgttttgctatttgtccttggacctaatctggacttaatttggacacacaggctgtaactatgtgtttttctcctttggtgtggggcactgtgagtttaagcaccaatcacatgcatccacatctaactgcacttctgttcccagaacgaaggccgtgagtgtgagttgtccaggtccttgrcaacaaagaattgaacaaaatgcacaaagtaacaaaggaacaaaacagagggaggaagcatca

SEQ ID NO: 446351 - DNA, 579 bp, Homo sapiens
agaatcttaaagacaaattcagattacatgtaacattggtcaaattgaccagaaaatattcttccaaagaagttcttctctaaacaccaaaagtgcacagctactctcagcatgagaaatacaagtattatgagaaagagggcttattctgagcagaatttccatctctgctgctctcccatctgccggccgttggattgggaatctatactggaacacacctgacaacctccaccagcactttttgatgaagaattggaattcactctattcacatagtagaattatatcagagattgcaagatagctaactgaagagctactatgattcttgggtggycacatcacctgcatttatttgtccgggaatagtggcattcctaatttagtaaaataaaagaatagactgtaaaattatgctgacctataattatacctataggatcaattaataaacatgtcaggttaatatctactgtagcaatgtggtagtaaattttctttgggtattaaatataaatgtgtacatataaataattttggtatattagtcataatgtatatattttaaaaattatc

SEQ ID NO: 446352 - DNA, 595 bp, Homo sapiens
ctttgggtattaaatataaatgtgtacatataaataattttggtatattagtcataatgtatatattttaaaaattatctgtaagcttaattacaatattttataatactttatatttcaaacaaattaatgcttatattaaagttatataaacttaattcaaasaaattaatacttataataaagttatataaacttaaagttataatactttatatttcaaacaaattaataacattaatattaaaattactatttaagaagtttattcaaaataaatattgtggccttatattcacacaattgtagaaaatactgtttaatttacatggatgcatgttgtctactaaagactaaacaaaactatgctaatttttctgaagtaataagtagaaaccaaagcacagctaaaaattccactgctcagtttatacactaacagttctagcttttgcagtgttaaatactttaggctccagatattatcacctttgatataatcgccttggatgattagttttctattggagaaacttagtatcttttactcttcattactctgtattgctgaattgaatcctatcctttgtgctca

SEQ ID NO: 446353 - DNA, 584 bp, Homo sapiens
acaattgtagaaaatactgtttaatttacatggatgcatgttgtctactaaagactaaacaaaactatgctaatttttctgaagtaataagtagaaaccaaagcacagctaaaaattccactgctcagtttatacactaacagttctagcttttgcagtgttaaatactttaggctccagatattatcacctttgatataatcgccttggatgattagttttctrttggagaaacttagtatcttttactcttcattactctgtattgctgaattgaatcctatcctttgtgctcaacttttgtgtgatcttaaagtgagctttatcattctaaacaaatctgtgtctactttaaaagactgaaaatggaaaaaaaaaaaactttgccaaatcaaaagcaaaaacaaagtggtggttctcaggtcctagataaagagaatcctgagtcaaaaaaaagaaaaaaaggtaagttttatttagctgttaaaataatttatatatatgtgtgtatttcaaaaaagcaaacaaaaatgtacatgtaggctaaatgctttttaaagaaaagcaacagctggattaaggac

SEQ ID NO: 446354 - DNA, 606 bp, Homo sapiens
ttccagcctgggcaacaagaacaaaactttgtctcaaaaaaaaaaaaagtaaaatattgtccttaatttttatcttataaaactatattatattctataaacagtcacataaattaatttttcttcagccatgttaaaatgtactattgttttcacgtcktaagaaagaataagtatggacacaagagtttgttttccttttccagacttaagatttgtgatataaaagttaactgaagtgagagcgtttcaactgggtttccacatcattttccacagtggaatcatctgaggcatagaattcagtgcacccacacatagctttgaaatatagtcctctgactatgtctggagaatatgccaagctttccaacagcaagcaagactgaggcatcagcatagagattaggcctggctgaagagctcttgaaatacgtgtgccttatacaaaacacctgggaatgtcagacaccatggtataaaaatcaccaaagtaattaggccagtgactgtgtcattgattgtaactaccagtcaatgtctacctaatatttaactagtggcagcaatgaatataacattcaatgatagatggagagggtagaa

SEQ ID NO: 446355 - DNA, 606 bp, Homo sapiens
ttccagcctgggcaacaagaacaaaactttgtctcaaaaaaaaaaaaagtaaaatattgtccttaatttttatcttataaaactatattatattctataaacagtcacataaattaatttttcttcagccatgttaaaatgtactattgttttcacgtcgtaagaaagaataagtatggacacaagagtttgttttccttttccagacttaagatttgtgatataaaagttaactgaagtgagagcgtttcaactgggtttccacatcattttccacagtggaatcatctgaggcatagaattcagtgcacccacacatagctttgaaatatagtcctctgactatgtctggagaatatgccaagctttccaacagcaagcaagactgaggcatcagcatagagattaggcctggctgaagagctcttgaaatacgtgtgccttatacaaaacacctgggaatgtcagacaccatggtataaaaatcaccaaagtaattaggccagtgactgtgtcattgattgtaactaccagtcaatgtctasctaatatttaactagtggcagcaatgaatataacattcaatgatagatggagagggtagaa

SEQ ID NO: 446356 - DNA, 593 bp, Homo sapiens
gcctggctgaagagctcttgaaatacgtgtgccttatacaaaacacctgggaatgtcagacaccatggtataaaaatcaccaaagtaattaggccagtgactgtgtcattgattgtaactaccagtcaatgtctacctaatatttaactagtggcagcaatgaatataacattcaatgatagatggmgagggtagaaagtctgctctccaaagaatgtcatctttttctcaattcagaaaagtccctcaattgcatttttctcagctgcttatacataattcaaatctactctctcgtatgtcttatgtcacaagcaatcaaaaatgcagttatagtcaaattgaaaagaaacttggagttggtagatctgggttcaaatttcacctctgccacttattatgtgtagccttgatggggttcagttccttcttctgtaagaaagggttaatacctacctcatagaattgatgtgttttaaatatagttgagcattcacataaagaggtttttgaaattttcttcacttttccgtaagttatagccaactcatctttttgttccagtttctccctcatgatatttggtatatatg

SEQ ID NO: 446357 - DNA, 593 bp, Homo sapiens
gcctggctgaagagctcttgaaatacgtgtgccttatacaaaacacctgggaatgtcagacaccatggtataaaaatcaccaaagtaattaggccagtgactgtgtcattgattgtaactaccagtcaatgtctacctaatatttaactagtggcagcaatgaatataacattcaatgatagatggagagggtagaaagtctgctctccaaagaatgtcatcyttttctcaattcagaaaagtccctcaattgcatttttctcagctgcttatacataattcaaatctactctctcgtatgtcttatgtcacaagcaatcaaaaatgcagttatagtcaaattgaaaagaaacttggagttggtagatctgggttcaaatttcacctctgccacttattatgtgtagccttgatggggttcagttccttcttctgtaagaaagggttaatacctacctcatagaattgatgtgttttaaatatagttgagcattcacataaagaggtttttgaaattttcttcacttttccgtaagttatagccaactcatctttttgttccagtttctccctcatgatatttggtatatatg

SEQ ID NO: 446358 - DNA, 593 bp, Homo sapiens
gcctggctgaagagctcttgaaatacgtgtgccttatacaaaacacctgggaatgtcagacaccatggtataaaaatcaccaaagtaattaggccagtgactgtgtcattgattgtaactaccagtcaatgtctacctaatatttaactagtggcagcaatgaatataacattcaatgatagatggagagggtagaaagtctgctctccaaagaatgtcatctttttctcaattcagaaaagtccctcaattgcatttttctcagctgcttatacataattcaaatctactctctcgtatgtcttatgtcacaagcaatcamaaatgcagttatagtcaaattgaaaagaaacttggagttggtagatctgggttcaaatttcacctctgccacttattatgtgtagccttgatggggttcagttccttcttctgtaagaaagggttaatacctacctcatagaattgatgtgttttaaatatagttgagcattcacataaagaggtttttgaaattttcttcacttttccgtaagttatagccaactcatctttttgttccagtttctccctcatgatatttggtatatatg

SEQ ID NO: 446359 - DNA, 430 bp, Homo sapiens
ccccagtaacagagatacacaactgccaaagtcagctcttaggggtgttgtaccaggaggtggtgtaaacagatctggacccagagaattagaaagaaaaggcagaatgaagttcacaacagcagctgctacatttaaaaatgttagagctgttttacaattattttcacttccctagctttctgagcctgtaagtctctcttccctatttcaacattcatcctaaagagttttmaattagtatgtgaaaccaaaaggtcagagtgttttagtctgatacaaatcatccctaactaaaatgattccagtatgtgcttccatttcattaaaactgttctgtgaaaatttggatatcctcaggaatgcattattacagaataatttaaagcattagctatgcttcatctgcatgctactatattttagaatc

SEQ ID NO: 446360 - DNA, 519 bp, Homo sapiens
aaaactgttctgtgaaaatttggatatcctcaggaatgcattattacagaataatttaaagcattagctatgcttcatctgcatgctactatattttagaatctcatttttaggaattrctatataaattgattacatattcttttgaagaacctcagtaataggaaatctatggcctctgagagtggatttactttttgataacagtcaaatcctatgactattgtgtaaaggtgagggacccagctaggcaattctgcttggggttaaaataataataaatgtacctgaaaataaggaggttgacttcttatacagcagctacacaccagctcctcaaacacacctacctcaggacctttgagcttaatgctctcactttgtggaatctttttatagcatgttctttttcactgatatgagttacaggtcacttaaaaaaggcctttcctgaacaccctaatggagagtggtccacaatcactctcaacaaccacatttgtctaaatcaatgtcatg

SEQ ID NO: 446361 - DNA, 519 bp, Homo sapiens
aaaactgttctgtgaaaatttggatatcctcaggaatgcattattacagaataatttaaagcattagctatgcttcatctgcatgctactatattttagaatctcatttttaggaattgctatataaattgattacatattcttttgaagaacctcagtaataggaaatctatggyctctgagagtggatttactttttgataacagtcaaatcctatgactattgtgtaaaggtgagggacccagctaggcaattctgcttggggttaaaataataataaatgtacctgaaaataaggaggttgacttcttatacagcagctacacaccagctcctcaaacacacctacctcaggacctttgagcttaatgctctcactttgtggaatctttttatagcatgttctttttcactgatatgagttacaggtcacttaaaaaaggcctttcctgaacaccctaatggagagtggtccacaatcactctcaacaaccacatttgtctaaatcaatgtcatg

SEQ ID NO: 446362 - DNA, 196 bp, Homo sapiens
tcaaacacacctacctcaggacctttgagcttaatgctctcactttgtggaatctttttatagcatgttctttttcactgatatgagttacaggtcacttaaaaaaggcctttcctgaacaccctaatggagagtggtccacawtcactctcaacaaccacatttgtctaaatcaatgtcatgcttgcttttttat

SEQ ID NO: 446363 - DNA, 583 bp, Homo sapiens
tcaatgtcatgcttgcttttttatcaactgttatcaccatttattaattttttgttatttttcatctcctcttctgacccatgctgtccaacacagtaaccagtagattaaaattccaattaattgtaattcagaaacttaaagaaaaaaatggaaaaattgtatttcaccaaaaacaactttgttctttgaaggaagcatttaaaagagtaaaaaatggttttctggttccaagatggctgaataggaacagctccagtctacagctcccagcatgagtgacgyagaagacaggtgatttctgcatttccaactgaggtactgggttcatctcactggggcttgtcagacagtgggtgcagaccacagagtgtgagctgaagcagggtggggcatcacctcacctgggaagcacaaggggctggggaattccctttcctagccaagggaagctgtgacagatggtacctggaaaatcgggacactcccaccctaatactgtgcttttccagtggtcttagcaaatggcacaccaggagattatatcctgtgcatggcttggagggtcctatgaccacagagc

SEQ ID NO: 446364 - DNA, 598 bp, Homo sapiens
accacatttgtctaaatcaatgtcatgcttgcttttttatcaactgttatcaccatttattaattttttgttatttttcatctcctcttctgacccatgctgtccaacacagtaaccagtagattaaaattccaattaattgtaattcagaaacttaaagaaaaaaatggaaaaattgtatttcaccaaaaacaactttgttctttgaaggaagcatttaaaagagtaaaaaatggttttctggttccaagatggctgaataggaacagctccagtctacagctcccagcatgagtgacgcagaagacaggtgatttctgcatttccaactgaggtactgggttcatctcactggggcttgtcagacagtgggtgcagaccacagagtgtgagctgaagcagggtggggcatcacctcacctgggaagcacaaggggctggggaattccctttyctagccaagggaagctgtgacagatggtacctggaaaatcgggacactcccaccctaatactgtgcttttccagtggtcttagcaaatggcacaccaggagattatatcctgtgcatggcttggagggtcctatgaccacagag

SEQ ID NO: 446365 - DNA, 592 bp, Homo sapiens
ggcctgagagtcccactttctggctggcagaacccagaggtgggagcacactggagtgtccttcagggtgtcttcaccccatgagagggctgggggctttgggagtttgcagctggcaggagtcagggcccagtcccctaactctgatgcrtccttggttaaatcctgtgcctcagcctgcagggcctattgtggtcaccaggtgaatgtgttcccttagtctgggagccccaagtaggcagcaccccctgccaacgacttcagggcacctggaagtggaggctgagaggtctcccacttcgcagagctgggctctggcccagaggccttctccttggcttagctggtctctcgggctcctggggctgcagatcagggacagaaacaagcagctctgctctgctatgcctacagagaggtgcccagtgaatacaggttccagacaaaaggtggagcctggcatcctgccctgcgtgggctccagcctgctgccatctggggaaactgagtcatggcgaggctcaaggatgtttctcagaccacaccagtccctgaaggtccgctgacctcccattcttgacggacagtgaga

SEQ ID NO: 446366 - DNA, 645 bp, Homo sapiens
cactgcaacctatgcctactgcattcaagtgattctcctgactcagcctccctagcagctgagattacaggcgtgtaccaccatgcccagctaaytttttgtatttttagtagaaatgaggtttcaccatgttatccaggctggtctcgaactcctgacctcaggcgttctgcccatctcggcctcccaaagtgctgggtttacaggagtgagccaccgtgcctggccacctatagcagtatttcgcagcagacaattgtcattgtgctataaactaattcaaaattggactaatattccttatgattaacaagttttatattttcaccagagatatttagccctgcctggtaatcagaaaagtgcaaattaacataaaataagatatattttgtaaagtcatgctggtattgaaaaagtaattactaccattggcaaatgtgaggaaaaaggcattctcatacactgttggtatatgaaattggtaaattatttctgaagggtaacttagtgctgtgtatcaaaatttcaaataacctgacatccctttaactcaacaactccacttctgggactagatttcacaggaaaacataacttgtgtaaacatacacttattaagggcattaattatatattacacat

SEQ ID NO: 446367 - DNA, 645 bp, Homo sapiens
cactgcaacctatgcctactgcattcaagtgattctcctgactcagcctccctagcagctgagattacaggcgtgtaccaccatgcccagctaactttttgtatttttagtagaaatgaggtttcaccatgttatccaggctggtctcgaactcctgacctcaggcgttctgcccatctcggcctcccaaagtgctgggtttacaggagtgagccaccgtgcctggccacctatagcagtatttcgcagcagacaattgtcattgtgctataaactaattcaaaattggactaatattccttatgattaacaagttttatattttyaccagagatatttagccctgcctggtaatcagaaaagtgcaaattaacataaaataagatatattttgtaaagtcatgctggtattgaaaaagtaattactaccattggcaaatgtgaggaaaaaggcattctcatacactgttggtatatgaaattggtaaattatttctgaagggtaacttagtgctgtgtatcaaaatttcaaataacctgacatccctttaactcaacaactccacttctgggactagatttcacaggaaaacataacttgtgtaaacatacacttattaagggcattaattatatattacacat

SEQ ID NO: 446368 - DNA, 568 bp, Homo sapiens
attacacataatgaacaatagcttaataaatacataaaatatatgtaataagaaggtgaattggaagtattaagaaagaattataaaaagtgtggggtaacagatgttagaccctttagcctagttttagttgacaatcatctgcagatatagtttgtgtgagagacatcttactctgtaaatcatttggagagacacctgcaatatttcataaagatgaaaatttatttctagtgaacttatacgcttgtcaataaatagtaactttaaaaatttagttgattrtaaatgaccttttctaatcggggagtaattatgactgtgtgatttgaaaaggtaattttgaaattctaactatactgaattatctccagtatccttttttataatatatgctagagtgactagtaacaaaaacttcagcagaatattctttccttactacttttcaagtatatgcattcttttgaagatgttgaagtgagagattaaatatctgagaactaaaaaggaaaaataattcagaacacagaaattttattaggatgataaagagcatctgcagagg

SEQ ID NO: 446369 - DNA, 575 bp, Homo sapiens
ggtagatcacaggatgaactctttattttttaacaaaatgagttttaagataaatgtctttatctgcagatgcatcttaagataagaaaataaagaaaaaacaaatgttaatatgctgtacaaaaaaatagagaagaattagaaaggaaagagaaacaacataagaaagaagttgaagcaaagcaacttgaaccaactgttcaatcactagagatgaaaacaaagactgcaagaaatactccaaatcagataaatcaatctttggtaaaaattctatattttaaactattktatgaaagtttcttctaatattctcttgatttaatatataatatttaggtctaaaacaaaccagaaatgttatctcatttttaaaaaatgaatgatgccacttacaggtacaattattaatatttattataaatcttggcatccacataagatattattttataacaaagagcttttgaaaacaataatatgccatagtatatacttagtgataacctattgataaagattctgttcccagtaaaattgttccttgtactttcccctatttcatattgattact

SEQ ID NO: 446370 - DNA, 205 bp, Homo sapiens
taagttagtttccactttttagctattatgaacaatgctgctgcgaacattcacttacaggttattatgtggacamgggtttttatttccctgccattggactttatcctcagagttaattgggcagatttcagcacttgtcttgctcatgctatcctttctgccttctcagtttctgttcatctagcctcattcactcagacgt

SEQ ID NO: 446371 - DNA, 205 bp, Homo sapiens
taagttagtttccactttttagctattatgaacaatgctgctgcgaacattcacttacaggttattatgtggacacgsgtttttatttccctgccattggactttatcctcagagttaattgggcagatttcagcacttgtcttgctcatgctatcctttctgccttctcagtttctgttcatctagcctcattcactcagacgt

SEQ ID NO: 446372 - DNA, 205 bp, Homo sapiens
taagttagtttccactttttagctattatgaacaatgctgctgcgaacattcacttacaggttattatgtggacacgggtttttatttcyctgccattggactttatcctcagagttaattgggcagatttcagcacttgtcttgctcatgctatcctttctgccttctcagtttctgttcatctagcctcattcactcagacgt

SEQ ID NO: 446373 - DNA, 424 bp, Homo sapiens
acaactttttagacatgtgtgtcatgggggcgggagtcagctgagctgctggggcaaggtgaaattttttttgaatgccaaaatattttttttttttttttgagaaagagtctggctctgtttcccaggctggagtgcaatggcacggtcttggctcactgcaacctatgcctccaagcaattttcctgcctcagcctcstgagtagctggcattacaggcatgtgccaccacgcccagctaatttttgtatttttagtagagatggggttttgccaagttgatcaggctggtcttgaattcctgacctcgtgatctgctgcctcggcctcccaaagtgacgtgagccaccatgcccggccacttattctttcatgattttgaaaacaatgaccaagccttggacatataatgtccagtgcact

SEQ ID NO: 446374 - DNA, 424 bp, Homo sapiens
acaactttttagacatgtgtgtcatgggggcgggagtcagctgagctgctggggcaaggtgaaattttttttgaatgccaaaatattttttttttttttttgagaaagagtctggctctgtttcccaggctggagtgcaatggcacggtcttggctcactgcaacctatgcctccaagcaattttcctgcctcagcctcctgagtagctggcattacaggcatgtgccaccackcccagctaatttttgtatttttagtagagatggggttttgccaagttgatcaggctggtcttgaattcctgacctcgtgatctgctgcctcggcctcccaaagtgacgtgagccaccatgcccggccacttattctttcatgattttgaaaacaatgaccaagccttggacatataatgtccagtgcact

SEQ ID NO: 446375 - DNA, 564 bp, Homo sapiens
ttgttgatgtttagagatatttttggttgtcatgaattggggggaggttactacaggaatatggtgtgtagagtccggggatgctgctcaacaacctgtaacacacagcacagtctcccacaacaaggaaacatttggcttaaagtttctatagtgcttagattgagaaacactgatataaattattttgaatcacaccactctcttgaaacaaaaagaaatgtattttaagttgtaattcaaattatctgcttcagattccaagaattgaagctaggaagcatctatactgaatggctgcaatatcctatctgttatgtttaacttggtcttaggctacaggaaatgggttctgcccttcatataacttagaaatatctgaaatttttcagttatttaagacatattttatctgaattttaattacctcctgatcaaattggctaagtagttaagaactgaagctctcattgacctgaattagttattctgtgatctgtgttttgtgctaccttttgacttygctattttcaggaaatgagagggattatggagaatcaacgc

SEQ ID NO: 446376 - DNA, 541 bp, Homo sapiens
aggtgggggctcttctgctggagaggcagctagggagggtccttagaagaagtgacagctgagttcttctctgaagggtgaagctgaattacttgaagcttagggtgaaggggtgtccagggaagtggagcctgtgagccaaaagcataatgacttgtccagagaagtgtaacaagttccatattgtttctatgccaaatctgcacaagagtcaccacaggaaagagcaggatcctggagccagggccttggatttcacctgctggcaatggaaatgttcactgggaattttggggggcaaaacrtgaaaatgtttcatcttagctccaattctctgtctctctgtctctttctgtccctctctctctcctttatctttaatttttgtattatcctaagaaaacacagatgtctcagacatggggattagcagcctgcctctttctggatgacttcaggggagcacttcagcctctgtgagcttatttacaataattcacaaatcttgccaaaaaaaaagtcatggtagcagagtttagaa

SEQ ID NO: 446377 - DNA, 574 bp, Homo sapiens
gtggacaattctcttcacctgcctgggccccactgcccgcccttccaaacagtgcagggtcacagctgagctctctgagacacctcacaggatctcagcttctaaactatcaagtgtcttctaggtgaaggcttggtctcatagcctttgtggtttcctccaggtaacacttggttttctgacctaaccctggtatatgtgtgacacatgtgtgaatgtgctccctgtggcagcgctgaggaaggactcagtcatcacagatgctgaaasgcaaatgcagtgtgcttttttccaacatctccagtcttgtattatttttacccatcagcccatttgaaaaagaaaaaaaaaagcctcctgttagaattaaatcccctctggagataatgagtattttttaaatctttcattttttttatatagtcatgtttgctcccagttcctgccaggatccactagagggcagagacacctgtgtgtatttgtgtagcacttgctgagtggtaataaaaacagataccctgccctcccagagccaacctccagtgccagggcaagcagcagcaagtaagaa

SEQ ID NO: 446378 - DNA, 574 bp, Homo sapiens
gtggacaattctcttcacctgcctgggccccactgcccgcccttccaaacagtgcagggtcacagctgagctctctgagacacctcacaggatctcagcttctaaactatcaagtgtcttctaggtgaaggcttggtctcatagcctttgtggtttcctccaggtaacacttggttttctgacctaaccctggtatatgtgtgacacatgtgtgaatgtgctccctgtggcagcgctgaggaaggactcagtcatcacagatgctgaaaggcaaatgcagtgtgcttttttccaacatctccagtcttgtattatttttacccatcagcccatttgaaaaagaaaaaaaaaagcctcctgttagaattaaatcccctctggagataatgagtattttttaaatctttcattttttttatatagtcatgtttgctcccagttcctgccaggatccactagagggcagagacamctgtgtgtatttgtgtagcacttgctgagtggtaataaaaacagataccctgccctcccagagccaacctccagtgccagggcaagcagcagcaagtaagaa

SEQ ID NO: 446379 - DNA, 574 bp, Homo sapiens
gtggacaattctcttcacctgcctgggccccactgcccgcccttccaaacagtgcagggtcacagctgagctctctgagacacctcacaggatctcagcttctaaactatcaagtgtcttctaggtgaaggcttggtctcatagcctttgtggtttcctccaggtaacacttggttttctgacctaaccctggtatatgtgtgacacatgtgtgaatgtgctccctgtggcagcgctgaggaaggactcagtcatcacagatgctgaaaggcaaatgcagtgtgcttttttccaacatctccagtcttgtattatttttacccatcagcccatttgaaaaagaaaaaaaaaagcctcctgttagaattaaatcccctctggagataatgagtattttttaaatctttcattttttttatatagtcatgtttgctcccagttcctgccaggatccactagagggcagagacacctgtgtgtatttgtgtagcacttgctgagtggtaataaaaacagataccctgccctcccrgagccaacctccagtgccagggcaagcagcagcaagtaagaa

SEQ ID NO: 446380 - DNA, 391 bp, Homo sapiens
ttcatgctaatttgaattgcattttaagaagtaatgattcttggggtaaagaccatagaatacggcacccagaaataaatccacatatttccagccaactgattttggacgaacatgccaagaacatacgctggggaaaggacagcctcttcaaatgaatgacactgkgaaaactaaatatccatatggagaagaatgatattagcttcctatgtaacaccatataacaacataaactcagaatcgattgaagactgaaatgtaaggcccaaaattatcaaactactctaagtaaatatagggaaaatgcttgaggacattagtctgcacaaagatttttatgggtaagacatcagaagcataggcaaacaacaaatcatagacaaatgac

SEQ ID NO: 446381 - DNA, 470 bp, Homo sapiens
ctcccaattctaatttcctaaacaccagccaagggccagccttgcatgcaggcctttctaaggatggcagtctcttgcctgttatatgaaatcttttctgcacactttgtatagctccaacttaatttttggtgttgttttaaaatttcattttaataatataatattataagataaggtaacttggtactaatttctgttgtatgatycatcttaagttgcagcactggttacttttttgactttcggtgtcgaacagctatttgtacataagttaccatagcaatgttaggtaactataatctgtcctatttatctcatttacctttcagtaaaattgttaaataagcaaaataatttctgagttaaaattagaatgaaaattgtcttttatttggattacatgaataatcgaattttcatattgtgctaaagccctgcttagaattatgaaataagataaaatattc

SEQ ID NO: 446382 - DNA, 391 bp, Homo sapiens
ttcatgctaatttgaattgcattttaagaagtaatgattcttggggtaaagaccatagaatacggcacccagaaataaatccacatatttccagccaactgattttggacgaacatgccaagaacatacgctggggaaaggacagcctcttcaaatgaatgacactgtgaaaactaaatatccatatggagaagaatgataytagcttcctatgtaacaccatataacaacataaactcagaatcgattgaagactgaaatgtaaggcccaaaattatcaaactactctaagtaaatatagggaaaatgcttgaggacattagtctgcacaaagatttttatgggtaagacatcagaagcataggcaaacaacaaatcatagacaaatgac

SEQ ID NO: 446383 - DNA, 643 bp, Homo sapiens
aacccacagccaatatcatgctgaatgggcaaaacaggaagcattcactttgaaaactggcacaagacagggatgcaacctaagaaatgggagaatgaattccaggaacaggtgatccatgcaggagagaggagcarcattgctgagagccaggggtgaagcaattcaagctggagacactgagacaaacacaggggcgcctggcattctctgaaaggcagtacagtggttctcaccactcagtaaatgtggtaattacctcttatctggttacaatgcgtcttcccaggcctgccagcagggattcttaatcctgatgcaaatgatgtggcagcacttgtggttatagacatgagtgtttgaatcacagatctatgtccaaacccaaatcccctcagtaattaactgtaagctgtcattcaattacttaatctctccagcatgccacttcctcagaccaattcatatgggaatatgaattcataggagtgttataaagggtagtttatacaatgaactcatgactatgaaatgcttagcatggcatccaaaaagccctgaataagtggtgcaacaatacctttttattacggaaaacacacccaacctagaaaagagtgttcataggggattaagagaagta

SEQ ID NO: 446384 - DNA, 643 bp, Homo sapiens
aacccacagccaatatcatgctgaatgggcaaaacaggaagcattcactttgaaaactggcacaagacagggatgcaacctaagaaatgggagaatgaattccaggaacaggtgatccatgcaggagagaggagcagcattgctgagagccaggggtgaagcaattcaagctggagacactgagacaaacacaggggcgcctggcattctctgaaaggcagtacagtggttctcaccactcagtaaatgtggtaattacctcttatctggttacaatgcgtcttcccaggcctgccagcagggattcttaatcctgatgcaaatgatgtggcagcacttgtggttatagacatgagtgtttgaatcacagatctatgtccaaacccaaatcccctcagtaattaactgtaagctgtcattcaattacttaatctctccagcatgccacttcctcagrccaattcatatgggaatatgaattcataggagtgttataaagggtagtttatacaatgaactcatgactatgaaatgcttagcatggcatccaaaaagccctgaataagtggtgcaacaatacctttttattacggaaaacacacccaacctagaaaagagtgttcataggggattaagagaagta

SEQ ID NO: 446385 - DNA, 512 bp, Homo sapiens
aatgcgtcttcccaggcctgccagcagggattcttaatcctgatgcaaatgatgtggcagcacttgtggttatagacatgagtgtttgaatcacagatctatgtccaaacccaaatcccctcagtaattaactgtaagctgtcattcaattacttaatctctccagcatgccacttcctcagaccaattcatatgggaatatgaattcataggagtgttataaagggtagtttatacaatgarctcatgactatgaaatgcttagcatggcatccaaaaagccctgaataagtggtgcaacaatacctttttattacggaaaacacacccaacctagaaaagagtgttcataggggattaagagaagtaagtacagttagtgagcagagcaagccagcgtggtgagggcctttcctaggtgaggcatccaccacatttgaaagtgggatgcagggcaagagctcaacatcaaccaggatgggcaggaatgaagtaaatagctcacacctgtt

SEQ ID NO: 446386 - DNA, 552 bp, Homo sapiens
aggcctgccagcagggattcttaatcctgatgcaaatgatgtggcagcacttgtggttatagacatgagtgtttgaatcacagatctatgtccaaacccaaatcccctcagtaattaactgtaagctgtcattcaattacttaatctctccagcatgccacttcctcagaccaattcatatgggaatatgaattcataggagtgttataaagggtagtttatacaatgaactcatgactatgaaatgcttagcatggcatccaaaaagccctgaataagtggtgcaacaatacctttttattacggaaaasacacccaacctagaaaagagtgttcataggggattaagagaagtaagtacagttagtgagcagagcaagccagcgtggtgagggcctttcctaggtgaggcatccaccacatttgaaagtgggatgcagggcaagagctcaacatcaaccaggatgggcaggaatgaagtaaatagctcacacctgttccttcatgggtcagttcctttcattttcacttttgactctgatgcaaaattag

SEQ ID NO: 446387 - DNA, 578 bp, Homo sapiens
atttataaaatagatcagactcattgaaggacctggggaatgggagcccacccctcggtctccagcctccccaaactatgtgtttctccagagtaagcttgagcctctcccagcatggattaaaacccatggctcttccagatctaaaatctgaggctctacaatttaagtcatagttaggcacttgcatacctgtaatggtaacatgcttaaatactcagtctatcattgtttaatattgaatgaaagacacatattttgtttacttattatgcagcagctagtctgtgttcacctgcattgtctcagggttagctctttatttccaagcatcctgtcccatttcctggagcctattgaccaggggaaagatatggtcaaaagttamaggtatgttgggcaaagccttaggaatagcttttctgacaaacaagcaatggggaaaagactccgttcaataaatggtgctgggataactggctagccacatgctgaagattgagctgggcccctttcttacaccatacacaaaaatgaactcaggatggattaaagacttaagtgtaaaacccaaaaat

SEQ ID NO: 446388 - DNA, 578 bp, Homo sapiens
atttataaaatagatcagactcattgaaggacctggggaatgggagcccacccctcggtctccagcctccccaaactatgtgtttctccagagtaagcttgagcctctcccagcatggattaaaacccatggctcttccagatctaaaatctgaggctctacaatttaagtcatagttaggcacttgcatacctgtaatggtaacatgcttaaatactcagtctatcattgtttaatattgaatgaaagacacatattttgtttacttattatgcagcagctagtctgtgttcacctgcattgtctcagggttagctctttatttccaagcatcctgtcccatttcctggagcctattgaccaggggaaagatatggtcaaaagttacaggtatgttgggcaaagccttaggaatagcttttctgacaaacaagcaatggggaaaagactccgttcaataaatggtgctgggataactggstagccacatgctgaagattgagctgggcccctttcttacaccatacacaaaaatgaactcaggatggattaaagacttaagtgtaaaacccaaaaat

SEQ ID NO: 446389 - DNA, 571 bp, Homo sapiens
agaaaaaaaaaaaaaaaaaaaaaaaaaggcaaacgtggcaaacaagcatatggaaaaaagctctagatcactgatcactagagaaawgctcatcaaaaccacagtgaggcaccatctcacaccagtcagaatggctattactaaaaagtaaaaaactaacagaagttggcaaggttgcagggaaaagtgaacatgtatacaccattggtgggagtgtaagttaattcaactgtggtggaaagcagtatggtgattcctcaaagagctaaaagcagaactacaacatttgacctagcaatcccattactggttatatacccagatgaatataaatcattctaccatgaagttacatgcatgcaaatgttcattgcagcactattcacaatagcaaagacatagaatcaacccaaatactcatcagtcacggattggataaagaaaatgtgctacatatacaccatggaataatatgcagccataaaaaagaatgagattatgtcttttgcattagtatggatgaagctgatgggtattatccttagcaaactaacgcaggaatagaaaacca

SEQ ID NO: 446390 - DNA, 406 bp, Homo sapiens
tgtttctggtctgagtcctatgttttgttggtttctggygatatggtgttttattctaaactaaacagtttgaactgaagaactagagaggctgtattgtgttataacaaaataagtgcagtagctcccccttaactgtgggagatacattccaagacccccagtggatgcatgaaaccatgaatagtactgaatcacaagctgtttttccctatacatacatatctatgagaaagtttaatttataaattaaattaaatctgatgttatctgtagatagggtgtgagaattgaattgtgtcatcagcaggaatgattgcttgtttgttggtggggaaaaactctccacacatttggtcacagaagccttctttgttgatgattgttgctgtggtgtgacagcaga

SEQ ID NO: 446391 - DNA, 406 bp, Homo sapiens
tgtttctggtctgagtcctatgttttgttggtttctggtgatatggtgttttattctaaactaaacagtttgaactgaagaactagagaggctgtrttgtgttataacaaaataagtgcagtagctcccccttaactgtgggagatacattccaagacccccagtggatgcatgaaaccatgaatagtactgaatcacaagctgtttttccctatacatacatatctatgagaaagtttaatttataaattaaattaaatctgatgttatctgtagatagggtgtgagaattgaattgtgtcatcagcaggaatgattgcttgtttgttggtggggaaaaactctccacacatttggtcacagaagccttctttgttgatgattgttgctgtggtgtgacagcaga

SEQ ID NO: 446392 - DNA, 561 bp, Homo sapiens
atatggtgttttattctaaactaaacagtttgaactgaagaactagagaggctgtattgtgttataacaaaataagtgcagtagctcccccttaactgtgggagatacattccaagacccccagtgsatgcatgaaaccatgaatagtactgaatcacaagctgtttttccctatacatacatatctatgagaaagtttaatttataaattaaattaaatctgatgttatctgtagatagggtgtgagaattgaattgtgtcatcagcaggaatgattgcttgtttgttggtggggaaaaactctccacacatttggtcacagaagccttctttgttgatgattgttgctgtggtgtgacagcagagaaaaacgtgtcaagtatgtctttctgcgcatatagtggataaggggtactagtgtatactctgttgtaatggcccctcatattttggtccagaaatcatgctctttgacactgttgactcatcacacctgttctgctaacaataccatttttactcaatctcataggctttggctaggatgacttgtatactgc

SEQ ID NO: 446393 - DNA, 510 bp, Homo sapiens
gcatgaaaccatgaatagtactgaatcacaagctgtttttccctatacatacatatctatgasaaagtttaatttataaattaaattaaatctgatgttatctgtagatagggtgtgagaattgaattgtgtcatcagcaggaatgattgcttgtttgttggtggggaaaaactctccacacatttggtcacagaagccttctttgttgatgattgttgctgtggtgtgacagcagagaaaaacgtgtcaagtatgtctttctgcgcatatagtggataaggggtactagtgtatactctgttgtaatggcccctcatattttggtccagaaatcatgctctttgacactgttgactcatcacacctgttctgctaacaataccatttttactcaatctcataggctttggctaggatgacttgtatactgcagttcacttgtagataccaaattttaataaatttattcttctttgcatctaataaatacagagggaagagttcttact

SEQ ID NO: 446394 - DNA, 477 bp, Homo sapiens
  misc_feature (1)...(477): n = A,T,C or G
nnnnnnnnnnntctgacctttgcccttggccatctgcagcataggaggatgccccttgtgccaggtggctctcagaatctggggactgtaagagccaggatcagcacccgtcagtcacatgctgagcccagcactgacaatgaacgtgttctgtctatgactcaagatatacactccatcttcttgaaccttaaraatattacattgagttcctcaggaaacagcatttagaaatgcaagcattttcatctcatcgtttatctttaagacaaggttctggagcctcctaggaactcatttaagggtgctgaaaaaggagtgggtgaggctttagtttgcttaatctcaatatttgaagtgtataacattatatttgaactaaagtttaatttgctaaaaaacgcaaattgtttctctattctgtagaatataattgatttgtaatgcctcctacatgacaagtgggaatacagactg

SEQ ID NO: 446395 - DNA, 477 bp, Homo sapiens
  misc_feature (1)...(477): n = A,T,C or G
nnnnnnnnnnntctgacctttgcccttggccatctgcagcataggaggatgccccttgtgccaggtggctctcagaatctggggactgtaagagccaggatcagcacccgtcagtcacatgctgagcccagcactgacaatgaacgtgttctgtctatgactcaagatatacactccatcttcttgaaccttaaaaatattacattgagttcctcaggaaacagcatttagaaatgcaagcattttcatctcatcgtttatctttaagacaaggttctggagcctcctaggaactcatttaagggtgctgaaaaaggagtgggtgaggctttagtttgcttaatctcaatatttgaagtrtataacattatatttgaactaaagtttaatttgctaaaaaacgcaaattgtttctctattctgtagaatataattgatttgtaatgcctcctacatgacaagtgggaatacagactg

SEQ ID NO: 446396 - DNA, 561 bp, Homo sapiens
atatggtgttttattctaaactaaacagtttgaactgaagaactagagaggctgtattgtgttataacaaaataagtgcagtagctcccccttaactgtgggagatacattccaagacccccagtggatgcatgaaaccatgaatagtactgaatcacaagctgtttttccctatacatacatatctatgagaaagtttaatttataaattaaattaaatctgatgttatctgtagatagggtgtgagaattgaattgtgtcatcagcaggaatgattgcttgtttgttggtggggaaaaactctccacacatttggtcacagaagccttctttgttgatgattgttgctgtggtgtgacagcagagaaaaacgtgtcaagtatgtctttctgcgcatatagtggataaggggtactagtstatactctgttgtaatggcccctcatattttggtccagaaatcatgctctttgacactgttgactcatcacacctgttctgctaacaataccatttttactcaatctcataggctttggctaggatgacttgtatactgc

SEQ ID NO: 446397 - DNA, 478 bp, Homo sapiens
gctattcacctaataagggactaatatacaaaatatacaaaaaaactcaaacaacttcacagtawaaaaatctgagttcaaatttgggcaaaatatataactatacttttttttagaaaaagaaatccaaataaccaataaataaattttaaatgctcagtatcactaatcctcagggaaatacaaatcaaatctacaatgtgatataatcttgcttcaatttgaataaattgctgtcattgaaaagacaaaaaaaataacaaatgctcgtgaggctccagagaacagtaaactcttacatgctgttggtgggaaggtaaattagtgcagccactatagagaacaacaggaggttttctcaaaaaaactaataatgggactgccgagggatccagcaaccccactactgggtattcaggcaatagaaaagaaaacaatagatcaaaaggatacctgtcctcatatgtttactgtagca

SEQ ID NO: 446398 - DNA, 517 bp, Homo sapiens
  misc_feature (1)...(517): n = A,T,C or G
ttcaccatatacaactcattcactccatacatgctcttcatatgtcaactgtgtgtgctctctgtaatactagacactcaataaatacatttgtaaaatgctgaatcaataaactaaaatgcaatctcctacaatctttatttctgcccayaggaatatatttcatgttagttgtctttcaatttataaaaatatatcaattatattgaaaaatgctttaaggtaataaaatgttttcacatacattgttgcatgaaccatcaaacatccccgtgataaatgccaggcaggtaacattatcgctaccttgtagctgagaaaaataagtttcaaggtcagacacgtagttaataaaaaaactaaggctagaatctagggtccctgaggtcctggacccatcatgctccacaacttcaaatatgctcccctccacaaaagggaaaatccaaagctaaagtctgtatggaatttctcctaaaggattaccaaacatgatttggaatntgttttcatttta

SEQ ID NO: 446399 - DNA, 622 bp, Homo sapiens
  misc_feature (1)...(622): n = A,T,C or G
gaatctgcagtcaggtaagatttcatagatttaaaaaattatgttaactaagaaaatatagatggaagaaactaatatctgctgagtgttgtattctgggctagacatcctaatatgttctatgcatttatcatctcataaagccatcataacatctgtgttcctataacctactgttaaataaacaactatggattagagctgattaattgcctcatgatcccatagttaacaaagtagctggcctrcagtttgaccatcagcctacctgccttccaaatcctttctcttgctcctcagcatagattnatacataaaagacagcccttgnataatttatngagtgctgaatcagatcaatcggattcattaatttaattaacttctaaattaatgagagtttaaataccttgaactctcatttaagtttattgttagaatgtggttagtcctaataaatttgacgatttcagtggtaaccagtatcttatttttaccttcaaaggctctagggcagatctgacttagctttggccataggactgtaagttttaccaaagcaagtttaggcaagtcttagagacaaattatttgacttcccagtttggttttccatttaggc

SEQ ID NO: 446400 - DNA, 622 bp, Homo sapiens
  misc_feature (1)...(622): n = A,T,C or G
gaatctgcagtcaggtaagatttcatagatttaaaaaattatgttaactaagaaaatatagatggaagaaactaatatctgctgagtgttgtattctgggctagacatcctaatatgttctatgcatttatcatctcataaagccatcataacatctgtgttcctataacctactgttaaataaacaactatggattagagctgattaattgcctcatgatcccatagttaacaaagtagctggcctgcagtttgaccatcagcctrcctgccttccaaatcctttctcttgctcctcagcatagattnatacataaaagacagcccttgnataatttatngagtgctgaatcagatcaatcggattcattaatttaattaacttctaaattaatgagagtttaaataccttgaactctcatttaagtttattgttagaatgtggttagtcctaataaatttgacgatttcagtggtaaccagtatcttatttttaccttcaaaggctctagggcagatctgacttagctttggccataggactgtaagttttaccaaagcaagtttaggcaagtcttagagacaaattatttgacttcccagtttggttttccatttaggc

SEQ ID NO: 446401 - DNA, 533 bp, Homo sapiens
tttaaggaatcttagaatgaattaaaataccttctagtatttttatctgcrttgaacattctggtcaagtgattctctagatagagaatgtgaggctcaaagagattaggaagcttttttttttagacataggaattggcagaaatgagatttgaactcatggtaaagcccagtactcttgcttctttttatgtcctattggcgtgtgttttaataatacaaacgggagtgagcctgtggatagaatgagaatggaattagctggtgaacccaatagaagtagataagaatggaatgagcaggggaagtccaagtttgaaagataacaacactggattggataggagtacggactcttctacaagagatcaaagtattggggtttatgacaagtttgataaagataaattataaaaatgaaggacacaagatgttgggaattatctacaaaggcacattaaaatagaaggttcaagggagctctaaaaattttgctgcttttttttttttttaaatcaaggactgacaaactt

SEQ ID NO: 446402 - DNA, 533 bp, Homo sapiens
tttaaggaatcttagaatgaattaaaataccttctagtatttttatctgcgttgaacattctggtcaagtgattctctagatagagaatgtgaggctcaaagagattaggaagcttttttttttagacataggaattggcagaaatgagatttgaactcatggtaaagcccagtactcttgcttctttttatgtcctattggcgtgtgttttaataatacaaacgggagtgagcctgtggatagaatgagaatggaattagctggtgaacccaatrgaagtagataagaatggaatgagcaggggaagtccaagtttgaaagataacaacactggattggataggagtacggactcttctacaagagatcaaagtattggggtttatgacaagtttgataaagataaattataaaaatgaaggacacaagatgttgggaattatctacaaaggcacattaaaatagaaggttcaagggagctctaaaaattttgctgcttttttttttttttaaatcaaggactgacaaactt

SEQ ID NO: 446403 - DNA, 533 bp, Homo sapiens
tttaaggaatcttagaatgaattaaaataccttctagtatttttatctgcgttgaacattctggtcaagtgattctctagatagagaatgtgaggctcaaagagattaggaagcttttttttttagacataggaattggcagaaatgagatttgaactcatggtaaagcccagtactcttgcttctttttatgtcctattggcgtgtgttttaataatacaaacgggagtgagcctgtggatagaatgagaatggaattagctggtgaacccaatagaagtagataagaatggaatgagcaggggaagtccaagtttgaaagataacaacactggaytggataggagtacggactcttctacaagagatcaaagtattggggtttatgacaagtttgataaagataaattataaaaatgaaggacacaagatgttgggaattatctacaaaggcacattaaaatagaaggttcaagggagctctaaaaattttgctgcttttttttttttttaaatcaaggactgacaaactt

SEQ ID NO: 446404 - DNA, 478 bp, Homo sapiens
gctattcacctaataagggactaatatacaaaatatacaaaaaaactcaaacaacttcacagtataaaaatctgagttcaaatttgggcaaaatatataactatacttttttttagaaaaagaaatccaaataaccaataaataaattttaaatgctcagtatcactaatcctcagggaaatacaaatcaaatctacaatgtgatataatcttgcttcaatttgaataaattgctgtcattgaaaagacaaaaaaaataacaaatgctsgtgaggctccagagaacagtaaactcttacatgctgttggtgggaaggtaaattagtgcagccactatagagaacaacaggaggttttctcaaaaaaactaataatgggactgccgagggatccagcaaccccactactgggtattcaggcaatagaaaagaaaacaatagatcaaaaggatacctgtcctcatatgtttactgtagca

SEQ ID NO: 446405 - DNA, 605 bp, Homo sapiens
caggtgatggagactccagttagcttgtttttcaggagcagggatatagagagctcctactcttggtcatttgaggccattctttcaggaatctgtgctttcatacactgaagatttgaagattggagacttctgtggaaccctgcagaagtagaatctggaagtgggtgtccataggaagaaagatacttagatagtacttagggaaatagaggtacaactatcatgactctgtttcttttctcgcagtctctctccttgggtgtctgagtgcctatgaaaatttttaagggcttgctagtttatgtggacctgaataaggtaggacctatagagtgaaaataatgggattttataattgttaatattttaatmtttctgggaaaagtattctcaataagaacatacacctttgctatttgacttctgtacatttagctttcatacatttcaaatattgtgggggctttcctgtaccaatttagggtaaaggaaagcaataggaccttcctaagttggatccatgctgaggaatcaagactaccattttgaagtgatgtagattagtcttttatccagagacaaatcacggaaaagagacagtg

SEQ ID NO: 446406 - DNA, 605 bp, Homo sapiens
caggtgatggagactccagttagcttgtttttcaggagcagggatatagagagctcctactcttggtcatttgaggccattctttcaggaatctgtgctttcatacactgaagatttgaagattggagacttctgtggaaccctgcagaagtagaatctggaagtgggtgtccataggaagaaagatacttagatagtacttagggaaatagaggtacaactatcatgactctgtttcttttctcgcagtctctctccttgggtgtctgagtgcctatgaaaatttttaagggcttgctagtttatgtggacctgaataaggtaggacctatagagtgaaaataatgggattttataattgttaatattttaatctttctgggaaaagtattctcartaagaacatacacctttgctatttgacttctgtacatttagctttcatacatttcaaatattgtgggggctttcctgtaccaatttagggtaaaggaaagcaataggaccttcctaagttggatccatgctgaggaatcaagactaccattttgaagtgatgtagattagtcttttatccagagacaaatcacggaaaagagacagtg

SEQ ID NO: 446407 - DNA, 395 bp, Homo sapiens
caactgagtgaagaaaaaacctgtagaataggagaaaatattgtcaagctattcacctaataagggactaatatacaaaatatacaaaaaaactcaaacaacttcacagtataaaaatctgagttcaaatttgggcaaaatatataactatacttttttttagaaaaagaaatccaaataaccaataaataaattttaaatgctcagtatcactaatcctcagggaaatacaaatcaaatctacaatgtgatataatcttgcttcaatttgaataaattgctgtcattgaaaagacaaaaaaaataacaaatgctcgtgaggctccagagaacagtaaactcttacwtgctgttggtgggaaggtaaattagtgcagccactatagagaacaaca

SEQ ID NO: 446408 - DNA, 557 bp, Homo sapiens
  misc_feature (1)...(557): n = A,T,C or G
nnnnnnnnnntcagtggatcaaattgtttgcagtaatcatggaatcctcctggtatttttagtggcagaaatgttcagcacatagcatatagcttttgttcttggaaayttatcattttggtgtcatatagtttttaggagagattgtttctcaacttatattattggttctgtagtgagactaaaaaagtattaaaaattgtagaaaaatagctgagtttggtggtgtacacctgtagtccctgctacttggtagtttgagacagtaagattgcttgaacacaggagtttgagaacagcctgggcaacattgtatctaatttaaaaatataaattgtggaaatgtagaaatttaaatttatgttctcaagatttgtattgcaaaggtatttttatgtgatttatgagttgtccatgaagagtttatataaaacacttcatctaattgaataacatgtattttcctgcaaataaccagttctagaagcagagactcttaataccaatatggtaagtctttatcatcataattttgtcattgtagtttatttaaaata

SEQ ID NO: 446409 - DNA, 557 bp, Homo sapiens
  misc_feature (1)...(557): n = A,T,C or G
nnnnnnnnnntcagtggatcaaattgtttgcagtaatcatggaatcctcctggtatttttagtggcagaaatgttcagcacatagcatatagcttttgttcttggaaatttatcattttggtgtcatatagtttttaggagagattgtttctcaacttatattattggttctgtagtgagactaaaaaagtattaaaaattgtagaaaaatagctgagtttggtggtgtacacctgtagtccctgctacttggkagtttgagacagtaagattgcttgaacacaggagtttgagaacagcctgggcaacattgtatctaatttaaaaatataaattgtggaaatgtagaaatttaaatttatgttctcaagatttgtattgcaaaggtatttttatgtgatttatgagttgtccatgaagagtttatataaaacacttcatctaattgaataacatgtattttcctgcaaataaccagttctagaagcagagactcttaataccaatatggtaagtctttatcatcataattttgtcattgtagtttatttaaaata

SEQ ID NO: 446410 - DNA, 557 bp, Homo sapiens
  misc_feature (1)...(557): n = A,T,C or G
nnnnnnnnnntcagtggatcaaattgtttgcagtaatcatggaatcctcctggtatttttagtggcagaaatgttcagcacatagcatatagcttttgttcttggaaatttatcattttggtgtcatatagtttttaggagagattgtttctcaacttatattattggttctgtagtgagactaaaaaagtattaaaaattgtagaaaaatagctgagtttggtggtgtacacctgtagtccctgctacttggtagtttgagacagtaagattgcttgaacacaggagtttgagaacagcctgggcaacattgtatctratttaaaaatataaattgtggaaatgtagaaatttaaatttatgttctcaagatttgtattgcaaaggtatttttatgtgatttatgagttgtccatgaagagtttatataaaacacttcatctaattgaataacatgtattttcctgcaaataaccagttctagaagcagagactcttaataccaatatggtaagtctttatcatcataattttgtcattgtagtttatttaaaata

SEQ ID NO: 446411 - DNA, 487 bp, Homo sapiens
atgttcagcacatagcatatagcttttgttcttggaaatttatcattttggtgtcatatagtttttaggagagattgtttctcaacttatattattggttctgtagtgagactaaaaaagtattaaaaattgtagaaaaatagctgagtttggtggtgtacacctgtagtccctgctacttggtagtttgagacagtaagattgcttgaacacaggagtttgagaacagcctgggcaacattgtatctaatttaaaaatataaattgtggaaatgtagaaatttaaatttatgttctcaagatttgtattgcaaaggkatttttatgtgatttatgagttgtccatgaagagtttatataaaacacttcatctaattgaataacatgtattttcctgcaaataaccagttctagaagcagagactcttaataccaatatggtaagtctttatcatcataattttgtcattgtagtttatttaaaata

SEQ ID NO: 446412 - DNA, 465 bp, Homo sapiens
agtttgagaacagcctgggcaacattgtatctaatttaaaaatataaattgtggaaatgtagaaatttaaatttatgttctcaagatttgtattgcaaaggtatttttatgtgatttatgagttgtccatgaagagtttatataaaacacttcatctaattgaataacwtgtattttcctgcaaataaccagttctagaagcagagactcttaataccaatatggtaagtctttatcatcataattttgtcattgtagtttatttaaaatatttacttggccaggcgtggtggctcacacctgtaatcccagcacttttggaggccgaggtgggtagatcacctgaggtcaggagttcaagatcagcctggccaacatggtgagaccctgtctctaaaaaaaaaaaaaaaaaaaaaaaaagcacaaaaattatccaggcatgatagtgcatgcctgtaatcccag

SEQ ID NO: 446413 - DNA, 577 bp, Homo sapiens
ccatatttagctaattgaatgtcttatagtaagaaacactatcacagaagtacttacaaaaaactaattgcagcataaatattaattagtattatcagagttatgaaagaccgaaggctctgttatagatctatttccccatgtactttattgtacttcatgyttttcgttttctttcttggcttaagctcatatttcattgactaattaggcttgttttttgtttgtatctctctttgttctcacattttaaattgaaatttttggggaggcagggtctagctctgttgtccatgctgcagtgtagtggcatgatcttggctcactgctgtatccacctctcaggctcaagtgatcctcccacatcagcttcccaagcagctgggactacaggcacacaccatcatgcctgactccttttggtattttttgtgtagagatgtgtcctcattatgttgcccaggctggtctccaactcctgaactcaagcaatccacccaccttggccttgcaaagggctgagattacaggtgtgagccaccgtgcctgggcaacattgagattgatttaaagaaat

SEQ ID NO: 446414 - DNA, 577 bp, Homo sapiens
ccatatttagctaattgaatgtcttatagtaagaaacactatcacagaagtacttacaaaaaactaattgcagcataaatattaattagtattatcagagttatgaaagaccgaaggctctgttatagatctatttccccatgtactttattgtacttcatgtttttcgttttctttcttggcttaagctcatatttcattgactaattaggcttgttttttgtttgtatctctctttgttctcacattttaaattgaaatttttggggaggcagggtctwgctctgttgtccatgctgcagtgtagtggcatgatcttggctcactgctgtatccacctctcaggctcaagtgatcctcccacatcagcttcccaagcagctgggactacaggcacacaccatcatgcctgactccttttggtattttttgtgtagagatgtgtcctcattatgttgcccaggctggtctccaactcctgaactcaagcaatccacccaccttggccttgcaaagggctgagattacaggtgtgagccaccgtgcctgggcaacattgagattgatttaaagaaat

SEQ ID NO: 446415 - DNA, 577 bp, Homo sapiens
ccatatttagctaattgaatgtcttatagtaagaaacactatcacagaagtacttacaaaaaactaattgcagcataaatattaattagtattatcagagttatgaaagaccgaaggctctgttatagatctatttccccatgtactttattgtacttcatgtttttcgttttctttcttggcttaagctcatatttcattgactaattaggcttgttttttgtttgtatctctctttgttctcacattttaaattgaaatttttggggaggcagggtctagctctgttgtmcatgctgcagtgtagtggcatgatcttggctcactgctgtatccacctctcaggctcaagtgatcctcccacatcagcttcccaagcagctgggactacaggcacacaccatcatgcctgactccttttggtattttttgtgtagagatgtgtcctcattatgttgcccaggctggtctccaactcctgaactcaagcaatccacccaccttggccttgcaaagggctgagattacaggtgtgagccaccgtgcctgggcaacattgagattgatttaaagaaat

SEQ ID NO: 446416 - DNA, 577 bp, Homo sapiens
ccatatttagctaattgaatgtcttatagtaagaaacactatcacagaagtacttacaaaaaactaattgcagcataaatattaattagtattatcagagttatgaaagaccgaaggctctgttatagatctatttccccatgtactttattgtacttcatgtttttcgttttctttcttggcttaagctcatatttcattgactaattaggcttgttttttgtttgtatctctctttgttctcacattttaaattgaaatttttggggaggcagggtctagctctgttgtccatgctgcagtgtagtggcatgatcttggctcactgctgtatccacctctcaggctcaagtgatcctcccacatcagcttcccaagcagctgggactacaggcacacaccatcatgcctgactccttttggtattttttgtgtagagatgtgtyctcattatgttgcccaggctggtctccaactcctgaactcaagcaatccacccaccttggccttgcaaagggctgagattacaggtgtgagccaccgtgcctgggcaacattgagattgatttaaagaaat

SEQ ID NO: 446417 - DNA, 580 bp, Homo sapiens
cttataacgtagtattaaattcagggacataataggaaagaagttgaggctaggccaaaaaggccaattagggtaaaccaatatggaagcacaccagtgtagaacagggcattcaaattgtcatgaattcgttgaggagcttctggaaagtgcacattctgactyagcaggtattggagtctgcatttctcatgagcactcaggtgatgtttgtgctggtccttggacacagctctgaatagcaagggaatagccttcctttagagaaatctggaaaaagaaccactggagagcaatttaaaaaataacagaatccagggaaagctttaatttccttttatttctgagcatgattctagccacaagggaaggaaaatgagatgaaaaaagagagattacaggtgtatactactgctgaatacagatgaaaaaagtggtcacaatcatccataaaaagcagttaggaagggaagcatcaggatgacagttctgataatcattttttcaaaggaagagggatggtgaatggacacaaaaggaggaaagaaagacatttgctggggtcttgggagttaaagcc

SEQ ID NO: 446418 - DNA, 580 bp, Homo sapiens
cttataacgtagtattaaattcagggacataataggaaagaagttgaggctaggccaaaaaggccaattagggtaaaccaatatggaagcacaccagtgtagaacagggcattcaaattgtcatgaattcgttgaggagcttctggaaagtgcacattctgacttagcaggtattggagtctgcatttctcatgagcactcaggtgatgtttgtgctggtccttggacacagctctgaatagcaagggaatagccttcctttagagaaatctggaaaaagaaccactggagagcaatttaaaaaataacagaatccagggaaagctttaatttccttttatttctgagcatgattctagccacaagggaaggaaaatgagatgaaaaaagagagattacaggtgtatactactgctgaatacagatgaaaaaagtggtcacaatcatccatawaaagcagttaggaagggaagcatcaggatgacagttctgataatcattttttcaaaggaagagggatggtgaatggacacaaaaggaggaaagaaagacatttgctggggtcttgggagttaaagcc

SEQ ID NO: 446419 - DNA, 606 bp, Homo sapiens
ggatgacagttctgataatcattttttcaaaggaagagggatggtgaatggacacaaaaggaggaaagaargacatttgctggggtcttgggagttaaagccaagtaaacttgagacaactcacttccagttgcttcagcatatgcccagtctcacaaaagaggttattgctgtggagagtactggagacaggagggagtgctagagttggggtaaaccacagcagctcatttcacttgataactgtcaggcctcagggagagaagtttcactgacatgagtgaataagatatgattaagttgcatatagatgctttggcgaaatttttttgagacagccagttctttgatatgatagctgttttataaaagtcctttacagtgtaagataatataccaaacttagttaattttagaagtaatcataaaattcattccatgaaaaccaaaattatcattttcaataaatactgcactgattttgaaatataaatatgtattaatatccagcaagtctgtggtcattcaatgttttcttttttgataaataatttgatatcagaagcttattcgacatggtttatttgatgtgttttatggaccacc

SEQ ID NO: 446420 - DNA, 577 bp, Homo sapiens
tttaatttccttttatttctgagcatgattctagccacaagggaaggaaaatgagatgaaaaaagagagattacaggtgtatactactgctgaatacagatgaaaaaagtggtcacaatcatccataaaaagcagttaggaagggaagcatcaggatgacagttctgataatcattttttcaaaggaagagggatggtgaatggacacaaaaggaggaaagaaagacatttgctggggtcttgggagttaaagccaagtaaacttgagacaactcacttccagttgcttcagcatawgcccagtctcacaaaagaggttattgctgtggagagtactggagacaggagggagtgctagagttggggtaaaccacagcagctcatttcacttgataactgtcaggcctcagggagagaagtttcactgacatgagtgaataagatatgattaagttgcatatagatgctttggcgaaatttttttgagacagccagttctttgatatgatagctgttttataaaagtcctttacagtgtaagataatataccaaacttagttaattttagaagtaatc

SEQ ID NO: 446421 - DNA, 606 bp, Homo sapiens
ggatgacagttctgataatcattttttcaaaggaagagggatggtgaatggacacaaaaggaggaaagaaagacatttgctggggtcttgggagttaaagccaagtaaacttgagacaactcacttccagttgcttcagcatatgcccagtctcacaaaagaggttattsctgtggagagtactggagacaggagggagtgctagagttggggtaaaccacagcagctcatttcacttgataactgtcaggcctcagggagagaagtttcactgacatgagtgaataagatatgattaagttgcatatagatgctttggcgaaatttttttgagacagccagttctttgatatgatagctgttttataaaagtcctttacagtgtaagataatataccaaacttagttaattttagaagtaatcataaaattcattccatgaaaaccaaaattatcattttcaataaatactgcactgattttgaaatataaatatgtattaatatccagcaagtctgtggtcattcaatgttttcttttttgataaataatttgatatcagaagcttattcgacatggtttatttgatgtgttttatggaccacc

SEQ ID NO: 446422 - DNA, 606 bp, Homo sapiens
ggatgacagttctgataatcattttttcaaaggaagagggatggtgaatggacacaaaaggaggaaagaaagacatttgctggggtcttgggagttaaagccaagtaaacttgagacaactcacttccagttgcttcagcatatgcccagtctcacaaaagaggttattgctgtggagagtactggagacaggagggagtgctagagttggggtaaaccacagcagctcatttcacttgataactgtcaggcctcagggagagaagtttmactgacatgagtgaataagatatgattaagttgcatatagatgctttggcgaaatttttttgagacagccagttctttgatatgatagctgttttataaaagtcctttacagtgtaagataatataccaaacttagttaattttagaagtaatcataaaattcattccatgaaaaccaaaattatcattttcaataaatactgcactgattttgaaatataaatatgtattaatatccagcaagtctgtggtcattcaatgttttcttttttgataaataatttgatatcagaagcttattcgacatggtttatttgatgtgttttatggaccacc

SEQ ID NO: 446423 - DNA, 461 bp, Homo sapiens
cccagtctcacaaaagaggttattgctgtggagagtactggagacaggagggagtgctagagttggggtaaaccacagcagctcatttcacttgataactgtcaggcctcagggagagaagtttcactgacatgagtgaataagatatgattaasttgcatatagatgctttggcgaaatttttttgagacagccagttctttgatatgatagctgttttataaaagtcctttacagtgtaagataatataccaaacttagttaattttagaagtaatcataaaattcattccatgaaaaccaaaattatcattttcaataaatactgcactgattttgaaatataaatatgtattaatatccagcaagtctgtggtcattcaatgttttcttttttgataaataatttgatatcagaagcttattcgacatggtttatttgatgtgttttatggaccacc

SEQ ID NO: 446424 - DNA, 461 bp, Homo sapiens
cccagtctcacaaaagaggttattgctgtggagagtactggagacaggagggagtgctagagttggggtaaaccacagcagctcatttcacttgataactgtcaggcctcagggagagaagtttcactgacatgagtgaataagatatgattaagttgcatatagatgctttggcgaaatttttttgagacagccagttctttgatatgatagctgttttataaaagtcctttacagtgtaagataatataccaaacttagttaattttagaagtaatcataaaattcattccatgaaaaccaaaattatcattttcaataaatactgcactgattttgaaatataaatatgtattaatatcyagcaagtctgtggtcattcaatgttttcttttttgataaataatttgatatcagaagcttattcgacatggtttatttgatgtgttttatggaccacc

SEQ ID NO: 446425 - DNA, 463 bp, Homo sapiens
ccagttctttgatatgatagctgttttataaaagtcctttacagtgtaagataatataccaaacttagttaattttagaagtaatcataaaattcattccatgaaaaccaaaattatcattttcaataaatactgcactgattttgaaatataaatatgtattaatatccagcaagtctgtggtcattcaatgttttcttttttgataaatawtttgatatcagaagcttattcgacatggtttatttgatgtgttttatggaccacccttgcatgagtggatcaaggagctctaattcaaggccaaatgaggggataggagaaatgtaggtgctgcagtagcccatgtgatcatgggaaaaatgagtactttgattagctgttatttcataagtgtgtatcctagctgatcaatgtagaaccctttctttgatgagaggtgaatcccacattcacctgaact

SEQ ID NO: 446426 - DNA, 313 bp, Homo sapiens
ttcactgacatgagtgaataagatatgattaagttgcatatagatgctttggcgaaatttttttgagacagccagttctttgatatgatagctgttttataaaagtcctttacagtgtaagataatataccaaacttagttaattttagaagtaatcataaaattcattccatgaaaaccaaaattatcattttcaataaatactgcactgattttgaaatataaatatgtattaatatccagcaagtctgtggtcattcaatgttttcttttttgataaataatttsatatcagaagcttattcgacatggt

SEQ ID NO: 446427 - DNA, 444 bp, Homo sapiens
gagacagccagttctttgatatgatagctgttttataaaagtcctttacagtgtaagataatataccaaacttagttaattttagaagtaatcataaaattcattccatgaaaaccaaaattatcattttcaataaatactgcactgattttgaaatataaatatgtattaatatccagcaagtctgtggtcattcaatgttttcttttttgataaataatttgatatcagaagcttattcgacatggtttatttgatgtgttttatggaccacccttgcatgagtggatcaaggagctctaattcaaggccaaatgaggggataggagaaatgtaggtgctgcagtagcccatgtgatcatgggaaaaatgagtastttgattagctgttatttcataagtgtgtatcctagctgatcaatgtagaaccctttctttgatgag

SEQ ID NO: 446428 - DNA, 551 bp, Homo sapiens
tttacctattaaagtgtcagtttctgttttaacttcagaggcttgctgctagtgttattacactgatgatctgaagcttatcagatgttctaatgagcaagactgtgtgtgtaggtgtatatatagatgtgtgtatgcgtgygcttgtggcatctttcactattacaaatgacgaaagtaatgattcatttatgactggtagacacagtcttttaaaatggtgattttgagcctttttagtgttaaagtttttaaaacatgattgcatagaggctaccaacatcataagttggttgtttttcatttcaatgcccttttgaaatctttaactacattgtgatgcccagaaataatatgcagaattttttgtgtcctaaaatagtatgtgagtggttatatactttatatacctttctgccactttctttggtgtgttttgtattatattttccacttgtacccacattggtgtgattatctctggtttaattcattttacactgttcattgtattccctcataccactttaccacatttagttagactctcc

SEQ ID NO: 446429 - DNA, 522 bp, Homo sapiens
tgctgggctgttctcagaaaagaaaactgaaaatagcaaatgatattgtcttattttacctcttggacatccttgaatgaaactgctactaaagggatactcggatcaaaattcagatctaatgttttgaacagtatagtttgtgaatgtccagtgatcatgagcccttgatggggaaatgacctttcgagtttcacttttgcattttttgctcktttcgttgacttgtcttgaaagcttaaattcaactattttatttttacagaaatcaggaatataacttttaaaatatatgtctgtcctgtctcacggtgttgtgtactcttcagatcttgtatgaacatagacttatatgggaacaattaggttttttgtttgtttgtttttgtttttgagacagagtcttgctctgtcaccaaggctggagtgcagtggctcagtcttggctcattaccacctctgcctctcaggttcaagcaattctcctgcctcagcccctcgagtagctgatactacatgcac

SEQ ID NO: 446430 - DNA, 522 bp, Homo sapiens
tgctgggctgttctcagaaaagaaaactgaaaatagcaaatgatattgtcttattttacctcttggacatccttgaatgaaactgctactaaagggatactcggatcaaaattcagatctaatgttttgaacagtatagtttgtgaatgtccagtgatcatgagcccttgatggggaaatgacctttcgagtttcacttttgcattttttgctcgtttcgttgacttgtcttgaaagcttaaattcaactattttatttttacagaaaycaggaatataacttttaaaatatatgtctgtcctgtctcacggtgttgtgtactcttcagatcttgtatgaacatagacttatatgggaacaattaggttttttgtttgtttgtttttgtttttgagacagagtcttgctctgtcaccaaggctggagtgcagtggctcagtcttggctcattaccacctctgcctctcaggttcaagcaattctcctgcctcagcccctcgagtagctgatactacatgcac

SEQ ID NO: 446431 - DNA, 522 bp, Homo sapiens
tgctgggctgttctcagaaaagaaaactgaaaatagcaaatgatattgtcttattttacctcttggacatccttgaatgaaactgctactaaagggatactcggatcaaaattcagatctaatgttttgaacagtatagtttgtgaatgtccagtgatcatgagcccttgatggggaaatgacctttcgagtttcacttttgcattttttgctcgtttcgttgacttgtcttgaaagcttaaattcaactattttatttttacagaaatcaggaatataacttttaaaatatatgtctgtcctgtctcacggtgttgtgtactcttcagatcttgtatgaacatagacttatatgggaacaattaggttttttgtttgtttgtttktgtttttgagacagagtcttgctctgtcaccaaggctggagtgcagtggctcagtcttggctcattaccacctctgcctctcaggttcaagcaattctcctgcctcagcccctcgagtagctgatactacatgcac

SEQ ID NO: 446432 - DNA, 566 bp, Homo sapiens
gaaaacaacatatataacagagatggttgagtgattgaaagtaaactgtagtaaataccagaagcttagaacaagttaagtaaacttgtctgagttaatagcaattacaagacttttaaaatacattggaccacgggggagtagtgcatttgtggggtagaggacaacatggtactgcttcagtgaagaaagaacttttacaccttattacaatttgtattattattcacattctaataaataaaaactttattttcagatattttacatcatgtttctactagttgaaccatcaatagtaagacttttcaaagatttgggaagttgtgagttgatgataaatatctgtatcaccatcagtgatcaaaaatcagacagcaactaccayagattttggacatgcgaacttcatagttaaagaaaggattaatcttggagctgtgtttctatcaaggaattacactcttcattacctgtgtgaatcgcagttattagagtagaaagagagcaaagaagggaaagaagcatagaaaattttattctagattacctcgtttggcttcatg

SEQ ID NO: 446433 - DNA, 583 bp, Homo sapiens
acatatataacagagatggttgagtgattgaaagtaaactgtagtaaataccagaagcttagaacaagttaagtaaacttgtctgagttaatagcaattacaagacttttaaaatacattggaccacgggggagtagtgcatttgtggggtagaggacaacatggtactgcttcagtgaagaaagaacttttacaccttattacaatttgtattattattcacattctaataaataaaaactttattttcagatattttacatcatgtttctactagttgaaccatcaatagtaagacttttcaaagatttgggaagttgtgagttgatgataaatatctgtatcaccatcagtgatcaaaaatcagacagcaactaccatagattttggacaygcgaacttcatagttaaagaaaggattaatcttggagctgtgtttctatcaaggaattacactcttcattacctgtgtgaatcgcagttattagagtagaaagagagcaaagaagggaaagaagcatagaaaattttattctagattacctcgtttggcttcatgctaccatagttctgacttttaaag

SEQ ID NO: 446434 - DNA, 583 bp, Homo sapiens
acatatataacagagatggttgagtgattgaaagtaaactgtagtaaataccagaagcttagaacaagttaagtaaacttgtctgagttaatagcaattacaagacttttaaaatacattggaccacgggggagtagtgcatttgtggggtagaggacaacatggtactgcttcagtgaagaaagaacttttacaccttattacaatttgtattattattcacattctaataaataaaaactttattttcagatattttacatcatgtttctactagttgaaccatcaatagtaagacttttcaaagatttgggaagttgtgagttgatgataaatatctgtatcaccatcagtgatcaaaaatcagacagcaactaccatagattttggacatgcgaacttcatagttaaagaaaggattaatcttggagctgtgtttctatcaaggaattacactcttcwttacctgtgtgaatcgcagttattagagtagaaagagagcaaagaagggaaagaagcatagaaaattttattctagattacctcgtttggcttcatgctaccatagttctgacttttaaag

SEQ ID NO: 446435 - DNA, 640 bp, Homo sapiens
  misc_feature (1)...(640): n = A,T,C or G
agcaacatataaataagaaagggaatgagaagaaagagtgatttcattgaggttggtatttaacataaatttgagtrcaggtaccatgattatatttagaattttgtggctggatgggaaaaccagctagatgtctatagatttcctactcaaacacaatgtgcctttgntttacttttacgtctctaatttagcaattattaggtacaactgtatgcagtgtcactaaaaatacctcccaaaaccaaatattaaataatgtctatggctttctgttttatagtgttgattttcccaatattaatgggaaccactgagcatttgccttgtggtgtctcctcagctgtattcacatattccatcaccttttcttaatggataatcacgcactatgagtaagggttttcagaaaagctgtgtcatttaaagataacacaggagcatcaaatttaattctgctaggacgcctggtctactgattaactgcagctaatatgaggtctacttcacatccaagttaaattcagtgcccttaatcagtcatatgatgaggtcaacagtaataaattatgcaatattttttcacccacccctatagttttaatttctttttccccttatgtctgtgtttaacattttg

SEQ ID NO: 446436 - DNA, 640 bp, Homo sapiens
  misc_feature (1)...(640): n = A,T,C or G
agcaacatataaataagaaagggaatgagaagaaagagtgatttcattgaggttggtatttaacataaatttgagtacaggtwccatgattatatttagaattttgtggctggatgggaaaaccagctagatgtctatagatttcctactcaaacacaatgtgcctttgntttacttttacgtctctaatttagcaattattaggtacaactgtatgcagtgtcactaaaaatacctcccaaaaccaaatattaaataatgtctatggctttctgttttatagtgttgattttcccaatattaatgggaaccactgagcatttgccttgtggtgtctcctcagctgtattcacatattccatcaccttttcttaatggataatcacgcactatgagtaagggttttcagaaaagctgtgtcatttaaagataacacaggagcatcaaatttaattctgctaggacgcctggtctactgattaactgcagctaatatgaggtctacttcacatccaagttaaattcagtgcccttaatcagtcatatgatgaggtcaacagtaataaattatgcaatattttttcacccacccctatagttttaatttctttttccccttatgtctgtgtttaacattttg

SEQ ID NO: 446437 - DNA, 640 bp, Homo sapiens
  misc_feature (1)...(640): n = A,T,C or G
agcaacatataaataagaaagggaatgagaagaaagagtgatttcattgaggttggtatttaacataaatttgagtacaggtaccatgattatatttagaattttgtggctggatgggaaaaccagctagatgtctatagatttcctactcaaacacaatgtgcctttgntttacttttacgtctctaatttagcaattattaggtacaactgtatgcagtgtcactaaaaatacctcccaaaaccaaatattaaataatgtctatggctttctgttttatagtgttgattttcccaatattaatgggaaccactgagcatttgccttgtggtgtctcctcagctgtattcacatattccatcaccttttcttaatggataatcacgcrctatgagtaagggttttcagaaaagctgtgtcatttaaagataacacaggagcatcaaatttaattctgctaggacgcctggtctactgattaactgcagctaatatgaggtctacttcacatccaagttaaattcagtgcccttaatcagtcatatgatgaggtcaacagtaataaattatgcaatattttttcacccacccctatagttttaatttctttttccccttatgtctgtgtttaacattttg

SEQ ID NO: 446438 - DNA, 603 bp, Homo sapiens
ggttgaagtagtaaatgtgctagttagcttgatcattacacactatatacatgtataaaaatatcactctatagcccataattatgtatatatgtgtcaattaaaacaaaagagaagctacattcatcccatttaaaaagcagaatrtgggccagccttactgacttccttctaatgagtagaatgtagtgaaagggataccatgtggcttccctatctcagactgttttcccttggaacccagccccaattgtgagggcctgaaagtgcctgtgtcagtgttcatgctgcctgtcccaaccaagtttacagccgatggccagcatcaaccatcaaacaagtgggtgaccaaagcttcagaggattccatttccccaactgatcagctcttcctagggaagctgaagggagcagagacaagctgttctggacaagtttttcccaaaccacaggttcatgaacaaaataaatgtttttctttcaagccacaagactctgggtaattgttagaaaaataacttttaaaaagagacaacaggaaacataacttatgcagcagaaaagtctcctttaaagtaggatctaataaatgttgagatttat

SEQ ID NO: 446439 - DNA, 425 bp, Homo sapiens
atttgccttgtggtgtctcctcagctgtattcacatattccatcaccttttcttaatggataatcacgcactatgagtaagggttttcagaaaagctgtgtcatttaaagataacacaggagcatcaaatttaattctgctaggacgcctggtctactgattaactgcagctaatatgaggtctacttcacatccaagttaaattcagtgcccttaatcagtcatatgatgaggtcaacagtaataaattatgcaatattttttcacccacccctatagttttaatttctttttccccttrtgtctgtgtttaacattttgctttgcaaaacatgatgataatcttctagagtagtgaggacaagctataaatccaaagtttcttacctatgcaaatgacttgtttgctctattttctcatgagc

SEQ ID NO: 446440 - DNA, 550 bp, Homo sapiens
aatcacttctgaatacctaatgtctaagcatctccaaggtttatataaggatttcagaaactgacttctgggttgggcacggtggctcatgtctgtgatcccagcactttgggaggctgaggcaagtggatcatttgagatcaggagttcaagaccagcctggccaacaaggtgaaaccccatctctaataaaatacaaaaattagcaggtggtagtggcacgcgcctgtaatctcagctactcaggaggctgaggtagragaattacttgaacctgggaggccgggttgcagtgagctgagatcatgccactgccctccagtctgggagacagagtataaccttgtcccaaaaaagaaaagaaaaggaaactgatttctgcccaaatctccatctgtatccctttccccatctgcctttttctctggaattactgagctgctggtaatggccccctcaccattcctcttctgcagagaaatacatacgctcttggaggcttctcttcctctcttgttgctgcctggcatgtgctcaccctttcctgccc

SEQ ID NO: 446441 - DNA, 593 bp, Homo sapiens
ccagcactttgggaggctgaggcaagtggatcatttgagatcaggagttcaagaccagcctggccaacaaggtgaaaccccatctctaataaaatacaaaaattagcaggtggtagtggcacgcgcctgtaatctcagctactcaggaggctgaggtaggagaattacttgaacctgggaggccgggttgcagtgagctgagatcatgccactgccctccagtctgggagacagagtataaccttgtcccaaaaaagaaaagaaaaggaaactgatttctgcccaaatctccatctgtatccctttccccatctgcctttttctctggaattactgagytgctggtaatggccccctcaccattcctcttctgcagagaaatacatacgctcttggaggcttctcttcctctcttgttgctgcctggcatgtgctcaccctttcctgccctctgcctcgcttaatctggctaacctcactctctaagtctcagctcatggatgatctttaggaaagccatccctgacagcttctattttccttccttattccccagtgcctaacacttagcaggaactcaataagtaattatt

SEQ ID NO: 446442 - DNA, 448 bp, Homo sapiens
tgctcaccctttcctgccctctgcctcgcttaatctggctaacctcactctctaagtctcagctcatggatgatctttaggaaagccatccctgacagcttctattttccttccttattccccagtgcctaacacttagcaggaactcaataagtaattatttagcaaaattaagactgyttatacaaagatgattcaaaagattatcctctacagtctagcagcaaaggggtcaacatgtaaagacatgatgtgcaggtcaggtggtaaagtgacactagaaaaattgacaaggtactaagggaccccaacgaagcagacacctgtgtgtgtggagaaagatacctagaatcaaggaagatttcacatagcattctgagccttttttttttcctctttttggagacaagttcttactctatcacccaggattggagtgcaatggcat

SEQ ID NO: 446443 - DNA, 448 bp, Homo sapiens
tgctcaccctttcctgccctctgcctcgcttaatctggctaacctcactctctaagtctcagctcatggatgatctttaggaaagccatccctgacagcttctattttccttccttattccccagtgcctaacacttagcaggaactcaataagtaattatttagcaaaattaagactgcttatacaaagatgattcaaaagattatcctctacagtctagcagcaaaggggtcaacatgtaaagacatgatgtgcaggtcaggtggtaaagtgacactagaaaaattgacaaggtactaagggaccccaacgaagcagacacctgtgtgtgtggagaaagatasctagaatcaaggaagatttcacatagcattctgagccttttttttttcctctttttggagacaagttcttactctatcacccaggattggagtgcaatggcat

SEQ ID NO: 446444 - DNA, 448 bp, Homo sapiens
tgctcaccctttcctgccctctgcctcgcttaatctggctaacctcactctctaagtctcagctcatggatgatctttaggaaagccatccctgacagcttctattttccttccttattccccagtgcctaacacttagcaggaactcaataagtaattatttagcaaaattaagactgcttatacaaagatgattcaaaagattatcctctacagtctagcagcaaaggggtcaacatgtaaagacatgatgtgcaggtcaggtggtaaagtgacactagaaaaattgacaaggtactaagggaccccaacgaagcagacacctgtgtgtgtggagaaagatacctagaatcaaggaagatttcacatagcattctgagcctttttttyttcctctttttggagacaagttcttactctatcacccaggattggagtgcaatggcat

SEQ ID NO: 446445 - DNA, 590 bp, Homo sapiens
tcctcgtcctgtctaattttttgtagaggcaaggttacctatggttcccaggctggtcttaaacycttggccttgagcgattctcccattttggccttccaaagtgctgggattacagatgtgagctattatgcccagcctactttctgagtcttaaaagatgaaaataaatttttcagaatagcaggggaaaacatttgtgatgtaaaaaatggggtgcacactaattgaggtataaacaacaataattttgcaaattattagtaactgccaactcaattagtgtcttgttaaaaagatactgttatgaagtataataaagcattacgttgtatattttgactgtgtttcaaatttctgttttgtttccaacagttttgttgacttatgttgggtggaacaatttgtgagtgaccctgagattttacatggcttgaatctggtgatatctggtgtctccccaagtggtttgttgaagttttggataattagaagtatttcttacagaagtaaatatttcagtaaacattgtttcattcaaactctcaaaatataaaatacaaagaaatgttattctctatttattttta

SEQ ID NO: 446446 - DNA, 590 bp, Homo sapiens
tcctcgtcctgtctaattttttgtagaggcaaggttacctatggttcccaggctggtcttaaacccttggccttgagcgattctcccattttggccttccaaagtkctgggattacagatgtgagctattatgcccagcctactttctgagtcttaaaagatgaaaataaatttttcagaatagcaggggaaaacatttgtgatgtaaaaaatggggtgcacactaattgaggtataaacaacaataattttgcaaattattagtaactgccaactcaattagtgtcttgttaaaaagatactgttatgaagtataataaagcattacgttgtatattttgactgtgtttcaaatttctgttttgtttccaacagttttgttgacttatgttgggtggaacaatttgtgagtgaccctgagattttacatggcttgaatctggtgatatctggtgtctccccaagtggtttgttgaagttttggataattagaagtatttcttacagaagtaaatatttcagtaaacattgtttcattcaaactctcaaaatataaaatacaaagaaatgttattctctatttattttta

SEQ ID NO: 446447 - DNA, 543 bp, Homo sapiens
cttatgttgggtggaacaatttgtgagtgaccctgagattttacatggcttgaatctggtgatatctggtgtctccccaagtggtttgttgaagttttggataattagaagtatttcttacagaagtaaatatttcagtaaacattgtttcattcaaactctcaaaatataaaatacaaagaaatgttattctctatttatttttataaagattatagtcyttatctaactcttcttagttcatttgaactaaatcaatgactttgtcaacagaacaaaccttaccagtggctttagaggaagagcaagaaaggtgtgaaagaagtgaaaagaagcaatcacaggtatatgaaaatttaagttcttgtttaatattaggggttttttttgctttactaacaaagcatagtccaaatgacatgacctttcagactatacctttagaatccaatagatcataattttatatttaatttttaaaacatcttaaccagttatgaaacttaagatattcttactatctctagtaactattagttattc

SEQ ID NO: 446448 - DNA, 617 bp, Homo sapiens
ttacatggcttgaatctggtgatatctggtgtctccccaagtggtttgttgaagttttggataattagaagtatttcttacagaagtaaatatttcagtaaacattgtttcattcaaactctcaaaatataaaatacaaagaaatgttattctctatttatttttataaagattatagtccttatctaactcttcttagttcatttgaactaaatcaatgamtttgtcaacagaacaaaccttaccagtggctttagaggaagagcaagaaaggtgtgaaagaagtgaaaagaagcaatcacaggtatatgaaaatttaagttcttgtttaatattaggggttttttttgctttactaacaaagcatagtccaaatgacatgacctttcagactatacctttagaatccaatagatcataattttatatttaatttttaaaacatcttaaccagttatgaaacttaagatattcttactatctctagtaactattagttattctagtaattcttagtatctctagtaattcatagctgtatttacccttagaattgaggcaagaaattttcagaattatcttgctgttttatttatataaccttactcataatacac

SEQ ID NO: 446449 - DNA, 543 bp, Homo sapiens
cttatgttgggtggaacaatttgtgagtgaccctgagattttacatggcttgaatctggtgatatctggtgtctccccaagtggtttgttgaagttttggataattagaagtatttcttacagaagtaaatatttcagtaaacattgtttcattcaaactctcaaaatataaaatacaaagaaatgttattctctatttatttttataaagattatagtccttatctaactcttcttagttcatttgaactaaatcaatgactttgtcaacagaacaaaccttaccagtggctttagaggaagagcaagaaaggtgtgaaagaagtgaaaagaagcaatcacaggtatatgaaaatttaagttcttgtttaatattaggggttttttttgctttactaacaaagcatagtmcaaatgacatgacctttcagactatacctttagaatccaatagatcataattttatatttaatttttaaaacatcttaaccagttatgaaacttaagatattcttactatctctagtaactattagttattc

SEQ ID NO: 446450 - DNA, 617 bp, Homo sapiens
ttacatggcttgaatctggtgatatctggtgtctccccaagtggtttgttgaagttttggataattagaagtatttcttacagaagtaaatatttcagtaaacattgtttcattcaaactctcaaaatataaaatacaaagaaatgttattctctatttatttttataaagattatagtccttatctaactcttcttagttcatttgaactaaatcaatgactttgtcaacagaacaaaccttaccagtggctttagaggaagagcaagaaaggtgtgaaagaagtgaaaagaagcaatcacaggtatatgaaaatttaagttcttgtttaatattaggggttttttttgctttactaacaaagcatagtccaaatgacatgacctttcagactatacctttagaayccaatagatcataattttatatttaatttttaaaacatcttaaccagttatgaaacttaagatattcttactatctctagtaactattagttattctagtaattcttagtatctctagtaattcatagctgtatttacccttagaattgaggcaagaaattttcagaattatcttgctgttttatttatataaccttactcataatacac

SEQ ID NO: 446451 - DNA, 561 bp, Homo sapiens
ttcagtaaacattgtttcattcaaactctcaaaatataaaatacaaagaaatgttattctctatttatttttataaagattatagtccttatctaactcttcttagttcatttgaactaaatcaatgactttgtcaacagaacaaaccttaccagtggctttagaggaagagcaagaaaggtgtgaaagaagtgaaaagaagcaatcacaggtatatgaaaatttaagttcttgtttaatattaggggttttttttgctttactaacaaagcatagtccaaatgacatgacctttcagactatacctttagaatccaatagatcataattttatatktaatttttaaaacatcttaaccagttatgaaacttaagatattcttactatctctagtaactattagttattctagtaattcttagtatctctagtaattcatagctgtatttacccttagaattgaggcaagaaattttcagaattatcttgctgttttatttatataaccttactcataatacacaaggtaacatgaagtattgggtcatattactgaggaa

SEQ ID NO: 446452 - DNA, 543 bp, Homo sapiens
cttatgttgggtggaacaatttgtgagtgaccctgagattttacatggcttgaatctggtgatatctggtgtctccccaagtggtttgttgaagttttggataattagaagtatttcttacagaagtaaatatttcagtaaacattgtttcattcaaactctcaaaatataaaatacaaagaaatgttattctctatttatttttataaagattatagtccttatctaactcttcttagttcatttgaactaaatcaatgactttgtcaacagaacaaaccttaccagtggctttagaggaagagcaagaaaggtgtgaaagaagtgaaaagaagcaatcacaggtatatgaaaatttaagttcttgtttaatattaggggttttttttgctttactaacaaagcatagtccaaatgacatgacctttcagactatacctttagaatccaatagatcataattttatatttaatttttaaaacatcttaaccagttatgaaacttaagwtattcttactatctctagtaactattagttattc

SEQ ID NO: 446453 - DNA, 582 bp, Homo sapiens
ttttagttacaatcccataatttaagagtagcaacacatagattaagtttcacagttaaattttaattattttctaatatttctttgtttatacttgattaaagctaattttaaaacatgcactctgacagaaaagacatctgagaaacaaaacaagcaaatttgttttccattttgcacctgccccccaccaaaaaaagtctcaagaaccagaactgggtaagaacagtgataaagggaatcaatctatatattcatgactttctttaaaattyattacaaacaagttcaagctgaatattggtaaaagttctgaaaactccaaaattactacttgccctgaggaagagctcctacatggtaactctaaagagggatgaacaaaaaaggagtgccctctagtctgatgaatcatgtccctgattgtgaggagaaaaatgtatctggagggtctagctctgtggcagtccaggcagcgcctgaacagaggaagcccatgtcaaatgtctttttattccattcacactccaggtccctgaaatacacttaccagtcatcttctaagcttcatttaatttaaaa

SEQ ID NO: 446454 - DNA, 582 bp, Homo sapiens
ttttagttacaatcccataatttaagagtagcaacacatagattaagtttcacagttaaattttaattattttctaatatttctttgtttatacttgattaaagctaattttaaaacatgcactctgacagaaaagacatctgagaaacaaaacaagcaaatttgttttccattttgcacctgccccccaccaaaaaaagtctcaagaaccagaactgggtaagaacagtgataaagggaatcaatctatatattcatgactttctttaaaattcattacaaacaagttcaagctgaatattggtaaaagttctgaaaactccaaaattactacttgcmctgaggaagagctcctacatggtaactctaaagagggatgaacaaaaaaggagtgccctctagtctgatgaatcatgtccctgattgtgaggagaaaaatgtatctggagggtctagctctgtggcagtccaggcagcgcctgaacagaggaagcccatgtcaaatgtctttttattccattcacactccaggtccctgaaatacacttaccagtcatcttctaagcttcatttaatttaaaa

SEQ ID NO: 446455 - DNA, 601 bp, Homo sapiens
attcacactccaggtccctgaaatacacttaccagtcatcttctaagcttcatttaatttaaaataaatcagactataaaaatgataacaaaccagacacacagcttgtttctaacacagatgatggaaatttttgttatgatatagaaactgaaaaagtaaggaacccagtaattatgattgaaatgaaagatgattaagagtttgacatgcaaatggaaaaatatataaacccaaataccactaattggaaattaggcattggtctcagtctagagatccagaaagcctttttgatttgtggtttacccaccccaaagaaatgaagcatatgattcagatagaaagtcacagtatttctgctgctacagatacttataaaaacagaaaaccaacacagtgcttattccagaagccgctgtatgacaatcccagtgttaatwactacaaaaccatgaatcttgaactataaaatgcgggttattctttgccacatagtgagagaacatcaaaaatatagctagaagacttacagcaagatatttcaaggtcaccaagatatcacatatatacatatgtaacaaacctgcacattgtgcac

SEQ ID NO: 446456 - DNA, 557 bp, Homo sapiens
tgtgcatctctgtttcagtaaaaggaggtcaatacagggaactgtggtctctgagaatgcaagatctgcactaagaaaaggattagcyacagtactacccaagagaaccagctaccaggaggaaagagggtctgtaaactgcaagatgatgacttcacttgatttccactgaggaaagctggtggttcagacttaaacttctccttcctcgatggtaaacatctatggaaggttctatgaattataatgagttagtaaaacataatgcactaaatattagactatgtcagcagatcctgcgaccaaaacttactgaaaatataactatagcgggaggcaatggaaaaaagactaaaggcttgaatggagaaaaaaagaaattaaatgtgtcttgtaagcctggcgtctgatcatgtcttagacgaagtaaggtataagctggccagagactcctttgtgacacaaaaggtgaaaaaaaagatattccactaaatttaatttttattatgacataagacaactggtaatatgcaacatgattgaaaaaaacttctcat

SEQ ID NO: 446457 - DNA, 611 bp, Homo sapiens
gtaaacatctatggaaggttctatgaattataatgagttagtaaaacataatgcactraatattagactatgtcagcagatcctgcgaccaaaacttactgaaaatataactatagcgggaggcaatggaaaaaagactaaaggcttgaatggagaaaaaaagaaattaaatgtgtcttgtaagcctggcgtctgatcatgtcttagacgaagtaaggtataagctggccagagactcctttgtgacacaaaaggtgaaaaaaaagatattccactaaatttaatttttattatgacataagacaactggtaatatgcaacatgattgaaaaaaacttctcattcaattcgattgggctttgacataagaatagacataaagaagctaagaattgacaatctaaaaataagctgcactttttacagtcaattgattttatgcaaacttaacgaaagaatacaatgggaaaagaatagtcttttcaacaaatggtggtgggacaactgggtatccataagaaaaagtaaataaagttcgaccaaatatcttatttaaaaattaactcaaaataaaatagttaactgtaaaagctaaaactataaaaccctca

SEQ ID NO: 446458 - DNA, 611 bp, Homo sapiens
gtaaacatctatggaaggttctatgaattataatgagttagtaaaacataatgcactaaatattagactatgtcagcagatcctgcgaccaaaacttwctgaaaatataactatagcgggaggcaatggaaaaaagactaaaggcttgaatggagaaaaaaagaaattaaatgtgtcttgtaagcctggcgtctgatcatgtcttagacgaagtaaggtataagctggccagagactcctttgtgacacaaaaggtgaaaaaaaagatattccactaaatttaatttttattatgacataagacaactggtaatatgcaacatgattgaaaaaaacttctcattcaattcgattgggctttgacataagaatagacataaagaagctaagaattgacaatctaaaaataagctgcactttttacagtcaattgattttatgcaaacttaacgaaagaatacaatgggaaaagaatagtcttttcaacaaatggtggtgggacaactgggtatccataagaaaaagtaaataaagttcgaccaaatatcttatttaaaaattaactcaaaataaaatagttaactgtaaaagctaaaactataaaaccctca

SEQ ID NO: 446459 - DNA, 557 bp, Homo sapiens
tgtgcatctctgtttcagtaaaaggaggtcaatacagggaactgtggtctctgagaatgcaagatctgcactaagaaaaggattagctacagtactacccaagagaaccagctaccaggaggaaagagggtctgtaaactgcaagatgatgacttcacttgatttccactgaggaaagctggtggttcagacttaaacttctccttcctcgatggtaaacatctatggaaggttctatgaattataatgagttagtaaaacataatgcactaaatattagactatgtcagcagatcctgcgaccaaaacttactgaaaatataactatagcgggaggcaatggaaaaaagactaaaggcttgaatggagaaaaaaagaaattaaatgtgtcttgtaagcctggcgtctgatcatgtcttagaygaagtaaggtataagctggccagagactcctttgtgacacaaaaggtgaaaaaaaagatattccactaaatttaatttttattatgacataagacaactggtaatatgcaacatgattgaaaaaaacttctcat

SEQ ID NO: 446460 - DNA, 611 bp, Homo sapiens
gtaaacatctatggaaggttctatgaattataatgagttagtaaaacataatgcactaaatattagactatgtcagcagatcctgcgaccaaaacttactgaaaatataactatagcgggaggcaatggaaaaaagactaaaggcttgaatggagaaaaaaagaaattaaatgtgtcttgtaagcctggcgtctgatcatgtcttagacgaagtaaggtataagctggccagagactcctttgtgacacaaaaggtgaaaaaaaagatattccactaaatttaatttttattatgacataagacaactggtaatatgcaacatgattgaaaaaaacttctcattcaattcgattgggcyttgacataagaatagacataaagaagctaagaattgacaatctaaaaataagctgcactttttacagtcaattgattttatgcaaacttaacgaaagaatacaatgggaaaagaatagtcttttcaacaaatggtggtgggacaactgggtatccataagaaaaagtaaataaagttcgaccaaatatcttatttaaaaattaactcaaaataaaatagttaactgtaaaagctaaaactataaaaccctca

SEQ ID NO: 446461 - DNA, 611 bp, Homo sapiens
gtaaacatctatggaaggttctatgaattataatgagttagtaaaacataatgcactaaatattagactatgtcagcagatcctgcgaccaaaacttactgaaaatataactatagcgggaggcaatggaaaaaagactaaaggcttgaatggagaaaaaaagaaattaaatgtgtcttgtaagcctggcgtctgatcatgtcttagacgaagtaaggtataagctggccagagactcctttgtgacacaaaaggtgaaaaaaaagatattccactaaatttaatttttattatgacataagacaactggtaatatgcaacatgattgaaaaaaacttctcattcaattcgattgggctttgacataagaatagacataaasaagctaagaattgacaatctaaaaataagctgcactttttacagtcaattgattttatgcaaacttaacgaaagaatacaatgggaaaagaatagtcttttcaacaaatggtggtgggacaactgggtatccataagaaaaagtaaataaagttcgaccaaatatcttatttaaaaattaactcaaaataaaatagttaactgtaaaagctaaaactataaaaccctca

SEQ ID NO: 446462 - DNA, 608 bp, Homo sapiens
ctttgtgacagcatttgccagtgttttcttagctatgactccaaaggaaaaatggattcaatggacttcaaaattgaaaactrctgtgcctcagaagacagtatgaagaagtgaaaaggtaagacgccaagtagaagaaagtatttgaaaagcgtgtatctgataagggacttacatatataggaaatataaataactcttgcaattaataaataacaagataagccaattttaaaaaatggtaaaagattttgaatagatatatctgcaaagcagatataaagatggataagcacattaatagatgcttaatgtaattagtcattaggaaaatgtaaatcaaaaccacatgtggtatcacttcacaccacaggataaaatctttgttcaagaaaaaagagggttagaaaaaaatgtaaagaaattaaaacccttatctaatgctgctgggaatgtaaagtgatgcagccactttggaaaacaaactggcagctccttaaagggttaagcataaagttaccatatgacacagaaattccagtcataagtataactccagaaaaataaaaacatacacaagcacaaaaactcatacataaatgtttaca

SEQ ID NO: 446463 - DNA, 608 bp, Homo sapiens
ctttgtgacagcatttgccagtgttttcttagctatgactccaaaggaaaaatggattcaatggacttcaaaattgaaaactactgtgcctcagaagacagtatgaagaagtgaaaaggtaagacgccaagtagaagaaagtatttgaaaagcgtgtatctgataagggacttacatatataggaaatataaataactcttgcaattaataaataacaagataagccaattttaaaaaatggtmaaagattttgaatagatatatctgcaaagcagatataaagatggataagcacattaatagatgcttaatgtaattagtcattaggaaaatgtaaatcaaaaccacatgtggtatcacttcacaccacaggataaaatctttgttcaagaaaaaagagggttagaaaaaaatgtaaagaaattaaaacccttatctaatgctgctgggaatgtaaagtgatgcagccactttggaaaacaaactggcagctccttaaagggttaagcataaagttaccatatgacacagaaattccagtcataagtataactccagaaaaataaaaacatacacaagcacaaaaactcatacataaatgtttaca

SEQ ID NO: 446464 - DNA, 608 bp, Homo sapiens
ctttgtgacagcatttgccagtgttttcttagctatgactccaaaggaaaaatggattcaatggacttcaaaattgaaaactactgtgcctcagaagacagtatgaagaagtgaaaaggtaagacgccaagtagaagaaagtatttgaaaagcgtgtatctgataagggacttacatatataggaaatataaataactcttgcaattaataaataacaagataagccaattttaaaaaatggtaaaagattttgaatagatatatctgcaaagcagatataaagatggataagcacattaatagatgcttaatgtaattagtcattaggaaaatgtaaatcaaaaccacatgtggtatcacttcacaccacaggataaaatctttgttcaagaaaaaagagggttagaaaaaaatgtaaagaaattaaaacccttawctaatgctgctgggaatgtaaagtgatgcagccactttggaaaacaaactggcagctccttaaagggttaagcataaagttaccatatgacacagaaattccagtcataagtataactccagaaaaataaaaacatacacaagcacaaaaactcatacataaatgtttaca

SEQ ID NO: 446465 - DNA, 563 bp, Homo sapiens
ggctacatcactggtcttcttttatttgtggctaaataaatgttgtgttagaagagtaaagagttcccagttacatgggatctatagttctacaaaatgaatgtatacataatccatgtaaatccttcacttattttaaaacaactttttaatttttaaattaaatttaatttgtgcatgtgtgtgagaccagagtgagaacagagatggccgccggtgaggggcrgtggtctcaccatgttgcccaggcaagtcttgaactccccttcaagtgccaccctcctcacctggcctccctcaccttgcctcttcccctctcactcctatgccagctcctgccattccccaccccctctgtagactgcaagactcaacaagtgacttgctgagcaaactctgctaagagatctgtttagggacacaggaggccaagtacacaaaaaagcaaaagaactagcatgcctttttcaatggatgtctattttacagggctggcttcagattattatagctttaaataaaaggaccgttttgtcatctcggcccatggcctacattatttc

SEQ ID NO: 446466 - DNA, 563 bp, Homo sapiens
ggctacatcactggtcttcttttatttgtggctaaataaatgttgtgttagaagagtaaagagttcccagttacatgggatctatagttctacaaaatgaatgtatacataatccatgtaaatccttcacttattttaaaacaactttttaatttttaaattaaatttaatttgtgcatgtgtgtgagaccagagtgagaacagagatggccgccggtgaggggcagtggtctcaccatgttgcccaggcargtcttgaactccccttcaagtgccaccctcctcacctggcctccctcaccttgcctcttcccctctcactcctatgccagctcctgccattccccaccccctctgtagactgcaagactcaacaagtgacttgctgagcaaactctgctaagagatctgtttagggacacaggaggccaagtacacaaaaaagcaaaagaactagcatgcctttttcaatggatgtctattttacagggctggcttcagattattatagctttaaataaaaggaccgttttgtcatctcggcccatggcctacattatttc

SEQ ID NO: 446467 - DNA, 518 bp, Homo sapiens
tgttgtgttaaatacactggattttgtcgttggagtgggaagaacagtgcagaatatctgcttgaytttttttatatttattacatgttaaaattattactatgattactatttgggacatactgagttaggtatatttaaaattaatttcaccttttcttttaatggggcttactagtacatttaaaattacatacgtggctcacatatttattggacagcacagctctagaagtttaggaagaaataagaaaaatattgagaataggtagcgacagtaggaagtttgacctcctgtaagactgattccaataaaactaataggtgatagttttaattggctttttcctactagaagaagtaagtgtactttacatgcctctttgttctccctctttccccttcaatttagtggttagcgtgtatttactacatcaggcttaatattcactaaacagtgttaagaagacttaggtaaatgattccctgatgaacacacttgatattcaaagcacttt

SEQ ID NO: 446468 - DNA, 518 bp, Homo sapiens
tgttgtgttaaatacactggattttgtcgttggagtgggaagaacagtgcagaatatctgcttgactttttttatatttattacatgttaaaattattactatgattactatttgggacatactgagttargtatatttaaaattaatttcaccttttcttttaatggggcttactagtacatttaaaattacatacgtggctcacatatttattggacagcacagctctagaagtttaggaagaaataagaaaaatattgagaataggtagcgacagtaggaagtttgacctcctgtaagactgattccaataaaactaataggtgatagttttaattggctttttcctactagaagaagtaagtgtactttacatgcctctttgttctccctctttccccttcaatttagtggttagcgtgtatttactacatcaggcttaatattcactaaacagtgttaagaagacttaggtaaatgattccctgatgaacacacttgatattcaaagcacttt

SEQ ID NO: 446469 - DNA, 368 bp, Homo sapiens
taacaccttttccttcccaccgttaatccttcacwaacattcagggagtctttagcaatttgcttatgggtaatctttcaataagtagaggctgaccctttcatgatttcatgtccctttgtcaccatgcacgtgattatgtgtcaacaaatgttcattacaagttgggttttctcaattagaatagtagcaaatcctaaacttttgttttagttgaagttgtattatgaactagctcagtatgtttgttaagtttatagagctttagcatacccaaaatgtcagttttaaacactgaagtccatggagttaataaaaatacagatatgaattcttttaataatttagttttagcagtcctatgaacc

SEQ ID NO: 446470 - DNA, 582 bp, Homo sapiens
tactgcagtggtgggagcactgggtgttgtcgtccacacctgaggacaagcagctttgttttggatcatgtatctgttattgtgatgtagccatttatttttcagggaatgatgccaaatgatgtttgtccctttgctttacatttttatagctaggtctttgaagctgaactggaggaacttcttagccaatactgtcttctcaaaccaaaagttgacagttgcagaagacacrttttttagtgtcatggcaaccaagcaacatattaccttaaattaaatttagaggttgagcatccctaatctgaaaatctgaaatttgaaatgcttcaaaatctgaaactttttgagcactgacatgacaccacatgtggattttgatgtcccagtcgaagtgcaggtgtacaacacacagtttatttgatgttctcttgtgaaaaaagaccctctcatcccccttcagctgcagtataaattttctatacatgctcagatttccccaagcaagcacacacacaaagggtcacagaatggcacatgtgcaagctggacacgccaatggcaggatccccacagatggga

SEQ ID NO: 446471 - DNA, 582 bp, Homo sapiens
tactgcagtggtgggagcactgggtgttgtcgtccacacctgaggacaagcagctttgttttggatcatgtatctgttattgtgatgtagccatttatttttcagggaatgatgccaaatgatgtttgtccctttgctttacatttttatagctaggtctttgaagctgaactggaggaacttcttagccaatactgtcttctcaaaccaaaagttgacagttgcagaagacacattttttagtgtcatggcaaccaagcaacatattaccttaaattaaatttagaggttgagcatccctaatctgaaaatctgaaatttgaratgcttcaaaatctgaaactttttgagcactgacatgacaccacatgtggattttgatgtcccagtcgaagtgcaggtgtacaacacacagtttatttgatgttctcttgtgaaaaaagaccctctcatcccccttcagctgcagtataaattttctatacatgctcagatttccccaagcaagcacacacacaaagggtcacagaatggcacatgtgcaagctggacacgccaatggcaggatccccacagatggga

SEQ ID NO: 446472 - DNA, 582 bp, Homo sapiens
tactgcagtggtgggagcactgggtgttgtcgtccacacctgaggacaagcagctttgttttggatcatgtatctgttattgtgatgtagccatttatttttcagggaatgatgccaaatgatgtttgtccctttgctttacatttttatagctaggtctttgaagctgaactggaggaacttcttagccaatactgtcttctcaaaccaaaagttgacagttgcagaagacacattttttagtgtcatggcaaccaagcaacatattaccttaaattaaatttagaggttgagcatccctaatctgaaaatctgaaatttgaaatgcttcaaaatctgaaactttttgagcactgacatgacaccacatgtggattttgatgtcccagtcraagtgcaggtgtacaacacacagtttatttgatgttctcttgtgaaaaaagaccctctcatcccccttcagctgcagtataaattttctatacatgctcagatttccccaagcaagcacacacacaaagggtcacagaatggcacatgtgcaagctggacacgccaatggcaggatccccacagatggga

SEQ ID NO: 446473 - DNA, 582 bp, Homo sapiens
tactgcagtggtgggagcactgggtgttgtcgtccacacctgaggacaagcagctttgttttggatcatgtatctgttattgtgatgtagccatttatttttcagggaatgatgccaaatgatgtttgtccctttgctttacatttttatagctaggtctttgaagctgaactggaggaacttcttagccaatactgtcttctcaaaccaaaagttgacagttgcagaagacacattttttagtgtcatggcaaccaagcaacatattaccttaaattaaatttagaggttgagcatccctaatctgaaaatctgaaatttgaaatgcttcaaaatctgaaactttttgagcactgacatgacaccacatgtggattttgatgtcccagtcgaagtgcaggtgwacaacacacagtttatttgatgttctcttgtgaaaaaagaccctctcatcccccttcagctgcagtataaattttctatacatgctcagatttccccaagcaagcacacacacaaagggtcacagaatggcacatgtgcaagctggacacgccaatggcaggatccccacagatggga

SEQ ID NO: 446474 - DNA, 663 bp, Homo sapiens
ttgccattgtttatacagctgtttaacagctgatgcaggtattctggtgatgctactgtgttgcttattactttttactgtattaatggcatgtcatatttttacttatgtttgaataattgtgtgaaaatgattgctcatcagtagcatataaattcagagtcagaaatgatggtcagtgacgtcaaacagccacagattttccacatggaagctgaratagtgacacctttgctttctgatggttccatgtacacaaactttgtttcattcacaaaattatttgaaatattatataaaattacctttaggctatgtgtataagatatatgaaacataagtgaatttcacgtttagacttgggtctcatccccaagatatctcacgtagatgcaaatattataaaatccaaaaaaaaattccgaaaccctaaacacttctggttccaaacatttcagataagggatactcaatctgcatatataaaatatttatgtatcacatacatagtatgtatataatatgaatttccattcctctacaggttactattctggtacattcccgttatattctgtttatcagactgcaactaaaactttcatgggttcagctttatgttgaacagaatttgcagaattatgagttgaagcaaaccctagt

SEQ ID NO: 446475 - DNA, 368 bp, Homo sapiens
taacaccttttccttcccaccgttaatccttcacaaacattcagggagtctttagcaatttgcttatgggtaatctttcaataagtagaggctgaccctttcatgatttcatgtccctttgtcaccatgcacgtgattatgtgtcaacaaatgttcattacaagttgggytttctcaattagaatagtagcaaatcctaaacttttgttttagttgaagttgtattatgaactagctcagtatgtttgttaagtttatagagctttagcatacccaaaatgtcagttttaaacactgaagtccatggagttaataaaaatacagatatgaattcttttaataatttagttttagcagtcctatgaacc

SEQ ID NO: 446476 - DNA, 605 bp, Homo sapiens
ttaaattgcagaataatattccatttgtttgcatgtattgaagtttgtttatccattcttgaattatctatctctaattgggttgttttgtctttttattacagaattgtaattgttccttatgtaygccagacacaaatcccttgtgttcatcagggttgcaggattcaagatcaatatacaaaaatcaatagtatttgacacactttaactgaatactacatactcacaatgagcaatcagaaaatgaaattaagaaagcaactttatttatcatagcatcaacaagaataaaatactgatacatttaagaagtgtaaaacttgtactctgaaaactataaaacattgttgaaagaaatgaaagaagatctaaataaatgtaaaagtatcccatgatcatggacctaaggcttaacattgttaagaaggcagtactccctaaactcatctacagatttaacttcatccctgtcagaatcccagatgagttctctgtaaaatcggcaagctgactctgaaattcatatggaattgcaagggactaagaatagccaaaataatcttttgaaaatgagaaacaaagtagaagaactcatacttact

SEQ ID NO: 446477 - DNA, 605 bp, Homo sapiens
ttaaattgcagaataatattccatttgtttgcatgtattgaagtttgtttatccattcttgaattatctatctctaattgggttgttttgtctttttattacagaattgtaattgttccttatgtatgccagacacaaatcccttgtgttcatcagggttgcaggattcaagatcaatatacaaaaatcaatagtatttgacacactttaactgaatactacatactcacaatgagcaatcagaaaatgaaattaagaaagcaactttatttatcatagcatcaacaagaataaaatactgatacatttaagaagtgtaaaacttgtactctgaaaactataaaacattgttgaaagaaatgaaagaagatctaaataaatgtaaaagtatcycatgatcatggacctaaggcttaacattgttaagaaggcagtactccctaaactcatctacagatttaacttcatccctgtcagaatcccagatgagttctctgtaaaatcggcaagctgactctgaaattcatatggaattgcaagggactaagaatagccaaaataatcttttgaaaatgagaaacaaagtagaagaactcatacttact

SEQ ID NO: 446478 - DNA, 484 bp, Homo sapiens
ctgttggtgggaaaaacgtgatgcagccacctgaaaaatgtatggaggttcctccaaaaattaaaaataaagttactgtatgacmcagtaattccacttctgagcatctatttaaagtatgcaatgtatacctgaaagaagtatttgcacatccatattcactgtattagtttattcttgcagtgctataagaaaattcctgagacttggtaatttattttaaaaagaggtttaattggcttatggttctgcaggctgtacggcaagcatagcagcttctgctttaggggaggccttgaaaagcttccagtcatggcagaaagaaaagggacagagagtcatctcacatggtgggagcaggaacaagagagcacgagagggaaggtgccacatgcttttgaaaaatgagatctcagaagaagtcactcactatggcaaagacagtaccaaaggggctgctgctaaaccattcgtgagaagccaa

SEQ ID NO: 446479 - DNA, 484 bp, Homo sapiens
ctgttggtgggaaaaacgtgatgcagccacctgaaaaatgtatggaggttcctccaaaaattaaaaataaagttactgtatgacccagtaattccacttctgagcatctatttaaagtatgcaatgtatacctgaaagaagtatttgcacatccwtattcactgtattagtttattcttgcagtgctataagaaaattcctgagacttggtaatttattttaaaaagaggtttaattggcttatggttctgcaggctgtacggcaagcatagcagcttctgctttaggggaggccttgaaaagcttccagtcatggcagaaagaaaagggacagagagtcatctcacatggtgggagcaggaacaagagagcacgagagggaaggtgccacatgcttttgaaaaatgagatctcagaagaagtcactcactatggcaaagacagtaccaaaggggctgctgctaaaccattcgtgagaagccaa

SEQ ID NO: 446480 - DNA, 611 bp, Homo sapiens
tggggtctgcaagtacttcttagctatgacaacaatgctacaagcaacaagggaataaataagacwaacttcattaaaattaaaatcctttgtgagttaaaggaacccatcaaaaagtaaaaagtcagctcatagatggggaggaaatatctacaaatcctttatgtgataaaggactcatatccaaaatatatacagagctctcacagacatataaccccactaaaaaaattgacaaagggtttgaatagacctttctccaaagaagatacataaatggccagtaaactcatgaaaaggtgttcaacatcattagttattggaaaaatgcaaatcaaaaccacagtgacataccacttcacacccactgcgatggctaaaataaacaagatagacaataacaaatttggtgaggatgtgaaataattacaacccttatacactgtggggttgcaaaatgatgcagtcactttggaaaagtttttaacctttccctaaaatgttaaaaatcgagttccacataacccagctattccactcctgggtatatacccaaaataaataaaaacatatgttcacacgtccacaccaaaacctctgcaagaatgttc

SEQ ID NO: 446481 - DNA, 611 bp, Homo sapiens
tggggtctgcaagtacttcttagctatgacaacaatgctacaagcaacaagggaataaataagactaacttcattaaaattaaaatcctttgtgagttaaaggaacccatcaaaaagtaaaaagtcagctcatagatggggaggaaatatctacaaatcctttatgtgataaaggactcatatccaaaatatatacagagctctcacagacatataaccccactaaaaaaattgacaaagggtttgaatagacctttctccaaagaagatacataaatggccagtaaactcatgaaaaggtgttcaacatcattagttattggaaaaatgcaaatcaaaaccacagtgacataccacttcacacccactgcgatggctaaaataaacaagatagacaataacaaatttggtgaggatgtgaaataattacaacccttatacactgtggggwtgcaaaatgatgcagtcactttggaaaagtttttaacctttccctaaaatgttaaaaatcgagttccacataacccagctattccactcctgggtatatacccaaaataaataaaaacatatgttcacacgtccacaccaaaacctctgcaagaatgttc

SEQ ID NO: 446482 - DNA, 601 bp, Homo sapiens
gatatgttgaacacattctcaataaaactatgaagaygaagaatgactgtgattgtttatattacattaaaaaaagaaaatccacgtccataataacgttcaaaataaaaagaaggaatacattcattaggtggttttagaggtgactactacaccaattccttacttcaaaagcagtaattatagaataaaatatttcccgatttaggagattacataccagattgatgagggaaagctgtttttcagaatgacattatgacatctcaacaatatggaagaaatgatagtcatcaatatggaagaaatggacatttacaaactcccttgacttaaggattcaggcaaggagcatgaatggaggtggcaggtgctcagggaactggggagtttcatgagtcatgtgtcaccctgcagcctccctgctaattgcaaaggggaaagcttactgttcctgtaacaggacgtggtggccgcctaccccctcaggagtgagctgatctaattttgcatcactgatagtgttaccagtgcagggtgtccaggttcttgccttcttgaacaaagaattgatcagaacgcacaaacaaagcaaggaaag

SEQ ID NO: 446483 - DNA, 647 bp, Homo sapiens
tcatttaggtttttaaatcatttaaaagccttttcccacattcttctcccgtctgagttttgggtgtgagttmggggaggttggaggttgaatgtggactctgaagcaggagtaagtaaggacccttgctctgctgtgctgcccacatgactgccattgtaaggccctcgctggctctggcctctgccatctgtcctcactgatgtactctgcgtcagcctatgcttatctgagccagtgttcactgaggcagtgtgaccccgttggacctcaaacccatggcattggggccatgaagaactggaccccacgtcataaccacgagttggttccctttggggccactgcctgcacagagctgtcagacttggtgcacctggtcacctctgctcttggtcatttctgtcccctgccatgttggactgttcatgatgtttgggatgtaccacaggctctgagctctaggacaaaagcaggcacaaggatcctctgcgttagtctgtgcacctgctctgggggttttctgccctgcctttctatccccaaggttcccaccttggtcgagagcagggctgggcctgtttttggagacagcctgttgtgaattgccttctttctcacattccttccttcctcagttcaggcaa

SEQ ID NO: 446484 - DNA, 598 bp, Homo sapiens
agtgatccactgctaaggccaatttgtcatcaatcaacacagttatatactaattagagtggtgagacttaattttttgagaaaaaaacaattactacttttcgatgggaacaaaagagttagaaatattaataacccttcctggtagatagtaaacaaggtggaagtaacagccatcattcaactttgccaaatttggaagagragaaactttgacattaaattttgaaatttggggaaattaagtaggcacatgatgagctagctgaggggatagaaatggtcatagttaagcttctacacaaactgaaagaaactacaaaataaagtatttgttctccgccttaacctaagctgaaggtttcagcccaaaaccatcagctgagttcaaagaggcaaaaaggaatgtcaagcccagggaatgacctccacctcacccttttctaccctcaagacataactatagggaaagactgaggtatgaaaatggggacattccacagcaaatgtgtatgattggaggagcaggctcctgagatagaaagctttgggaaaataataaagcaggaagaaccaggggcaccaggtttgttccatc

SEQ ID NO: 446485 - DNA, 535 bp, Homo sapiens
aggggtgtgtgtgtgcgtgtgtgcatacagtatgttcaagcataactcagatgtattgtaaaagaaatttcataataaagcaagtcacacaaactttttggtttcccagtgcatataaaagttgtatttacaccatgtgttctactaagtatgcaataacatcatgcctaaaaaatacacaccttaaattaaaaatgctttgttgattaaaaatgctaatgatcatctaagacttcagcaaatcattwtctttttactggggaagggtcttgcctcagtattggtggcttctgaccagggtggtggttgcaaatcatagaacggtagggatgcatgtggcaatttgtttctttctccttctataataaagatggggtcttgttcagcctgtcaacgtgcagtggcatcatcatagctcactgcagcctcaaactcctgggcgccagggatcctcctacctcaacctcctgagtagctaggactacaggcacacaccaccatgcccagctaatttttttcatttcttattttagag

SEQ ID NO: 446486 - DNA, 535 bp, Homo sapiens
aggggtgtgtgtgtgcgtgtgtgcatacagtatgttcaagcataactcagatgtattgtaaaagaaatttcataataaagcaagtcacacaaactttttggtttcccagtgcatataaaagttgtatttacaccatgtgttctactaagtatgcaataacatcatgcctaaaaaatacacaccttaaattaaaaatgctttgttgattaaaaatgctaatgatcatctaagacttcagcaaatcattttctttttactggkgaagggtcttgcctcagtattggtggcttctgaccagggtggtggttgcaaatcatagaacggtagggatgcatgtggcaatttgtttctttctccttctataataaagatggggtcttgttcagcctgtcaacgtgcagtggcatcatcatagctcactgcagcctcaaactcctgggcgccagggatcctcctacctcaacctcctgagtagctaggactacaggcacacaccaccatgcccagctaatttttttcatttcttattttagag

SEQ ID NO: 446487 - DNA, 619 bp, Homo sapiens
gcccgcctcggcctcccaaagtgctgggattataggtgtgagccaccgcgccctgccccattttttaactgcagtatatttttctccttactaaagctcataaaaattatattatttttgaagtttttccaactcaaaaggaataagagatttgagtccacagcttcataatgattccttcttccctcttctccctggccttccagtctgatgaagactggtggctggrtttatttcaaaactttgttccaattcagaaagaccagttcacatgtcttctttacaatgatattttttgccttgttgaagaaagcatccatgtaaataaaaaaataaaagaaaacagctccaaatgtatgctagtttcaataagatagcatcgcgtatctttatagtgggatccctagaaccttacccacttgaaaaggttgatgccacgaactactgccaatgaccaagacccaaattctggtcatcactgtggcaccgagatgcttgcggttgttcttgagcaattttgctttgctgttttgagcatttttttcccaagcatcatatgaaaattaggaaaaacaccttgtattatgcgttgtcccaaacaatcacatctgcgggttcc

SEQ ID NO: 446488 - DNA, 619 bp, Homo sapiens
gcccgcctcggcctcccaaagtgctgggattataggtgtgagccaccgcgccctgccccattttttaactgcagtatatttttctccttactaaagctcataaaaattatattatttttgaagtttttccaactcaaaaggaataagagatttgagtccacagcttcataatgattccttcttccctcttctccctggccttccagtctgatgaagactggtggctggatttatttcaaaactttgttccaattcagaaagaccagttcacatgtcttctttacaatgatattttttgccttgttgaagaaagcatccatgtaaataaaaaaataaaagaaaayagctccaaatgtatgctagtttcaataagatagcatcgcgtatctttatagtgggatccctagaaccttacccacttgaaaaggttgatgccacgaactactgccaatgaccaagacccaaattctggtcatcactgtggcaccgagatgcttgcggttgttcttgagcaattttgctttgctgttttgagcatttttttcccaagcatcatatgaaaattaggaaaaacaccttgtattatgcgttgtcccaaacaatcacatctgcgggttcc

SEQ ID NO: 446489 - DNA, 619 bp, Homo sapiens
gcccgcctcggcctcccaaagtgctgggattataggtgtgagccaccgcgccctgccccattttttaactgcagtatatttttctccttactaaagctcataaaaattatattatttttgaagtttttccaactcaaaaggaataagagatttgagtccacagcttcataatgattccttcttccctcttctccctggccttccagtctgatgaagactggtggctggatttatttcaaaactttgttccaattcagaaagaccagttcacatgtcttctttacaatgatattttttgccttgttgaagaaagcatccatgtaaataaaaaaataaaagaaaacagctccaaatgtatgctrgtttcaataagatagcatcgcgtatctttatagtgggatccctagaaccttacccacttgaaaaggttgatgccacgaactactgccaatgaccaagacccaaattctggtcatcactgtggcaccgagatgcttgcggttgttcttgagcaattttgctttgctgttttgagcatttttttcccaagcatcatatgaaaattaggaaaaacaccttgtattatgcgttgtcccaaacaatcacatctgcgggttcc

SEQ ID NO: 446490 - DNA, 619 bp, Homo sapiens
gcccgcctcggcctcccaaagtgctgggattataggtgtgagccaccgcgccctgccccattttttaactgcagtatatttttctccttactaaagctcataaaaattatattatttttgaagtttttccaactcaaaaggaataagagatttgagtccacagcttcataatgattccttcttccctcttctccctggccttccagtctgatgaagactggtggctggatttatttcaaaactttgttccaattcagaaagaccagttcacatgtcttctttacaatgatattttttgccttgttgaagaaagcatccatgtaaataaaaaaataaaagaaaacagctccaaatgtatgctagtttcaataagatagcatcgcgtwtctttatagtgggatccctagaaccttacccacttgaaaaggttgatgccacgaactactgccaatgaccaagacccaaattctggtcatcactgtggcaccgagatgcttgcggttgttcttgagcaattttgctttgctgttttgagcatttttttcccaagcatcatatgaaaattaggaaaaacaccttgtattatgcgttgtcccaaacaatcacatctgcgggttcc

SEQ ID NO: 446491 - DNA, 360 bp, Homo sapiens
tgtattgaggatttacaatgtatcagacacttttatgaacatttaaaaaatataatttcatttaatttgcagcaaccctaacaggtagctgctattattaatcctctttttgaagtacagaaatgaagcactaatatgctaagtaacttgattgaggtcacagttagcaagcagtagacttaatattgaaactcaggcttggttcttaatgataccccatgcagcctaactactaaaattgctaatacttttcaacatatgtaatatctgaaagagcaagtctttataccctctgcccatcattattttgttcacarttatcctgaatactttcattaacactattgattaatttttgaa

SEQ ID NO: 446492 - DNA, 612 bp, Homo sapiens
acccttcacttctggaatttccctaaaattttctgatattttgaaacatcaatttcctcctctcctagttttttaccgggaggaccaggatctttccttctcattaattgtccttcattttatgctttgtttcttcatctgtttttaagtaatgtgctattgagtactcttgaaattataatatcattcacataatcttgttaaatagagaaaaataattaacaaatatttttaaccaagtatattgtgtttaaaacaacttctcttccagcatgaagctatacaattggaaacagaaaatatgattttaaagaagaaaataaaagtaagttttttgtgtgaatcaatgtttatcaataaaaatatttcctctggtgactgcttgtcctgtgtaataagcatgaccaactgatcgtaattctttgtaggttactgaaaaccatgtgaagcagatcataggaaagatcagtgaagagaggcaggagtaagtattgacatcatgataaaasaactagagcagtatcatgctgttctcaagatcagttatttaaaactagattagactagatagacctttgaagggttcacactcatgaatgcttacattaaata

SEQ ID NO: 446493 - DNA, 554 bp, Homo sapiens
catatgaataaactcttagaacagtgcatagtccatagtagacaktcagtgttgcatcctttgttttcacattagtcattatattttatgaattatcattgcagccaattttataaaatttcaattcattgttaaatatatagctggtttgttgtttccacaggccaagttgcttttcattaaaatttgatttgcttcatttatttactggaaaatagcaaggaagagcctatagaggtaccttttatgtctgccctaagatggaacttctgagcttacagaggaagagagaagtcagtattcctaccttaggacaccagttgtcttctatacgctgaggtgcatttggggcacacagctagagagtcatttttccaatgcccctactttctcctgaattcagctgtctcttatttcacaggaacataatacacacacattttttttttaatttgttcccagtgctttcaaatccactgaaacacattagaggaaactattgtcacctttgcagtcctcagcatgaaagaactctctatggtgccatagacagt

SEQ ID NO: 446494 - DNA, 614 bp, Homo sapiens
aacagaaagaaatccttgtggtttttgttttgttttgttttgtttttgcattttggtactgtggtttccataaactagaatagttgtgcaagcatggtaagtcacataccaaatgctgtatttttgcaacagtgtattttaaatctctcagtaagtgtttttcattagctcaatttgtagagggtactaatatctattcatctttccattcttagattttttttcatgtcatcgtttacttgtttacctactcaaatttctctcaaattatctcccttgtgagagaccctcatgctcagatatatgtaatgttttccatgtgccccaggctttcagtgatctgggtccaggtttttgtttctgttaagtttttagcttgaaattcctgcaatatgttaggataaatttgcaaactacaactacatatgggtcaggcttgatttccatattctcaatggatggagactatttattttctacccatagccccaagtagagacaaggcttgttttttgtttatggagttctcagttcagctcctctcctcatgcagccacagggaagtctcrtcctgcatggaccttcccttcacatccgggagcctcaagccacac

SEQ ID NO: 446495 - DNA, 441 bp, Homo sapiens
gtatctgtcacctcagatatttatattttctttgttttgagaccattatgaatcttctagctattttgaaatacacaataaattattaagtgtaattttcctagtgtactatcaaacaatagaacatattccttttatccaactgtatttttgtaccccttaaccaacattatacacaatggaacattaytcagccgtaaaaaggaatgaaatcgcgtaacttgcagcagcatggatgaaactgaaggtcgttaggttaaataaaattatccaggcacaaaaaggcaaatatcacacgtctgactcacttatgggagctaaaaagtagatctcatgacagtgtagagtagaagggtggttacaggtctcttattcagtgttccccatatgtatgtggagtatgtatttgattttaggacttgcttagagaatcaatttaat

SEQ ID NO: 446496 - DNA, 592 bp, Homo sapiens
ttagggtgtctcatagacacagtcatttctaagtgtaatgagggttattgtgtaaataggccccaataacaacattctaaataatcactaattaaatatttttgtatgccagttgagtaggaatgccattttataaaatgtgaatggatgtatttttaatgtgtggtagacatgctcttacagtcctgtttccaggttgtctttatcgttttgttttttgagcacatataccttttcaatatcctcgtgcctaagactgataggccatcaaaatatatttcagttttagacaaacagcagttttttctgctagaattctcttctacttggacagtgactccaagattayttacgcagtgttataggcaaataatttatacaaaatgcacctaaaaagacaacatagttttctaccttcatcagtagtttgcatgagtatgataaaatcatctactaataatcctagattatattattttctactattcatattaaaggtcatttagaaaatgggaagtaatataaattttctaaaactaattattttgtgctgtgattttaattaattttattttgtaattagtgttattta

SEQ ID NO: 446497 - DNA, 560 bp, Homo sapiens
ttttcatttatttgttgtctgttctttcattaattttaacttttatttttatgctttcactatacttttggatttttttcttgtttctctgattgaatagtaatgaaataatcagattatatgtattatgatctgggcattgactgaactataccttgcaagttttgatgaagtacttttccttagtttttagattatttatttctgcttttgtttccttgttgatgtagaggttatttcaaagtaattttctaatttygaaatactttggatgtttgcttgttttttattttttattttgttcctagagacttctttggattgtagaaaaaagaatgtaactattaagttaaaattttatagttgatcaatattttcttcctggccaagacagaaaagatgattgttaaagcaactttatttaggtgtaattacactaattttaagttttggcaaatgcaactactagcagagtcacagtaaaggtataaaaaagtctgccaccactctacctttttccaatcaaatttccctaccccaggcatagaaatcaatgtgtt

SEQ ID NO: 446498 - DNA, 632 bp, Homo sapiens
gggtattttatagatgaactttatcaggttgaggaagtttccttctaattctgatttgttgagtgtttattttttttattgtgaatgggtgttggattttgtcatatgctttatctgcatctatcgagattatcaagcagtttttgttatttattctattagtaaggtgcattagattaattgatatttagatgttaaaccaaccttgcattcctatgatagatrtcaggtaataatggtgtatagttgttctatatattgctggatttggcttgatgatatttcgttgaggacattagtgcctgtattcataaattatactggtctgtacttttcttttttgtggtatttgtcttattttggtgtcagggtaacactggcctcatggaattagctgggaagtattccctcctctactatttttttggaagagtttatgaagaatttgtattaattcatcttcaaatgtatagaatttaccagtgaagtcatgtgggtatagatgtttctttgtggttgttatttttccctttgactactaattcagtctttgtactttttataggtctattcacattgactatttcttcttatgtcatatttagtcacttgtgtctttctagaaatttgtc

SEQ ID NO: 446499 - DNA, 550 bp, Homo sapiens
agaaatacagcttactatacttgaaccaaaaagaactctgaatatttcattgaagaaatctaatcttaaaacaaacaaacaaacaaaccacccatccctcaggaccaggcctcaacagcttcatgtggggttgctatcaaacartcttgcacaaaagctttccaaaagaaggacaagaaccatttcctaccttattttatgaaggctaaataatcctgatttccaaagtctgtcaaaaacatcacaaaaacagtaaattcaagttcagtattccctttggatctaactataaaactcatgaccatatataactgtaaaagtataactgtaaaattcataacaaaatataacatgttcaatcacatataacaagatcatatgtcataacaagaattttattgcaggattaggaaactggcttaacatttccaaaattcaccacaacagaatgaagaagagacatcatatgattattacaatagatgtagaaaaagcatctgacaaaattacacctccatttatgaaggccaaaaatctcagaaaactagga

SEQ ID NO: 446500 - DNA, 550 bp, Homo sapiens
agaaatacagcttactatacttgaaccaaaaagaactctgaatatttcattgaagaaatctaatcttaaaacaaacaaacaaacaaaccacccatccctcaggaccaggcctcaacagcttcatgtggggttgctatcaaacagtcttgcacaaaagctttccaaaagaaggacaagaaccatttcctaccttattttatgaaggctaaataatcctgatttccaaagtctgtcaaaaacatcacaaaaacagtaaattcaagttcagtattccctttggatctaactataaaactcatgaccatatataactgtaaaagtataactgtaaaattcmtaacaaaatataacatgttcaatcacatataacaagatcatatgtcataacaagaattttattgcaggattaggaaactggcttaacatttccaaaattcaccacaacagaatgaagaagagacatcatatgattattacaatagatgtagaaaaagcatctgacaaaattacacctccatttatgaaggccaaaaatctcagaaaactagga

SEQ ID NO: 446501 - DNA, 604 bp, Homo sapiens
ggtgtatgtaccattatgcacccactagaatggccaaaattacaaagaccaacattatcagttgttggcaagtgatattgtttggctgtgtccccacctaaatctcatctcggattgtaatctgcatgtgtcaagggaggggcctggtgagcggtgattgagtcatggggacagattttccctttgccattctcatgatagtgaatgaattctcacccagatctggttgtttgaaagtgtgtggcacctcccactttgcttgctctctctctcctgcagccatataatacttgcttccctttcaccttcgccatgattgtaagtttgctgaggcctccccagccatgtggaactgtgagtcaattaaacctcttytctttataaattacccagtatcaggtaattctttatagcggtgtgaaaatggactaatacagcaaggatgtcaagcagctgaaatactcatatattgctggtaagagtatagaatttgtacagctgctttagaaaacaccttagttgttttgtttttattttgttttgttttaataaagctgaacatgttcttatactgtgttctagcagttcactctcaggtattttt

SEQ ID NO: 446502 - DNA, 566 bp, Homo sapiens
gtatgatctataaatctgcattttgtaaaatacaaagcattttgtttgaartattttgttcttaagatgtcgattacctcagtatcactttaaaggaaatcattaaaagattaacatggaatgatccttaattcaccaagtgagatcttatctcactgtgaggtgattaggaattgataagctcatggaagcaatccacagaattctacattataatgagtaaagttataatctacttaagaattaataatgagttcaaaattcacacatttacattgttgtgatggctaattatgtaaggaattgcctaacacaagccattctttgctgtcatatgagatggactgtgtagaatttggtcactggaaggcttttaccgccggcatagaaatgccctcatggctattggaaacctttctcttctcctcaccattttctagagttccttataacactcgagttaacacagacatcatctcccctgtaacaaggatgtggactcctccacctgtccttttcaaagatttgggtttgcttcccatgttccctaggtggcaccatctata

SEQ ID NO: 446503 - DNA, 553 bp, Homo sapiens
cttctgagccatccaaactcttcttacgtctgcctgttactcagttccaaagtcgcttccacagtttcatgtatctttatagcagcacccaactctctgcagtatcaatttactgtattagtctattctcatgctgctatgaagaaatacccaagactgggtaatttataaaggaaagaggtttaattgactcacagttcttcatgtctggggmggcctcaggagacttacagttatgacagatggggaagctaacacatccttcttcacgtggcagcaggagagagaaaaatgagtgcccagcaaagggggaagccccttataaaaccatcagctcctgtgaaaactgaatccctatcacaaaacaggaagggggaaactgcccgcatgattcagttatctccacctcatctctcccacaacatgtggagattatgggaactacaattcaagatgagatttgggtgggggacaactatatcagacagtttaattctagcttatgaaaggatttgctaggaacagaaaagagagagagaggaaacgtaatgca

SEQ ID NO: 446504 - DNA, 553 bp, Homo sapiens
cttctgagccatccaaactcttcttacgtctgcctgttactcagttccaaagtcgcttccacagtttcatgtatctttatagcagcacccaactctctgcagtatcaatttactgtattagtctattctcatgctgctatgaagaaatacccaagactgggtaatttataaaggaaagaggtttaattgactcacagttcttcatgtctggggaggcctcaggagacttacagttatgacagayggggaagctaacacatccttcttcacgtggcagcaggagagagaaaaatgagtgcccagcaaagggggaagccccttataaaaccatcagctcctgtgaaaactgaatccctatcacaaaacaggaagggggaaactgcccgcatgattcagttatctccacctcatctctcccacaacatgtggagattatgggaactacaattcaagatgagatttgggtgggggacaactatatcagacagtttaattctagcttatgaaaggatttgctaggaacagaaaagagagagagaggaaacgtaatgca

SEQ ID NO: 446505 - DNA, 579 bp, Homo sapiens
tgctgcagcaaatgaataaatatttctgtctctgtggtgggtgagtcagaagaggacaytcttagcatcaggcagtggcagttaagaagcctcagaaggaagagccagtgattttctttgcagtaaaaggactttgcaaggctgcccttcgaatcggcaagaaattcacgaggaaggaaaagtgaatcaaaatgaactcaaagagaagaggcttttttttttcttttgttttgaaatactttgccttcactggttcccaaataggaagtatactagaattatcctagacaatttaaaaatacagacgctagggcctcatctccaactttccaactcagaatctccaacagccgcttccaggcacctgtgtttgtttgttaagaggtttcagtttttagagcagttttaggttcatggcaaagccgagcagaagatacagagacctgcacatgccccttgcctccacacaggcccagcactgtttttaaaaatcttgacaggcaactaccttggagtcagcaatccgcgtattattttagctcatttcagcgtctttaacactggtaacttaattgctag

SEQ ID NO: 446506 - DNA, 579 bp, Homo sapiens
tgctgcagcaaatgaataaatatttctgtctctgtggtgggtgagtcagaagaggacactcttagcatcaggcagtggcagttaagaagcctcagaaggaagagccagtgattttctttgcagtaaaaggactttgcaaggctgcccttcgaatcggcaagaaattcacgaggaaggaaaagtgaatcaaaatgaactcaaagagaagaggcttttttttttcttttgttttgaaatactttgccttcactggttcccaaataggaagtatactagaattatcctagacaatttaaaaatacagacgctagggcctcatctccaactttccaactcagaatctccaacagccgcttccaggcacctgtgtttgtttgttaagaggtttyagtttttagagcagttttaggttcatggcaaagccgagcagaagatacagagacctgcacatgccccttgcctccacacaggcccagcactgtttttaaaaatcttgacaggcaactaccttggagtcagcaatccgcgtattattttagctcatttcagcgtctttaacactggtaacttaattgctag

SEQ ID NO: 446507 - DNA, 579 bp, Homo sapiens
tgctgcagcaaatgaataaatatttctgtctctgtggtgggtgagtcagaagaggacactcttagcatcaggcagtggcagttaagaagcctcagaaggaagagccagtgattttctttgcagtaaaaggactttgcaaggctgcccttcgaatcggcaagaaattcacgaggaaggaaaagtgaatcaaaatgaactcaaagagaagaggcttttttttttcttttgttttgaaatactttgccttcactggttcccaaataggaagtatactagaattatcctagacaatttaaaaatacagacgctagggcctcatctccaactttccaactcagaatctccaacagccgcttccaggcacctgtgtttgtttgttaagaggtttcagtttttagagyagttttaggttcatggcaaagccgagcagaagatacagagacctgcacatgccccttgcctccacacaggcccagcactgtttttaaaaatcttgacaggcaactaccttggagtcagcaatccgcgtattattttagctcatttcagcgtctttaacactggtaacttaattgctag

SEQ ID NO: 446508 - DNA, 579 bp, Homo sapiens
tgctgcagcaaatgaataaatatttctgtctctgtggtgggtgagtcagaagaggacactcttagcatcaggcagtggcagttaagaagcctcagaaggaagagccagtgattttctttgcagtaaaaggactttgcaaggctgcccttcgaatcggcaagaaattcacgaggaaggaaaagtgaatcaaaatgaactcaaagagaagaggcttttttttttcttttgttttgaaatactttgccttcactggttcccaaataggaagtatactagaattatcctagacaatttaaaaatacagacgctagggcctcatctccaactttccaactcagaatctccaacagccgcttccaggcacctgtgtttgtttgttaagaggtttcagtttttagagcagttttaggttcatggcaaagccgagcagaagatacagagacctgcacatgccccttgcctccacacaggcccagcactgtttttaaaaatcttgacaggcaactaccttggagtcagcaatccgcgtattattttarctcatttcagcgtctttaacactggtaacttaattgctag

SEQ ID NO: 446509 - DNA, 436 bp, Homo sapiens
gacggagcaggaaatgtattacatttaccagagaacagttatacagaaagctgatttctcaatagcaattattratgtggaagccaaaaatcagtagaatggtatctttcatgtgatgaaagacaatagctagcaacctagaatcgtctaatgaaaatatgtgtcaagaataaggagaaataaagaatttttaaatggagattcattaccaggattaaatatgtataacacattttatattatatattacatattatattatatacagtatagtatatatatcatatattacattgtaaatatgtatatattaccagtattacatatatagataaatttaggggaacattgacagtattatataaaaattataaaatgtctagtatttttataagttataagagaattacaacagaaagcaacaatatatataatt

SEQ ID NO: 446510 - DNA, 563 bp, Homo sapiens
tgtgttattttcattcaacctaaggaaggatcttaagaaagcatgtttgttattctcaatcttttcaaacaagaagttgaagtatgatatgttttatttttatttttgccattaaatctcaaagcatctgaccttcctaaatcttgcatgcttcaaagactcatcagaaaattcatccttttccaaagccccagaaaagcttgaaaattgatttttyccccctatggtcttatatgcaataagcagcaagacacagtgaaaagagtcctggggttcagaagatttgagctgtagtcctgcctctgccactaactggttgagtaacattgggcaactcacttaactgctgcatattctaatttactcatttttttagtgaataagctagactgtataatctattaatagttctttagaactctctcattctatgacaacaagtatcacatattcactcccttaagagatgcacacgatatatcacagagtgctttgcacagagccttgcacctagtactcattcaaaaatattaagtaagttaattctgcagactaaaatcatt

SEQ ID NO: 446511 - DNA, 548 bp, Homo sapiens
aaactaaaccaaaattagtagaagaattaataaaaatcagagcagaaataaatgaatttgaaatgaagaatataatacacaagatcaataaaacaaaaagttgttattgataaacaacattgacaaaactgttagccagactaagaaaaaaagagagaagatccaaataaataaaatcagtgatgaaaaaggaggcattacaactaatatcacagaaattcaaaggatcattagtgactatgagtaaccawatgccaataaattggaaaacagagaagaaatgtgtaaaatattcaaaattaatgtaatataaaaaattaatttaccaagattgaactgtgtagaaatctcaaacctgaagagattaataacaagattaaagccataataaaaagttttccagtaaagaaaagcttgggagctgacagcttcactgctgaattctaccaaaacatttacagaagaactaatactaatcctattaaaactgttctgaaaaataggggaagagggaatactttcaaactcattctatcattatcctgata

SEQ ID NO: 446512 - DNA, 579 bp, Homo sapiens
taccactagcacaggccttggagagtactgccagactaccactaatgttcccttaagggtcaaggtctgtgaagtcagcttatggtacatgttgcctggcctgggacttacccttcagggtagtgggctcccttccttcccagagtaggtccagaagtgctatctaagagtcaagttctggaattgaaaaacccaaaagcccacttggtgctctatgtccctgtgtccatgctggtacctaaggtgaaagacgragtcccctttggtttcccctctgcttttctcaacagaaggagttttgtctcatagccaccatagctggtaataagctgagtctcacctgaagacagcaattctcaaaggcttacccaaggcctttgatatagtacctgggtatcactgctagatattcaggacccaagggctctttagttagcaggtgataaatgctgccaggattgggtccttctgttcaaggcagcaggttcccttgtggtccacagcatgtctaaaaatgtcatcttggagctagggccattcaggggcctcatgactctgactagtgctctgtcctactgt

SEQ ID NO: 446513 - DNA, 581 bp, Homo sapiens
tatgtccctgtgtccatgctggtacctaaggtgaaagacgaagtcccctttggtttcccctctgcttttctcaacagaaggagttttgtctcatagccaccatagctggtaataagctgagtctcacctgaagacagcaattctcaaaggcttacccaaggcctttgatatagtacctgggtatcactgctagatattcaggacccaagggctctttagttagcaggtgataaatgctgccaggattgggtccttctgttcaaggcagcaggttcccttgtggtccacagcatgtctaaaaatgtcatcttggagctagggccattcaggggcctcatgactctgactagtgctctgtcctactgtggctgagctggtatccaagatgcaaggcaaagttctctccactcttccctctcctcttctcaagcataacagagtggtctcttttggagccacaagctgtgcagcttgggatcaggggaggggtaataccagcactyccttagccatgccaactgatgtctcagtaggtcatgtgcccctccattccactgtatctgggctgagttcagccctag

SEQ ID NO: 446514 - DNA, 433 bp, Homo sapiens
agtaagaattttacaaaaagctttatgagtaaaaataaaaatattaacctaagatttagaaataagatttgcaatgcattggaaatactagtaaagtgtttattatggtttgatattcagcaggataaatcattactgtgcatggatcatttacaagtacaaaagagattatcatcaatataaagaaaaatggttaaagaatatcagtaattcaaaaattagaaatttaaatgactaaaaagtataaaatacattcaatatccttacttatgcaagaaatacaatttaaaaataatgtatcrtatctgaaaaaatgaaatggtttcataaagaacttttgatagcaactacatagactatcaaacaaccactggctagcatgcaatttttgcaattattctggaggccatattaataaagcaaatcaatttat

SEQ ID NO: 446515 - DNA, 590 bp, Homo sapiens
gctttgtgtaaaaggtaacaatagcttattaaagttaagaaaagatagaaaaatgtgcgctttgagtttgaataacctggttctgacattcttaagaggaaaggttgcttcatgtgactttacatttttattatgcattttatcttagggagtacagcacatctaattaatgtaccatgataaatggagtttctatatcattagaacccacttataaagaatgaaaggggaccttcatgtgcaaacacagaaaagttaatccctagctatcaaaggttcagctcctacaaagtcatttcactttgctcatacatttaataggaatcatttatataatattcaggcaatgggagagaaacggcaaaaaaagttttaattgagttattcaactatcaattctggcttgtcagattgtaagaagagaaattgagatagaaatcccgagagaggatttcttacttaaaaaaaagcctggaaaaacccaagtggatctttccactgttctgtgatggagaggaaacttgamaattataatttttagaagaaggaaacatgcaatggtgttctattatgattctgagaactggctt

SEQ ID NO: 446516 - DNA, 576 bp, Homo sapiens
taatttggagtgatgactttgtgccagataccatctcagacatccaggatataaaaacaaactctatttattggtaaatgttgaacggaaacctcactttccatcctggaattaccctgctttttactctaaagggtagaaggtttggaatctgaggtcaaatcaggagaaaatagtgacttgaaagacaactagttctgtatctatttatttaacattttggatttgtcttactgccmcttaagtttcttgaaaataggaccatgctttattattctagtgccatgcatagaacaccctgcatttgacaaatgttgctgaaaaaatgcattaaagagagaacgaatggatgaaactgtcatagcattctcttaagcaaaacctgagaagaaattattgagggaatcctaaatcggcaaaatagaaatttagttgcattcagattttcagtattaaagataaacaccataaaggcctatatccactgaaacttgtatgcattgtctaatatatacaattaaaattttatatctctaattctaatatctaataattatatgaattaagattagatgt

SEQ ID NO: 446517 - DNA, 533 bp, Homo sapiens
ggctgggcgcagaggctcacacctgtaatcccagcactttggaaggcagatcacttgaggtcaggagtttgagaccagcctggccaacatggtgaaaccctgtctctactaaaaatacaaaaatcagactggcctgatgctgcactcctatagtcccagctacttgggagtctggggcagaagaattgcttgaactcactaggcagaggttgcagtgagccaagatcgcaccattgcactccagtctgggcatcacggcgagactctatctcaaaaaaaaaaaaaaaaaaaraaaaagaaaaaaaagaaaagaaaagaaaaagaagtacagctttgatgtgctaagaaataagcatgtcattgcctagaaagaataataaggagcctatttctgcacaagtttatgagaggctgattctcccagaggaaatatttatactggatgtgtagaatgaagagtcagccatgtaaagagtagagagcaaaagtttacagatatatggaaaaataatttcaagttcaccgaggccaaa

SEQ ID NO: 446518 - DNA, 528 bp, Homo sapiens
ctattaacgaacctctctttattcccccaattcccctacatttgccagcctctggtaaccaccattctactcttcagaatcatgagatcaactttttagctcccacatacaagtgagaagatgcaatatttgtctttctgtgcctggcttatttcacttaatagaatgtcctccagcttctattttgctacaaatgacaggatttcgttgtttttatggctgaagagtataccactacatatgtatgaagtaagaaaaagaaagtgttaggactgagaatggtgctctggatgaaaggagaaaatagaaggcyttcttcatctgccccccccaaaaaaaaagaaaagattcctttaggcttggtggaagagagtgaagagtgtggttccagaggcagaaaactatgtgttaactgtatcccctagtaaaatagaaaggtacagtggcatgagtcaatgcatgtaggaacataagcacataagcaagcacataaaaatttcccattttttttaccacacatgaagcacc

SEQ ID NO: 446519 - DNA, 519 bp, Homo sapiens
atcgtcacctagttgccattgtaattgtgacttcaaaaggcyattgcaccattctatcattccagctgctttaggatgatggggaacatggtaagaccagtgaattccatgagcataagcccactgccacaattttttagctgtaaagtgagtgccttggttagaggcaatgctgtgtggagtaccgcaatggtggataaggcattctgtgagtccatgaatggcagtattggcagaagcattgcattcaggataggcaaacccatatacagagaaagtgtctattccagtgaggacaaatctctgtcctttccatgatggaagagatccaatataatcgacctgctagctggctatccaccctgaggaatggtgccacatcgagggctcagtgttggtctctgctgctgtcaaattgggcactcagcagtggccatagccaggtcagccttggtaagtgcaagtccatgttgctgagttcatgcaaaacctccatcactgccaccatggccactttgt

SEQ ID NO: 446520 - DNA, 519 bp, Homo sapiens
atcgtcacctagttgccattgtaattgtgacttcaaaaggccattrcaccattctatcattccagctgctttaggatgatggggaacatggtaagaccagtgaattccatgagcataagcccactgccacaattttttagctgtaaagtgagtgccttggttagaggcaatgctgtgtggagtaccgcaatggtggataaggcattctgtgagtccatgaatggcagtattggcagaagcattgcattcaggataggcaaacccatatacagagaaagtgtctattccagtgaggacaaatctctgtcctttccatgatggaagagatccaatataatcgacctgctagctggctatccaccctgaggaatggtgccacatcgagggctcagtgttggtctctgctgctgtcaaattgggcactcagcagtggccatagccaggtcagccttggtaagtgcaagtccatgttgctgagttcatgcaaaacctccatcactgccaccatggccactttgt

SEQ ID NO: 446521 - DNA, 543 bp, Homo sapiens
agaccagtgaattccatgagcataagcccactgccacaattttttagctgtaaagtgagtgccttggttagaggcaatgctgtgtggagtaccgcaatggtggataaggcattctgtgagtccatgaatggcagtattggcagaagcattgcattcaggataggcaaacccatatacagagaaagtgtctattccagtgaggacaaatctctgtcctttccatgatggaagagatccaatataatcgacctgctagctggctayccaccctgaggaatggtgccacatcgagggctcagtgttggtctctgctgctgtcaaattgggcactcagcagtggccatagccaggtcagccttggtaagtgcaagtccatgttgctgagttcatgcaaaacctccatcactgccaccatggccactttgttcatgggcccatcgggcgatgacaggggtggcttgggaaagaggctgagtggtgtccacagaacaggtcatcctatccacttgattagtaaactcctctgctgaggtcacccattga

SEQ ID NO: 446522 - DNA, 543 bp, Homo sapiens
agaccagtgaattccatgagcataagcccactgccacaattttttagctgtaaagtgagtgccttggttagaggcaatgctgtgtggagtaccgcaatggtggataaggcattctgtgagtccatgaatggcagtattggcagaagcattgcattcaggataggcaaacccatatacagagaaagtgtctattccagtgaggacaaatctctgtcctttccatgatggaagagatccaatataatcgacctgctagctggctatccaccctgaggaatggtgccacatcragggctcagtgttggtctctgctgctgtcaaattgggcactcagcagtggccatagccaggtcagccttggtaagtgcaagtccatgttgctgagttcatgcaaaacctccatcactgccaccatggccactttgttcatgggcccatcgggcgatgacaggggtggcttgggaaagaggctgagtggtgtccacagaacaggtcatcctatccacttgattagtaaactcctctgctgaggtcacccattga

SEQ ID NO: 446523 - DNA, 543 bp, Homo sapiens
agaccagtgaattccatgagcataagcccactgccacaattttttagctgtaaagtgagtgccttggttagaggcaatgctgtgtggagtaccgcaatggtggataaggcattctgtgagtccatgaatggcagtattggcagaagcattgcattcaggataggcaaacccatatacagagaaagtgtctattccagtgaggacaaatctctgtcctttccatgatggaagagatccaatataatcgacctgctagctggctatccaccctgaggaatggtgccacatcgagggctcagtgttggtctctgctgctgtcaaattgggcactcagcagtggccatagccaggtcagccttggtaagtgcaagtccatgttgctgagttcatgcaaaacctccatcactgccaccatggccactttgttcatgggcccatcgggygatgacaggggtggcttgggaaagaggctgagtggtgtccacagaacaggtcatcctatccacttgattagtaaactcctctgctgaggtcacccattga

SEQ ID NO: 446524 - DNA, 629 bp, Homo sapiens
atcacctattttcctgtgcttttttttgtttacgtatttttgtgtgtgattttattaacatgttttttttacatcttaacatttgtaaatattccctgttcatttttttaattcccaattttcatagctattgtgaacctttttttgaaatctgtttataaaatttttaaattaaaaattaattagatgtttaatcaaaattgaattggatttctaaattactttgagagaatgtggcatttttccatgttaattcattccacaaaatgagaataactatttctgtatcctgttcttttaaatttttaatcatactctaaaattgtctcagcagaggtactcatatttaaataattacatatccagaagcattgcatttaaatgcaaaagataatttattaaagttctctctctcgatattggtcacaaatacagtcaacttttagattatattattcgaccactctgtatcatgcatactttgtgtgtttgacctataacatttcctttctttggttcatacgttccaaataaatatttttccaccccattattttaaacttttaaagaaattcttgtatataaatgtttttttgsggggaggataattgactttttctttctttttt

SEQ ID NO: 446525 - DNA, 636 bp, Homo sapiens
ccgtttctccttccatgaaaagtatacaacctgaagttcttcctatggggaagatgtcccttcagcgctgtccttcaggcatgtcctagaaaggggctgcagtgctgcagctgtccacttttgggtggtacctacataacgtgcagaaccgtatgtgaaccaggcccaagtcttctcttcctctgtcatctgttaatagggaactctccataaagccatgaatgctggctgggggagagaaggaggatggcaggaatagagaccatgggcatttgaccacttcctcatgtaacttacctgtaccttcaggacctgctcaaggctgatcatgtatacatcacttccatttgatgatagaatgccgctgtgcacaacccactttatggctggataggtcagaaagcacccagttcatgataggcagttaggttacatggtgacttgttgacccatagtcaaacgttcagtttacaccaaagccyagtaacatgccaagagctgtctttcaaaaggagagtacttatctgcaggagatggcagggctttgctacaaaatcctggaggcctttgctctaatttacctgtaggcgcctgccaaaggctccaaacagcatccctatctgccattgacacctc

SEQ ID NO: 446526 - DNA, 618 bp, Homo sapiens
gttcagtttacaccaaagcctagtaacatgccaagagctgtctttcaaaaggagagtacttatctgcaggagatggcagggctttgctacaaaatcctggaggcctttgctctaatttacctgtaggcgcctgccaaaggctccaaacagcatccctatctgccattgacacctcaagcaccattggatctgctgtatcatatggcccaartggcaaagcagcttgcacagcagcctaagtctgttacagaaccttctcctgttctggaccccactcaaaactggcagccttttgggtcacttgataaatgggctggagtaacacgcccaaatgaggaatgtgttgcttccaaaatctaaataagcccagtaggcattgtgcctctttcttggttgtagtaggggccaaatgcagcaacttatcctttaccttagaataaatatcttgacagatcccgcaccactggaccattggaaattttactgaggtagaagttccctgaattttagtctgatttctttcccatcctgtggcatgcatatatcacaccaataagtccaatgtatttcctagttcttgctcactgcatccagtcagcataatgtcatcaatgtatt

SEQ ID NO: 446527 - DNA, 584 bp, Homo sapiens
ctacattaaaccaagggagatcaggcatttccaactcattcacagtgggctgtcttttcatccttatttcagctaaccaagcaaataaactgtcagaatcttttttaaatccctgagctgcaagattaaatgcagagtctctacctagtgcacccaaatcaataaattcctaacccaactttatgttccttccacaattatcccacacccttaatattcattcccatgcctattctccagatttctgcttatataaattagaaaactcaagcagttatttttgagtgttgcacatcttctcttgggtcatactctcaacctcacctctaggagcccgccaggattttaatctagttataggtctagaagcaaacaggggttttgggggtggctcctgaggagaattaacatyatcttgcctggcaactgcctcaggtgagggtgttactgttgccttagtgcagggtttatctcttcagacaaaggtagaaaggctgatggcagcatgggtcagggagggaatgttcccattactggggatggggaagctgtttcttctggtgaaaaatgttcatcagagtttt

SEQ ID NO: 446528 - DNA, 592 bp, Homo sapiens
atgaaactattttagcctcagatatttaatatcgttcaaaacagctaaagaaaacatttttaatttgtagtatatcaatcctcactgtaaaatatggaaagctcaggctaaaattaacttcaatgtttattcttaacaccatatataaagcatactattatggatttatataaataaaataaatataccacattaaaaaagtaagagagaaaaaaacccacatgaaaggattgattcattcatttattttctgagaattgaagtttcatcaatacagcaaagtaacagaaatgaggaaatttaaaatctgggatgttacaaggaaaaggtctgaataactaaaatcttttggaatcagtaaaccagaaagggtaagcttttggraaaatagccttaatataagcatccctcaagcattactttaacttatagtataatgctttttacttacattttctgcattattgtgactttttgaaaaacatgaattcaaagaatcataggtcaaattatgcatttaaaaataatttaatatatgctaaaattatgtatgtttgatatatagtgtgcttaaattattgataagccactg

SEQ ID NO: 446529 - DNA, 526 bp, Homo sapiens
aagcaaacaaataaataacaaataaatactattggttgtctttaagttaggagtcaaaaactcacttgtgtccaggcaattagacagccctttgggtcctacatggagctcctgccctctcttaaaacttccaatcttgagtatggaggcacctgggctaatgcttgccggattggtttcatttttctttccacccacagaagttccattaagcagatgtccacagtgtttcaaccttccaggaaattgcagacttctcttattggcttatgtttcttctccatttttgctcttatgggtggatcattgtatttttactttaattatcarttgcttggtataattaaatttggtttgcagggggaaatcaagaaatgtgtgtgttcatttttaattcttggagtttgtatttctagaatagtgatgcaatagaatgacatacttattaggataacactaaataagtgttcagaagttaattattatttaaaagagtttcttttcaaattttctatcttacataaat

SEQ ID NO: 446530 - DNA, 618 bp, Homo sapiens
cttattaggataacactaaataagtgttcagaagttaattattatttaaaagagtttcttttcaaattttctatcttacataaataatgtgaatgaaattttatagaattttacttgataaaagtctatttttttttgccagggaatatgggaatgttttaacatagcaatgaattttattactactgagatgttatttacaccttagtatatttaactcactcaaaaatggcttatattttcttctattatatatataaaattatatatgcataaatatatctgtatctctacatatcatctctgtatatatatatatatgtatatatatatatctatatatctatatctatctatatatatatctatatatctatatctatctatmtatatatatatatatatatatatcttctcagtagctatcatgattccgtaacagaaagtaaatattataacttagaaaaaactgaaatttctcatgtcaagtgtacgtttctttatactttatagaaaacatctttttctctaatgctttgtactggaaatgtcatcttatgacaaagtaaatacaaacaaccaaatatatccttttttatacgcctatactctgcaaag

SEQ ID NO: 446531 - DNA, 571 bp, Homo sapiens
caccacacctggctaatttttgtaattttagtagagatagggttttgccatgttggccaggctgggcttgaattcctgacctcaagtgatctgcccactttggccccccgaagtgctgggattacaggcatgagtcacygcgccaggcctggaggccattactgtaaatgaaataactcagtaacagaaaatcaaataccacatgttctcatgtatgagtgggaactacacaatgcatacacatagatacacagggaaaaataacagacactagggactccaaaactgtggaggagagaaatggttgacggttgaaaaattacctactgggtacaatgtttactattcaggtaatgggtacactggaagcccaaacctcaccattatgcaatatacccatgtaacaaacctatacatgtacctctgaatctataaacataaaatatactgtttaaaaaccgaattattatattaaaatacatgtaaaatacttaactcatagctattacatgtggatataatatgggtatgtattatatatatgtgtatgtagtggacaaacacatacata

SEQ ID NO: 446532 - DNA, 632 bp, Homo sapiens
gaataaccatttgaccccaaaatcccactactgagcatccagccaaagaaaaccatataattatattaaaaagacatctgcacttgcatgtttatcacagcactattcccagcaaagtcatgaaatcaacctaagtgttcatcaacagtatattgaataaagaaaacatggtatatatatactatggaatacaactcagccataaaaaataaatgaaataatgtcttttgcagcaacatggttagaagtgtaagccactttatttatttatttatttatttatttgagttagagtctcactatgtcacccatgctggagtgcagtggcacaatcttggctcaccgcaacctctaccttctgggttcaagccattctcctctcctgcctcagcctcccacatagctgggattacaggcctgggccaccacacctggctaatttttgtaattttagtagagatagggttttgccatgttggccaggctgggcttgaattcctgacctcaagtgatctgcccactttggccccccgaagtgctgggattacaggcatgagtcaccgcgccaggcctggaggccattactgtraatgaaataactcagtaacagaaaatcaaataccacatgttct

SEQ ID NO: 446533 - DNA, 572 bp, Homo sapiens
taaataactgcagtctgcaaagcagcaggatgaaaagtctatacataaagctgtatttctatatattagcagtaaacaatttgaaaataaaatttataaaaatcagtttacattagcatttaacagcatactaatattagaatagaatttaacaaaagctgtgcatgactttattttttttttactgaaaattataraacaaaactgagggaaattgaagaagccataaataaatcaagaggtagactgtgttcataaaatgaaagtctcaatgtggttacattttgactttccatgaattaatttatgaattcaatgcacctcaatcataatccagaggcttttttactggactctgacatgatgattctaaaataagattcacatggccaagagtagtaaaatgattttttaaatgagcagtaaatctggagaatctacagtactaaattttggcgtaagagtgtaaaaatgaaaaaaaaaaaaacccacaagtccaggaataaaccacatttattttggtcaattgattgtgacaaaggttcctaagaaaatcaatgaatatatgaaaa

SEQ ID NO: 446534 - DNA, 572 bp, Homo sapiens
taaataactgcagtctgcaaagcagcaggatgaaaagtctatacataaagctgtatttctatatattagcagtaaacaatttgaaaataaaatttataaaaatcagtttacattagcatttaacagcatactaatattagaatagaatttaacaaaagctgtgcatgactttattttttttttactgaaaattataaaacaaaactgagggaaattgaagaagccataaataaatcaagaggtagactgtgttcataaaatgaaagtctcaatgtggttacattttgactttccatgaattaatttatgaattcaatgcacctcaatcataatccagaggcttttttactggactctgacatgatgattctaaaataagattcacatggccaagagtagtaaaatgattttttaaatgagcagtaaatctggagaatctacagtactaaattttggcrtaagagtgtaaaaatgaaaaaaaaaaaaacccacaagtccaggaataaaccacatttattttggtcaattgattgtgacaaaggttcctaagaaaatcaatgaatatatgaaaa

SEQ ID NO: 446535 - DNA, 522 bp, Homo sapiens
cttttaacataaaagagttaataaaaaatataaagtgtgctggagatttacaaagggttgtctgttttctttttttccccagtgtaatttgtttcatttcaactcagtaaaaatttatatcatataagaaggcttgtatggacacacagaggagcaagatttgaacactacctctcagtaaatttaatgtatgaagaaacaactgtcatatcattgtgcaggtggtacattacataaagctagagtgtgtgaatgggattccctagacttgtgtgttacacaacsggaaaaactatataaacaaatcgatgtcagttttctttgatgtataataaatttccataaactttcagcttaaaggaacacatatttattgtctcaatgtatccctggtccaggagccaaagattcatctagctgggtcctctgtttcagggtccaattacaaggctgaaatcaaggtagaacttggaccatggtttcatcagaagctcaaatagggaaagatctgcttccaacctc

SEQ ID NO: 446536 - DNA, 438 bp, Homo sapiens
cagtagaaaaacatcaatagtttgtctatgcacattttttctttcttkcttgcttttctttttttctttttctaccaaggcctgctgtgtcacacttgcctgttgccagagaggctcccatttgctccaagggataaattaaatgatctgggctgcctttgttgctgggttggtgattatagacaatgcggagccagagtcttctctttttgttgcttggagtgacagaagacaccctgctgagttgttcttccagctctagggtgacaaaactgtgcaacttcctcacactactctgaagttgttctttggttgcctgttgcattatttctaaggttttagttgtacttagccaagagaagcagagagaaagtagtatattatattttagctgaaccagagtccatatggaactttttctatcctaataagttccta

SEQ ID NO: 446537 - DNA, 438 bp, Homo sapiens
cagtagaaaaacatcaatagtttgtctatgcacattttttctttcttgcttgcttttctttttttctttttctaccaaggcctgctgtgtcacacttgcctgttgccagagaggctcccatttgctccaagggataaattaaatgatctgggctgcctttgttgctgggttggtgattatagacaatgcggagccagagtcttctctttttgttgcttggagtgacagaagacaccctgctgagttgttcttccagctctagggtgacaaaactgtgcaacttcctcacactactctgaagttgttctttggttgcctgttgcattatttctaaggttttagttgtacttagccaagagaagcagagagaaagtagtatattatattttagctgaaccagagtccatatggaaytttttctatcctaataagttccta

SEQ ID NO: 446538 - DNA, 602 bp, Homo sapiens
ttttaaaatgttttatatggcttaaaggctgtataaaaacaggctgcaaaccagatttggccctccagcctttagcttgccaacccctggtctctaccaaaggaggctttcttgattgagaaagttaatcaaagtaatataatttttaaattatctgtgcattttgaatggggacattacaatatttgaatcatattgactttagagataaccaaaattttaatatgtttttcagtttaactgctgygtatgttttgacctgtctttaacctactgacctgtcaaaatgtgggtagctaaaattcttcatttaatttgcactttgtattttttagttgagaccaggtattggcaaactttgttattattattattactattattatttttaaacagacagatggtaagtggtttattcctgtcggcataaagatttctgttacagacattaaatactatcttcacagtcaaaaccagccatggatggtatataaatgaataaatgtgactatgttgcaataaaactttatttatttaaaaaatggcttttcactgtttttatagttttaaaagacaattctgtttggtgattttgtcgttag

SEQ ID NO: 446539 - DNA, 607 bp, Homo sapiens
tagaaactcatgcaaacactttagcttgttaatagtgtgtgtgagtagatgagagaataacttgctgtggaataaattccagaacaataatacaaaaatgaaaaggagaagaaagagtggacaagaaaaactgactccttgcttccattcctacagggagatcacacataaagaaactttcctttccttccaactggtggggttcctcatgtgatggatgtctccaattccaagcaatattacagctagcagttcagtacctctctgctcagcagtgaaggtaatgcgatgtgttttcaacaggcactgcaggggaactgagatttttctttttatatatcatttataaattgatgctgtaacttcaccaaacagtagycttttaaaacttaatgagaatgaaaaattgtgtgtatgttcacatgtatatatgtgtgtgtaagagtgagtttatgtttaacatttgatgttcctaggaagtttaggggagcaacagttcaagcacttgaatatatttttatgctttgtttcttatttctttgtaaatatacctttatctttaatttgtatattgataatagaaatgcaggacaaatgattttttaaa

SEQ ID NO: 446540 - DNA, 629 bp, Homo sapiens
taacaaataaaactactggcatctaggtaattctgaatttcagataaaagtgaatacatttttaatacaagtatgtcccacttattgcatggaaaagcttgtactaaaaaattatttgtggtttatctaaaatttaaatttagctgggaaatcctatattttatctggcaacgctgatattgtctactccacatttaattgtcataaagtctcattttaggtaaaatataagttatttcggtgttcacatatraatacagaacaaatatgtaggtagattaaatatattcttgagcctgggaaagctgtctttttttttttttctttctctttattttagtaaagtcaagcagtgaacaatgttccataaaggtcaattgggcaactgtaccatctgctctgggtccctagaataaatctcctgctggggcactgatatacatgagcacatgttgttttcacaaagaccaaaatcttatattgtattcttgtttgatccccgctgtggatgccagcttagcagtgtcagtaatggtgtttgtgcctgaattctggaccttcattacacagattgctgccagtcccagaaataaagactccactagattaaagaaacatgaaataaaatg

SEQ ID NO: 446541 - DNA, 558 bp, Homo sapiens
ttcttaataatttaatctagcaccacttgacaaaatgattgaatctattataagacactttaatgttttagaagtatctcttatctgctgaaaaataatatattcacttattaaactatacaatactgatatattttaacatttatgttgaaaatacctgtattcatttgttcttgcactgctataaagaactacctgagactgggtaatttatgaagaaaagatgtttaataagctcacagttccctgaactatacaggctgctgtttctgtggaggacgcatgaaacttacaatcatggcagaaggcaaaggggaagaaagttcatgttcacataggtgacaggaaagataaatcatgaagagggaagtgctacacacttttaaacaagcagatctctttaaaactgactcactatcacaagaacagtaagggggaagtctgtccctataatccaatcacctgccaacagactgctcctcccacaytgaggtttacaattcgacatgagctttgggtggggacagagagccaaaccatatcatttcacgcctggcc

SEQ ID NO: 446542 - DNA, 446 bp, Homo sapiens
gctccaaaataagcatttttgactccatgtctcacatccaggcctcttagacacaatgggtaggctcccaaagtctcccacttgggcatctctgcctctgtggctttgctaggtataacacccatggctgctttcatgtgctggctttgagtacctgtggctttaccaggtacatggtacaagctgtcagtggacttacaattccagggtctagaggatggtagtcctcttttcacagctccactaggcagtaccccagtggggaatctgtgagaggactccaaccccacatttcccctcygcactgctctaataggggttcttcatgagggatccatccctgcagcaggtgaatacctggacatccaggtgtttccatacatcctctgaaatctcagcagaggctcctcagccttaactcttgccctctgcacttctcaggatta

SEQ ID NO: 446543 - DNA, 446 bp, Homo sapiens
gctccaaaataagcatttttgactccatgtctcacatccaggcctcttagacacaatgggtaggctcccaaagtctcccacttgggcatctctgcctctgtggctttgctaggtataacacccatggctgctttcatgtgctggctttgagtacctgtggctttaccaggtacatggtacaagctgtcagtggacttacaattccagggtctagaggatggtagtcctcttttcacagctccactaggcagtaccccagtggggaatctgtgagaggactccaaccccacatttcccctccgcactgctctaataggggttcttcatgagggatccatccctgcagcaggtgaatacctggacatccaggtgtttycatacatcctctgaaatctcagcagaggctcctcagccttaactcttgccctctgcacttctcaggatta

SEQ ID NO: 446544 - DNA, 596 bp, Homo sapiens
attgcccaatagcccctccaaattttgtggcttgaattcccaaagcacatcgcccttacaatagcagctggtgaccccaaaatgataagtagaagcaaaatgtcccaattgcttatggtaactttagttgcccaaggtcagaacaacccagttatctgtttagaaatccctgatgaggaattgtaccaattttcccattcttgtgaatgagtctgaaactccaaatgccttgtgaaactggaactgtgaatttgaaaatgcgattcatmttcctggcagcagtgtctttaaccttaaatactaaactgagcattcttaaaactctaaggtaaacaataatgtatttgagtaaaataactaaaaagaaaatgaactgaaggccctctggggtttggcccagttctgtatagataataaacccaaatagaagttactagtaggagtggataaataaggaacaacatattgaggtggatataaacatcatactaatcaaataaatggattgaacttctcttatcgttcctgtaggatggcagcctctcacttagaaaactcctaatcattataaatgtcatccttacccagcaaaaatt

SEQ ID NO: 446545 - DNA, 608 bp, Homo sapiens
  misc_feature (1)...(608): n = A,T,C or G
ttatagttttagtccttacatttatgtggattagctcaaaatggatccatttgatccaattactttgcacccatagtttttgtatatggtgtgggtaaaaggtcctactacaggttttgcatatgttaacatatctagttgtccttgtccagttttcaaacttcttttccccactgaataatcttggcactcttgtcaaaagcagtggttatatatgtacgggttcatatctgactctcaattctatcccactggtctatacatctatctttctgctagtattatattgtcctgattaccattgtcttgtagtaagttttanagtcagtaagtatgagttcttctactttgtttctcattttcaaaagattattttggctattcttagtcccttgcaattccatatgaatttcagagtcagcttgycgattttacagagaactcatctgggattctgacagggatgaagttaaatctgtagatgagtttagggagtactgccttcttaacaatgttaagccttaggttcatgatcatgggatacttttacatttatttagatcttctttcatttctttcaacaatgttttatagttttcagagtacaa

SEQ ID NO: 446546 - DNA, 298 bp, Homo sapiens
aaacatgcttaaagggatggatamccactctccatgatgtgattagttcatgctgcatgcctgtatcaaaacatctcatgcaccccataaatatatatgcttattatatactcacaaaaatgcttgaaaataaaaataaaggaactactgaaggtcaggtcagagtggaaatgtaaaaatactaattagagaataatgtgaatacaacaggaatcctgttggtattctatttatattgtaagcagcagttcaattgttttgaaaaagtaatttcaattttaatcactgaactaaagaa

SEQ ID NO: 446547 - DNA, 283 bp, Homo sapiens
tataatatttgttgttttgtaagtaggttccatgttatgtgtcacatgtgtcacgattttcttcctttctatggctgaataatatttcttcatatatatattatatatatattacatatatattatatacatacattatatatattatatatattatatattatatatatatataatatatatcatatatatatatgcttttgtttatccacctattcctggayggacgtttttgtttcttccaccttgtggctgtgtaatgctgctgtgaacttaggtgtgc

SEQ ID NO: 446548 - DNA, 469 bp, Homo sapiens
ggtctgggcttcccaaagggtcacagctcttgtttccttctctttgcccacaatgtggcaagcaagggggcatgactcagccctgtttgtgttacagctctttcagcctcttccctaggatttgtcataattaattctcatattgtcttatttttttacrtttgtttcaacttcagaagatgcatggatctaaacacaacataatgtgttagctagctgccatatgaatttctccgtgtttcaccactatgcagcctaaagttattccgtcatccatgactatcctggctaaagagtctaaagatctttgtttggtagctatggcttcagctagttcattcgctaatttacctagagtggttgacagatttctaattatacgttcatgagaggttactccccaccattacaagtgacttctgccaaacattggccaaaattcacctacttggtttgcaggtatggtttg

SEQ ID NO: 446549 - DNA, 469 bp, Homo sapiens
ggtctgggcttcccaaagggtcacagctcttgtttccttctctttgcccacaatgtggcaagcaagggggcatgactcagccctgtttgtgttacagctctttcagcctcttccctaggatttgtcataattaattctcatattgtcttatttttttacatttgtttcaacttcagaagatgcatggatctaaacacaacataatgtgttagctagctgccatatgaatttctccgtgtttcaccactatgcagcctaaagttattccgtcatccatgactatcctggctaaagagtctaaagatctttgtttggtagctatggcttcagctagttcattcgctaatttacctagagtggttgacagatttctaattatacgttcatgagaggttactccccaccattmcaagtgacttctgccaaacattggccaaaattcacctacttggtttgcaggtatggtttg

SEQ ID NO: 446550 - DNA, 469 bp, Homo sapiens
ggtctgggcttcccaaagggtcacagctcttgtttccttctctttgcccacaatgtggcaagcaagggggcatgactcagccctgtttgtgttacagctctttcagcctcttccctaggatttgtcataattaattctcatattgtcttatttttttacatttgtttcaacttcagaagatgcatggatctaaacacaacataatgtgttagctagctgccatatgaatttctccgtgtttcaccactatgcagcctaaagttattccgtcatccatgactatcctggctaaagagtctaaagatctttgtttggtagctatggcttcagctagttcattcgctaatttacctagagtggttgacagatttctaattatacgttcatgagaggttactccccaccattayaagtgacttctgccaaacattggccaaaattcacctacttggtttgcaggtatggtttg

SEQ ID NO: 446551 - DNA, 599 bp, Homo sapiens
cacaacataatgtgttagctagctgccatatgaatttctccgtgtttcaccactatgcagcctaaagttattccgtcatccatgactatcctggctaaagagtctaaagatctttgtttggtagctatggcttcagctagttcattcgctaatttacctagagtggttgacagatttctaattatacgttcatgagaggttactccccaccattacaagtgacttctgccaaacattggycaaaattcacctacttggtttgcaggtatggtttgtctaatcctggaaagtaatttcgatgaactacttcagtgttcagaaacattggagttataaatagaaagaggaagagtgacataacctaatggacaattatttctgatatgccagcggtcaacacattcataagcccatgggtggttgatccagggaccacacagcgggcctgacagactctgaaagttaaggctttggtttactggtaacagagacaggttaaagtacatgtcttcagtcttgagtagagtgataatcagtctcatttttttttaagtttaagtagtccttcaaaaatacatctcattcctgacaggataaaa

SEQ ID NO: 446552 - DNA, 273 bp, Homo sapiens
ttggccaaaattcacctacttggtttgcaggtatggtttgtctaatcctggaaagtaatttcgatgaactacttcagtgttcagaaacattggagttataaatagaaagaggaagagtgacataamctaatggacaattatttctgatatgccagcggtcaacacattcataagcccatgggtggttgatccagggaccacacagcgggcctgacagactctgaaagttaaggctttggtttactggtaacagagacaggttaaagtacatgt

SEQ ID NO: 446553 - DNA, 357 bp, Homo sapiens
aacacttggagccaggaaataattcaggattcagcccaaattataggcaaataataaaaactctaaaacaatgatcagggttggaatctaatagcatatgtcatagttttcttttggaacataaattttctctctartccatcattttatcaaagacaaatcatagtaggaccaattttgtatgcaaaataagttttagtcttatcataccgggcctgattatttccataaagggcagcaagaatatttattggccatataggcttcttaaaattggctttgttggaaatttttaatgaggaatcttagacttttaagagccttgaagctagccaagtcaaagatttgcatcagact

SEQ ID NO: 446554 - DNA, 357 bp, Homo sapiens
aacacttggagccaggaaataattcaggattcagcccaaattataggcaaataataaaaactctaaaacaatgatcagggttggaatctaatagcatatgtcatagttttcttttggaacataaattttctctctagtccatcattttatcaaagacaaatcatagtaggaccaattttgtatgcaaaataagttttagtcttatcataccgggcctgattatttccataaagggcagcaagaatatttattggccatataggctycttaaaattggctttgttggaaatttttaatgaggaatcttagacttttaagagccttgaagctagccaagtcaaagatttgcatcagact

SEQ ID NO: 446555 - DNA, 539 bp, Homo sapiens
aatcatagtaggaccaattttgtatgcaaaataagttttagtcttatcataccgggcctgattatttccataaagggcagcaagaatatttattggccatataggcttcttaaaattggcyttgttggaaatttttaatgaggaatcttagacttttaagagccttgaagctagccaagtcaaagatttgcatcagactgtgtctgtaataattttttaacctactttttaaaattatactttaagttctggggtacatgtgcagaacgtgcaggtttgttacataggtatatatattctgcggtggtttgctgcacccatcaacccatcacctatattaggcatttctcctaatgctatccctctccctgcccccaccccctaacaggccccagtgtgtgatgttcccctccctgtgtccatgtgttctcattgttcaactcccacttatgagtgagaacatgtggtgtttggttttctgttcttgtgttagtttgctgagaatgatggattccagcttcttccatgtccctgcaaag

SEQ ID NO: 446556 - DNA, 539 bp, Homo sapiens
aatcatagtaggaccaattttgtatgcaaaataagttttagtcttatcataccgggcctgattatttccataaagggcagcaagaatatttattggccatataggcttcttaaaattggctttgttggaaatttttaatraggaatcttagacttttaagagccttgaagctagccaagtcaaagatttgcatcagactgtgtctgtaataattttttaacctactttttaaaattatactttaagttctggggtacatgtgcagaacgtgcaggtttgttacataggtatatatattctgcggtggtttgctgcacccatcaacccatcacctatattaggcatttctcctaatgctatccctctccctgcccccaccccctaacaggccccagtgtgtgatgttcccctccctgtgtccatgtgttctcattgttcaactcccacttatgagtgagaacatgtggtgtttggttttctgttcttgtgttagtttgctgagaatgatggattccagcttcttccatgtccctgcaaag

SEQ ID NO: 446557 - DNA, 539 bp, Homo sapiens
aatcatagtaggaccaattttgtatgcaaaataagttttagtcttatcataccgggcctgattatttccataaagggcagcaagaatatttattggccatataggcttcttaaaattggctttgttggaaatttttaatgaggaatcttagacttttaagagccttgaagctagccaagtcaaagatttgcatcagactgtgtctgtaataattttttaacctactttttaaaattatactttaagttctggggtacatgtgcagaacgtgcaggtttgttacataggtatatatattctgcrgtggtttgctgcacccatcaacccatcacctatattaggcatttctcctaatgctatccctctccctgcccccaccccctaacaggccccagtgtgtgatgttcccctccctgtgtccatgtgttctcattgttcaactcccacttatgagtgagaacatgtggtgtttggttttctgttcttgtgttagtttgctgagaatgatggattccagcttcttccatgtccctgcaaag

SEQ ID NO: 446558 - DNA, 539 bp, Homo sapiens
aatcatagtaggaccaattttgtatgcaaaataagttttagtcttatcataccgggcctgattatttccataaagggcagcaagaatatttattggccatataggcttcttaaaattggctttgttggaaatttttaatgaggaatcttagacttttaagagccttgaagctagccaagtcaaagatttgcatcagactgtgtctgtaataattttttaacctactttttaaaattatactttaagttctggggtacatgtgcagaacgtgcaggtttgttacataggtatatatattctgcggtggtttgctgcacccatcaacccatcacctatattaggcatttctcctaatgctatccctctccctgcccccacccccyaacaggccccagtgtgtgatgttcccctccctgtgtccatgtgttctcattgttcaactcccacttatgagtgagaacatgtggtgtttggttttctgttcttgtgttagtttgctgagaatgatggattccagcttcttccatgtccctgcaaag

SEQ ID NO: 446559 - DNA, 464 bp, Homo sapiens
ccccctgtcctgtacccgtatatgtcccagaccccaggctccagaagcagacaagcagatgaggagatgaacagaagagcagaattgcagaatgatgtggcagaaagaagagaaggagcacctgaatgccaagaggagtttggctggcagtggttggagagatcagcctcyggatggcaaagctcccggagaagatcatcttccattccatcccctttccagctccccatccatcccattgagtgccacctccaccactcaataaaacccccacattcaccatcctcaagtctgtgtgcaacttaattctttctggatgctggacaaggaactgggtaccaagagggcactgaacaggttaacacttaagcagtctgtggatggcaaagctaaaagagtgcactgtaacacatgcccacttgggctgtgggagtcgcaggcacccacccctagacagtaccatg

SEQ ID NO: 446560 - DNA, 464 bp, Homo sapiens
ccccctgtcctgtacccgtatatgtcccagaccccaggctccagaagcagacaagcagatgaggagatgaacagaagagcagaattgcagaatgatgtggcagaaagaagagaaggagcacctgaatgccaagaggagtttggctggcagtggttggagagatcagcctccggatggcaaagctcccggrgaagatcatcttccattccatcccctttccagctccccatccatcccattgagtgccacctccaccactcaataaaacccccacattcaccatcctcaagtctgtgtgcaacttaattctttctggatgctggacaaggaactgggtaccaagagggcactgaacaggttaacacttaagcagtctgtggatggcaaagctaaaagagtgcactgtaacacatgcccacttgggctgtgggagtcgcaggcacccacccctagacagtaccatg

SEQ ID NO: 446561 - DNA, 440 bp, Homo sapiens
aactagtttttgtatcttctaaaaatttttatctccagaaagctctaattttcattcctttacaagctttatttctctctcctttccaacaccagactttgctctgtttgttttctatatcttttttagagatgcctacaatagaaaaaawctatgacatattcaatacatctgaaaagtttacattgccatagataagaatgaattatctgtttataaagaaaaaacaataaaaatatgaaccaagaaagcacagaaggtagtaaccacatttagatgtttatcatggaatcatctttataatccatctgttacaattccacacagcaaattacaagtaattgtgaagtttcccctcattttataggtttggtcttataaggcatacaacacaaattttaattacttttctttttggtatttggatcttaatttggtca

SEQ ID NO: 446562 - DNA, 440 bp, Homo sapiens
aactagtttttgtatcttctaaaaatttttatctccagaaagctctaattttcattcctttacaagctttatttctctctcctttccaacaccagactttgctctgtttgttttctatatcttttttagagatgcctacaatagaaaaaatctatgacatattcaatacatctgaaaagtttrcattgccatagataagaatgaattatctgtttataaagaaaaaacaataaaaatatgaaccaagaaagcacagaaggtagtaaccacatttagatgtttatcatggaatcatctttataatccatctgttacaattccacacagcaaattacaagtaattgtgaagtttcccctcattttataggtttggtcttataaggcatacaacacaaattttaattacttttctttttggtatttggatcttaatttggtca

SEQ ID NO: 446563 - DNA, 440 bp, Homo sapiens
aactagtttttgtatcttctaaaaatttttatctccagaaagctctaattttcattcctttacaagctttatttctctctcctttccaacaccagactttgctctgtttgttttctatatcttttttagagatgcctacaatagaaaaaatctatgacatattcaatacatctgaaaagtttacattgccatagataagaatgaattatctgtttataaagaaaaaacaataaaaatatgaaccaagaaagcacagaaggtagtaaccacatttagatgtttatcatggaatcatctttataatccatctgttacaattccacasagcaaattacaagtaattgtgaagtttcccctcattttataggtttggtcttataaggcatacaacacaaattttaattacttttctttttggtatttggatcttaatttggtca

SEQ ID NO: 446564 - DNA, 562 bp, Homo sapiens
ctacgtaatctgtacaccaaatcccattgacacacrttttacccatataataaacctgcacatgtacccgctgaacctaaaataaatgttggaaggaaataaagttacaaccaactcttgtactgttgtgaggaaacaatcatatgtgttcacaaaaaatcaactactaatagatttataatagtatatatgtagcagaaaaatatcagatataacttatatacccaaaagtatgacttaaaaacagcatgacaatctttatgatgggatattgtgcaactactagaagcacattttcagagattatttattaacttatgataatgactacattgagtggtttttagaagcatgaattgaaaccatgtataagcatgactttattgaacttatatataacattacacacacatttacataattataaaataagtatgtgcatgttcataatatgtatttatttatattcatatgtaaggccaataggaagtaatctctgtatctgagttattatttcataaataatttatgcttgttctgtgaaaataaaaacactgctatg

SEQ ID NO: 446565 - DNA, 562 bp, Homo sapiens
ctacgtaatctgtacaccaaatcccattgacacacattttacccatataataaacctgcacatgtacccgctgaacctaaaataaatgttggaaggaaataaagttacaaccaactcttgtactgttgtgaggaaacaatcatatgtgttcasaaaaaatcaactactaatagatttataatagtatatatgtagcagaaaaatatcagatataacttatatacccaaaagtatgacttaaaaacagcatgacaatctttatgatgggatattgtgcaactactagaagcacattttcagagattatttattaacttatgataatgactacattgagtggtttttagaagcatgaattgaaaccatgtataagcatgactttattgaacttatatataacattacacacacatttacataattataaaataagtatgtgcatgttcataatatgtatttatttatattcatatgtaaggccaataggaagtaatctctgtatctgagttattatttcataaataatttatgcttgttctgtgaaaataaaaacactgctatg

SEQ ID NO: 446566 - DNA, 530 bp, Homo sapiens
gctgcagtggggtgggcagctccaggcacagrtgccagctccctgtgaggctgcagctggaccaggccgactgcaaacaacttccactgtgggtatcagggaatgcagtggcacccagaagcttggagatgcaggacctgcagagccccaaagaaggtgtcacagccctggttggaggagctcctaggtctgtgttccctgaagggacacagctcttctctccttctctcttctcttcttcttgcctgcaatttggcaagaaaggatagcgtttcagccctgtttatgttacacctctttcagccctgctagttggcaggtcctgagttcttgtcctgagtccaggaaaaatgaggtatgtggacaagtagaaggtgagcaaggtgaagaggtgctttattgagccacagtacagctcagaggagacctgcagtgggtagctcctttctgcaggcaggtcatcccaacgtctgttcagctctcagcagctgagaggagacgcacggtgggtagctgtgcccatagtgccc

SEQ ID NO: 446567 - DNA, 530 bp, Homo sapiens
gctgcagtggggtgggcagctccaggcacaggtgccagctccctgtgaggctgcagctggaccaggccgactgcaaacaacttccactgtgggtatcagggaatgcagtggcacccagaagcttggagatgcaggacctgcagagccccaaagaaggtgtcacagccctggttggaggagctcctaggtctgtgttccctgaagggacacagctcttctctccttctctcttctcttcttcttgcctgcaatttggcaagmaaggatagcgtttcagccctgtttatgttacacctctttcagccctgctagttggcaggtcctgagttcttgtcctgagtccaggaaaaatgaggtatgtggacaagtagaaggtgagcaaggtgaagaggtgctttattgagccacagtacagctcagaggagacctgcagtgggtagctcctttctgcaggcaggtcatcccaacgtctgttcagctctcagcagctgagaggagacgcacggtgggtagctgtgcccatagtgccc

SEQ ID NO: 446568 - DNA, 632 bp, Homo sapiens
tgccagctccctgtgaggctgcagctggaccaggccgactgcaaacaacttccactgtgggtatcagggaatgcagtggcacccagaagcttggagatgcaggacctgcagagccccaaagaaggtgtcacagccctggttggaggagctcctaggtctgtgttccctgaagggacacagctcttctctccttctctcttctcttcttcttgcctgcaatttggcaagaaaggatagcgtttcagccctgtttatgttacacctctttcagccctgctagttggcaggtcctgagttcttgtcctgagtccaggaaaaatgaggtatgtggacaagtagaaggtgagcaaggtgaagaggtgctttattgagccacagtacagctcagaggagacctgcagtgggtagctcctttctgcaggcaggtcatcccaacgtctgttcagctctcagcagctgagaggagacgcacggtgggtagctgtgcccatagtgcccaggcgttcgagctgaggagggccttccggccactgctgagccactsttagccacacctcagcctccctcctgtgcttgccagtgcccaaattctggagggggccgaggtggcagggggctggcatgtcagcact

SEQ ID NO: 446569 - DNA, 647 bp, Homo sapiens
ctcttctctccttctctcttctcttcttcttgcctgcaatttggcaagaaaggatagcgtttcagccctgtttatgttacacctctttcagccctgctagttggcaggtcctgagttcttgtcctgagtccaggaaaaatgaggtatgtggacaagtagaaggtgagcaaggtgaagaggtgctttattgagccacagtacagctcagaggagacctgcagtgggtagctcctttctgcaggcaggtcatcccaacgtctgttcagctctcagcagctgagaggagacgcacggtgggtagctgtgcccatagtgcccaggcgttcgagctgaggagggccttccggccactgctgagccactcttagccacacctcagcctccctcctgtgcttgycagtgcccaaattctggagggggccgaggtggcagggggctggcatgtcagcactgccctgagcttgcacaaaccaggccaggttgtgactgtgcccaggtttggcctcaacttggatctgaatttggagtgggctctggaagcagagagacgccaggtggcaggaccaggtacaactgagcctgcggggcaggggggcttgctgggcctctgagagtgcagagatgcctgggtttgcagtcatggctgg

SEQ ID NO: 446570 - DNA, 647 bp, Homo sapiens
ctcttctctccttctctcttctcttcttcttgcctgcaatttggcaagaaaggatagcgtttcagccctgtttatgttacacctctttcagccctgctagttggcaggtcctgagttcttgtcctgagtccaggaaaaatgaggtatgtggacaagtagaaggtgagcaaggtgaagaggtgctttattgagccacagtacagctcagaggagacctgcagtgggtagctcctttctgcaggcaggtcatcccaacgtctgttcagctctcagcagctgagaggagacgcacggtgggtagctgtgcccatagtgcccaggcgttcgagctgaggagggccttccggccactgctgagccactcttagccacacctcagcctccctcctgtgcttgccagtgcccaaattctggagggggccgaggtggcagggggctggcatgtcagcactgccctgagcttgcacaaaccaggccaggttgtgactgtgcccaggtttggcctcaacttggatctgaatttggagtgggctctggaagcagagagaygccaggtggcaggaccaggtacaactgagcctgcggggcaggggggcttgctgggcctctgagagtgcagagatgcctgggtttgcagtcatggctgg

SEQ ID NO: 446571 - DNA, 647 bp, Homo sapiens
ctcttctctccttctctcttctcttcttcttgcctgcaatttggcaagaaaggatagcgtttcagccctgtttatgttacacctctttcagccctgctagttggcaggtcctgagttcttgtcctgagtccaggaaaaatgaggtatgtggacaagtagaaggtgagcaaggtgaagaggtgctttattgagccacagtacagctcagaggagacctgcagtgggtagctcctttctgcaggcaggtcatcccaacgtctgttcagctctcagcagctgagaggagacgcacggtgggtagctgtgcccatagtgcccaggcgttcgagctgaggagggccttccggccactgctgagccactcttagccacacctcagcctccctcctgtgcttgccagtgcccaaattctggagggggccgaggtggcagggggctggcatgtcagcactgccctgagcttgcacaaaccaggccaggttgtgactgtgcccaggtttggcctcaacttggatctgaatttggagtgggctctggaagcagagagacgccaggkggcaggaccaggtacaactgagcctgcggggcaggggggcttgctgggcctctgagagtgcagagatgcctgggtttgcagtcatggctgg

SEQ ID NO: 446572 - DNA, 562 bp, Homo sapiens
ctacgtaatctgtacaccaaatcccattgacacacattttacccatataataaacctgcacatgtacccgctgaacctaaaataaatgttggaaggaaataaagttacaaccaactcttgtactgttgtgaggaaacaatcatatgtgttcacaaaaaatcaactactaatagatttataatagtatatatgtagcagaaaaatatcagatataacttatatacccaaaagtatgacttaaaaacagcatgacaatctttatgatgggatattgtgcaactactagaagcacattttcagagattatttattaacwtatgataatgactacattgagtggtttttagaagcatgaattgaaaccatgtataagcatgactttattgaacttatatataacattacacacacatttacataattataaaataagtatgtgcatgttcataatatgtatttatttatattcatatgtaaggccaataggaagtaatctctgtatctgagttattatttcataaataatttatgcttgttctgtgaaaataaaaacactgctatg

SEQ ID NO: 446573 - DNA, 298 bp, Homo sapiens
ctgaagtgaggagtgaggtctagaagcaactgggtccmttacagttctcagcagtgaggtccagaaacaactggactggttacagtgctcagcatttgccttatttgaacacagctgaccactcagcagtgtgtgagtggcagaagtttggctgttgggattggccaggactcagctactgttttaggcacatactcctaagttaggttttcagtctttctacctattaagttaggttgcagtttgtccacagggactcaaatctagaagtacagagtccttcccaggccatatttag

SEQ ID NO: 446574 - DNA, 298 bp, Homo sapiens
ctgaagtgaggagtgaggtctagaagcaactgggtccattacmgttctcagcagtgaggtccagaaacaactggactggttacagtgctcagcatttgccttatttgaacacagctgaccactcagcagtgtgtgagtggcagaagtttggctgttgggattggccaggactcagctactgttttaggcacatactcctaagttaggttttcagtctttctacctattaagttaggttgcagtttgtccacagggactcaaatctagaagtacagagtccttcccaggccatatttag

SEQ ID NO: 446575 - DNA, 298 bp, Homo sapiens
ctgaagtgaggagtgaggtctagaagcaactgggtccattacagttctcagcagtgaggtccagaaacaactggactggttacagtgctcagcatttgccttatttgaacacagctgaccactcarcagtgtgtgagtggcagaagtttggctgttgggattggccaggactcagctactgttttaggcacatactcctaagttaggttttcagtctttctacctattaagttaggttgcagtttgtccacagggactcaaatctagaagtacagagtccttcccaggccatatttag

SEQ ID NO: 446576 - DNA, 626 bp, Homo sapiens
cattacagttctcagcagtgaggtccagaaacaactggactggttacagtgctcagcatttgccttatttgaacacagctgaccactcagcagtgtgtgagtggcagaagtttggctgttgggattggccasgactcagctactgttttaggcacatactcctaagttaggttttcagtctttctacctattaagttaggttgcagtttgtccacagggactcaaatctagaagtacagagtccttcccaggccatatttagttcactgtaacagttcctattatgacctcactgacagttctttttctctgaattctcctttcttctcaacagcttatccaaatgttccattggtccctgttcatcttgccctgcagttctccttgactgattcagccctttgtggtttgcagtcctgtttctctacagcttggacctcttcagtctttccatcataggtttaactctctgttgaatgcttctttgtagctatccaaatttaccttaagctcaaaaaattcgaagtgaaagccacatcctcttctcttccttatgtgtatggcattactaccatgcagccagtgacccaaaatgggatttcttctgggcttttcttgcttagatt

SEQ ID NO: 446577 - DNA, 298 bp, Homo sapiens
ctgaagtgaggagtgaggtctagaagcaactgggtccattacagttctcagcagtgaggtccagaaacaactggactggttacagtgctcagcatttgccttatttgaacacagctgaccactcagcagtgtgtgagtggcagaagtttggctgttgggattggccaggactcagctactgttttaggcacatactccwaagttaggttttcagtctttctacctattaagttaggttgcagtttgtccacagggactcaaatctagaagtacagagtccttcccaggccatatttag

SEQ ID NO: 446578 - DNA, 626 bp, Homo sapiens
cattacagttctcagcagtgaggtccagaaacaactggactggttacagtgctcagcatttgccttatttgaacacagctgaccactcagcagtgtgtgagtggcagaagtttggctgttgggattggccaggactcagctactgttttaggcacatactcctaagttaggttttcagtctttctacctattaagttaggttgcagtttgtccacagggactcaaatctagaagtacagagtccttcccaggccatatttagttcactgtaacagttcctattatgacctcactgacagttctttttctctgaattctcctttcttctcaacagcttrtccaaatgttccattggtccctgttcatcttgccctgcagttctccttgactgattcagccctttgtggtttgcagtcctgtttctctacagcttggacctcttcagtctttccatcataggtttaactctctgttgaatgcttctttgtagctatccaaatttaccttaagctcaaaaaattcgaagtgaaagccacatcctcttctcttccttatgtgtatggcattactaccatgcagccagtgacccaaaatgggatttcttctgggcttttcttgcttagatt

SEQ ID NO: 446579 - DNA, 562 bp, Homo sapiens
ctacgtaatctgtacaccaaatcccattgacacacattttacccatataataaacctgcacatgtacccgctgaacctaaaataaatgttggaaggaaataaagttacaaccaactcttgtactgttgtgaggaaacaatcatatgtgttcacaaaaaatcaactactaatagatttataatagtatatatgtagcagaaaaatatcagatataacttatatacccaaaagtatgacttaaaaacagcatgacaatctttatgatgggatattgtgcaactactagaagcacattttcagagattatttattaacttatgataatgactacattgagtggtttttagaagcatgaattgaaaccatgtataagcatgactttattgaacttatatataacattacacacacatttacataattataaaataagtatgtgcatgttcataatatgtatttatttatattcatatgtaaggccaataggaagtaatctctgtatctsagttattatttcataaataatttatgcttgttctgtgaaaataaaaacactgctatg

SEQ ID NO: 446580 - DNA, 633 bp, Homo sapiens
gattacaggtgtgagccaccatgtccggccttatcctcaaaaaagaatttatcaaaattgtgtgtgtgtgtgtgtgtgtgtgtgtgtgtgtatgttttaagtagagtaatactatattaaaatgccactatatatgttctaacaaaaaacctcaatttaacaaatgtatgtggggagagggagagarggagagagagagagaaggagggaggcagagagagagagaagagagagatatgtatctctggtgactcttcctttttggatgatgaccccagtcctaacagattacggccttacccttttgcccctatttaacctttaacttcttaaaagctccttctccaaatacagtcacactgggagatagggcttcaggttaggaattctggggggacataattctctccagaacagacactaatatcatgagtgctcagattgctagtgaatatgttcttgttacaattattttcactttgcagttttaaataatgaatacttggataaaaaatacccactgtattctaattttttcaacacttcttacttgcatggattctaaacagaagtccaatgtaattcttatgtctgtttctctgtagacaatgtgtttcttcctctgccttattt

SEQ ID NO: 446581 - DNA, 633 bp, Homo sapiens
gattacaggtgtgagccaccatgtccggccttatcctcaaaaaagaatttatcaaaattgtgtgtgtgtgtgtgtgtgtgtgtgtgtgtgtatgttttaagtagagtaatactatattaaaatgccactatatatgttctaacaaaaaacctcaatttaacaaatgtatgtggggagagggagagaaggagagagagagagaaggagggaggcagagagagagagaagagagagatatgtatctctggtgwctcttcctttttggatgatgaccccagtcctaacagattacggccttacccttttgcccctatttaacctttaacttcttaaaagctccttctccaaatacagtcacactgggagatagggcttcaggttaggaattctggggggacataattctctccagaacagacactaatatcatgagtgctcagattgctagtgaatatgttcttgttacaattattttcactttgcagttttaaataatgaatacttggataaaaaatacccactgtattctaattttttcaacacttcttacttgcatggattctaaacagaagtccaatgtaattcttatgtctgtttctctgtagacaatgtgtttcttcctctgccttattt

SEQ ID NO: 446582 - DNA, 633 bp, Homo sapiens
gattacaggtgtgagccaccatgtccggccttatcctcaaaaaagaatttatcaaaattgtgtgtgtgtgtgtgtgtgtgtgtgtgtgtgtatgttttaagtagagtaatactatattaaaatgccactatatatgttctaacaaaaaacctcaatttaacaaatgtatgtggggagagggagagaaggagagagagagagaaggagggaggcagagagagagagaagagagagatatgtatctctggtgactcttcctttttggatgatgaccccagtcctaacagattasggccttacccttttgcccctatttaacctttaacttcttaaaagctccttctccaaatacagtcacactgggagatagggcttcaggttaggaattctggggggacataattctctccagaacagacactaatatcatgagtgctcagattgctagtgaatatgttcttgttacaattattttcactttgcagttttaaataatgaatacttggataaaaaatacccactgtattctaattttttcaacacttcttacttgcatggattctaaacagaagtccaatgtaattcttatgtctgtttctctgtagacaatgtgtttcttcctctgccttattt

SEQ ID NO: 446583 - DNA, 633 bp, Homo sapiens
gattacaggtgtgagccaccatgtccggccttatcctcaaaaaagaatttatcaaaattgtgtgtgtgtgtgtgtgtgtgtgtgtgtgtgtatgttttaagtagagtaatactatattaaaatgccactatatatgttctaacaaaaaacctcaatttaacaaatgtatgtggggagagggagagaaggagagagagagagaaggagggaggcagagagagagagaagagagagatatgtatctctggtgactcttcctttttggatgatgaccccagtcctaacagattacggccttacccttttgcccctatttaacctttaacttcttaaaagctccttctccaaatacagtcacactgggagatagggcttcaggttaggaattctggggggacataattctctccagaacagacaytaatatcatgagtgctcagattgctagtgaatatgttcttgttacaattattttcactttgcagttttaaataatgaatacttggataaaaaatacccactgtattctaattttttcaacacttcttacttgcatggattctaaacagaagtccaatgtaattcttatgtctgtttctctgtagacaatgtgtttcttcctctgccttattt

SEQ ID NO: 446584 - DNA, 521 bp, Homo sapiens
tgagcatcttttcatatacctatttgacatttatatatcttcttttttgtttttgctcattttttgagacagtgtctcactctgtcacccaggctggagtgcagtggtataatgatggcttactgtagttatgactaccagggttcaagcaatcctcccacctcagcctcctgagtagctgggaccacaggcatgcatcaccatgcccaggtaggttttwaaattatttgctatgtttttcaggttggtcttgaactcctgggctcaagtggtccaactgtcttggctccccaaaatgctggaattacaggtgtgagccactgcgcctaacctgaataccttcttttgagaaatgtctgctcagattttttgcccatttaaataattggattattagtttttttcttatagagttgtttgaactccttatatattctggttattaatcccttgtcagatatatagtttgcaaataatttcttccactctgaggccatgtcaattcactttgtccattgttt

SEQ ID NO: 446585 - DNA, 448 bp, Homo sapiens
ggcatttgtactcccagctacttgggaggctgaggaggagaatggtgtgaacccgggaggtggagcttgcagtgagcccagatcgcgccactgcactgcagcctgagcaacagagctagactccatctcaaaaaaaaaaaattctgccaatgaatatctagttttcccagcacaatttggtgaagagactgtcctctcccccatgtatattcttggcaccttcattgaaaatgagttagttgtaaatgtraggatttatttctgggttctgtattctgttccattggtctatgtgtctgttttatgccagtaccatgctgtttagcttacaattgctctgtagtataatttaacgtcaggtgatgtgattcttccagttttgttctttttgctacggatggctttgggtattctgggtcttttatgatttcatataaattttaggatt

SEQ ID NO: 446586 - DNA, 448 bp, Homo sapiens
ggcatttgtactcccagctacttgggaggctgaggaggagaatggtgtgaacccgggaggtggagcttgcagtgagcccagatcgcgccactgcactgcagcctgagcaacagagctagactccatctcaaaaaaaaaaaattctgccaatgaatatctagttttcccagcacaatttggtgaagagactgtcctctcccccatgtatattcttggcaccttcattgaaaatgagttagttgtaaatgtgaggatttatttctgggttctstattctgttccattggtctatgtgtctgttttatgccagtaccatgctgtttagcttacaattgctctgtagtataatttaacgtcaggtgatgtgattcttccagttttgttctttttgctacggatggctttgggtattctgggtcttttatgatttcatataaattttaggatt

SEQ ID NO: 446587 - DNA, 617 bp, Homo sapiens
gcacacaaaacttggggggaaaataagaggcagagagaaaacaggttatatcagccctatctcacaatccacaagttcatcctattagaggagtaactatgtaaaacaaactttatctgttgaatgtcctatttagttaatcacaaaactgtacgagaasacacttgtgacttatttagcagcttgtttgttcgctttccactggcttcacaaatgtcctttggaaagagaaagtacatttggaaccctgtacaccttttctttctccagtaccctcttgtcacttccatcactaaggtgacagaagcaactaggggcaatgcatttgtagcacacctgggtcagaggtatcctccaggggaaggatcagacctgcttgaaaacatgtcgttggaattgggaggcttctagtagctataacataagcactgatgtttactgttccctgccctccactttgatcactctgggaaacgtttttttttaaaaaatcaattgtattcaaacataatttacataaaataaatattcctattttaaagtgcacagtttgctgagttttgccagatgtaaccatccagttgaataaaattgattaaactgatctttcaaataat

SEQ ID NO: 446588 - DNA, 584 bp, Homo sapiens
tttacttgtatttaatttgttacacatgaatattgcatatgtaagataatatactaagaaattatcacatttaatgaaatgctttaatcaaattcctgattgaatttttgatatcaatatctttttccttgtttaatccatctttagagtgaacagggctgtctaggccaaagtcctcacttctatctaaattgtctgagttacagaactttttgaatttattatgttgtcacaggaagtttcttattgcttgyttaaaggagtcgctctcaatatgatgcggaatccaaaagcactgaagggcatatatcctgagtttctgttactgaagccaaaggttgccaatttcttgtagatcctgctagagttaaacttcatttaagtaatcattaaaagctgcatttattccctcacttgaacttttgatttcacactattaggactaatcctctaagtctttgctaagttatgttcctccttttcttgtggcttgactctgatgctctctatatgcaacatcaattgatgtaaagtacattcagggcaatagagtttctttaaatattactttgttattcaaaata

SEQ ID NO: 446589 - DNA, 411 bp, Homo sapiens
gagttacagaactttttgaatttattatgttgtcacaggaagtttcttattgcttgcttaaaggagtckctctcaatatgatgcggaatccaaaagcactgaagggcatatatcctgagtttctgttactgaagccaaaggttgccaatttcttgtagatcctgctagagttaaacttcatttaagtaatcattaaaagctgcatttattccctcacttgaacttttgatttcacactattaggactaatcctctaagtctttgctaagttatgttcctccttttcttgtggcttgactctgatgctctctatatgcaacatcaattgatgtaaagtacattcagggcaatagagtttctttaaatattactttgttattcaaaataatcacaaaagcactcatcgtagga

SEQ ID NO: 446590 - DNA, 411 bp, Homo sapiens
gagttacagaactttttgaatttattatgttgtcacaggaagtttcttattgcttgcttaaaggagtcgctctcaatatgatgcrgaatccaaaagcactgaagggcatatatcctgagtttctgttactgaagccaaaggttgccaatttcttgtagatcctgctagagttaaacttcatttaagtaatcattaaaagctgcatttattccctcacttgaacttttgatttcacactattaggactaatcctctaagtctttgctaagttatgttcctccttttcttgtggcttgactctgatgctctctatatgcaacatcaattgatgtaaagtacattcagggcaatagagtttctttaaatattactttgttattcaaaataatcacaaaagcactcatcgtagga

SEQ ID NO: 446591 - DNA, 411 bp, Homo sapiens
gagttacagaactttttgaatttattatgttgtcacaggaagtttcttattgcttgcttaaaggagtcgctctcaatatgatgcggaatmcaaaagcactgaagggcatatatcctgagtttctgttactgaagccaaaggttgccaatttcttgtagatcctgctagagttaaacttcatttaagtaatcattaaaagctgcatttattccctcacttgaacttttgatttcacactattaggactaatcctctaagtctttgctaagttatgttcctccttttcttgtggcttgactctgatgctctctatatgcaacatcaattgatgtaaagtacattcagggcaatagagtttctttaaatattactttgttattcaaaataatcacaaaagcactcatcgtagga

SEQ ID NO: 446592 - DNA, 617 bp, Homo sapiens
gcacacaaaacttggggggaaaataagaggcagagagaaaacaggttatatcagccctatctcacaatccacaagttcatcctattagaggagtaactatgtaaaacaaactttatctgttgaatgtcctatttagttaatcacaaaactgtacgagaagacacttgtgacttatttagcagcttgtttgttcgctttccactggcttcacaaatgtccttkggaaagagaaagtacatttggaaccctgtacaccttttctttctccagtaccctcttgtcacttccatcactaaggtgacagaagcaactaggggcaatgcatttgtagcacacctgggtcagaggtatcctccaggggaaggatcagacctgcttgaaaacatgtcgttggaattgggaggcttctagtagctataacataagcactgatgtttactgttccctgccctccactttgatcactctgggaaacgtttttttttaaaaaatcaattgtattcaaacataatttacataaaataaatattcctattttaaagtgcacagtttgctgagttttgccagatgtaaccatccagttgaataaaattgattaaactgatctttcaaataat

SEQ ID NO: 446593 - DNA, 583 bp, Homo sapiens
caaacctgggctacatgacagaaccccatttctaccaaaaactgtaaaaatcagctgcacatgatagcatgcatctgtaagtcccagctayttaggaggctgaggtgagaggatcacttgtgactggaaggtcacagctgcactggccatgttcatgtcactgcactccagcctgggcaacagagcaagattttgtctcaaaaaaaaaaaaaaagttggtgacgattggaataattggaattcacatacattactggtgggaacataaaatggtgtaatcaatttgggtgttttcttggcatttgatttttttaaaaaatcaagacattgtttccctatgtttcccaggcttgtcctgaactcccaagctaagaaaatcctccagactcagcgtctcaaatacctgagattaaaggtgtgagccactgtgcctgaccagtgtaaccactttgaaaaacaacgtggcagtttctcaaagactaaatgtataataatcacataatgcaacaatttcactcctgagtgtaaatccaagagaaataaaaatatatgttcccactaaaacttacatacgagtgttcat

SEQ ID NO: 446594 - DNA, 583 bp, Homo sapiens
caaacctgggctacatgacagaaccccatttctaccaaaaactgtaaaaatcagctgcacatgatagcatgcatctgtaagtcccagctatttaggaggctgaggtgagaggatcacttgtgactggaaggtcacagctgmactggccatgttcatgtcactgcactccagcctgggcaacagagcaagattttgtctcaaaaaaaaaaaaaaagttggtgacgattggaataattggaattcacatacattactggtgggaacataaaatggtgtaatcaatttgggtgttttcttggcatttgatttttttaaaaaatcaagacattgtttccctatgtttcccaggcttgtcctgaactcccaagctaagaaaatcctccagactcagcgtctcaaatacctgagattaaaggtgtgagccactgtgcctgaccagtgtaaccactttgaaaaacaacgtggcagtttctcaaagactaaatgtataataatcacataatgcaacaatttcactcctgagtgtaaatccaagagaaataaaaatatatgttcccactaaaacttacatacgagtgttcat

SEQ ID NO: 446595 - DNA, 583 bp, Homo sapiens
caaacctgggctacatgacagaaccccatttctaccaaaaactgtaaaaatcagctgcacatgatagcatgcatctgtaagtcccagctatttaggaggctgaggtgagaggatcacttgtgactggaaggtcacagctgcactggccatgttcatgtcactgcactccagcctgggcaacagagcaagattttgtctcaaaaaaaaaaaaaaagttggtgacgattggaataattggaaytcacatacattactggtgggaacataaaatggtgtaatcaatttgggtgttttcttggcatttgatttttttaaaaaatcaagacattgtttccctatgtttcccaggcttgtcctgaactcccaagctaagaaaatcctccagactcagcgtctcaaatacctgagattaaaggtgtgagccactgtgcctgaccagtgtaaccactttgaaaaacaacgtggcagtttctcaaagactaaatgtataataatcacataatgcaacaatttcactcctgagtgtaaatccaagagaaataaaaatatatgttcccactaaaacttacatacgagtgttcat

SEQ ID NO: 446596 - DNA, 498 bp, Homo sapiens
aagtccaaagtctcatctgggtcaaggctacattctcttttgcctacgagtctctgaaataaaaagcaagttcactgtgtctaaggtacaatgatggtacaggcattttgtaagctttccatatccaaaagggagacattttccagaaaccttcttatttttatctgaggccccctcagcctggccttcactgtccwtgtttttgtcagcattcttgtcactgccatttaaccagtctctaagatggtccaaaaatgttctcatctgtctgtcttctttggagccctccaaactcttccaacctctacccattacccagttccgaagttgcttccacattttcaggtatctttatagcaatgctccagtcctcatttgccatttttggtaagatttattttgaaaaagaggtttaattggctcatggttctgcagagtggacaggaagcttagtgcttctgcttctggggggcctcagaaatctttcaatcattgtgc

SEQ ID NO: 446597 - DNA, 498 bp, Homo sapiens
aagtccaaagtctcatctgggtcaaggctacattctcttttgcctacgagtctctgaaataaaaagcaagttcactgtgtctaaggtacaatgatggtacaggcattttgtaagctttccatatccaaaagggagacattttccagaaaccttcttatttttatctgaggccccctcagcctggccttcactgtccatgtttttgtcagcattcttgtcactgccatttaaccagtctctaagatggtccaaaaatgttctcatctgtctgtcttctttggagccctccaaactcttccaacctctacccattacccagttccgaagttgcttccacattttcaggtatctttatagcaatgctccagtcctcatttgccatttttggtaagatttatttygaaaaagaggtttaattggctcatggttctgcagagtggacaggaagcttagtgcttctgcttctggggggcctcagaaatctttcaatcattgtgc

SEQ ID NO: 446598 - DNA, 557 bp, Homo sapiens
tgaaaaagaggtttaattggctcatggttctgcagagtggacaggaagcttagtgcttctgcttctggggggcctcagaaatctttcaatcattgtgcaaggtaatgaaagagtgaattgtctcatatggcaagaggaaatcacggagagtagggagtgatatagagttttcagtggccagatctcacgagaattcactcatgattgtgaggasagtaccaaggggatagtgctgaaccactcatgagaaatttgccttcatgattcaatcaccttataccaggatccacctccaacattaggaagcataactcaacatgagatttggtggggacacatattcgaattgcctcatcagtctttgagtataaagacatccatagcaggctttatccagccagcttctttgggattctttatagggtttcaggtctatagcatatccactaaaatattcctacttcaaaaggcaataaagtaagtggtattaccattcttcaaaaagttataatggtagtgtaggcattcatagtatgatttagttcatttgctactgt

SEQ ID NO: 446599 - DNA, 357 bp, Homo sapiens
tgaggagagtaccaaggggatrgtgctgaaccactcatgagaaatttgccttcatgattcaatcaccttataccaggatccacctccaacattaggaagcataactcaacatgagatttggtggggacacatattcgaattgcctcatcagtctttgagtataaagacatccatagcaggctttatccagccagcttctttgggattctttatagggtttcaggtctatagcatatccactaaaatattcctacttcaaaaggcaataaagtaagtggtattaccattcttcaaaaagttataatggtagtgtaggcattcatagtatgatttagttcatttgctactgtttctatt

SEQ ID NO: 446600 - DNA, 557 bp, Homo sapiens
tgaaaaagaggtttaattggctcatggttctgcagagtggacaggaagcttagtgcttctgcttctggggggcctcagaaatctttcaatcattgtgcaaggtaatgaaagagtgaattgtctcatatggcaagaggaaatcacggagagtagggagtgatatagagttttcagtggccagatctcacgagaattcactcatgattgtgaggagagtaccaaggggatagtgctgaaccactcatgagaaatttgccttcatgattcaatcaccttataccaggatccacctccaacattaggaagcataactcaacatgagatttggtggggacacatattcgaattgcctcatcagtctttgagtataaagacatccatagcaggctttatccagccagcttctttgggattctttatagggtttcaggtctatagcatatccactaaaatattcctacttcaaaargcaataaagtaagtggtattaccattcttcaaaaagttataatggtagtgtaggcattcatagtatgatttagttcatttgctactgt

SEQ ID NO: 446601 - DNA, 490 bp, Homo sapiens
gaattcactcatgattgtgaggagagtaccaaggggatagtgctgaaccactcatgagaaatttgccttcatgattcaatcaccttataccaggatccacctccaacattaggaagcataactcaacatgagatttggtggggacacatattcgaattgcctcatcagtctttgagtataaagacatccatagcaggctttatccagccagcttctttgggattctttatagggtttcaggtctatagcatatccactaaaatattcctacttcaaaaggcaataaagtaagtggtattaycattcttcaaaaagttataatggtagtgtaggcattcatagtatgatttagttcatttgctactgtttctattctatcaccatattaacactttcgtacacaattctatattcagctgggtttcagttgagcacaaagtcatccttgtactaccaccgatagctggcactagctctttgatactgttat

SEQ ID NO: 446602 - DNA, 436 bp, Homo sapiens
tcataattgtattgatgtctgtaggttctgtagttacatcctccatttaattcycattatctacattatgtagcttctctaatttttttcaagataaatcttgctagccattgtttattaaaaaaatttttttcaaagaaccaatttgtgggtatattaattagctccaccttttgttatttgctatgttgttggtttacatttttatctttatcatcttccttcttcttaatttggatatactttgctcatttttttagcctcttaaaaaagaacctaaaggtcattgattgaagccttttattttcaatatattacatctataaatgtacctttaagaaatgatttatctgcatcccacattttattaagtttttaaaaattttctttcagtttaaactattttttttgtgtgtgaaacttttcttgaccaatg

SEQ ID NO: 446603 - DNA, 534 bp, Homo sapiens
tacctttagttaaaaatgggaatatgagtttttctttttctaacttggcaaagattatgtttttttcatgaagaaatacagacatatttaaacactcaggatctgagaatttgaaatrcatgaaacttagcaggtggtctttaagtagttttcatttctaaattttagtacatagcattgaatgctacagaagaaaagacaatgagggattactcataaacattgcctttatgatatccttccaaagaaaaccaagtgtccctgtgcttggactcataaagcagaaatgcttaccttgcttttatgtcactaacaaacaattgtgcctagtcattgaattctaatgcatttaagccatcttgagagtagagcccttagggaaaactacaaatggaaaattcattgatttttgattttgctttcctatggatcaaatttaatactttcttgtaaatctctccctttgcagatcatatgtgataaatagttatccaactttctagatgtccacccagagctgcttccatatgaaga

SEQ ID NO: 446604 - DNA, 534 bp, Homo sapiens
tacctttagttaaaaatgggaatatgagtttttctttttctaacttggcaaagattatgtttttttcatgaagaaatacagacatatttaaacactcaggatctgagaatttgaaatgcatgaaacttagcaggtggtctttaagtagytttcatttctaaattttagtacatagcattgaatgctacagaagaaaagacaatgagggattactcataaacattgcctttatgatatccttccaaagaaaaccaagtgtccctgtgcttggactcataaagcagaaatgcttaccttgcttttatgtcactaacaaacaattgtgcctagtcattgaattctaatgcatttaagccatcttgagagtagagcccttagggaaaactacaaatggaaaattcattgatttttgattttgctttcctatggatcaaatttaatactttcttgtaaatctctccctttgcagatcatatgtgataaatagttatccaactttctagatgtccacccagagctgcttccatatgaaga

SEQ ID NO: 446605 - DNA, 534 bp, Homo sapiens
tacctttagttaaaaatgggaatatgagtttttctttttctaacttggcaaagattatgtttttttcatgaagaaatacagacatatttaaacactcaggatctgagaatttgaaatgcatgaaacttagcaggtggtctttaagtagttttcatttctaaattttagtacatagcattgaatgctacagaagaaaagacaatgagggattactcataaacattgcctttatgatatccttccaaagaaaaccaagtgtccctgtgcttggactcataaagcagaaatgcttaccttgcttttatgtcactaacaaacaattgtgcctagtyattgaattctaatgcatttaagccatcttgagagtagagcccttagggaaaactacaaatggaaaattcattgatttttgattttgctttcctatggatcaaatttaatactttcttgtaaatctctccctttgcagatcatatgtgataaatagttatccaactttctagatgtccacccagagctgcttccatatgaaga

SEQ ID NO: 446606 - DNA, 534 bp, Homo sapiens
tacctttagttaaaaatgggaatatgagtttttctttttctaacttggcaaagattatgtttttttcatgaagaaatacagacatatttaaacactcaggatctgagaatttgaaatgcatgaaacttagcaggtggtctttaagtagttttcatttctaaattttagtacatagcattgaatgctacagaagaaaagacaatgagggattactcataaacattgcctttatgatatccttccaaagaaaaccaagtgtccctgtgcttggactcataaagcagaaatgcttaccttgcttttatgtcactaacaaacaattgtgcctagtcattgaattctaatgcatttaagccatcttgagagtagagcccttagggaaaactacaaatggaaaattcattgatttttgattttgctttcctatggatcaaatttaatactttcttgtaaatctctccctttgmagatcatatgtgataaatagttatccaactttctagatgtccacccagagctgcttccatatgaaga

SEQ ID NO: 446607 - DNA, 570 bp, Homo sapiens
gcttcataagtgtcacttactattcacattacacattaaaaggacatctcctaaattaaatcttgtctatgataaaaaggcagaaaatcatgacycaaggctcatttataactgcagaaatgttcaagatagaccaaggcttgctatgtttaggaactgacaagtacaggtctttataatctaccattttgcctcatttgataccaggtgaccttcataatgcaggcaatagagaattgcaagatttgtcagagatttcaggtctttggaaagctatgttctttcacaagaacagccatggaaacaggaagaaagtcaattcccacttaaggtaatcagaatttacaaatattcctctcttcattgaaatctcaataggcacttcaatattatatttaattaattcttttgttacaatcatgcatcacataacaacattttggtcaaggatagtgcacatgtatgacagtggtgcaataaaatcataacgctgtacttttactgtacctcttgtatgtttagacatgtatagatacacttactgtatagatataagtaagtatagatata

SEQ ID NO: 446608 - DNA, 498 bp, Homo sapiens
tcacattacacattaaaaggacatctcctaaattaaatcttgtctatgataaaaaggcagaaaatcatgacccaaggctcatttataactgcagaaatgttcaagatagaccaakgcttgctatgtttaggaactgacaagtacaggtctttataatctaccattttgcctcatttgataccaggtgaccttcataatgcaggcaatagagaattgcaagatttgtcagagatttcaggtctttggaaagctatgttctttcacaagaacagccatggaaacaggaagaaagtcaattcccacttaaggtaatcagaatttacaaatattcctctcttcattgaaatctcaataggcacttcaatattatatttaattaattcttttgttacaatcatgcatcacataacaacattttggtcaaggatagtgcacatgtatgacagtggtgcaataaaatcataacgctgtacttttactgtacctcttgtatgttta

SEQ ID NO: 446609 - DNA, 498 bp, Homo sapiens
tcacattacacattaaaaggacatctcctaaattaaatcttgtctatgataaaaaggcagaaaatcatgacccaaggctcatttataactgcagaaatgttcaagatagaccaaggcttgctatgtttaggaactgacaagtacaggtctttataatctaccattttgcctcatttgataccaggtgaccttcataatgcaggcwatagagaattgcaagatttgtcagagatttcaggtctttggaaagctatgttctttcacaagaacagccatggaaacaggaagaaagtcaattcccacttaaggtaatcagaatttacaaatattcctctcttcattgaaatctcaataggcacttcaatattatatttaattaattcttttgttacaatcatgcatcacataacaacattttggtcaaggatagtgcacatgtatgacagtggtgcaataaaatcataacgctgtacttttactgtacctcttgtatgttta

SEQ ID NO: 446610 - DNA, 498 bp, Homo sapiens
tcacattacacattaaaaggacatctcctaaattaaatcttgtctatgataaaaaggcagaaaatcatgacccaaggctcatttataactgcagaaatgttcaagatagaccaaggcttgctatgtttaggaactgacaagtacaggtctttataatctaccattttgcctcatttgataccaggtgaccttcataatgcaggcaatagagaattrcaagatttgtcagagatttcaggtctttggaaagctatgttctttcacaagaacagccatggaaacaggaagaaagtcaattcccacttaaggtaatcagaatttacaaatattcctctcttcattgaaatctcaataggcacttcaatattatatttaattaattcttttgttacaatcatgcatcacataacaacattttggtcaaggatagtgcacatgtatgacagtggtgcaataaaatcataacgctgtacttttactgtacctcttgtatgttta

SEQ ID NO: 446611 - DNA, 570 bp, Homo sapiens
gcttcataagtgtcacttactattcacattacacattaaaaggacatctcctaaattaaatcttgtctatgataaaaaggcagaaaatcatgacccaaggctcatttataactgcagaaatgttcaagatagaccaaggcttgctatgtttaggaactgacaagtacaggtctttataatctaccattttgcctcatttgataccaggtgaccttcataatgcaggcaatagagaattgcaagatttgtcagagatttcaggtctttggaaagctatgytctttcacaagaacagccatggaaacaggaagaaagtcaattcccacttaaggtaatcagaatttacaaatattcctctcttcattgaaatctcaataggcacttcaatattatatttaattaattcttttgttacaatcatgcatcacataacaacattttggtcaaggatagtgcacatgtatgacagtggtgcaataaaatcataacgctgtacttttactgtacctcttgtatgtttagacatgtatagatacacttactgtatagatataagtaagtatagatata

SEQ ID NO: 446612 - DNA, 570 bp, Homo sapiens
gcttcataagtgtcacttactattcacattacacattaaaaggacatctcctaaattaaatcttgtctatgataaaaaggcagaaaatcatgacccaaggctcatttataactgcagaaatgttcaagatagaccaaggcttgctatgtttaggaactgacaagtacaggtctttataatctaccattttgcctcatttgataccaggtgaccttcataatgcaggcaatagagaattgcaagatttgtcagagatttcaggtctttggaaagctatgttctttcacaagaacagccatggaaacaggaagaaagtcaattcccacttaaggtaatcagaatttacaaatattcctctcttcattraaatctcaataggcacttcaatattatatttaattaattcttttgttacaatcatgcatcacataacaacattttggtcaaggatagtgcacatgtatgacagtggtgcaataaaatcataacgctgtacttttactgtacctcttgtatgtttagacatgtatagatacacttactgtatagatataagtaagtatagatata

SEQ ID NO: 446613 - DNA, 498 bp, Homo sapiens
tcacattacacattaaaaggacatctcctaaattaaatcttgtctatgataaaaaggcagaaaatcatgacccaaggctcatttataactgcagaaatgttcaagatagaccaaggcttgctatgtttaggaactgacaagtacaggtctttataatctaccattttgcctcatttgataccaggtgaccttcataatgcaggcaatagagaattgcaagatttgtcagagatttcaggtctttggaaagctatgttctttcacaagaacagccatggaaacaggaagaaagtcaattcccacttaaggtaatcagaatttacaaatattcctctcttcattgaaatctcaataggcacttcaatattatatttaattaattcttttgttacaatcatgcatcacataacaacattttggtcaaggatagtgcacwtgtatgacagtggtgcaataaaatcataacgctgtacttttactgtacctcttgtatgttta

SEQ ID NO: 446614 - DNA, 575 bp, Homo sapiens
aatcatgcatcacataacaacattttggtcaaggatagtgcacatgtatgacagtggtgcaataaaatcataacrctgtacttttactgtacctcttgtatgtttagacatgtatagatacacttactgtatagatataagtaagtatagatatacttaactgttgtgttacaattgcctacagtattcagtacagtaacatgctgcacaggtttgtagcctaggaggaataggctataccacctaacctagatatgtaatcagctatagcatctaggtttgtgtaagtaaactctgtgatgttcatacaataataaaattgtccagcaatgcatttctcagacacaccgctgtcattaagtgacacatgactgtattagttaacactatgggaacttcatgggaaatggacactctagctccaccataaatagaaactttttatgtcaaaaaacacataaaagcatagttgcaagattacatttccttccagatatttcatttagtatctccacagatcactaacttcctgaatagcattcttgtgtctccactgcctcacatttgatttcagg

SEQ ID NO: 446615 - DNA, 575 bp, Homo sapiens
aatcatgcatcacataacaacattttggtcaaggatagtgcacatgtatgacagtggtgcaataaaatcataacgctgtayttttactgtacctcttgtatgtttagacatgtatagatacacttactgtatagatataagtaagtatagatatacttaactgttgtgttacaattgcctacagtattcagtacagtaacatgctgcacaggtttgtagcctaggaggaataggctataccacctaacctagatatgtaatcagctatagcatctaggtttgtgtaagtaaactctgtgatgttcatacaataataaaattgtccagcaatgcatttctcagacacaccgctgtcattaagtgacacatgactgtattagttaacactatgggaacttcatgggaaatggacactctagctccaccataaatagaaactttttatgtcaaaaaacacataaaagcatagttgcaagattacatttccttccagatatttcatttagtatctccacagatcactaacttcctgaatagcattcttgtgtctccactgcctcacatttgatttcagg

SEQ ID NO: 446616 - DNA, 575 bp, Homo sapiens
aatcatgcatcacataacaacattttggtcaaggatagtgcacatgtatgacagtggtgcaataaaatcataacgctgtacttktactgtacctcttgtatgtttagacatgtatagatacacttactgtatagatataagtaagtatagatatacttaactgttgtgttacaattgcctacagtattcagtacagtaacatgctgcacaggtttgtagcctaggaggaataggctataccacctaacctagatatgtaatcagctatagcatctaggtttgtgtaagtaaactctgtgatgttcatacaataataaaattgtccagcaatgcatttctcagacacaccgctgtcattaagtgacacatgactgtattagttaacactatgggaacttcatgggaaatggacactctagctccaccataaatagaaactttttatgtcaaaaaacacataaaagcatagttgcaagattacatttccttccagatatttcatttagtatctccacagatcactaacttcctgaatagcattcttgtgtctccactgcctcacatttgatttcagg

SEQ ID NO: 446617 - DNA, 524 bp, Homo sapiens
aactgttgtgttacaattgcctacagtattcagtacagtaacatgctgcacaggtttgtagcctaggaggaataggctataccacctaacctagatatgtaatcagctatagcatctaggtttgtgtaagtaaactctgtgatgttcatacaataataaaattgtccagcaatgcatttctcagacacaccgctgtcattaagtgacacatgactgtattagttaacactatgggaacttcatgggaaatggacactctagctccaccataaatagaaactktttatgtcaaaaaacacataaaagcatagttgcaagattacatttccttccagatatttcatttagtatctccacagatcactaacttcctgaatagcattcttgtgtctccactgcctcacatttgatttcaggtcattccatcaattatcaaagacgcatccaacattaactttccaactactggtttggattgtgtcaacattgtcattctggaccacaacaacacaaaaggctaactc

SEQ ID NO: 446618 - DNA, 524 bp, Homo sapiens
aactgttgtgttacaattgcctacagtattcagtacagtaacatgctgcacaggtttgtagcctaggaggaataggctataccacctaacctagatatgtaatcagctatagcatctaggtttgtgtaagtaaactctgtgatgttcatacaataataaaattgtccagcaatgcatttctcagacacaccgctgtcattaagtgacacatgactgtattagttaacactatgggaacttcatgggaaatggacactctagctccaccataaatagaaactttttatgtcaaaaaacacataaaagcatagttgcaagattacatttccttccagatatttcatttagtatctccacagatcactaacttcctgaatagcattcttgtgtctccactgcctcacatttgatttcaggtcattccatcaattrtcaaagacgcatccaacattaactttccaactactggtttggattgtgtcaacattgtcattctggaccacaacaacacaaaaggctaactc

SEQ ID NO: 446619 - DNA, 524 bp, Homo sapiens
aactgttgtgttacaattgcctacagtattcagtacagtaacatgctgcacaggtttgtagcctaggaggaataggctataccacctaacctagatatgtaatcagctatagcatctaggtttgtgtaagtaaactctgtgatgttcatacaataataaaattgtccagcaatgcatttctcagacacaccgctgtcattaagtgacacatgactgtattagttaacactatgggaacttcatgggaaatggacactctagctccaccataaatagaaactttttatgtcaaaaaacacataaaagcatagttgcaagattacatttccttccagatatttcatttagtatctccacagatcactaacttcctgaatagcattcttgtgtctccactgcctcacatttgatttcaggtcattccatcaattatcaaagacgcatccaacattaactttccaactactggtttggattgtgtcaacattgtcattctggrccacaacaacacaaaaggctaactc

SEQ ID NO: 446620 - DNA, 606 bp, Homo sapiens
aaaaagctgttcaaatttcaaacaacaagttgaactgaagagytcacatctttgaatgaaatagacactagtagcctttaaaaattaaacatttctactgttttaaaaaattatagccatcatagtatgaggaaaaatgtaataatcctttttaattcttgccattttattaaccacagagtccttatgccctgacttcattggtacccctttgagattaaacagaacacttaatttaaaattctgataaataaattaattacaccatttacttgaggtactctttcacctttcaagaaatattttgagaattcattagctaaacattgctataatgcaggctagtaataaatggaaataatgatttcattgtaaagtttaaactaatgatggtatgatctggaatttttgttaacctagaagacataattagctctagaggtgaaatgaaagacaaaatcacttcacatattagtaaaaaacaaataatataactttataagctactgctgttcttttgctattaagaatcaatgacatctgtaattagggaagattatggaaaggttaaaggtgagaatacatgcagtctgtcgacaggaaacc

SEQ ID NO: 446621 - DNA, 528 bp, Homo sapiens
acagaacacttaatttaaaattctgataaataaattaattacaccatttacttgaggtactctttcacctttcaagaaatattttgagaattcattagctaaacattgctataatgcaggctagtaataaatggaaataatgatttcattgtaaagtttaaactaatgatggtatgatctggaatttttgttaacctagaagacataattagctctagaggtgaaatgaaagacaaaatcacttcacatattagtaaaaaacaaataatataactttataagctactgctgttcttttgctattaagaaycaatgacatctgtaattagggaagattatggaaaggttaaaggtgagaatacatgcagtctgtcgacaggaaacctaaacagtttaggttaaggaaaggtctgcgaaagtcatataaattatcaggttcacaggaaactgacatttattgtataaattccatggtcaaatgtattagggctccacgcacacaactgtgcaccatctatgttaccacac

SEQ ID NO: 446622 - DNA, 528 bp, Homo sapiens
acagaacacttaatttaaaattctgataaataaattaattacaccatttacttgaggtactctttcacctttcaagaaatattttgagaattcattagctaaacattgctataatgcaggctagtaataaatggaaataatgatttcattgtaaagtttaaactaatgatggtatgatctggaatttttgttaacctagaagacataattagctctagaggtgaaatgaaagacaaaatcacttcacatattagtaaaaaacaaataatataactttataagctactgctgttcttttgctattaagaatcaatgacatctgtaattagggaagattatggaaaggttaaaggtgagaatacatgcagtctgtcgacaggaaacctaaacagtttaggttaaggaaaggtctgcgaaagtcatatwaattatcaggttcacaggaaactgacatttattgtataaattccatggtcaaatgtattagggctccacgcacacaactgtgcaccatctatgttaccacac

SEQ ID NO: 446623 - DNA, 528 bp, Homo sapiens
acagaacacttaatttaaaattctgataaataaattaattacaccatttacttgaggtactctttcacctttcaagaaatattttgagaattcattagctaaacattgctataatgcaggctagtaataaatggaaataatgatttcattgtaaagtttaaactaatgatggtatgatctggaatttttgttaacctagaagacataattagctctagaggtgaaatgaaagacaaaatcacttcacatattagtaaaaaacaaataatataactttataagctactgctgttcttttgctattaagaatcaatgacatctgtaattagggaagattatggaaaggttaaaggtgagaatacatgcagtctgtcgacaggaaacctaaacagtttaggttaaggaaaggtctgcgaaagtcatataaattakcaggttcacaggaaactgacatttattgtataaattccatggtcaaatgtattagggctccacgcacacaactgtgcaccatctatgttaccacac

SEQ ID NO: 446624 - DNA, 528 bp, Homo sapiens
acagaacacttaatttaaaattctgataaataaattaattacaccatttacttgaggtactctttcacctttcaagaaatattttgagaattcattagctaaacattgctataatgcaggctagtaataaatggaaataatgatttcattgtaaagtttaaactaatgatggtatgatctggaatttttgttaacctagaagacataattagctctagaggtgaaatgaaagacaaaatcacttcacatattagtaaaaaacaaataatataactttataagctactgctgttcttttgctattaagaatcaatgacatctgtaattagggaagattatggaaaggttaaaggtgagaatacatgcagtctgtcgacaggaaacctaaacagtttaggttaaggaaaggtctgcgaaagtcatataaattatcaggttcacaggaaactgacatttattgtataaattccatggtcaaatgtattagggctccacrcacacaactgtgcaccatctatgttaccacac

SEQ ID NO: 446625 - DNA, 588 bp, Homo sapiens
tgatcctaatgtttgtagagtatttagaaatttgagaattccctccaaataaagagttttttaaaacattgttagacaaaaagtttgaattacaaaatgtggtagtagctcaggtctaactcaaatgcagggaaaaaactattaactctaaaaaaaattaaatacacatttgatggtaatgagaaacagaaaacaggcagaaatagtagaatattcaaccactgatgaagtatttgaccaytgaataaagaaaattgcaatgatttaaatttgcatcaatgtaacttcacacctgatgacacttcccagtctgtgcaaaattagatgtctaagagtaaagcggtgagttttactagcttgaggaataagagtacagagttccaggctgacagaaaagaagaactgggaaatttgaatgacatgggaggacatctcacacaactgaaagtcacagaggagaatgtcacagagtaaaaatctaaaatcagcacttaaacttcattcagatatatgatggctgctacatttcacattcataaaaagagactccatagaatctagcagaaaacaacagctaaattgctagta

SEQ ID NO: 446626 - DNA, 608 bp, Homo sapiens
aaattgcaatgatttaaatttgcatcaatgtaacttcacacctgatgacacttcccagtctgtgcaaaattagatgtctaagagtaaagcsgtgagttttactagcttgaggaataagagtacagagttccaggctgacagaaaagaagaactgggaaatttgaatgacatgggaggacatctcacacaactgaaagtcacagaggagaatgtcacagagtaaaaatctaaaatcagcacttaaacttcattcagatatatgatggctgctacatttcacattcataaaaagagactccatagaatctagcagaaaacaacagctaaattgctagtacagagcagagatttcaaccattgcatatagctcaggagtgaaagtttggtgtttgactacagaaaaaagactaatgttagaaaagagtcactcttcaaaggaaaataaaagagcctatctctacaaaatatcatacacataatctaacatataatttaacctgcctagacatagaaccaggaaaatatgacacataacaaaaaaagtaaacaatggattaagacattgaaatggcccacatgctggaattagaagataagaaatttaaaat

SEQ ID NO: 446627 - DNA, 608 bp, Homo sapiens
aaattgcaatgatttaaatttgcatcaatgtaacttcacacctgatgacacttcccagtctgtgcaaaattagatgtctaagagtaaagcggtgagttttactagcttgaggaataagagtacagagttccaggctgacagaaaagaagaactgggaaatttgaatgacatgggaggacatctcacacaactgaaagtcacagaggagaatgtcacagagtaaaaatctaaaatcagcacttaaacttcattcagatatatgatggctgctacatttcacattcataaaaagagactccatagaatcyagcagaaaacaacagctaaattgctagtacagagcagagatttcaaccattgcatatagctcaggagtgaaagtttggtgtttgactacagaaaaaagactaatgttagaaaagagtcactcttcaaaggaaaataaaagagcctatctctacaaaatatcatacacataatctaacatataatttaacctgcctagacatagaaccaggaaaatatgacacataacaaaaaaagtaaacaatggattaagacattgaaatggcccacatgctggaattagaagataagaaatttaaaat

SEQ ID NO: 446628 - DNA, 608 bp, Homo sapiens
aaattgcaatgatttaaatttgcatcaatgtaacttcacacctgatgacacttcccagtctgtgcaaaattagatgtctaagagtaaagcggtgagttttactagcttgaggaataagagtacagagttccaggctgacagaaaagaagaactgggaaatttgaatgacatgggaggacatctcacacaactgaaagtcacagaggagaatgtcacagagtaaaaatctaaaatcagcacttaaacttcattcagatatatgatggctgctacatttcacattcataaaaagagactccatagaatctagcagaaaacaacagctaaattgctagtacagagcagagatttcaaccattgcatatagctcaggagtgaaagtttggtgtttgactacagaaaraagactaatgttagaaaagagtcactcttcaaaggaaaataaaagagcctatctctacaaaatatcatacacataatctaacatataatttaacctgcctagacatagaaccaggaaaatatgacacataacaaaaaaagtaaacaatggattaagacattgaaatggcccacatgctggaattagaagataagaaatttaaaat

SEQ ID NO: 446629 - DNA, 589 bp, Homo sapiens
ttaacctgcctagacatagaaccaggaaaatatgacacataacaaaaaaagtaaacaatggattaagacattgaaatggcccacatgctggaattagaagataagaaatttaaaataagctattataagcatattcaaggatttaaggaatagatggtcataagagggaatatatggagaatctcaacagagaagtaaaaatgataaagagataataggacaaattttagaactgagagacagagtrtcttatataaaagtgtcattttatgcacataccagtaaattaaagatggcagaaaaaactatcagtgcacttaaaaacagatcaagaacaatttcccaatacagctaatacaaaggagaaaaataataaaaatatgaccagtctagcactaatataattggactcctagaaagagtagagaagaaaatgagacagaaaaagctatttgaaaaagtaaagaccaaaagttttcctaattgtcagcatatatcaacttacaggtttaagaaactcaaagaacagaataaaaatatacagaaccaaatgtagacataccatagtcaaaccactgggcaaaaaaaa

SEQ ID NO: 446630 - DNA, 589 bp, Homo sapiens
ttaacctgcctagacatagaaccaggaaaatatgacacataacaaaaaaagtaaacaatggattaagacattgaaatggcccacatgctggaattagaagataagaaatttaaaataagctattataagcatattcaaggatttaaggaatagatggtcataagagggaatatatggagaatctcaacagagaagtaaaaatgataaagagataataggacaaattttagaactgagagacagagtgtcttatataaaagtgtcattttatgcacataccagtaaattaaagatggcagaaaaaactatcagtgcacttaaaaacagatcaagaacaatttcccaatacagctaatacaaaggagaaaaataataaaawtatgaccagtctagcactaatataattggactcctagaaagagtagagaagaaaatgagacagaaaaagctatttgaaaaagtaaagaccaaaagttttcctaattgtcagcatatatcaacttacaggtttaagaaactcaaagaacagaataaaaatatacagaaccaaatgtagacataccatagtcaaaccactgggcaaaaaaaa

SEQ ID NO: 446631 - DNA, 562 bp, Homo sapiens
ttataaaactgctaacccaagtaaaacaaaaattgaatatcaaggaaatattttccagatttgcatgctaaatcaccaatattgaaattgtttagatatataatttaaataaactccatggtctaagccaaattacctataactcatcagttaccagtgccatgcacytaatttgaagaaacagctggtattcaagaggatgtaagtctaatgttaattaagcacagacttatgaagaaccaggatggccacctttccgtcttaagtccttaaaacttttgttattaaaagttctgcattccataactcatcatggaaagagaaaatgatccaaattaaatatattgctgtggtgatctctaaattgctaaaatagtttataatcaatgtttggtttgtcaaacctatattcctaggaaaacaatcaaaacttcaggtgcatttggttacctgatgggccatttaaacattttataaagggatttcattcagttgtcattttcagtgcatgttttctgattgtaaaaaagctcttccatgcaagagggttgatgttaaaaca

SEQ ID NO: 446632 - DNA, 562 bp, Homo sapiens
ttataaaactgctaacccaagtaaaacaaaaattgaatatcaaggaaatattttccagatttgcatgctaaatcaccaatattgaaattgtttagatatataatttaaataaactccatggtctaagccaaattacctataactcatcagttaccagtgccatgcacctaatttgaagaaacagctggtattcaagaggatgtaagtctaatgttaattaagcacagacttatgaagaaccaggatggccacctttccgtcttaagtccttaaaacttttgttattaaaagttctgcattccataactcatcatggaaagagaaaatgatccaaattaaatatattgctgtggtgatctctaaattgctaaaatagtttataatcaatgtttggtttgtcaaacctatattcctaggaaaacaatcaaaacttcaggtgcatttggttacytgatgggccatttaaacattttataaagggatttcattcagttgtcattttcagtgcatgttttctgattgtaaaaaagctcttccatgcaagagggttgatgttaaaaca

SEQ ID NO: 446633 - DNA, 547 bp, Homo sapiens
acagccaaccccttcacaatctagaatctgatgactggatcttctgagaacatcagaggactgcccttgccattcacatgacagcaaaacwttaaaaccttaaactttgggttcatagtcttacaactcagaagggtccctccacaattggaaccatacaccccttggaacccttaaggtaaagctaacaaggacagttcccccccagaagaagatggcatccttaatgtgaacagcttttcccaagatcacagatcaagacttctctactattatgagactcttatcttaagtatctgtgcagctgctaacatggcatatggagaaaacatcgggtattataaagatttggttgtagggaattaacaaaaaaacccacttagttaagcaagtaaactctttatctaattcattctttaatctatttgattttaggtggtttgatttatggggaccctgagtaaggagcatataccaaattcttggtgttatcccaatagtcataagagtctccctggtgcactgtacttactcaaatgttttaaga

SEQ ID NO: 446634 - DNA, 564 bp, Homo sapiens
tcacaatctagaatctgatgactggatcttctgagaacatcagaggactgcccttgccattcacatgacagcaaaacattaaaaccttaaactttgggttcatagtcttacaactcagaagggtccctccacaattggaaccatacaccccttggaacccttaakgtaaagctaacaaggacagttcccccccagaagaagatggcatccttaatgtgaacagcttttcccaagatcacagatcaagacttctctactattatgagactcttatcttaagtatctgtgcagctgctaacatggcatatggagaaaacatcgggtattataaagatttggttgtagggaattaacaaaaaaacccacttagttaagcaagtaaactctttatctaattcattctttaatctatttgattttaggtggtttgatttatggggaccctgagtaaggagcatataccaaattcttggtgttatcccaatagtcataagagtctccctggtgcactgtacttactcaaatgttttaagagtttgcatgcagccatctctaaaatgtcaa

SEQ ID NO: 446635 - DNA, 594 bp, Homo sapiens
gaactaagctcatgcaataggtcccaacagaacaaaccaaaccaaaatggagtcactcatgytaaatggaacataatcaaactaagactttaaggaaacacataaatcctagaacaaaccaggttttgtttttctcctgtaaacaggatgttccagcataagaagacaccttctactcaagtccttgttccaccttttcaaatctcactgttctatttcccagtgggtttctaaaccaaataagtacatttgcaagggtaatagtgacaccagtgactgaagttttggccagtctctcaaaattgagaaaataaccaaagggaaggcattgttaaagtgaactaagtatgtcctgagaaggactccataattatatatatgagtccttgtggatgacctgcaacctaccttaataggtaaacaagaatgaaaacctaacttgagtgtatgcacctcaaacaacagctacatcttggtcaatcccaatggccaaacttcaaccactcaggcactgccaaatgttcaaactgtgctcaaacaaggcaaacgctgagttgtttctgtacctcacttccgatttcggtatgccacttc

SEQ ID NO: 446636 - DNA, 576 bp, Homo sapiens
caataggtcccaacagaacaaaccaaaccaaaatggagtcactcatgttaaatggaacataatcaaactaagactttaaggaaacacataaatcctagaacaaaccaggttttgtttttctcctgtaaacaggatgttccagcataagaagacaccttctactcaagtccttgttccaccttttcaaatctcactgttctatttcccagtgggtttctaaaccaaataartacatttgcaagggtaatagtgacaccagtgactgaagttttggccagtctctcaaaattgagaaaataaccaaagggaaggcattgttaaagtgaactaagtatgtcctgagaaggactccataattatatatatgagtccttgtggatgacctgcaacctaccttaataggtaaacaagaatgaaaacctaacttgagtgtatgcacctcaaacaacagctacatcttggtcaatcccaatggccaaacttcaaccactcaggcactgccaaatgttcaaactgtgctcaaacaaggcaaacgctgagttgtttctgtacctcacttccgatttcggtatgcca

SEQ ID NO: 446637 - DNA, 576 bp, Homo sapiens
caataggtcccaacagaacaaaccaaaccaaaatggagtcactcatgttaaatggaacataatcaaactaagactttaaggaaacacataaatcctagaacaaaccaggttttgtttttctcctgtaaacaggatgttccagcataagaagacaccttctactcaagtccttgttccaccttttcaaatctcactgttctatttcccagtgggtttctaaaccaaataagtacatttgcaagggtaatagtgacaccagtgactgaagttttggccartctctcaaaattgagaaaataaccaaagggaaggcattgttaaagtgaactaagtatgtcctgagaaggactccataattatatatatgagtccttgtggatgacctgcaacctaccttaataggtaaacaagaatgaaaacctaacttgagtgtatgcacctcaaacaacagctacatcttggtcaatcccaatggccaaacttcaaccactcaggcactgccaaatgttcaaactgtgctcaaacaaggcaaacgctgagttgtttctgtacctcacttccgatttcggtatgcca

SEQ ID NO: 446638 - DNA, 580 bp, Homo sapiens
caataggtcccaacagaacaaaccaaaccaaaatggagtcactcatgttaaatggaacataatcaaactaagactttaaggaaacacataaatcctagaacaaaccaggttttgtttttctcctgtaaacaggatgttccagcataagaagacaccttctactcaagtccttgttccaccttttcaaatctcactgttctatttcccagtgggtttctaaaccaaataagtacatttgcaagggtaatagtgacaccagtgactgaagttttggccagtctctcaaaattgagaaaataaccaaagggaaggcattgttaaagtgaactaagtatgtcctgagaaggactccataattatatatatgagtccttgtggatgacctgcaacctaccttaataggtaaacaagaatgaaaacctaacttgagtgtatgcacctcaaacaacagctacatcttggycaatcccaatggccaaacttcaaccactcaggcactgccaaatgttcaaactgtgctcaaacaaggcaaacgctgagttgtttctgtacctcacttccgatttcggtatgccacttc

SEQ ID NO: 446639 - DNA, 344 bp, Homo sapiens
ttgcccataaactcccacgtttcatccatmcatccatcaatcaaatctacctatctttatttatttattgtgcgaaatacctgaactttgcctttccttccctgatttctgccacaaactaggcaaggagttctgcctaggggtttttcagagctccggctaccaccgaggttcctaacagggaaattgccagcttgaatgcttggggttgatgtgggagtgcgtgtgaaacgggtgtggggtgaaagggcagtgaactttgtaggtgggtagatgggggtgtgaagggctttcaggtaagaggcacagaggaaactgggagaggcagcgaaagcacttcacgc

SEQ ID NO: 446640 - DNA, 463 bp, Homo sapiens
tactgcccatttctagctatttctgagtaacccgccccttaattagcatgtcattaaaagtgaattataaaaatgactacaagccacacctaggctgctactctgggagcacaacccacagagggctccctgccctgcaggagcggacgcagggctgtaacaccgccaatgyctccatagagctgctttattccaccacaggcttgcttttggattccttcctgagcgacgccaagaacctgcccttcctcagtgtgactcttgcctaaaatctatccctggttttctcttttcctaagcatgccctgacttgttctttcatctcctctgaacttgcaattgctcctcagtgactctattctgcagatccagaaaactcaaccttaatcttcccagagccctgttgtctccaatattggaatatctagccttgctttctcagacgcctagattacaggcctct

SEQ ID NO: 446641 - DNA, 614 bp, Homo sapiens
gtattttgtgtaaggttgctatggcctttgtgcaaggttgtggattttgtggtattttgtgacagtttgtatcaggcctagaagcacgagaaccctctcttcaaggccttctctgaatctatttgtccaggttttttcttttctttttaaagattactgacagttttgattctgataacttttatatcatgatccctaatttcaaaaaaaaattaaacgtgtaactttatgatgtatttgataggcttggatttatgaatcacctctactatctatagtggtagatatatctgagcctacttacacagcacttccatcagattctctcttcagtggaattggaagaggggggttttggagaagggaatgaaggaattgtgctgyatcagaggtccccacctaacagcacagggactttttctgtgctcttgccaggccgttgtattaggctgatacaaaagtaattttggttttgtcattgaaagtaatgagaccatctgacttacaatgtctatgtcataaccaactcctaatagcctcctaggacagctttgccctgacatacactgtcctggaaccacgtctgctttgtaactcctgaggtagctgccacc

SEQ ID NO: 446642 - DNA, 609 bp, Homo sapiens
tgtcctggcagctctagccatgaagggatgatgctttatcagcatttctgttgagttttttttcctttttctcacaaactgattccacttttcccacatacgtttgacaattcatttgaactcatttattctaaacccattattttttgtctattatttaatagggwggggggcgagggataaaagataacaaataaggtgcagtgtacactgttcgggtgataggtgcacccaaatctcacaaataaccagtaaagaagttattcatggacccgaaccaaataccaccgtaccccaataacctatgggaaaaaaaataaaaaatacaataaaaaagagtcagaaaaaaagaaaataatcactgtacttaccatgacacttagaaatggtggctagcattatttgtgtcacctaatattattattttttctttatgctacaaactagctctgctattacaatcactactatttgaagtgttactaaattaaattaaatttattgtatccttctggactcagaaatgggggtaaatgctaagacaatttcagaatattatcacatattaaaagcttattatatggggaaaatgtgattttaaaaaaatag

SEQ ID NO: 446643 - DNA, 609 bp, Homo sapiens
tgtcctggcagctctagccatgaagggatgatgctttatcagcatttctgttgagttttttttcctttttctcacaaactgattccacttttcccacatacgtttgacaattcatttgaactcatttattctaaacccattattttttgtctattatttaatagggtggggggcgagggataaaagataacaaataaggtgcagtgtacactgttcrggtgataggtgcacccaaatctcacaaataaccagtaaagaagttattcatggacccgaaccaaataccaccgtaccccaataacctatgggaaaaaaaataaaaaatacaataaaaaagagtcagaaaaaaagaaaataatcactgtacttaccatgacacttagaaatggtggctagcattatttgtgtcacctaatattattattttttctttatgctacaaactagctctgctattacaatcactactatttgaagtgttactaaattaaattaaatttattgtatccttctggactcagaaatgggggtaaatgctaagacaatttcagaatattatcacatattaaaagcttattatatggggaaaatgtgattttaaaaaaatag

SEQ ID NO: 446644 - DNA, 609 bp, Homo sapiens
tgtcctggcagctctagccatgaagggatgatgctttatcagcatttctgttgagttttttttcctttttctcacaaactgattccacttttcccacatacgtttgacaattcatttgaactcatttattctaaacccattattttttgtctattatttaatagggtggggggcgagggataaaagataacaaataaggtgcagtgtacactgttcgggtgataggtgcacccaaatctcacaaataaccagtaaagaagttattcatggacccgaaccaaataccaccgtaccccaataacctatgggaaaaaaaataaaaaatacaataaaaaagagtcagaaaaaaagaaaataatcactgtacttaccatgacacttagaaatggtggctagcattatttgtgtcacctaatattattattttttctttatgctacaaactagctctgctattacaatcactactatttgaagtgttactaaattaaattaaatttattgtatccttctggactcagaaatgggggtaaatgctaagacaatttcagaatattatcayatattaaaagcttattatatggggaaaatgtgattttaaaaaaatag

SEQ ID NO: 446645 - DNA, 436 bp, Homo sapiens
attatttgtgtcacctaatattattattttttctttatgctacaaactagctctgctattacaatcactactatttgaagtgttactaaattaaattaaatttattgtatccttctggactcagaaatgggggtaaatgctaagacaatttcagaatattatcacatattaaaagcttattatatggggaaaatgtgattttaaaaaaatagaaattggtagagaaacartttttgggtctctttgatttccgcacattttgcaagtatggacgctgactttcttgttccaaatgatagttttcaagcatgtttgtatagaaaacagccttggaatagaaaaccagtacctccttctggaacaaaggaaaagtttatttactgtctagtataatgcagataatttctccctcttgggaagggtacagccaagtgaa

SEQ ID NO: 446646 - DNA, 436 bp, Homo sapiens
attatttgtgtcacctaatattattattttttctttatgctacaaactagctctgctattacaatcactactatttgaagtgttactaaattaaattaaatttattgtatccttctggactcagaaatgggggtaaatgctaagacaatttcagaatattatcacatattaaaagcttattatatggggaaaatgtgattttaaaaaaatagaaattggtagagaaacagtttttgrgtctctttgatttccgcacattttgcaagtatggacgctgactttcttgttccaaatgatagttttcaagcatgtttgtatagaaaacagccttggaatagaaaaccagtacctccttctggaacaaaggaaaagtttatttactgtctagtataatgcagataatttctccctcttgggaagggtacagccaagtgaa

SEQ ID NO: 446647 - DNA, 436 bp, Homo sapiens
attatttgtgtcacctaatattattattttttctttatgctacaaactagctctgctattacaatcactactatttgaagtgttactaaattaaattaaatttattgtatccttctggactcagaaatgggggtaaatgctaagacaatttcagaatattatcacatattaaaagcttattatatggggaaaatgtgattttaaaaaaatagaaattggtagagaaacagtttttgggtctctttratttccgcacattttgcaagtatggacgctgactttcttgttccaaatgatagttttcaagcatgtttgtatagaaaacagccttggaatagaaaaccagtacctccttctggaacaaaggaaaagtttatttactgtctagtataatgcagataatttctccctcttgggaagggtacagccaagtgaa

SEQ ID NO: 446648 - DNA, 424 bp, Homo sapiens
cattatttgtgtcacctaatattattattttttctttatgctacaaactagctctgctattacaatcactactatttgaagtgttactaaattaaattaaatttattgtatccttctggactcagaaatgggggtaaatgctaagacaatttcagaatattatcacatattaaaagcttattatatggggaaaatgtgattttaaaaaaatagaaattggtagagaaacagtttttgggtctctttgatttccgcacattttgcaagtatggacgctgactttcttgttccaaatgatwgttttcaagcatgtttgtatagaaaacagccttggaatagaaaaccagtacctccttctggaacaaaggaaaagtttatttactgtctagtataatgcagataatttctccctcttgggaagggt

SEQ ID NO: 446649 - DNA, 468 bp, Homo sapiens
ttggttgtctgggctctttaaaaatccatatgaaatttagaatattttttttctaattctgtgaaaaacgacattggttgtttcataggaatagtgttgaatgtgtagattgcttttggcagtatagccattttaacaatattgatctttctaatccatgagcatggaatagttttccatttgctttgtcatctatgatttctttckgcagtgtttcgtacttctccttttagatatcctttacctccttgcttagacatattcttcttttcttttattttattttgggggttgctgttgtaaacaggattgcactcttgatttacctctcagtttaaacatttttggtgtacagaaatgatacttctttctatatgttgattttttttaatcctcaaagtttgctgaagttttttttatcagttctaggagccttttggcacagtctttagggatttctaggtgtag

SEQ ID NO: 446650 - DNA, 478 bp, Homo sapiens
catctatgatttctttctgcagtgtttcgtasttctccttttagatatcctttacctccttgcttagacatattcttcttttcttttattttattttgggggttgctgttgtaaacaggattgcactcttgatttacctctcagtttaaacatttttggtgtacagaaatgatacttctttctatatgttgattttttttaatcctcaaagtttgctgaagttttttttatcagttctaggagccttttggcacagtctttagggatttctaggtgtagaatcatatcatcagtgaagagagataatttgacttcatttcctatttggatgccttttatagctttctcttgcctgatttctctggctaggacttgttaaacaggagtggtgagaacaggcatccctattttattcctgttcataaggggaatgtgttgggagaaaagctgagtgttggaagagaagctgaggcagggc

SEQ ID NO: 446651 - DNA, 478 bp, Homo sapiens
catctatgatttctttctgcagtgtttcgtacttctccttttagatatcctttacctccttgcttagacatattcttcttttcttttattttattttgggggttgctsttgtaaacaggattgcactcttgatttacctctcagtttaaacatttttggtgtacagaaatgatacttctttctatatgttgattttttttaatcctcaaagtttgctgaagttttttttatcagttctaggagccttttggcacagtctttagggatttctaggtgtagaatcatatcatcagtgaagagagataatttgacttcatttcctatttggatgccttttatagctttctcttgcctgatttctctggctaggacttgttaaacaggagtggtgagaacaggcatccctattttattcctgttcataaggggaatgtgttgggagaaaagctgagtgttggaagagaagctgaggcagggc

SEQ ID NO: 446652 - DNA, 478 bp, Homo sapiens
catctatgatttctttctgcagtgtttcgtacttctccttttagatatcctttacctccttgcttagacatattcttcttttcttttattttattttgggggttgctgttgtaaacaggattgcactcttgakttacctctcagtttaaacatttttggtgtacagaaatgatacttctttctatatgttgattttttttaatcctcaaagtttgctgaagttttttttatcagttctaggagccttttggcacagtctttagggatttctaggtgtagaatcatatcatcagtgaagagagataatttgacttcatttcctatttggatgccttttatagctttctcttgcctgatttctctggctaggacttgttaaacaggagtggtgagaacaggcatccctattttattcctgttcataaggggaatgtgttgggagaaaagctgagtgttggaagagaagctgaggcagggc

SEQ ID NO: 446653 - DNA, 478 bp, Homo sapiens
catctatgatttctttctgcagtgtttcgtacttctccttttagatatcctttacctccttgcttagacatattcttcttttcttttattttattttgggggttgctgttgtaaacaggattgcactcttgatttacctctcagtttaaacatttttggtgtacagaaatgatacttctttctatatgttgattttttttaatcctcaaagtttgctgaagttttttttatcagttctaggagccttttggcacagtctttagggatttctaggtgtagaatcatatcatcagtgaagagagataatttgacttcatttcctatttggatgccttttatagctttctcttgcctgattkctctggctaggacttgttaaacaggagtggtgagaacaggcatccctattttattcctgttcataaggggaatgtgttgggagaaaagctgagtgttggaagagaagctgaggcagggc

SEQ ID NO: 446654 - DNA, 581 bp, Homo sapiens
agatctatgctgcacaaaagctgtgagccttctgcctggggaacccccgcaaaaggtcccaacaggagtctgtggaccgttgcsaggagggacaatgggattacttttaggaaggtctagtttaagtttaaaaggggtacaaatacacactggagtcattgattcagattacaatgaggaaattcaaattgtgatatttagttctgttccctggaaagcacagccaggagtgcgcatagcacagctcctgagtgagccgtatgtgggaatgggaaaaagtgaaattaaatgaactggaggatttggaagcacaaataaaaaaggcaaggcagcttattgggtaaatcaaattactgataaacatcctatctgtgaaataactatccagggaaagaactttaaaggtttggtagatactatttttttttttttggtaggagtggacatttcaattatttctctacagcactggccgtccatgtggccaattcagcccactcaatttaacacagtagaaactgctaaagctccagaagtgtatcagagtagctatactttgcattgtgaagggcccaatggac

SEQ ID NO: 446655 - DNA, 581 bp, Homo sapiens
agatctatgctgcacaaaagctgtgagccttctgcctggggaacccccgcaaaaggtcccaacaggagtctgtggaccgttgccagsagggacaatgggattacttttaggaaggtctagtttaagtttaaaaggggtacaaatacacactggagtcattgattcagattacaatgaggaaattcaaattgtgatatttagttctgttccctggaaagcacagccaggagtgcgcatagcacagctcctgagtgagccgtatgtgggaatgggaaaaagtgaaattaaatgaactggaggatttggaagcacaaataaaaaaggcaaggcagcttattgggtaaatcaaattactgataaacatcctatctgtgaaataactatccagggaaagaactttaaaggtttggtagatactatttttttttttttggtaggagtggacatttcaattatttctctacagcactggccgtccatgtggccaattcagcccactcaatttaacacagtagaaactgctaaagctccagaagtgtatcagagtagctatactttgcattgtgaagggcccaatggac

SEQ ID NO: 446656 - DNA, 581 bp, Homo sapiens
agatctatgctgcacaaaagctgtgagccttctgcctggggaacccccgcaaaaggtcccaacaggagtctgtggaccgttgccaggagggacaatgggattacttttaggaaggtctagtttaagtttaaaaggggtacaaatacacactggagtcattgattcagattacaatgaggaaattcaaattgtgatatttagttctgttccctggaaagcacagccaggagtgcgcatagcacagctcctgagtgagccgtatgtgggaatgggaaaaagtgaaattaaatgaactggaggatttggaagcacaaataaaaaaggcaaggcagcttattgggtaaatcaaattactgataaacatcctayctgtgaaataactatccagggaaagaactttaaaggtttggtagatactatttttttttttttggtaggagtggacatttcaattatttctctacagcactggccgtccatgtggccaattcagcccactcaatttaacacagtagaaactgctaaagctccagaagtgtatcagagtagctatactttgcattgtgaagggcccaatggac

SEQ ID NO: 446657 - DNA, 500 bp, Homo sapiens
  misc_feature (1)...(500): n = A,T,C or G
ggacatttcaattatttctctacagcactggccgtccatgtggccaattcagcccactcaatttaacacagtagaaactgctaaagctccagaagtgtatcagagtagctatactttgcattgtgaagggcccaatggacaacctgggactgttcaaccaattgyaacttctgtacctataaatttatgggggagagatttattatgacaatggggagcacaagttctaattccataacaattatacagccctcanagtcaacatatgatgcacaaaatggggcatttccctggtataggagtagaaaaaaaattgcaaggtttgaaagaactgcttcaaacggaaagacaaagttcctgccaaagattaggataccatttttgatggtggccatagttaagcctccagaacctatacctttaaaatggttaacagataagccaatttggatagaataatggctgctaagcaaagggaaactggatgctttagagaaatt

SEQ ID NO: 446658 - DNA, 500 bp, Homo sapiens
  misc_feature (1)...(500): n = A,T,C or G
ggacatttcaattatttctctacagcactggccgtccatgtggccaattcagcccactcaatttaacacagtagaaactgctaaagctccagaagtgtatcagagtagctatactttgcattgtgaagggcccaatggacaacctgggactgttcaaccaattgcaactyctgtacctataaatttatgggggagagatttattatgacaatggggagcacaagttctaattccataacaattatacagccctcanagtcaacatatgatgcacaaaatggggcatttccctggtataggagtagaaaaaaaattgcaaggtttgaaagaactgcttcaaacggaaagacaaagttcctgccaaagattaggataccatttttgatggtggccatagttaagcctccagaacctatacctttaaaatggttaacagataagccaatttggatagaataatggctgctaagcaaagggaaactggatgctttagagaaatt

SEQ ID NO: 446659 - DNA, 500 bp, Homo sapiens
  misc_feature (1)...(500): n = A,T,C or G
ggacatttcaattatttctctacagcactggccgtccatgtggccaattcagcccactcaatttaacacagtagaaactgctaaagctccagaagtgtatcagagtagctatactttgcattgtgaagggcccaatggacaacctgggactgttcaaccaattgcaacttctgtacctataaatttatgggggagagatttattatgacaatggggagcacaagttctaattccataacaattatacagccctcanagtcaacatatgatgcacraaatggggcatttccctggtataggagtagaaaaaaaattgcaaggtttgaaagaactgcttcaaacggaaagacaaagttcctgccaaagattaggataccatttttgatggtggccatagttaagcctccagaacctatacctttaaaatggttaacagataagccaatttggatagaataatggctgctaagcaaagggaaactggatgctttagagaaatt

SEQ ID NO: 446660 - DNA, 500 bp, Homo sapiens
  misc_feature (1)...(500): n = A,T,C or G
ggacatttcaattatttctctacagcactggccgtccatgtggccaattcagcccactcaatttaacacagtagaaactgctaaagctccagaagtgtatcagagtagctatactttgcattgtgaagggcccaatggacaacctgggactgttcaaccaattgcaacttctgtacctataaatttatgggggagagatttattatgacaatggggagcacaagttctaattccataacaattatacagccctcanagtcaacatatgatgcacaaaatggggcatttccctggtataggagtagaaaaaaaattgcaagktttgaaagaactgcttcaaacggaaagacaaagttcctgccaaagattaggataccatttttgatggtggccatagttaagcctccagaacctatacctttaaaatggttaacagataagccaatttggatagaataatggctgctaagcaaagggaaactggatgctttagagaaatt

SEQ ID NO: 446661 - DNA, 335 bp, Homo sapiens
tgcacaaaatggggcatttccctggtataggagtagaaaaaaaattgcaaggtttgaaagaactgcttcaaacggaaagacaaagttcctgccaaagattaggataccatttttgatggtggccatagttaagcctccagaacctatacctttaaaatggttaacagataagccaatttggatagaataatggctgctaagcaaagggaaactggatgctttagagaaattagttactgaacaattagaaaatgggcacatractccaacattttccccttggaattctccagttttcataattaagaaaaaatcaggtaaatggagaatgttaa

SEQ ID NO: 446662 - DNA, 335 bp, Homo sapiens
tgcacaaaatggggcatttccctggtataggagtagaaaaaaaattgcaaggtttgaaagaactgcttcaaacggaaagacaaagttcctgccaaagattaggataccatttttgatggtggccatagttaagcctccagaacctatacctttaaaatggttaacagataagccaatttggatagaataatggctgctaagcaaagggaaactggatgctttagagaaattagttactgaacaattagaaaatgggcacatgrctccaacattttccccttggaattctccagttttcataattaagaaaaaatcaggtaaatggagaatgttaa

SEQ ID NO: 446663 - DNA, 297 bp, Homo sapiens
ataatcacagatttaaaagactgtttctttactatccttttagctgagcaagactgtgaackgtttgcatttacaattcctgcagtaaacaacctgcagcctgctaagcgttttcattgtttcacagatgggtctagtaatggtaaaggttcttattctggatcaaaagctaaagttttccagacaccctatacttcagctcaaaaggcggagcttgtagctgtaattgaggtgttgactgcttttgatatgcctgttaatgtgatttctgattcttcatacatgggtcattccaca

SEQ ID NO: 446664 - DNA, 297 bp, Homo sapiens
ataatcacagatttaaaagactgtttctttactatccttttagctgagcaagactgtgaacggtttgcatttacaattcctgcagtaaacaacctgcagcctgctaagcgttttcattgtttcacagatgggtctagtaatggtaaagsttcttattctggatcaaaagctaaagttttccagacaccctatacttcagctcaaaaggcggagcttgtagctgtaattgaggtgttgactgcttttgatatgcctgttaatgtgatttctgattcttcatacatgggtcattccaca

SEQ ID NO: 446665 - DNA, 297 bp, Homo sapiens
ataatcacagatttaaaagactgtttctttactatccttttagctgagcaagactgtgaacggtttgcatttacaattcctgcagtaaacaacctgcagcctgctaagcgttttcattgtttcacagatgggtctagtaatggtaaaggttcttattctggatcaaaagstaaagttttccagacaccctatacttcagctcaaaaggcggagcttgtagctgtaattgaggtgttgactgcttttgatatgcctgttaatgtgatttctgattcttcatacatgggtcattccaca

SEQ ID NO: 446666 - DNA, 297 bp, Homo sapiens
ataatcacagatttaaaagactgtttctttactatccttttagctgagcaagactgtgaacggtttgcatttacaattcctgcagtaaacaacctgcagcctgctaagcgttttcattgtttcacagatgggtctagtaatggtaaaggttcttattctggatcaaaagctaaagttttccagacaccctatacttcagctcaaaargcggagcttgtagctgtaattgaggtgttgactgcttttgatatgcctgttaatgtgatttctgattcttcatacatgggtcattccaca

SEQ ID NO: 446667 - DNA, 539 bp, Homo sapiens
tctcactctgttccccagactggagtgcagtagtgagatcatagctcactgttatctcaacctcccaggctcaaacaatcctcctgcctcatcctctctagttgctgggacaatargcatgcaccaccatgcctggcaattttttatcttattcttagtagagattgggtctcactatgttgcccaggctggtctcaaactcctgagctcaagtgatcctcttgcctcagcctctcaaagtgctgggatacaggcatgaaccactgtgcccagacaaaagagttcttttgtaaatacaaatgatttaaaaagtgttggtgaaattaaaatagaaaatacaaatctcttcacacttgtcagcatacatttttgactgtggtttatatttacatttgctagatattttaaggtgctagggtttggcatgaaggttataaagctataaacacaggaaaaaagaatatttgtttatgtgattttttaaatacataagaccaatttaatatggtttgttgaacaaaaataatggaattttctga

SEQ ID NO: 446668 - DNA, 539 bp, Homo sapiens
tctcactctgttccccagactggagtgcagtagtgagatcatagctcactgttatctcaacctcccaggctcaaacaatcctcctgcctcatcctctctagttgctgggacaataagcatgcaccaccatgcctggcaattttttatcttattcttagtagagattgggtctcactatgttgyccaggctggtctcaaactcctgagctcaagtgatcctcttgcctcagcctctcaaagtgctgggatacaggcatgaaccactgtgcccagacaaaagagttcttttgtaaatacaaatgatttaaaaagtgttggtgaaattaaaatagaaaatacaaatctcttcacacttgtcagcatacatttttgactgtggtttatatttacatttgctagatattttaaggtgctagggtttggcatgaaggttataaagctataaacacaggaaaaaagaatatttgtttatgtgattttttaaatacataagaccaatttaatatggtttgttgaacaaaaataatggaattttctga

SEQ ID NO: 446669 - DNA, 539 bp, Homo sapiens
tctcactctgttccccagactggagtgcagtagtgagatcatagctcactgttatctcaacctcccaggctcaaacaatcctcctgcctcatcctctctagttgctgggacaataagcatgcaccaccatgcctggcaattttttatcttattcttagtagagattgggtctcactatgttgcccaggctggtctcaaactcctgagctcaagtgatcctcttgcctcagcctctcaaagtgctgggatacaggcatgaaccactgtgsccagacaaaagagttcttttgtaaatacaaatgatttaaaaagtgttggtgaaattaaaatagaaaatacaaatctcttcacacttgtcagcatacatttttgactgtggtttatatttacatttgctagatattttaaggtgctagggtttggcatgaaggttataaagctataaacacaggaaaaaagaatatttgtttatgtgattttttaaatacataagaccaatttaatatggtttgttgaacaaaaataatggaattttctga

SEQ ID NO: 446670 - DNA, 539 bp, Homo sapiens
tctcactctgttccccagactggagtgcagtagtgagatcatagctcactgttatctcaacctcccaggctcaaacaatcctcctgcctcatcctctctagttgctgggacaataagcatgcaccaccatgcctggcaattttttatcttattcttagtagagattgggtctcactatgttgcccaggctggtctcaaactcctgagctcaagtgatcctcttgcctcagcctctcaaagtgctgggatacaggcatgaaccactgtgcccagacaaaakagttcttttgtaaatacaaatgatttaaaaagtgttggtgaaattaaaatagaaaatacaaatctcttcacacttgtcagcatacatttttgactgtggtttatatttacatttgctagatattttaaggtgctagggtttggcatgaaggttataaagctataaacacaggaaaaaagaatatttgtttatgtgattttttaaatacataagaccaatttaatatggtttgttgaacaaaaataatggaattttctga

SEQ ID NO: 446671 - DNA, 312 bp, Homo sapiens
gatgactagctttgtctaatacctcagttctcacaaatactctagataaactgtcaaaaataagtaaatgtaaatggataaatgtctatacaagayatcttaatgtatttttgaaatttttttgagacagtgtctctgtctgtcacccatgctgaagtgcagtggcatgatcacagctcactgcaaccttgaccttctgcgctcaagggatcctcccacctcagcctcccatgtagctgttaattacaggcatacaccaccatggtcagctaacttttatttttttttgtagagtcagcctctcactatttt

SEQ ID NO: 446672 - DNA, 312 bp, Homo sapiens
gatgactagctttgtctaatacctcagttctcacaaatactctagataaactgtcaaaaataagtaaatgtaaatggataaatgtctatacaagatatcttaatgtatttttgaaatttttttgagacagtgtctctgtctgtcacccatgctgaagtgcagtggcatgatcacagctcactgcaaccttgaccttctgckctcaagggatcctcccacctcagcctcccatgtagctgttaattacaggcatacaccaccatggtcagctaacttttatttttttttgtagagtcagcctctcactatttt

SEQ ID NO: 446673 - DNA, 420 bp, Homo sapiens
tagaaaaactacattgtgaacaaaaatttgarccatttatctgtctctctaactgatttctccagaattcagaagccattcgtgagcattcctaaattatggcaatataattatttgcataatttcaataagaatctatttttggtaacaggattcaattggagacactgtttgttttatcaaggctttaactcgaacagcagatacaaccagaccactttaaggaattgagcttgactttatagcaccaatgcaaagccccttagaatgactggcttggtgtcttgtctacaagggtcctttacaaagttgctgtccttgtggtaagaagtaaagaatgtcactttctgacgggcccaggaacctcaagttatttggggaccttgagaagataggactacacccattcataaaagtatt

SEQ ID NO: 446674 - DNA, 420 bp, Homo sapiens
tagaaaaactacattgtgaacaaaaatttgagccatttatctgtctctctaactgatttctccagaattcagaagccattsgtgagcattcctaaattatggcaatataattatttgcataatttcaataagaatctatttttggtaacaggattcaattggagacactgtttgttttatcaaggctttaactcgaacagcagatacaaccagaccactttaaggaattgagcttgactttatagcaccaatgcaaagccccttagaatgactggcttggtgtcttgtctacaagggtcctttacaaagttgctgtccttgtggtaagaagtaaagaatgtcactttctgacgggcccaggaacctcaagttatttggggaccttgagaagataggactacacccattcataaaagtatt

SEQ ID NO: 446675 - DNA, 420 bp, Homo sapiens
tagaaaaactacattgtgaacaaaaatttgagccatttatctgtctctctaactgatttctccagaattcagaagccattcgtgagcattcctaaattatggcaatataattatttgcataatttcaataagaatctatttttggtaacaggattcaattggagacactgtttgttttatcaaggctttaactcgaacrgcagatacaaccagaccactttaaggaattgagcttgactttatagcaccaatgcaaagccccttagaatgactggcttggtgtcttgtctacaagggtcctttacaaagttgctgtccttgtggtaagaagtaaagaatgtcactttctgacgggcccaggaacctcaagttatttggggaccttgagaagataggactacacccattcataaaagtatt

SEQ ID NO: 446676 - DNA, 451 bp, Homo sapiens
tatttgtgggatagtgggatagtgttatttgaaagtggacttgaattggttgtaaatgtatattgcaaattctgtggcaactagttaaaaaaaagttttaaaaagagaagtacatgctaagaaagacagggaaaatgtagtcatctaaaatcatcaatgaaaactgcaaaaggcagaaaaagagtggtagacaaaagaatggagactgaggagaatgaatagaaaacagtaacaaatatagtagatattaatccaatgatawcaataatcactttgaatgttaatggtatgaatgtaccaattcaaagataaagattgtcagagtctatcaaaagacagacacatcttgtttcactgcactttgctttattgtgttttgtgaccatgtgttttacatattgaaggtttgtggccaccctgcaataagcaggtctcactggcaccattgttc

SEQ ID NO: 446677 - DNA, 451 bp, Homo sapiens
tatttgtgggatagtgggatagtgttatttgaaagtggacttgaattggttgtaaatgtatattgcaaattctgtggcaactagttaaaaaaaagttttaaaaagagaagtacatgctaagaaagacagggaaaatgtagtcatctaaaatcatcaatgaaaactgcaaaaggcagaaaaagagtggtagacaaaagaatggagactgaggagaatgaatagaaaacagtaacaaatatagtagatattaatccaatgatatcaataatcactttgaatgytaatggtatgaatgtaccaattcaaagataaagattgtcagagtctatcaaaagacagacacatcttgtttcactgcactttgctttattgtgttttgtgaccatgtgttttacatattgaaggtttgtggccaccctgcaataagcaggtctcactggcaccattgttc

SEQ ID NO: 446678 - DNA, 451 bp, Homo sapiens
tatttgtgggatagtgggatagtgttatttgaaagtggacttgaattggttgtaaatgtatattgcaaattctgtggcaactagttaaaaaaaagttttaaaaagagaagtacatgctaagaaagacagggaaaatgtagtcatctaaaatcatcaatgaaaactgcaaaaggcagaaaaagagtggtagacaaaagaatggagactgaggagaatgaatagaaaacagtaacaaatatagtagatattaatccaatgatatcaataatcactttgaatgttaatggtatgaatgtaycaattcaaagataaagattgtcagagtctatcaaaagacagacacatcttgtttcactgcactttgctttattgtgttttgtgaccatgtgttttacatattgaaggtttgtggccaccctgcaataagcaggtctcactggcaccattgttc

SEQ ID NO: 446679 - DNA, 451 bp, Homo sapiens
tatttgtgggatagtgggatagtgttatttgaaagtggacttgaattggttgtaaatgtatattgcaaattctgtggcaactagttaaaaaaaagttttaaaaagagaagtacatgctaagaaagacagggaaaatgtagtcatctaaaatcatcaatgaaaactgcaaaaggcagaaaaagagtggtagacaaaagaatggagactgaggagaatgaatagaaaacagtaacaaatatagtagatattaatccaatgatatcaataatcactttgaatgttaatggtatgaatgtaccaattcaaagataragattgtcagagtctatcaaaagacagacacatcttgtttcactgcactttgctttattgtgttttgtgaccatgtgttttacatattgaaggtttgtggccaccctgcaataagcaggtctcactggcaccattgttc

SEQ ID NO: 446680 - DNA, 569 bp, Homo sapiens
catattaagctaaagtttcctaagtttgctcacagggtgttttattttttaaaagaaaatttaatatttagcagtcagttaaaatattgatattttctaaaattgaaccacattttggttaaaacacttatttttcaataaaatacaaatgaatatttttgttaattctgaaagttgtgtaacccaagtttttgattagaacacttaagcatgttaaaatacacattgtattgtcatggctattggtttcccgcatagggaagaactcagtggcatttgcctagggtgcattgcattggcctacctatcattaaattctagtttasagctgcaaactgaagtgctgcctggtttggtaaaattgaaactgcttgtttgagccatttcaatgattagcctacaagaaatctatcagtcctgaaataaaaatgtactcaggcagtacacttattggaatgctagactctaggttccttcagcaatcataactttcaggtggaaagttaatctctagaagtattttgttctgtttttgttagtttttaaaacaattgttggaaagccatatc

SEQ ID NO: 446681 - DNA, 276 bp, Homo sapiens
catctattattttcccttctctcattcttttgctaatgacaagtgctcacctaaatttatattcctctcctcattcttaatcacttaaaatatgtttcagcctcccttgtgcttaggtgtagccatagattttcagcwgatttaatttgagaggaagtgatgtgttctatttccacacatggtcccagacattcccaatgcatgctctttcatttgaattttcttttaactggtgggaatcttgcgacaaacttgattgccataaattgaaagttt

SEQ ID NO: 446682 - DNA, 561 bp, Homo sapiens
ccacatttaatttgttcttgccagcatttatgtatatgttgaccataactcagtagctaaaaaaggtaaaagaactttctctttcacaccaacagaaagagacttctaaattaaagctactttttattttcagtcttttcacaataggaaatgatgatctattatttcattggatttgggcttttgacaacaaaagtaaaaagagatctggtaattcagagaattaaactgtgtttaattctgtaccaaagattaaattctgtaccaagattaaattctgtaccaaaaagaaaaaaaagaaacagctagagagaaattcatattgatatgagacaaatgttttgatgaaggcttagaaaaaaaagaatagacagtaatcaaactaagtatcattcatgcactacacacagtgcaaccaaaaacagatgtgaagggctratgtgacagtaatactagataataaagctattcaatgccagctcacatttacctgattattactggttctttgattgaattatatgtaagaaaagtatgttggtaaagtactaaatgtgtttc

SEQ ID NO: 446683 - DNA, 638 bp, Homo sapiens
aaacgtgttttacatgtcataacctgttttctgaagccagggacaattcctagtgcttgaattcttgttatttagtaatcctccagtggttatataaacaatcactggtatatttaccaccgtcttagtccatttgagctactatagcaaaatgcagtaaactgggtactaatagagtacatgagccatggcaagaaaaatgacagaaatttatttctcacaaattctggaattcaggaagttcaartcactggcagattcagtgtcaggtgagggtctgctttgtggttcatacatggtgccttcttgctgtgtcctcacaaggtaagaagtgagcaaggcagctctctggcgcctctttgataaggggactaacttcattcgtaagggctctacactcatgactcaatcacctcccaaaggcctcatctcccaacaccaacacattagtgaattggtttcaggatatgaattttgagggtacacaaacattcagaccatagcaactaccaagtgtgaatagttatatgaactttgaggtacagataatataaacaatgtggggaatttattctaattatctacagatttgtacccaacaaagtcatgaaagtcactcaaaaatcatgacgttggtg

SEQ ID NO: 446684 - DNA, 576 bp, Homo sapiens
aatggaagcacatgcaagtggctggacgtcgagaggaacacaatggtgaagaacacaccgataggcaccggtagacaccactgggccattgaccagcagaacgacgcaaagtttggctgggatggttggaggaaagccctgctgctgggccgccccactcagggtaaaactacctttcctctccacctgcttctggcctccccatccaactcactgagagctaccaccactcaataaaaaaccttgcactcattctccaagcccaygtgtgatctgatttttccagtacaccaaggcaagaacgctgggatacagaaagccctctgtccttgccatcaggcagagggtctaattgagctgattaacacaagccgcctacagacaataaaactaaagagtactctgtaacacacacccactgggatttcaggagctgtaagcattcaccgctagatgctgctgtggggtcagagcctcacaacctgcccgctgcatgcgccccttagaggtttgagcagtggggcactgaagaatcgagccactccccccgtcacacaccctacaagggagacaaag

SEQ ID NO: 446685 - DNA, 603 bp, Homo sapiens
gatactcttaaatctttcagtttgagtttttgttttgttttgttttgtttttcccccaggttttcaaaggcaatagagatacatcaagtttctcccaaacaatttgcttatttcaggcatggggagcagcacatttggatagtgtagaatattgccagcctgtcagccatatctcaagtttatgtctctgaggtcttagatatacccataaccatacttttttcctatttaataaagaaagaccatcaattacatttatatacaggttgcgtttttaaaattatttcattatgttgtcttaccaattagattgcaaactcatttgtattatatctagctaatcttttaaaccataataggtacttgctagatacctgattacttaaccatacatgcatttgaaaaacatacattaattcagtgtactataaaacaaagtttctgcgtcaattgtggtggtacacatttgaaatgggatctctcrtataaaaaatgaaagaatgtatttcattcaccatggttctttgcaaaaagcaatcactttataaaagttaaccattgatattcataataatggtgcttaccaaaattaataattattga

SEQ ID NO: 446686 - DNA, 439 bp, Homo sapiens
aattcgtatagtttataagtggtggactgagaattcatccttcctacacctgcctagccttccaaggttcattgacataagagttcttgatcttctttaccgataacttcaggtccttaccagytgaaacagaataatagaaatattatgtataaccatgtcttctacccagttccttctcacttaattgaatgtaatttcaagcaaaactacaagcccagggaggatgatgcaattcttagctgcttggtctgtagtacttctttatgtctccttcctggcttcaaagctagcacataaagatgaaaggtgggttcctggatgatcgcaaattaataaattaataagtgctattgagctccatcttcatgttggtccagtccaaaggatcaggtttctggcaagaatcatgtttagtagttactttgattagtactcc

SEQ ID NO: 446687 - DNA, 593 bp, Homo sapiens
acataagtttcaacttatgatgacttttttcctaaatttaaacgatgmaaaatggtagacttcatcaattttgtttcattttaacaaaagtatacatttattcaattaaaatgttttttattcttgaagagtttcagagaaaaatggatgtgatttactttttaatagttacaggctatttgtaattcattatggcaaaaagtatacagctccatttatgatgatgaaataaatttctcttttaaaataaacttatttaagattgtttatcaattctagtagccttttggcagtctttcatagtgttctaagaatagaatcatattgtcagcgaagaaagatagtgttacctcctattttgctattgagtgtcttttatttctttctcttgcttgattgttctagccaggacttccagtactatgatgaataggagtagtaagaaggggcatctttgtctttttccagtttgataaacgattctagcgaggtttcagggcacaaaattaatgtacaataatcaatagtatttctagaatgcacatttatgcacataatgtccaggctgagagtcaaatcaaaaacacgattcc

SEQ ID NO: 446688 - DNA, 593 bp, Homo sapiens
acataagtttcaacttatgatgacttttttcctaaatttaaacgatgcaaaatggtagacttcatcaattttgtttcattttaacaaaagtatacatttattcaattaaaatgttttttattcttgaagagtttcagagaaaaatggatgtgatttactttttaatagttacaggctatttgtaattcattatggcaaaaagtatacagctccatttatgatgatgaaataaatttctcttttaaaataaacttatttaagattgtttatcaattctagtagccttttggcagtctttcatagtgttctaagaatagaatcatattgtcagcgaagaaagatagtgttacytcctattttgctattgagtgtcttttatttctttctcttgcttgattgttctagccaggacttccagtactatgatgaataggagtagtaagaaggggcatctttgtctttttccagtttgataaacgattctagcgaggtttcagggcacaaaattaatgtacaataatcaatagtatttctagaatgcacatttatgcacataatgtccaggctgagagtcaaatcaaaaacacgattcc

SEQ ID NO: 446689 - DNA, 630 bp, Homo sapiens
cacactacccaacttcaaattacactataaggctaagtaaccaaaacagcatggtactggtacaaaaaaaggatacagaccratgaaacagaatagaaaacttagaaataaagccatacatctgatctttgacaaagttaataaaaacaacagggaaaaaactctctattcaataaacagtgctgggataactggctagtcatatgcagaagaatgaaactagacctttacctttcactatatacaaaaattaactcaagatagatagattaaagatttaaatgtaagatctcaaaatcctagaagaaaacctagaaattacccttcttgacattggccttggcaaagagttttttgctaagtttccaaaagcaatggtaacaaaaacaaaaattgacaagtggaacctaattaaactaaagagcttttgcacagcaaaagaaatgatcaataaagtaaagagaaaacctacagattgggagaaaatattagcaaactatgtggccaataaaggtgtaatatccagaatctataagaaacttaaacaaattaacaagcaaaaaataaataaccccattaaaaagtaggcaaaggacatgaacagacacttcttgaaagacttagaagtag

SEQ ID NO: 446690 - DNA, 572 bp, Homo sapiens
ctactgaacttgaaatgtgtattttcttcacatatttttattttcagtgatgaatttttaaatgaatttctaaaaggatttacagtaatgtcagacatatcaccttaaatgaaaagaacattcaaaagttttatatcttttctgagttggaaagggaaaaaataagctattactagaatkaatttatattgttctttgaagcttctgatgatacatatgaaactcaacattatctaattgctcatgaaagttttcatcttctaatgtagccaacacaataacagctatcacttatttcacttgttctatgtgcataaaagcatttgggacaaaaataaatgaagttgaaaattgtacttccacataaattttattttatgtaaacaatagcataattttaaaaataagtgaacttaatttagaagaatagtcatttgatcccaatgaaaagtcatccttcagaatatgtcaataaaccttttgcagattcttgtattaaattatcgtcaatgagcacagctttttaaaaatagctactaatttctgaagcagatgttgaccctgctgcagca

SEQ ID NO: 446691 - DNA, 572 bp, Homo sapiens
ctactgaacttgaaatgtgtattttcttcacatatttttattttcagtgatgaatttttaaatgaatttctaaaaggatttacagtaatgtcagacatatcaccttaaatgaaaagaacattcaaaagttttatatcttttctgagttggaaagggaaaaaataagctattactagaattaatttatattgttctttgaagcttctgatgatacatatgaaactcaacattatctaattgctcatgaaagttttcatcttctaatgtagccaacacaataacagctatcacttatttcacttgttctatgtgcataaaarcatttgggacaaaaataaatgaagttgaaaattgtacttccacataaattttattttatgtaaacaatagcataattttaaaaataagtgaacttaatttagaagaatagtcatttgatcccaatgaaaagtcatccttcagaatatgtcaataaaccttttgcagattcttgtattaaattatcgtcaatgagcacagctttttaaaaatagctactaatttctgaagcagatgttgaccctgctgcagca

SEQ ID NO: 446692 - DNA, 650 bp, Homo sapiens
ctttttaaaaatagctactaatttctgaagcagatgttgaccctgctgcagcagatttatgtttcctggttttcctgtggtcctaacccttgtagcttacagcaggttttaacaaacattttgtgcaagttatacttttgtcttcatatttcttttgaaaatgaaataaacagtaggaaataaattaattttttattaaacatatattttgtttctgtgagcccatttctgccaaagaagtgcacagcaaaaaagtgaaataaataggctgagatccaggaaatgctggtacatcagtactagtctctataytctaatggcaaagctgctcagcctgcatttcccatacatattcccacatatttgggtcaatggggaccaagaggcttcttgtacctagcaggccattgtatgggtcaaggtacaacaagctgttgcaccaagtggccaccaatggcagcaaagtggaagaatggaagaagaaagtgttcccaccctcctgtgttggaggactcttccttttaatagagaacactgtaaacttttttttgacagggatctgttaatcatgttttatctgaaaaggatcggaaaaagaaatatggattaccactggctgtgtttcattccgattatatgttagagaatgc

SEQ ID NO: 446693 - DNA, 650 bp, Homo sapiens
ctttttaaaaatagctactaatttctgaagcagatgttgaccctgctgcagcagatttatgtttcctggttttcctgtggtcctaacccttgtagcttacagcaggttttaacaaacattttgtgcaagttatacttttgtcttcatatttcttttgaaaatgaaataaacagtaggaaataaattaattttttattaaacatatattttgtttctgtgagcccatttctgccaaagaagtgcacagcaaaaaagtgaaataaataggctgagatccaggaaatgctggtacatcagtactagtctctatactctwatggcaaagctgctcagcctgcatttcccatacatattcccacatatttgggtcaatggggaccaagaggcttcttgtacctagcaggccattgtatgggtcaaggtacaacaagctgttgcaccaagtggccaccaatggcagcaaagtggaagaatggaagaagaaagtgttcccaccctcctgtgttggaggactcttccttttaatagagaacactgtaaacttttttttgacagggatctgttaatcatgttttatctgaaaaggatcggaaaaagaaatatggattaccactggctgtgtttcattccgattatatgttagagaatgc

SEQ ID NO: 446694 - DNA, 564 bp, Homo sapiens
agtgaatgggcatagaatggagaaggagctggtggcaggagtgtggaggggagaattatacaggcttaargaaatttggggggatgatgattatgttcattttcttgattgtggggatgacttcatgggtgtatagatgtgttgaaacatctaattgtacactttcaaaatgtgtagtttgccaaatgttaacatcttaataaagctgagaaaataaaataacaagaaaaatgacacaggaactcacaaaaaccagcttccagtggccagatatcgaacaatctgatcattggaaagaataatagctacagtggattgacccatattgaaatagaaaaactcctaatttcaaaatgatactcataaaagagataatgggaaaaaaagcaagaaaagttcttaatatttatcctatattttttctatgcaaactatttcaggataaccaaatagatcaatctgagtattaaaagttattacatatagaaagaaaattttgagctaataaatgataaatgtgaaataactgtttcagacaaagttcattaaggaacaaaatgttag

SEQ ID NO: 446695 - DNA, 589 bp, Homo sapiens
tcctggggaattgtgccaaattatctaatatggaatttagctagacattacactcttgtttggcttcccatcttgttatgggtttaattgtgtccctcaaaaaggatacattgaagtcctgattctcaaaactttagaagaggaccttattttgaaatagggtgtttacaatggtaagcaaactaaaatgttgctactagggtgatccctaacaactgactgatagccttataaaaaagaggagtttggaaacagacacacatacagggagaatgccatgtgaagatgaaggcagagatggggtgrtgaatctacaagtttagaaaagtccaagattgtcagcaaatcaccagaagctcggagaaatgtctggaacagatttaccttctcagccctcagaagaaaccaaccctgccaacacgcaatcttagatatcaaatatccaaaactgagacaatacatttctgttgtttaagccacccattttgtggcactttgttgcagcagccctaggaagtgaatacactttgttttctgcaacacgtttctattcccgccactactccaccaagaaccttttttatacaag

SEQ ID NO: 446696 - DNA, 589 bp, Homo sapiens
tcctggggaattgtgccaaattatctaatatggaatttagctagacattacactcttgtttggcttcccatcttgttatgggtttaattgtgtccctcaaaaaggatacattgaagtcctgattctcaaaactttagaagaggaccttattttgaaatagggtgtttacaatggtaagcaaactaaaatgttgctactagggtgatccctaacaactgactgatagccttataaaaaagaggagtttggaaacagacacacatacagggagaatgccatgtgaagatgaaggcagagatggggtggtgaatctacaagtttagaaaagtccaagattgtcagcaaatcaccagaagctcggagaaatgtctggaacagatttaccttctcagcyctcagaagaaaccaaccctgccaacacgcaatcttagatatcaaatatccaaaactgagacaatacatttctgttgtttaagccacccattttgtggcactttgttgcagcagccctaggaagtgaatacactttgttttctgcaacacgtttctattcccgccactactccaccaagaaccttttttatacaag

SEQ ID NO: 446697 - DNA, 524 bp, Homo sapiens
  misc_feature (1)...(524): n = A,T,C or G
nnnnnnnnttattactaaaaagaccactctgaaggtgtagagaagaaaggagactacctaggaaacttaaacccgaggatgatgatgagtttcttggttttatttttgcttcatacatcccggatttagagatgaaaaagccagcaatgcagaaatgccagcagatacaaacaaacaaacaaaaaagcaacctaaccttctatttgtggccaaaggaccaggagaagtcaattgatcaagatagaaaacctttacacaataaactctccactccatccaaacaccagctctggttcctctcctacccatgacagcaaagtccaggtgaggaacgcaaacttccacacttgccaggctgtaacaaggcacccagggttcctcactggagtgtgtcrggaaaggcctgttaaagacctgggactttcatcttcagcaagtgcataccccattccaggttcctacctcttcccacaacaatgtcaatggagaccatgtatggaggctgggcttttattcccacatgg

SEQ ID NO: 446698 - DNA, 589 bp, Homo sapiens
atgatctcaacctaaaggaaaaaacataatcaatgatgtcaacattgaggtaatagagaagttaggattatctgacacagattttaaataggcacgaaaagaaaagcttgaatgatcaattagaaacacacataaaacaaatgaaaaaaatagactcagaaaagaaatggaagtctcagcaatgaaatggaagtctcagcaacaaaacagaagatgtgaaaaagatcccaatggaaaaatttagaaccaaaaattacaatatcttaaatacaatgyctaaggatgggctcaatagcatagtgcaggcgacagagtaaaggattctatgaactgacgggtagaataagaaaaattacccaactcaagctgtatagagaaaatagactgaataagaatctgcagacattcagagacctgtgggagtataaccaaaggtttgatatttatgtcatcagaatttggaaaggggaagagaaagagtttgggggtgaaacagtgctcaaaataataatggctgaaaatattccaaattggtcaagaaacataaagctgcagattcaagaaaccccaaacagataaaaaccctaaa

SEQ ID NO: 446699 - DNA, 589 bp, Homo sapiens
atgatctcaacctaaaggaaaaaacataatcaatgatgtcaacattgaggtaatagagaagttaggattatctgacacagattttaaataggcacgaaaagaaaagcttgaatgatcaattagaaacacacataaaacaaatgaaaaaaatagactcagaaaagaaatggaagtctcagcaatgaaatggaagtctcagcaacaaaacagaagatgtgaaaaagatcccaatggaaaaatttagaaccaaaaattacaatatcttaaatacaatgtctaaggatgggctcaatagcatagtgcaggcracagagtaaaggattctatgaactgacgggtagaataagaaaaattacccaactcaagctgtatagagaaaatagactgaataagaatctgcagacattcagagacctgtgggagtataaccaaaggtttgatatttatgtcatcagaatttggaaaggggaagagaaagagtttgggggtgaaacagtgctcaaaataataatggctgaaaatattccaaattggtcaagaaacataaagctgcagattcaagaaaccccaaacagataaaaaccctaaa

SEQ ID NO: 446700 - DNA, 584 bp, Homo sapiens
ttttctaattattagcatttgaaatgagatcatcacctacttgccaatgtatgttgatgtttactatttaattacttttacttggaatattttttgtgtttttaagtcatatcatcttgaacttatgagttactttcaaatatttattaaaatgtttcacatgcatgtttcttttaaattgactttcaactgttcactaatcgtaatttattattgctagtaaatgggatttttatgtattgtaccctgctgattatttagacttactttatggactggyatttggtcagtattggcaattgtttcaggcatgagtgacaagaataaatattgtatttatgtggtgaagatattttttaatgctgttgttcaaatatcctatatgtttattaattttagatatatttaatctatcaattactaggtagggcatgttaaaaatatattatgactgggagtttgacaatttctttatgcattcctgcaaaattatttgctatgtgaattacactgatagacttttcattacttttcaccttaagtgaattgaaaataatgttttatatttctatttcattaatttt

SEQ ID NO: 446701 - DNA, 489 bp, Homo sapiens
agttaagttctcactggatttttattctgatcctctattttggtcttttgggagtatagtgaaaaactgacacaaacatgcattctctagctaaatgttgccacctgaagagctagggaattaaaaaaaatagagctttatttgcttcatttttttcttaaatgcttgaaatgtaatgtttaaaaacatcctaaccatggtattgtggcatcgatgcttgttcattttatactctggttaatgtgaaactttcaattgaattggaatgkttttcaaaaatgttccaaaagagtgaagtctttctccagctacataatatgtaaattcaactttaagtgtagactgtaatactcacacataaatatctgaaatcttccaactgtttgtggtgttttaccaatttgtttcaaacagtgctagggatattaagcaacacaacaccctctgacaacaaaggtgctattaagggctgttgcatcaataatgggt

SEQ ID NO: 446702 - DNA, 291 bp, Homo sapiens
aaaccttgtaaataatattaagataaaaatacagctctagcacaccagaaaaaaaaaatcatgagaaaaaaaacaaaaatagatttacatcaacctttttaatttgtgactttaggccttcttccaaccaataaaaatctttaaaaactagcccaaaaacagtctgtctatataacattrgttgagttagatctattgttttaatgattcagaaattttctgggcaaagttggtacagttccagatcaagtgatagcttaatatggttatgagaataactcatccaaattg

SEQ ID NO: 446703 - DNA, 552 bp, Homo sapiens
tgtccttgaatatgcttataatggcttagtcctcttgtggaagtgcatatgcaagtgcaaatatttaattaataatataattttctgagaaaagtagagcccttggtggaggatattctttctttcttttttttttttaatccttttggagaatttgttttaccatttgggggcagctgcttcccaatcccatgggccttattttctcacatagagctgaaaatctgatgtaacttgaccacrctaaagtagatcagagatgcagccaaaaggaatcatttctatggtgttagctggagctaatcttcacttcaggattccctctttacaggctgtgcaaacctagagctgtcactggacacgtttgtgattcctagaaatgaagaccgtacaaagaaatgagagatgaggtatagagaaagtatatcctgactgatgtacaatctccaaaataagtccatgaatattataaatattttcttgagccatcatgctaattttgttattttctgattttgagtacagaaaattaaatctgtataagtggttgga

SEQ ID NO: 446704 - DNA, 552 bp, Homo sapiens
tgtccttgaatatgcttataatggcttagtcctcttgtggaagtgcatatgcaagtgcaaatatttaattaataatataattttctgagaaaagtagagcccttggtggaggatattctttctttcttttttttttttaatccttttggagaatttgttttaccatttgggggcagctgcttcccaatcccatgggccttattttctcacatagagctgaaaatctgatgtaacttgaccacgctaaagtagatcagagatgcagccaaaaggaatcatttctatggtgttagctggagctaatcttcacttcaggattccctctttacaggctgtgcaaacctagagctgtcactggacacgtttgtgattcctagaaatgaagaccgtacaaagaaatgagagatgaggtatagagaaagtatatcctgactgatgtacaatctccaaaatawgtccatgaatattataaatattttcttgagccatcatgctaattttgttattttctgattttgagtacagaaaattaaatctgtataagtggttgga

SEQ ID NO: 446705 - DNA, 487 bp, Homo sapiens
atattattaactctgaagtccactttaactgatgttaatatactcactctatttttcttttaattaatacttgcttgatatatcttcttctatctttattttataacatattatatctgaaattattttttgtagaaaacatatagttgggtcatttttaaaagtctaatctgacagtatgttgtatttagaacacatatttaatgtaattacttaaatatttggatatagrtctatcatttcatcatatgttttctgtgtgttcatttgtttgtgtttcccctctttgaaggctccacccagcttttggattatttgaatgttttaggattctatgctaattgatctatcatgattttgaaaatatctctgtttatatattttaatggctgttctagtgattaaatagtaatagttaactccccaatatctaactgcacttagtagtttacaacttcttttttgaatgtggaaaccttactgcagc

SEQ ID NO: 446706 - DNA, 543 bp, Homo sapiens
ctcctgtttcacagatgaagaaatagaaactctagcaaagtatgttgcctaggtctcagagattataaatggcattaatgaaattcaattctgtatattctgatatttcaacatgtcamtataaatttatttttaatttgtttttattctattgttttttatttttaaaatatggttaatataaaattataatattaaactagtattaaataaatagacataattacatatattttaacttaaagagattgaatttgaaaaataatctaaaatgattagtatctggcacacaaaattttacttttatgcttatataaagaagtacctacatataattcttaactttttcatgtatttttctaaaaaaacaactggtttcatgaaaataatggcattgctagatttaaagtaaatgaaatacaatgttcacggtcctccaattagtgaaatatggtattacgactgaaaaagagctaaataattcaataactatctcaaagttgtaaacacataataatccaagaggcttcttgcagtaacaca

SEQ ID NO: 446707 - DNA, 461 bp, Homo sapiens
gaattgtcagtattggatagaccctgtatgtgtccagatccatgtccacggacacttcgtccttttactataagaagaattaattttataggatcagggttttcttttgtccttgcagtcgatcattggtaagaaacactgcggtccaaaacagccatagaatgacaaagtcacaaggcactgatatctctgattcatgtgccctccaggtagctgctttgcaaaccagggatttcaaagattagtagtcttaaacacagaaggcttgatgactccctaattctaaagcaatggctgttattaatcctatatttatttaagaamttcatataaataattgttccagatacttaaattcattttccttagattgcaaacaaataaatctttgctttgatcgtctatttctttccatgtcactgattgtcatacttaccctgcttttacggaggagaaaactg

SEQ ID NO: 446708 - DNA, 603 bp, Homo sapiens
taacatatggttaaggagataaaggaaggaaggaggatgaagggttgctcttccagtttttattctagctgcatacccattctgagcattggcacacgtggtcagggagggggtacgggttggtgtaatggatggtgtgacagaaatttggcatcttagtggccaccacatcgtgctgctctgactccttcttcaggactgagttagtcattccccagctgccaggagtgttggctgctgagacctgacagcggatccactttccaggaatttcccttgggtaaaggaactgattcaccccaaactatactcccttcctgggggcagcctgccttcttccactgttgttacaatattccacagtcatttccctgacctattataaacctttctctttcactccagatgattgatagatagatggtagatagacagacagagagakagatagatagatagatagatagatagatagatagatagatataataaactattgacaaatgcaaatttcttaaaaaataaattatattgtgtatatttgaggttcataacatgaggttatggaatacatatagacagcaaaatggttaccatagtaaa

SEQ ID NO: 446709 - DNA, 592 bp, Homo sapiens
agccattatcttaagctaattaatgcaggaacagaaaaccaaatactatatgttctcacgtatgaccggaagttaaacattgggtactcgtggacataaagatggcaacaatagatactggtgtcttctagagtagggaggggggttagggggaagggactgaaaaactattgggtaatatgctcagtacctgggtgatgggatcacctgtacccaaacctcaacattatgcaatatatccaggtaataaaactgcacatgtacccctgaatctaaaataaaatttgtaaaaaaatctctcatgggaattccttcmtgcaaacaactagtgttagaatttattatttttcttaatgactatctgtcatttcatggtgtgatgggccaccatacagtcaagcatcaaaacactgatgaacgttcaccttgctttcagttttctgctcatacaaacaattctgaaatacaaatctgatatggtttggctaggtgtccccacccaaattgcatcttgaattgtactcccataattcttacgtgttgtgggagggacccagtgggagattatttgaatcatgctgtgggttcaata

SEQ ID NO: 446710 - DNA, 602 bp, Homo sapiens
acttttatttgcatagtttaaagtgctttactgacaaaaaatcactgcatttacccagccatagaaatggtgatagcagggaatttagattctgataaaatgaaataacaatataaaggtttattctgaattcattaatttgtatcactaaagtacagtgaactaccaataaaacacatgtgctrcaatatacacagtaagggcaggtatgaaacatattctaagagatatgtgactattctttatgggaaatgtgtctacctacagatcatctgtgcacaaacttatacgcatgtacatgcacattatttgaacaaataaatctctgcttttttgtctttccccctggagctctggctatctttccattttgctgttcagattaaaatactatcaaaacgagacatgattctccatcatttgttttattatggtaacatttaccttcatttgaacagtcactggccacaaatcttcatatgttatgttatagtactgactttctgatatataacaatgtatagaattctcaatagaatgcacataattcagaattatgtaactgaatgaccattagaactgaaaaaggtttactgaaaaga

SEQ ID NO: 446711 - DNA, 599 bp, Homo sapiens
gagtttaagcaaacaagcgttctatgtaatactttagaaacatttttaaggacttcagagaccatagctgtaagcactttagtagataatatacatagacacaagaaaatgtrattatcatacattttaaatatacataatttattcatttaacaaattgttttagccaacatggacatttacaccaaatgttaggaatacagaattattataagcccttgaagtcttcagtttaaaccccactgtctccacatgtatatacaaacaagtacctatatttgcttatggcttctctgaaacttattttcaaaatgaaaataaatgaataatatatgaattaccttatcatcccatcaacaaaatgatcaatccgatttattacctatgtcttctgtttctttcccctataatgatagctcaagctttctttcttacaatgacaaatcttccatttatttgaaaggtcttgtctcttcttgtcagcacagaaagttttgacttctttcactaaattatgaaaaaattgagttttaccttctttaaattactactgtttgaagcctctgtgaaaagaagctgacctgaatatttgctaatac

SEQ ID NO: 446712 - DNA, 599 bp, Homo sapiens
gagtttaagcaaacaagcgttctatgtaatactttagaaacatttttaaggacttcagagaccatagctgtaagcactttagtagataatatacatagacacaagaaaatgtaattatcatacattttaaatatacataatttattcatttaacaaattgttttagccaacatggacatttacaccaaatgttaggaatacagaattattataagcccttgaagtcttcagtttaaaccccactgtctccacatgtatatacaaacaagtacctatatttgcttatggcttctctgaaacttattttcaaaatgaaaataaatgaataatatatgaattaccttatcatcccatcaacaaaatgatcaatccgatttatwacctatgtcttctgtttctttcccctataatgatagctcaagctttctttcttacaatgacaaatcttccatttatttgaaaggtcttgtctcttcttgtcagcacagaaagttttgacttctttcactaaattatgaaaaaattgagttttaccttctttaaattactactgtttgaagcctctgtgaaaagaagctgacctgaatatttgctaatac

SEQ ID NO: 446713 - DNA, 596 bp, Homo sapiens
gggtttatttaatgtataattctctttgtagaagttctcattttgattatgtattatagtccagatttttgtttaattatctatctgtgttctcttataactcattgagcttctttaagataaatattttgaattctttgtcgtgtaaataatagatctctatgtctttagaatctcaatttcttctgaatcagtttattttgattcttttcatacaggattttggtcaatatatcatttttaaatagatgttcctataggggtagaagatctgagacttcttattttgccrtcttgttgatgtttctctgtgtttttgatttgtgaaatggataatttttaccaaaactgtgatgccagggtatcattattaaaaatagttgtggcaaaaaagtgatgatgttattttttattgctttcacaaatttacagtaacatggcaaacaaatgagtttgactattatttgtgtaatttcaccagtaagtgttaattttgatcacaatagacattgttaagcattatgctacttaacacatactaaaataccattaatctattactatgacctcattttgtctacaatcactttaattaa

SEQ ID NO: 446714 - DNA, 577 bp, Homo sapiens
cttttctttccacagagtcttagatattcttttaaaaagtatatgtgctctcaccaaaatgaagcatgtctttgcttctgctatgtatacttgcagtgacragtaacttgcaatgttattcactgttagctactacagtagttatttatttatttatttatttatttatttatttatttattcttatttttgacaggaatatgtgtgccccaaacctcagcattacacaatatactcgtctaacaaatctgcacatatccctctgaatctaaaataaaagttgaaattattttaaagagacaataatatttaggtatatcctcattcaaacatatttttcaatgtggaaatcacgtgatgaaataagtccctcaatttaaaatgtgtaatagtttgcctaactggggaagcctttttgccgtacttattcctgagcatgtgtgggagctgcgatgtaaggtacagccccatctctgccctagtttgtaatgtcgtcatctttcccctgagttgtttagcagaagatttttatctttttctcctgcgtatggtcaacatctttatgctcaacgttgcc

SEQ ID NO: 446715 - DNA, 534 bp, Homo sapiens
tatttgctttatctcatgatgatacacagatttgcagattaggtatatgcatatgtgtgagaccaaggtttcttgtttgctaattttagctgagtactaattttcagaattaccttccttaacaatactgattgcctcactaaattagtagtcaatatttaatcaagacagcaatgacattattcaattattgggcctgggccatgagcaatatctgaaaatggcttcaggtatcacacacagaactcgatgtgtcacataattccagcataattccctaagttttaggtaaaacatagtcgagaaaacatatrtcattgactgcctctagtcttaaagacatacacacaagcatagcacattcccagattttgatttgtaactcaaagtggatataaactccaaaagagttcaatgtggatactattaattatcatgctttaattaggcaagaaatttttcattttaaagttgtcattggcaatcacttttactgtctatctttccaaatactacagtatttagtgtcatggt

SEQ ID NO: 446716 - DNA, 534 bp, Homo sapiens
tatttgctttatctcatgatgatacacagatttgcagattaggtatatgcatatgtgtgagaccaaggtttcttgtttgctaattttagctgagtactaattttcagaattaccttccttaacaatactgattgcctcactaaattagtagtcaatatttaatcaagacagcaatgacattattcaattattgggcctgggccatgagcaatatctgaaaatggcttcaggtatcacacacagaactcgatgtgtcacataattccagcataattccctaagttttaggtaaaacatagtcgagaaaacatatatcattgactgcstctagtcttaaagacatacacacaagcatagcacattcccagattttgatttgtaactcaaagtggatataaactccaaaagagttcaatgtggatactattaattatcatgctttaattaggcaagaaatttttcattttaaagttgtcattggcaatcacttttactgtctatctttccaaatactacagtatttagtgtcatggt

SEQ ID NO: 446717 - DNA, 422 bp, Homo sapiens
gttctgttcaggcaaatgatcattatacccagtttccatatcattcatacacagctagacacattttctggtggggatttaaacaatggtatggaattctgcagtctctcctatctatatattctttcactctgaatatgtaccctamataataattcttaaacttcatttctttatacaaatattatttttcttatgttggtgtttgtaaactaatacctgcatacaggaaataaaaaagtgatacaaaaatgggagtagttataagattggcacttcaggtaggtagatgtatggataatcataactgcaattatagaattattacatgttatttttttaataagtaagataagtagcacaatgaagatattgtgttgttctggaaatttagaaaatgctaataatataaaaacgttata

SEQ ID NO: 446718 - DNA, 562 bp, Homo sapiens
ttagcaagttcaaaaataaagctctgtaaacatacaaataattcagattaaatatctaaaggaaatttatagctaccagaagaaaagatatacattttataaaattgttgtataattagcttctttcttttttcttttcttcctaatctcaagctgttcattgatcatgatcatgagtaggcactgtgcaagattcagggaaaacgaagatacwtaaacaaggctgaggaaatgccttcttatgtcttttatatgtatttcattatttcactctcgccacagccattttactctaaccattttttttctgataaagaaactgagactcaaaataataataatgtgccaattacgacatagctagtaaataatagagcaagactccaagcctaagagtgtataattctattcctttgtaacactaacatttaatttgtactctatgggggtaggttggaaattaaatagtgtttaattttaatatttttacgaagtctatatttcttttggcatatggaatcaactaataaaattttaaaataatttttatttttcttaaaat

SEQ ID NO: 446719 - DNA, 562 bp, Homo sapiens
ttagcaagttcaaaaataaagctctgtaaacatacaaataattcagattaaatatctaaaggaaatttatagctaccagaagaaaagatatacattttataaaattgttgtataattagcttctttcttttttcttttcttcctaatctcaagctgttcattgatcatgatcatgagtaggcactgtgcaagattcagggaaaacgaagatacataaacaaggctgaggaaatgccttcttatgtcttttatatgtatttcattatttcactctcgccacagccattttactctaaccattttttttctgataaagaaactgagactcaaaataataataatgtgccaattacgacatagctagtaaataatagagcaagactccaagcctaagagtgtataattctattcctttgtaacactaacatttaatttgtactctatgggggtaggttggaaattaaatagtgtttaattttaatatttttaygaagtctatatttcttttggcatatggaatcaactaataaaattttaaaataatttttatttttcttaaaat

SEQ ID NO: 446720 - DNA, 507 bp, Homo sapiens
aaaatttacaatttgcctaagactatttttcaatatattttcttatgttttatctaaaagaaaaaatcttagcaatggtattttggaaatgataaccttctattttcatcttataagaataataaggtaatttccaagcacttaactgtccaaaacaccaaacaaaacaaaataaaagcaattaaagyatttgcggtttcaaattctcctttctttaagtttctgttatagtaagttgaaaatataaaccacaaaccctttttaaaaactatgtacagacaaacaactttttcttcacctttgaaaatgttggaactaacatttaaaagaaaaaaatggatatttaagcaaaattttacttttgtaagtgcttgataagaatgtggtttttaactaccttgtgaaattttaatatggttaggaagagcttttttctatgaatcagccacatatcatatattttattttttcattactttataacacaaagaccaaaatcctgttctc

SEQ ID NO: 446721 - DNA, 533 bp, Homo sapiens
attcatgtattaacagctgttctctcttctcacatgtagttctactttagatagcatctaaagcacaggcagaccgtattgtagagttaaaaaaagatgtctgtcttcaacatttatgatagtgggtaagaaatcccaaggtttgtgtttttgttttttttttccaaatgcattctgttaaacagagacatgttctgggacaccttggtcaaatttccccatataagtacagcatttttttttatcacacaccatacaattggaaacagatgcaattagctgatgtatattatgcaagaatctgtatactcagatttcccagattataaatttcacatgtacattcacatatgcataatacattttaaagatttctacaaaaagcctttcacccccccaaattatgtttactaaagaagaaagtgagaactgttgctstcttactcctcagtgcctcatgtcatcgaacggtgatgtaaacagttcccatggtcaccacttctgtcccaggccattgaattgcaaaggtcaga

SEQ ID NO: 446722 - DNA, 594 bp, Homo sapiens
tgattatatacatttaaatacacaaatttaagcataaagaatataaattactctatggaataggtactatttttcccattttatggatgaaaaaaaatgaggcagcaaaagttaaaggaactttctcaaagtcatataaatactaagtggcagaggtgaaatatgaatacaaataatgaggtaatctgtttccaaaatctatgctcagaaacattgcaccacattgcctaaataaaggtaccactaataaaaaagattgatgacagttattgtgcacttattagttacaaatcaactacctatgtggcatttttttaaatttaattctcaagacaaaccagtgaaatagatattatttccattttactgaggagaaaactgaggaagagagatgtttactgacatgtttgaagtcaaatagtttgtaaggagttgaagcagaatttgggttcaaatctatttgaatcaagctttaaaagtcttcattattgtcattgaatggataaatagataggtacatggaaagatagatgattagatttatgrgtatgtttgtacacaagtacatatgcatactccctgaaatatggatat

SEQ ID NO: 446723 - DNA, 603 bp, Homo sapiens
ttatgaatgtatatcatgtttatgcattcatatttgtttgtcataaaataaaaaagtgaataataaaaaagtgtggaataataatttaaaaatattttacagtctgatttttatttttatttcaatgaactaagtttatgacttagagtacatgagatagtatggagaatgggggcaaaacaattgaaaagttcaagctgttcctggatttgagatctccctggatttgagacctccctgaagataggataaataatcattatatttctaatgcacatcacaatatatagtacataacaggaaattagggaatatttggattggtgtggcctattgatgttatttattgaaacactttggaacaaattctataggctgagttgataattttgatgtgagtatgccaaaggggcatcagttactatttcccttttatgagctatctagaagcatgaggagaaaktgtgttcatggaaacctccctttagccaggactttggtgcatgctggagtatttttcttaagagaagtcataattctaactcaatacctgtctttttttctgacttcttaacttacaacttgttgcaaatgtttcttgtt

SEQ ID NO: 446724 - DNA, 508 bp, Homo sapiens
atagagaacccagaaataaacccagacacttatatccaactgatctttgacaaagcaaacaaaaacataaagtggggaaaggacaccttttcaactaatggtgccaagataattggtaagctacatgtagaattacgaaactggataatcatctctcaccttatacaaaatggatttttataatttaagatggattaagggcttaaatctaagacctgaaactataaaaattctagaagacaacattggaaaaacccttctagacaytgactgagcaaagatttcatgacaaagaacccaaaagcaaatgcaataaaacaaagataaatagcggggacttaaataaagagcttttacatggcaaaaggaacagtcagcagagtaaacagataaccctcagagtggaagaaaatcctcacaatctatacatctgacaaaggactaatatccagaatctacaacaaattcaaacaaatcaacaagaaaataaaaatcccatcagaaagtg

SEQ ID NO: 446725 - DNA, 508 bp, Homo sapiens
atagagaacccagaaataaacccagacacttatatccaactgatctttgacaaagcaaacaaaaacataaagtggggaaaggacaccttttcaactaatggtgccaagataattggtaagctacatgtagaattacgaaactggataatcatctctcaccttatacaaaatggatttttataatttaagatggattaagggcttaaatctaagacctgaaactataaaaattctagaagacaacattggaaaaacccttctagacactgactgagcaaagatttcatgacaaagaacccaaaagcaaatgcaataaaacaaagataaatagcggggacttaaataaagagcttttacatggcaaaaggaacagtcagcagagtaaacagataaccctcagagtggaagaaaaycctcacaatctatacatctgacaaaggactaatatccagaatctacaacaaattcaaacaaatcaacaagaaaataaaaatcccatcagaaagtg

SEQ ID NO: 446726 - DNA, 485 bp, Homo sapiens
ctgctgtggtaaacttgtagcctactccagtccctagtcaccttggattttccagaacctggaggtgtcaccagtggaggctgtgaaacaaacaaacaaacaaacaaatgtcagcctctccctccctctgggagctttgttccagggaggtatggtcctgttgctagcccaaaggcacctgtaggaagtggctggagacctcagttgagaggacctgcccagtgaggaggagcgggataaaggtcccacttaggaaagtagtgtggccaggttttggtacagcagctgttctgtgcagggagtccgcttcagcccctggtcacctcagacactccaaggcccaaaggctagaatgcctaagttgctcaaacagcaaagatggtggcccaccctccctctgagagctctgtctcagggcrgttacaaatctctgttggctggagaacaccgatgggggtggctggatgccccagttgaacggtcct

SEQ ID NO: 446727 - DNA, 552 bp, Homo sapiens
cctctttctgaaaagaaaaacatgcctgcctaaatattcttaaactgtgaaggatcttggagacattttatgcattatctattttgtgtacaaattccatttccaaatgtcttaactccagagatggaaagcaattttttacattgctggacaattctaaatgttagagattacatcttatgtttaaaatatgcttctactgcctgttattggatctttcacgtagaacacagtgaaatcgctattttctttcatcctaacaccaaataacaattgtaactgatttttgattgaatcgatctgtctctttgcatgaagaggtttattttgggggtattgtagggaacgacatattgttatacatcagggtaaagtgagargagtactaattgtgtagtgtattatggttcttattgcctaaatttggctgtctacacatataattcataggaattagaacctcttacgtccaggtgcagaagattgctgtaaaccaggtttcacagtaaaataacactgatgattttatattaactccattttacttcatat

SEQ ID NO: 446728 - DNA, 593 bp, Homo sapiens
gctaatacaaatagacattcggttatatacttgaaaaccatactaggmttcctccttctcattgatcttcaggatggtgtcccaaatttaatgaaatttggctattggttagccataatgaaaaggtaggtatattctcatgctatatgcctcaaggtaaaataattcagaagatgatgaccagcaaatatttgtttaataattgaataccatattatttctttgtttaaaggaaagaacacctgttgtgttattagtcaactatagctgttttcgaaagatttttttaatatgaagcaaaattacaccaaaacatttactgcatctatactaatattttaaatcactgagtgtatctctcatcgtggaatcaaataccattctcatcatttaaaataacccgtaagaatttgataaatggacctggagacaattgattatcctgatgaaaaaatgtaataaaattggatgactggcatgcccaaaaatatattccaagtaaattataaaccaaaatacaataagtaaaatttaaactttcagaagaaaatataggttaaccttgttttagccttatgaaaaaaatatagaca

SEQ ID NO: 446729 - DNA, 612 bp, Homo sapiens
ttgtggtactatgcattcagtgtagatttttgttgttgttgttcaatgcttatcaccagacacctgtctcaaagcctgagggagtaatagctcaggaagactctatgagccatctgccactgacattctcagattgtactgggtcaacttccctgggaattatataaggagtcttctttgacctaccctttcaggccaatcagatcacattggtaacygcacaggattttagagtgggccacttcttaaaaaggaaatgtcacattgaatgtgaagctggtgactggcatataagttacttgaggaaacaaaaaaaatttttagattttaacatgagcaatttagctgtggaatttctgtgttttgatgaaaacatagttttccttcagatgataatctcatgttgtcttgatgcactcattgtgtcaagtttaagaattgttcactatcgctctttaggaagaagttttgtcaattgtctttaattaattgtgtaatgacaatgacctcaaaaaaagaatactgatattcagggtaatcttacagtaggcatcctatttgccattgaaattcaagaagtttgtggaatgacttttttaaaaaggttgtttt

SEQ ID NO: 446730 - DNA, 458 bp, Homo sapiens
ccagcacattttataaaatgattactttttggtgctaatatgtctcagacactgtacaaatatgtgattaatctgtccccaaattttgtgaggtaacttttattattgtccttcttcaactgaagaaaatgaggccaggacttaaaatccagacagtgaaaccttaagtgatgaggacytagatttgaccccagttctactgagttctaaagcctgtgctataacctagatgccacatgccttttatggcttgtcaagtcctgatttacacataccagttgcagtttctgtttctattggaacttcttgggctccattagttagtccggtggcttaaaaaacaggcaggatatgtgttagaggaccatgaaaagctatgtagacagctactgtattgtcacagccagcaagcagttgacgtcaccccatttggcctcttcccctctgaagatcatctc

SEQ ID NO: 446731 - DNA, 652 bp, Homo sapiens
cattcattaactcgtttttacatcctaatactttttcttacaggtttctatcacttttttttgctgatcatttaatttgtcctagcaggaagaatttaatttcctgaaagataacaagatccaggagttactctgtgatttttctgttgccacattttatatagctcacattgtcataagtaggttgtgagcttttctaaggcacaaccttgagttacagttcatatttactccagccagactctggtatgaagttgtttattcacacattgcgtgctatgtggatgtgctctaacaggctttatgttaactactgagtaaacagagataaaacaaaaaattcttccsttagaaattcatgggctactgtgtagattaaaaaatctacatgcaattaaaatgaatgtgatcagtgctctgaggttaagtacaatatagtgatatgaaggaaacaagcaatcccccagacacaaaatttttgatatttatttttaccaactgattgaaaaaacgttttccaagtggggaaaaatactaaaagagttttgtcattctcaacgtttctgatataggccagtgacagaaacagagaaatatggcccatgaaagtgatgaagcgttatgagttgttatggtagatagtaaatttgaa

SEQ ID NO: 446732 - DNA, 404 bp, Homo sapiens
taacacaaaaattataaggtaaacaagacaattagagcctcaaaaatgtctaatatccaaggagaacaatccacttaggaagaaggatgttctgaaacaaacaaaaccaaaaacccacttcactttaaatatgcataaagtaaatttgggagagtgaatgataaaacattcattctacaagactttaatgccaactcctagaaagagttacaagacatcattttataaagaagaaaatatatagtatatgcatctaaaataaaccattgaaaatactattttaatgatagcaagcacaaaaacacttagcttgttcactcaaacaygaatgtttaatccccctgaattctttaaatctctgatctcctttgggaatgaaataacttcagggctcaatttgtact

SEQ ID NO: 446733 - DNA, 476 bp, Homo sapiens
ttttaatgtaagagtatggaaagttcattgatataattccacattaccactagactttaagaaactccctctcattgagttatagtttagtawgagacatatttattttcttctcttttccaactgcaaatctgtaggaggctggattttcttcagctatttcagatgcagatacagattgcaatagatggatggcagaagctgttgttattaattcagacattccagagaatcataaaaatgtaaatcaatgccacccttctaatttaatatttatgttggaaaatacagtttttttaaataaaatatgatgggttgatctataatgggttttaattttacatagataagatagagtcaatataattctaaaactctgtttaaatttctaatatgataaaaatctatagttataaaccatgtaaacaaaagctctggagcacttgataatttttaaaagtggaaagagttcctga

SEQ ID NO: 446734 - DNA, 585 bp, Homo sapiens
gttaaacatctgatataattcattacacttatatggtaatatcttatttccataagcacatatttaaaattatgaattactgttttttaatcactttattgttatattctctatcttatgcattcgatagtgaatgtaaaastaggttggccacatcgcctatttcatgagtcccttctcctatctggtccttccctcctccctcaagattacagaagaaaataaagatgagaaactctaattatgcacttctttctaaattaggggcattaatgaaatctctcaggatgttgactctctactccctgttctagagaatggggattaggcttaaagctgagccttgcctttaaaaacaagtcttctatttcttttgctgtttcctttgatgcttcatcgtgtggaattgcagcattccttaattgaaggatgctggtgtttttttctctctctttactaatatttttaatttattttgttagatattggagcaagaaataattatagctcaatttattcttccagcttttccagaaagtttcctctcaaactacaaattaataattaatcttttgaatccttggc

SEQ ID NO: 446735 - DNA, 509 bp, Homo sapiens
atacctcccccaagatacttattaattaattacaagtggaaaagagaactcgtataatggaaaaaacccacagacttcgcttcaactaagtgatcaagttagcgtcwctgctaataaaactttcaggcatcatctggccctgatatgatgcaccaagaaacacacaccacttctgtgatcttgttcccctaaaatgcgtaactttaatgtagtaatgaaaaaatacagacgaaaacaaatttgaggacatcctataaagtaactgaccagtacaccttgagtatcaaggttatggaagataagggataaccttatcctcctaaggagatgaaggagatatgacaactaaatttgatatgagttcctgcattggactctgaaacagaaaaaaggacatcagtggaaaaacaagtaaaatctaataaaatccggtaacatcttagttttgataattgtactgtgcttatataagatgttaatgttaggggaagctgagtgagcgtatatgc

SEQ ID NO: 446736 - DNA, 608 bp, Homo sapiens
cttactccagtcagaatggctgttattgaaaagacaaaaaacaacagattgttagtgagcacacgggtaaaagggaactcttatacactgtgagaagaaatgcaaatcagttcaattttctatgaaaacagcatggagatttctcaaagagctaaagatagaacaatcattcgatccagtaatcccactactgggtatcaacccaaaggaaaagaaatcacatcaaaaacatacctgcacttgcatgtttatcacagcacaattcacaataacaaagatgtggaataaacctaagtgtccatcaatgaatgattagataagcaaaattatatagatagatagatacagatatagatatatttacatacacacacacaaaataggatactattcagccatgaaaaagaataaaattatgtcttctgcagcaacatggatggaatcagaggccattatcttaagtgaaacaactcagaaacagaaagacaaatattgaatattctcacttataagtgggagctaaatgatgtgtacacatggatgtaagagtgtggaatgatarccagtagacactcagaagggtggggagatggcagagagtaagggat

SEQ ID NO: 446737 - DNA, 581 bp, Homo sapiens
attctgagcaattttggagcaatatgattgaggcacaaatgagcgtttctaaataatgttgcagttattgcatttaggtataatataaacaccccaagtgttatggttatataggtgtgtgtatgtatatgtatgtgtatatatgcatatatatgtatttgtatatgtatgtgtatacgtatgtatacatatgcatacacatatatatgtagttaagtgtctgggaaaggttttggggttcgagagagactgaaagaagttcatgggaaaagtagaattggtctatagcaacctccttcttgtcatacacttgtgatcctgtgtttattattttctatagccagtgctggaatatacggtgattgaaactattagagaaaataaagtgagctccaggtctaratattttaacgtgcaaaattagacaaataagagaaacagagcaagccttactgctgttgttttgggcgtgagagcaactttcttgcaggacgttatgggctccctgcatggttaagtgctgtgtggctaaaacataagcagaagctgggagctgaggagtcctttgttgactcaaccac

SEQ ID NO: 446738 - DNA, 656 bp, Homo sapiens
ctctggtgggttaaggtcaccttcctggagaatcactgagttgaatgattttataataggttggaggactctggaaggaatgcatattagtagarttagatggcttcaaaactagtttaaaatgaatctgtctagacaggagtcgatgttagtgtctgggaagagtatttatagacacctctttgatatctatacaacattttctcctatggaatatttattattgtccaaaaagaggaaaatgagttagcacaatgttcacatttttagtatatccaaattaggttgggtacaaggagacattttctaattagtttcaaggaattatattttaatatgtttttaaaagaaatcaaatactttgatgaaaaggaaatataaggtaaagcaagagttaaattttaagctggaaaaaaattaaggtgcttttacaatgaagtgcctctctgaaagtataaaacttagatggcgtgtaaagatcaaaaacttggtgataaaatgatgacattagagaaaatgaagtattgtatgaaagtaggtaatgtctgcagaattgttgggctcattcaggcagaagtagagataatgaaagcggataatggactgtaattaagtgctcaggcctcctgcaaacccgtgtgaaagtcaagttactt

SEQ ID NO: 446739 - DNA, 578 bp, Homo sapiens
gccacttacaaagtctggaggggaagaaggggaggmcatgacccgtgtggccatgtctttgatgaatgaaagacgtagccaggagactggtcactcccagaagcaaggggagggagatgataacacagttgagtagtagaagcatcgaaaaagaaatgatttgctcaagagaatggaagaataacagcttggaaacaaacattaaggacgtgttgtcctgaagggtgcagggtggcaggacatgcagcccctgcagaaagaactgttagcgcatccagcagagcctcactgaacagaggaagccctgtgctcgctggcattgttacagtacacagcggactgaggatcaacagcaggaggggcgagagcagcttctctgatagtctggctgaatgcagaactcaaatgtaaaataggctcaggaatgtaaataagaactcttcttgagataagccaatataaatatcctttttctgaaatgagagtctgatagccacagtggtttcgatattattctacacaatccctctctggagttttggtatagtagctacatgttgagttaatttaagaagctg

SEQ ID NO: 446740 - DNA, 578 bp, Homo sapiens
gccacttacaaagtctggaggggaagaaggggaggacatgacccgtgtggccatgtctttgatgaatgaaagacgtagccaggagactggtcactcccagaagcaaggggagggagatgataacacagttgagtagtagaagcatcgaaaaagaaatgatttgctcaagagaatggaagaataacagcttggaaacaaacattaaggacgtgttgtcctgaagggtgcagggtggcaggacatgcagccccygcagaaagaactgttagcgcatccagcagagcctcactgaacagaggaagccctgtgctcgctggcattgttacagtacacagcggactgaggatcaacagcaggaggggcgagagcagcttctctgatagtctggctgaatgcagaactcaaatgtaaaataggctcaggaatgtaaataagaactcttcttgagataagccaatataaatatcctttttctgaaatgagagtctgatagccacagtggtttcgatattattctacacaatccctctctggagttttggtatagtagctacatgttgagttaatttaagaagctg

SEQ ID NO: 446741 - DNA, 393 bp, Homo sapiens
aagcaatagtcaatttaacattttttcctcactatggatgccttccaaagcctatttaaaaatttgtagtgcccctttcttctatggaaccagctaaaatagtaatttgggcacttaattccagtagaatcatgaaaatgtgtgtcttccatcctcttccctggaaagttgccacaatacccatctcaagtatgactttgtccctactggagacaaggagactatgtacataktttcctttagagtaaataaagtcagggtaaagaagcggcctaggatctggacacacacatacacacacgcatacagagaggtcattttcagcagcattagagaaaaagcctgggacagtaagagcctaaataccagtcaatgattcatatattgtttccc

SEQ ID NO: 446742 - DNA, 487 bp, Homo sapiens
tttcgtgcagttcatgctcactgtaagtttatttctctgtaaatattgtcatattgtctgaagttggtagaaccttccttcaayccctgaagaaatttattgctaattgtcacaatggggctgacagctgaattggcgaggaggtccacatgcctacaggaaaggtgtttttgagcctactacctgctagttgtcccgtttattaaaaagctggatagtagagagctatttgttggacaaaagactatgtaatttgttcaatatatgaaactcaaggacttcccttaaatctcattaattggctctattccagaaagtcatatctctatcagtatcccatctgtctcataaaaagtgtaaagggattgactttaccctacttataagtcaataaattcatctgatatagtcaatggatgccgacagaagacccaagtttctgtgtcagaggcaaaaaaactgtattactcacagaataaataacaac

SEQ ID NO: 446743 - DNA, 589 bp, Homo sapiens
atatgttatcatcattctgctatgagttcaattgttttattttttagctccgataaatgagtgaggatatgtgaaatttttctttctgtcccaggcttatttcacttaacatactgacctccagttccatccacgttctgcaaatgactgaatcttattatttttttatggctgactagtactctattaagtatattatggttactagaggctgagatgggcaatggagaggggagacgtaaagtggggatggttagtggatgaaaaaatatagttacatagaatgaataagatctagtaaatgatggcacaacagtgtgactacagtcaacaataatttatagtacatttgaaaagaacgaaaagaatataattagaatgttcctaacacgaggaaatgataaatrctgagataatgtattcctatttaccctgatgtgtaactacacattgtatgcctgtattaaaaatctcatgtgccccataaatatatatacctactatctacctataaaaattaaaaattaaaaaaatgtattttaccactgaaagacctcttgacttaaatttctttaaggttggattttag

SEQ ID NO: 446744 - DNA, 497 bp, Homo sapiens
tttaaaaccttcaactttccagtttctatttatacttcatgtgctgcgtaattattacctcattcccacatcttaacgtctcctgtaagaggtttattctataacctttcattggaaactcatactttcttacccattgtgagaccttggttcaactctatcattccacytgctgtggcttcaatctctatttcatatttttcatttaccttcaaactgcacatattactaaattctttcagtctgaagcaaaactcacctgtaacttaagttaaataagttgccttttcttaactgttactaagaaaagaagttgctatggaagccttcttcacactcaatttcttaacccatgaaatctggacacacaatagaaactttgccacagtcatttgtgagttatttcccccaaacaatggatactttagagtaaacatgtctcttggtcagtcatgaaaactctcttctcttgatttagagacagctactctcttctg

SEQ ID NO: 446745 - DNA, 467 bp, Homo sapiens
gtcaggaactctgcttctttttgaaacttataaaaacattctagttaccataagcatggtaaactaaaattagacaatgataaagaagaagaaataaagaagaaggcaagagaaaagtgaatcaaaaagctgaagagcttgttaatgaaatcgttaataaaaacagatcacaataaaaaaagaaaagcaggaatactaatgtaatctctggcatctttctaagacctctcccctctatttctcttcatcctgagayagccctctaatacttttagagcctatctccagtaatttgtaaatagattatcaatactgatgcacctgtgatgtgcttctgtgactacttatctcatctccaaggctaccaatgtacatcatagactaggagactaaaattatttgagcacctactatgttgtagaatgtatataaagaaatttttcaaaagttattaattcatcacaaat

SEQ ID NO: 446746 - DNA, 521 bp, Homo sapiens
ggtaagaactttttatggcattattactattagtttatttactatgcagtttgaaaacaaaatttaccttgtgtttcaattacttggagaaaaccttttttgaaagttagtgaagttgtagaaaagtctcattagaatgttaaatattaatgacatctttaaactccaygcttaagagttagggaaataagaataggaatacaataatttgccaatgtaaaactgaataatctgaactttttaactctgggttctgtgtccaacattatgaccttgaatgatgtgagaaaatacatttcttgctttctttttttgcataatttggaatttaccgttaacctaggtcattgagatgctgggggttagtgaccaaaatgttcataagaaagatgatggcttgggaagttgaatttaactttttctaaggatgtagttttttttttttttaattacttagaaacacaagttttaacatagaagagaaaggaaacatgtctttcaggaaatttgtaagtaacaga

SEQ ID NO: 446747 - DNA, 521 bp, Homo sapiens
ggtaagaactttttatggcattattactattagtttatttactatgcagtttgaaaacaaaatttaccttgtgtttcaattacttggagaaaaccttttttgaaagttagtgaagttgtagaaaagtctcattagaatgttaaatattaatgacatctttaaactccacgcttaagagttagggaaataagaataggaatacaataatttgcmaatgtaaaactgaataatctgaactttttaactctgggttctgtgtccaacattatgaccttgaatgatgtgagaaaatacatttcttgctttctttttttgcataatttggaatttaccgttaacctaggtcattgagatgctgggggttagtgaccaaaatgttcataagaaagatgatggcttgggaagttgaatttaactttttctaaggatgtagttttttttttttttaattacttagaaacacaagttttaacatagaagagaaaggaaacatgtctttcaggaaatttgtaagtaacaga

SEQ ID NO: 446748 - DNA, 572 bp, Homo sapiens
gaaatatttttaggatgctagcaaaacacatataagagtatacgtgtttcacagtatccatgtattccagaattatcttgctgtataaaagtattttactatgtaagaaatgcaaataataaacgaaaaggtgactaatgcttcctcactatagatatttggcattatagggcattcaggaaatgtactaatattactaaatcatttgttctgtagaaacccagatatttcactcttgtcttacattctcattgtcttccatctttgttttatrtacctattgtctttttccagagtactttagccactaaaggctagaaaaaggcagttcctcactagcagacattaagccctgagcagcaagaatcacaggcaatacatgggttgcagagcagtattgccacaaagagggatgtggggatggtagggatttcatttctctagagcaataagctcaacgtaaaatggttcccaattcttacctaaagactgtgcaccatcatcgtctctcataacatcactaaacagctaaatagtgtcattcacacccttcccaactgaaataatgccaa

SEQ ID NO: 446749 - DNA, 441 bp, Homo sapiens
tgtgggcctgcggtggtgggtaaagctcctttgcctgtggaactgggagaaaaaaagtgagaaaaactgcatctcattgtttgtcagctcatccatagcacaataggacaatagatagactgctaacattttgactccagtccctggttcgtggctagcacctcatgamtaacctggggcctgggggaaataactgcccaggtagccaggtagttgtttcagcaggtgttgggcaagatcctggcttcaggtatgacccagcacagtcccagtgaccacaggggtgcttgtgtcacctcatccccagttgcaggtggctcagaaagagagagaaacatttttttgtgagaaagtaagggaagagaataagagtgtctgcctggcaatctatagatttcttctggatcttattcaagacgatcaaggtggtacctctatgac

SEQ ID NO: 446750 - DNA, 450 bp, Homo sapiens
tcttctggatcttattcaagacgatcaaggtggtacctctatgactgtgcaagaaccacaggataactgggcttggggtgkcccccaatagaaacacaacttataacacaacaccttattccttttgaatatttggaaagctttcccaagaaggacaggtacaaacaagcccagactgtgaagaccacagtaaataccaaacccttcaatgctcaggcatagatggacatacacaataatcaagatcatccaggaagatatgaactcaccaaatgaaccaaataaagtaccagggaccaatcctagagaacagacatatgtgacctttcagacagagaattcaaatcagctgttttgaggaaactcaatgaaattttaagataacacagaaggaattcagaattctatcagatagatttgccacagatattaaaataattaaaaggttta

SEQ ID NO: 446751 - DNA, 450 bp, Homo sapiens
tcttctggatcttattcaagacgatcaaggtggtacctctatgactgtgcaagaaccacaggataactgggcttggggtggyccccaatagaaacacaacttataacacaacaccttattccttttgaatatttggaaagctttcccaagaaggacaggtacaaacaagcccagactgtgaagaccacagtaaataccaaacccttcaatgctcaggcatagatggacatacacaataatcaagatcatccaggaagatatgaactcaccaaatgaaccaaataaagtaccagggaccaatcctagagaacagacatatgtgacctttcagacagagaattcaaatcagctgttttgaggaaactcaatgaaattttaagataacacagaaggaattcagaattctatcagatagatttgccacagatattaaaataattaaaaggttta

SEQ ID NO: 446752 - DNA, 450 bp, Homo sapiens
tcttctggatcttattcaagacgatcaaggtggtacctctatgactgtgcaagaaccacaggataactgggcttggggtggcccccaatagaaacacaacttataacacaacaccttattccttttgaatatttggaaagctttcccaagaaggacaggtacaaacaagcccagactgtgaagaccacagtaaataccaaacccttcaatgctcaggcatagatggacatacacaataatcaagatcatccaggaagatatgaactcaccaaatgaaccaaataaagtaccagggaccaatcctagagaacagacatatgtgacctttcagacagagaattyaaatcagctgttttgaggaaactcaatgaaattttaagataacacagaaggaattcagaattctatcagatagatttgccacagatattaaaataattaaaaggttta

SEQ ID NO: 446753 - DNA, 534 bp, Homo sapiens
atatatatgaatatatatattctatcatacatatgaatatatataatattctatcatatatatatgaatatgtatatattccatcatatatgtgtatatgtagatatagatatatgatggaatactactcagccataaaaaggaatgaattaacagcatttgcaatgacctagatgagatttgagactattattctgagtgaagtaactcagcaatggaaaaccaaacattcatgttctcactgatatgtgggagctaagctatggggatggaaaggcctaagaatgatacaacggactttggagacttgggggraggatgggagacggagagggataaaagacaagaaatatggtacagtgtatactgcctgggtgatgggtgcaccaagttctcacaaatcaccactaacgaacttactcatgtaaccaaataccacctgtaccccaatcacttatggaaaaataaaattaaaaaaaaataagacactggaagcaaaactaccttacaaaagctgtgacctttggctgatgg

SEQ ID NO: 446754 - DNA, 534 bp, Homo sapiens
atatatatgaatatatatattctatcatacatatgaatatatataatattctatcatatatatatgaatatgtatatattccatcatatatgtgtatatgtagatatagatatatgatggaatactactcagccataaaaaggaatgaattaacagcatttgcaatgacctagatgagatttgagactattattctgagtgaagtaactcagcaatggaaaaccaaacattcatgttctcactgatatgtgggagctaagctatggggatggaaaggcctaagaatgatacaacggactttggagacttggggggaggatgggagacggagagggataaaagacaagaaatatggtacagtgtatactgcctgggtgatgggtgcaccaagttctcacaaatcaccactaacgaacttactcatgtaaccaaataccacctgtaccccaatcacttatggaaaaataaaattaaaaaaaaataagacactggaagcaaaactaccttacaraagctgtgacctttggctgatgg

SEQ ID NO: 446755 - DNA, 553 bp, Homo sapiens
tattattagtatcactgtggttattactgtttgattgttctgctcaactttaatgcaaggcaattatggaagactatgaaaatcaaattattaaatttattaaaattaaattatcacattaaattattaatcctaaatatttaaactgtgataggtttgttggatcttttttttttataaaactacttgtaatatctatgataaagaaggaccatttatcttttagcaatggcaaaagtgatttattttccacacgaggttaaaagctaacatttaatttctcatttgaaaatttccagtgctttggaaaataaacatgcctgaccttaaaaatttttgcttgttttagtgtatatatatatatatatatatatatatatatatatgctttactatatatgtaagagctcagatatgtttgtacaaagatatggcacagctatgcaaatatcaattcaccatgtcttttacaaacattctactaaatattttacaaaaaaarcaccttcctcatttcaaaaatataaagaatattaaatatataaaataattt

SEQ ID NO: 446756 - DNA, 641 bp, Homo sapiens
atatttatttagtgtatgctaaatggaaatacttgaaacattgacaaacaatttgtttaaaaacaagaagtatgaagagtagttcaaacattgattaccttctccttttatatggaacaagggtcttttccatgccttagtgaattgccatcctttcttctaggtttgagtcagctttcaacattttatctcttttgcttctaatattgtgaaaatccttcagtagctcctctaacgtgatatttgttttcargagttacttactccagcacatctcattacagccacttttctcatttatgctggtaacttggccctcattaagttcctctggctgcatgtctggtgtctctaaagaaagcagcatcaacatttccatgtctactatcttctaatcacattcaatttcatttccattgttaccacttttctgtcctttgctacaccttcatctttgttgacctattacctcttttgattactcatttttgtaaaatgtcacttgggcttaacactgggagacaaggtagtaacacaaatatgtattttctgtttgtatgtgaactgaatcacagatgcacagtgaccaatccctgacagtctttgagagaagtggggtgatttcatcactgatcatgaga

SEQ ID NO: 446757 - DNA, 641 bp, Homo sapiens
atatttatttagtgtatgctaaatggaaatacttgaaacattgacaaacaatttgtttaaaaacaagaagtatgaagagtagttcaaacattgattaccttctccttttatatggaacaagggtcttttccatgccttagtgaattgccatcctttcttctaggtttgagtcagctttcaacattttatctcttttgcttctaatattgtgaaaatccttcagtagctcctctaacgtgatatttgttttcaggagttacttactccagcacatctcattacagccacttttctcatttatgctggtaacttggccctcattaagttcctctggctgcatgtctggtgtctctaaagaaagcagcatcaacatttccatgtctactatcttctaatcacattcaatttcatttccattgttaccacttttctgtcctttgctacaccttcatctttgttgacctattacctctttygattactcatttttgtaaaatgtcacttgggcttaacactgggagacaaggtagtaacacaaatatgtattttctgtttgtatgtgaactgaatcacagatgcacagtgaccaatccctgacagtctttgagagaagtggggtgatttcatcactgatcatgaga

SEQ ID NO: 446758 - DNA, 479 bp, Homo sapiens
gaaccaaagatttaaatgtaagacctcgaactataagaatactagaagaaaatctagggaaaaacattctgtacattggccctggcaaataatttataagtaagccctcaaaaacaattgcaacaaaaacaaaatttgacaagtgagacttaattaaactaaagagcttctacacagcaaaagaaatgatcaatagagtaaaagacaactgacagaatgggagaaaatatttgcaaactatgcatcagacaaaggtctaatatccagaacctataagaaacaaacaattcaataagcaaaaatacaaatatgtttataattatacatacagayggtctctgacgtatgatggttcaacttattaatacaatttttcaaatttatcatggtgcaaaaccaaattgcatttagtagaaaccatatgtcaaattttgaattttgatcttttcctgggataatgatatgatttactttatgat

SEQ ID NO: 446759 - DNA, 617 bp, Homo sapiens
atatgtgtaccgggcacatttaaagtaggctacacagctgggcatggtggctcatgcctgtaatcccagcactttaggaggctgagatgtgcagatcacttgaggccaggagtttgagaccagcctggtcagcatggcgaaatcccrtatatactaaaaatacaaaaattagctgggtgtggtgtcactggcctgtaatttcagctactagggaggctgagggacaagaatcacttgaacacagcaggtagaggttgcagtgagctgagatcacgctgctgtactccagcctgggtggcacagcattactctgtctccatcaatcaatcaatcaatcaatcaatcaagtatgctatgctaggccatgacgttcagcagattagatgtattaaatgtatttttgacttaggatgttttcaatttatgattggtttaagaataatttaataattattatatgtgatatatgatatataattatatatttataattatatacattcattttacattcttcttacattgttgtacctgatttagaatacgcatgttgatcaagctagtagtcatgtatatcattcaaaaataaatattttccagcgtgtatgctgaagtca

SEQ ID NO: 446760 - DNA, 617 bp, Homo sapiens
atatgtgtaccgggcacatttaaagtaggctacacagctgggcatggtggctcatgcctgtaatcccagcactttaggaggctgagatgtgcagatcacttgaggccaggagtttgagaccagcctggtcagcatggcgaaatcccatmtatactaaaaatacaaaaattagctgggtgtggtgtcactggcctgtaatttcagctactagggaggctgagggacaagaatcacttgaacacagcaggtagaggttgcagtgagctgagatcacgctgctgtactccagcctgggtggcacagcattactctgtctccatcaatcaatcaatcaatcaatcaatcaagtatgctatgctaggccatgacgttcagcagattagatgtattaaatgtatttttgacttaggatgttttcaatttatgattggtttaagaataatttaataattattatatgtgatatatgatatataattatatatttataattatatacattcattttacattcttcttacattgttgtacctgatttagaatacgcatgttgatcaagctagtagtcatgtatatcattcaaaaataaatattttccagcgtgtatgctgaagtca

SEQ ID NO: 446761 - DNA, 431 bp, Homo sapiens
aataatacactatttttttaagaagagttctaggtgtacagaaaagttaaggggaagtacagagagcttatatatgtttgctccacccctgcacatggtttcgccattaatatcttgcatcaatgtcatccatttcttacgattgaggaaccagtatttttttttttaatctacattcatgggtacatgtgcagacttcyatatatataaattgtgtgtcacaggggtttggtgtacaaattattttattacccaggtaataaacatagtgcccaattggcagtttcaatcctcatattccttccactcttctttctcaggtaggtccaggtgtctgttattcccttctttgtgtccatatgtgttctgtgtttaacttccacttatatgtgagaacatgtggtatttggtcttctgttcctgcattagtt

SEQ ID NO: 446762 - DNA, 572 bp, Homo sapiens
cttccactcttctttctcaggtaggtccaggtgtctgttattcccttctttgtgtccatatgtgttctgtgtttaacttccacttatatgtgagaacatgtggtatttggtcttctgttcctgcattagtttgcttaggataatggcctctagctccattcatgttgccgcaaaggaaattatctcatccatttttgtggctgcataatattccatggtgtgtatgtacaacattttccttatccagtctgccattgatgggyatttaggttgattccatgtctttgctactgtgaatagtgctgtgataaacatacatgtgcctgtgtctttatggtacaattgatattcctttgatatatacccaacaatgagattgctgggtcaaatggcaattctgttttaagttctttaagaaattgccaaactgctttccacaatgtctgaactagtttacactctcaccaacaatgcataagcatgagaaactgatattcatgcactccatggtttacattagggctcactccctgtattttacagttttatgcattttgaaagatgcataactt

SEQ ID NO: 446763 - DNA, 556 bp, Homo sapiens
ttttcattcccaccagcaatgaatgagaattcctgttacttcacatccttactagcaatttggagttgccagtgctttattttttattcctttttaagtttaaaaagtagtttactaaacagctcacataacataggaaaaagtccagaaggttacacaccaaaattcttacagaggttatatattttcatggtaggattaaaaaggtttttttggtctgtttttcaaatgctctctggccatttaattagtaattacatcaaaaaggtcttgctttcatatttctaaagtgaaaattaaccctcagaacgtttgtyaattctaattgaagttttcatggtttttaacataaaattcaagcaagcagaacattaccaaataaacactggaattataaaagtgcattttagatattgctatttgttgatgaaataaatgataatcagatactttctttaaagttataaaatacagaaaactaagcatatagcttaatattttgtttctcagtaatcttcatatcaaggcacatttgtcattgtctgaactgactata

SEQ ID NO: 446764 - DNA, 513 bp, Homo sapiens
ttattacaaatttgtaccttttcttcttacatttctatatctgatctattttgagttaatttttgtatgtgatatgaagtatgagtacaacttccttctgtgtgtgtgaatatccaatggactcagcaccattgattgaaaatactgttctttccctgttgaatgccttcgcactcttgtcaaaatcarttaaccatgtttgtttgttttctctggactctcaactctactctattgatttgcaagtctatcatatgctgctgccatactacctggcttactgttactttgttacaatttttgaaagcagaaagagtagttcctccatctttgttctttttcatgattttttaggttattttgagtactttgagttcctaaattaaatgtagaactgccaatctttacaaacaagcctgctgagattttgataagaattccattgaatttgtagattaatttggggaatactgccatattaacagtattaagtcttaagttacattaacatgg

SEQ ID NO: 446765 - DNA, 485 bp, Homo sapiens
cggggcctgcagcgaccagtcctccgactcgcccccaatcctggaggctatccgcaccccggagatcagaggtggctgggcagtggggactggggtggtgtcaggcgctgacatagtgagcggtcactgcagacaactggaggctttggggagagtctctgacaacctccaccacaattccccgggarggaagagagctctagcaaggagggatgcagggtcgagcccttcacacctgcccgcagcccttggcctcccctttgggactctcatctcagctgggactctgagcgtgacacaagggtgatggttccctgtcctctgccagtcatgacaggggtggtctcagcatgggcccttggagagcccttctgcagtgggaccctctccccactcagagctgggctggggttgggagggggaggtctggagtgtgcttcctttccaccctgccctgagcagctccagccagctcacttgggatc

SEQ ID NO: 446766 - DNA, 485 bp, Homo sapiens
cggggcctgcagcgaccagtcctccgactcgcccccaatcctggaggctatccgcaccccggagatcagaggtggctgggcagtggggactggggtggtgtcaggcgctgacatagtgagcggtcactgcagacaactggaggctttggggagagtctctgacaacctccaccacaattccccgggagggaagagagctctagcaaggagggatgcagggtcgagcccttcacacctgcccgcagcccttggcctcccctttgggactctcatctcagctgggactctgagcgtgacacaagggtgatggttccctgtcctctgccagtcatgacaggggtggtctcagcatgggccyttggagagcccttctgcagtgggaccctctccccactcagagctgggctggggttgggagggggaggtctggagtgtgcttcctttccaccctgccctgagcagctccagccagctcacttgggatc

SEQ ID NO: 446767 - DNA, 485 bp, Homo sapiens
cggggcctgcagcgaccagtcctccgactcgcccccaatcctggaggctatccgcaccccggagatcagaggtggctgggcagtggggactggggtggtgtcaggcgctgacatagtgagcggtcactgcagacaactggaggctttggggagagtctctgacaacctccaccacaattccccgggagggaagagagctctagcaaggagggatgcagggtcgagcccttcacacctgcccgcagcccttggcctcccctttgggactctcatctcagctgggactctgagcgtgacacaagggtgatggttccctgtcctctgccagtcatgacaggggtggtctcagcatgggccctyggagagcccttctgcagtgggaccctctccccactcagagctgggctggggttgggagggggaggtctggagtgtgcttcctttccaccctgccctgagcagctccagccagctcacttgggatc

SEQ ID NO: 446768 - DNA, 591 bp, Homo sapiens
tacatgctgagctgtaagcaggatgctgaattaggggaattgctcagtactaaatatgattgttactacaaccacaaaactagcaaggagtagaactgcattaaaacactgttgcaaatttttttattttttgagacggagtcttgctctgtcgcccaggctggagtgcagtggcgagatctcggctcactgcaagctctgccttccgggttcacgccattctcctgcctcagcctccctagtagtagctgggactacaggcgcccgccaccttgcccggctaattttttgtatttttagtagagacggggtttcaccatkttcgccaggatggtcttgatctcctgacctcgtgatctgcccgcctcggcctcccaaagtactgggattacaggcgtgagccaccatgccgggcccactgttgcaaatttctttccaaaacctctgccagcacatggctgaacccacagaactggcaggacacacaagatgcgctgggttaagatgctttggtgctctctgtgggttcagctgactgttttacaggcctgcttcttgaccgttggggtgggcagatctgagcccccacta

SEQ ID NO: 446769 - DNA, 608 bp, Homo sapiens
ctgattatagattgggatacctaatattgctgaaatgtcaatattaggcaaagaaaatctacatatttaatgcagtccctatcaaaatttcaatgatgtgttttagagaaatttttaaaaacccattctgaaatttatactgaatatcatgaaaccctaaattgtcaagaaaattctgaagttggagaatcaaattatatctatctgataaggaattgttatccagaatacatagagaattcctaaaactcaatgacaaaaaacaaacaacccaatttaaaaatgggcagacagacatctagaccaatgaaatagactaggcagkccaaaaataaaccctcacaataatgtccaaataattctcaacaaaggtgccaagaccattcagtagaaaaagatctcttttcaacaaatgggctgagcaaactggatttccacatgcaaaatgataaagttagactcttacctaataccatatacaaagattaactcaacagggatcaaagatctaaatgtaagaggtaaaactatgaaactcttacaagaaaaatagggggaatcttcatgaaagtggatttggcagtgttttcttagatatgacaccaaag

SEQ ID NO: 446770 - DNA, 554 bp, Homo sapiens
acagtgattttgacctgggtcatttctactgtgtgtgtctccagacccaagtctctggggaaggggtggctcaactcagaggagggtgggcaatgctctagtgcccagctgggcacactcaccacaattgctgtccaggctgaccgtaaaccaaggctgactcctggtgccgtccctgctcctgggggaacggggggtcgtgggaagccctcatgttgctgagaagcaggagccgtgcttttttccaggtttcacttgaaaaagaagatgagggtctggcgggactccttcttggtggagagagggtgagtgccgggtcctgggagggacacccctgcccacctccctccctctgcccaggaagcttctgtagccccaccgcatcatgctattcaggagctgcccatggctctgaagttggtccaaaggcccctaaacacaaagcccattcactgctcctatagacacagaattggggtctgaggtcacgtgtacscttttggcatgctttgtccagcctctacaatgtcttcaatttatttaatttattgcca

SEQ ID NO: 446771 - DNA, 555 bp, Homo sapiens
ttcccgcagcccgaaggcggcccattcgagtcctgtcattgtttgatggcatcgcgacaggtgagttcggggaacacctggagacactgctatcgtgtcacaacagggtagccagggagtcagaaggcatggttaaggtgtctgacatcagtggcaagaaaggtccctggggattaccagccctgaaaaaaaccctgtctccttgtttctctccaccttctcaaccaccttgcagtcttggtcattgagttttatttatttattttttcgagatggagtctccctttgtcacccaggttagagtgcaatggcgtgatctgtgctcactgcagcccccatctccgaggttcaagtgattctctcctcagcctcccaagtagctgggattacaggtgctcaccaccacgcccagctaatttttatatttttcgtagagacggggtttctccaygttggtcaggttggtctcgaattcctgacctcaagtgatctgcccaccttggcatcccaaaccgctgggattagagacatgaaccaccgtgcctgggcagtctt

SEQ ID NO: 446772 - DNA, 420 bp, Homo sapiens
aaggaaatattccttcctgttcccactttcagggaggcctcttaagacatgaagaggaccaaaataacaattgcagtataacttcacatggtggggtggggggtgtggagttcaaatgtggttgatcaaaatagtgttgttactttcgtttagacttgattccaacatgtaaaaaaatcaggcactttagtgggagtgattttaacttcagtagtgaaagggcaatgcaattaagagttagggtagtgtttctcaaacttcatcctcagaggtgctttagaaattgactacctttggtttgaatttatttttaraaatatatcttcttttcagtatttttaaaactgtaaaaggtaaaccatgttttctcaaatgtgttaaatggaattttaactcattatgtttcaagttttaaccagt

SEQ ID NO: 446773 - DNA, 420 bp, Homo sapiens
aaggaaatattccttcctgttcccactttcagggaggcctcttaagacatgaagaggaccaaaataacaattgcagtataacttcacatggtggggtggggggtgtggagttcaaatgtggttgatcaaaatagtgttgttactttcgtttagacttgattccaacatgtaaaaaaatcaggcactttagtgggagtgattttaacttcagtagtgaaagggcaatgcaattaagagttagggtagtgtttctcaaacttcatcctcagaggtgctttagaaattgactacctttggtttgaatttatttttagaaatatatcttcttttcagtatttttaaaactgtaaaaggtaaaccatgttttctcaaatgtgttaaatgraattttaactcattatgtttcaagttttaaccagt

SEQ ID NO: 446774 - DNA, 658 bp, Homo sapiens
ctctctcatgtgatgtaatcaagactgtgcaaatgacagtgtttcttaggagtctcctcccagacttgttggttctagaatttaaaactcagcagtttgcctttgcagatagtgggattctttttattgcattaattatttaaccaatgctttcagatgaccaatttagcaattaaatggggttgtcattattagataagctatgatctaacatgatttaaaatagcagctccagcctgtctctactgtggtattaatagacctaaaatgtctttaaagatgcatgagcagtttcttattttttggaactggtaaaatgtctccagctagagagttgaatgttctgttacattggacaagtgcctttttgaaaacaaaaggagctttttttcttaagaaaagttatacttgctgaaaatagttgcagaatgcaataaaaatggaacatagttaaaaagaaatgacaattccatcactcttttcactttggcaataagacaggacttcactcttttttcagaagaggcatttgaaagttcccttctcaacatagcaacgttagcacccactgggaattctgccactatccagccctcagtctgtaatgaatcrgttgaattcagagacagagcagtctaaaaagtggcttaaaacgtgc

SEQ ID NO: 446775 - DNA, 570 bp, Homo sapiens
cctcatctccacatgatcacatctcttctccagcaagggcacaaaactggatagagaaagagtttgatgaattgacagaagtaggcttcakagggcgggtaataacaaactcctctgagctaaaggagtgtgttctaacccaatgcaaggaagcaaagaacactgaaaaaagttacaggaactgctagctagaataatcagtttagagatgaacaaaaatgacctgatggagctgaaaaacacagcacaggaactttgtaaagcatacacaagtatcaacagccgaatcgatcaagtggaagaaaggatatcagagattgatgatcgacttactgaaataaggtgtgaggacaggattagagaaaaaaggatgaaagggaatgaacaaagcctccaagaaatatgggactatgtgaaaagaccaaacctatgatttgattggggtacctgaaagtgatggggagaatggaaccaagttggaaaacacacttcaggatattatcacggaaaacttccccaacctagcaagacaggccaacgttcaaattcaggaaatacagagaacaccac

SEQ ID NO: 446776 - DNA, 539 bp, Homo sapiens
catttcttgtaagagtcacttagtttccaagaaataagaaaaatacatacacacgtatgtatagatatgttccagaaattttgcagttgtaggtaatttttatttgatatcgactactatataattttctatatttttttaaaaaaatttcaatatttaagcctttctttctgtggtatagttaccaaaatgttatgtaaataagaaagacactacttttttttatcagtgtttattagtgtttatgagggtatatttaaacattaaaaaatgtaacttggataaagtcaaattatttttgtgggtgatgctttaaaggaactcatgtatataaaatgagcttaggttttatggttatgtgaacttattagtactttatgatattatagttctaaatacttaattttaattattccatattagacataaaacacactgtacagagaaataagaatattttatatatttcaaatacaaagaaaagtaagaaatgagttttcrtatttcagtaagtattagaatttgttttagtgtcacta

SEQ ID NO: 446777 - DNA, 659 bp, Homo sapiens
agtcctcctttataaaacatgcacagaatatgatcaccaaatggccttgcatatattttacaatatgcaatcactctactgccataaagttcttattgctgactaaatttctggctacaaacatcaactacagccagtctcttcgcctctctttaaaacaaatgttacctcttaaatgtaagctttgtttcaagtataaatgtgagtagataaattaatcatgtgctataacataaaaagaggaggacaataggtctcaagagggaggtaaatgcaaatgaaataaaacatgtaatagtcaactccagggcaatatcatgatttttattggagcagatgagaaagaagggtgtgcagcctcaaaatcattagtgcaatcaactgtccccattcccaaactaaatattcatcaacaatctgaatatgagaatataattctacagttcaaaaaactttaatattgcagacttatctgtgctgctgctctatgtgctgcataccaaatgtaactacttaattatttagccctatataaatttgtgagttagtgtgtgtgtatatatgtgtgaaattatatcttgcaaacacctgctgctactcatgyattatgtaaacataaatagtgccaaatgagaaggaaagtgtatgggattcaacat

SEQ ID NO: 446778 - DNA, 578 bp, Homo sapiens
catcctggctcaaggtgtctaggcagtaggggaattgatcagtcaatgggacaacagtgttgtcattcatagacgtctatatctatgaatatctgtgaatgtcaataaaagactgtacatattggccattaaataatcataagcacacaattataagcacacaaatactacatttgaatgaataagagcatttgtactgctgtgctagataagctttatgaatagttagaaacacagatgataaacatgtttgcttacaatcctagctaactcctgtactgatagtttgccagactgagccaaggtatagagaagatgccttacagctgtgtatgctgtagctatgttttattaaattgaccttgtgacctgaaatgatttctgcttctccaagtgttgagagatacttccgttaacacacatttattgagcaaaaggcaatrtgccaggtgttgagtatatggtaaataagacaacccagaccctctcaggtctcttggggagctcacattctaagacatttcctgtcaaaatatcattggtggatcacctgtattgaaataatcagtgggtagcca

SEQ ID NO: 446779 - DNA, 585 bp, Homo sapiens
taggagaatcttctgtttttactctagtacacagtcattattcttgagattaggagtttttaacttttcttttcttttttaaataactgggaatacctccaactaatatcagtaatagggtctccccaagctgtgactctcgtgagagtcatggggtcacagtagtgggactcttagaatcccaaacgcaatacagtttaaaaatcactggaggtgactgggactctctcttttcttatgacttcctagtcrctgcttaactgagtgtttttgatatactatgtaacaaaaataaaacactcatacattctgaataaagtgattttatcattattctgtttctgtgacaagtctgaggtacacttagtaggaaagttaaggccatatttttgggaatgagtcatatacctcaaagctataatggcatatgcatttctgacttattatttggatggtatttcttgtcagtgtaaaataataacagaaaaatgatcatcagagataatgagttaatttgagagtgaaccctgcaatgtggaatatagtgccacagtcaactacaggcatattcagggagacagagga

SEQ ID NO: 446780 - DNA, 589 bp, Homo sapiens
ccctccctttatggccttccctggctccattttgtcagagtttgacacaaatgactttgttttaattttgacatatttcacatttcccacttttgagcaagacctttcactggaagcactgctgatcaaacatcttatgtttaggtttcgattgtcttttggtgcagggatggacctgtcctggttgttggtctggtaccacattggaggaaagtgattggcaactaggagtcagtgttaagagctttttggccagatttcagcaataaaggggatttaaagggaktaagtcttaggctgagactagtcggaatccattgttaagttcaattttgtctcttccataggcattgactatcatctcaaagtcctagcacaccattattctgttataagttgtagttctgcagaaatagttacaatatttagaaaggaaaatacaaagtaaaattaatagtaatataataatggagcttgtataatagttgttgttgttgttgttgttgttgttgttgttgttgttgagacggagtctcgctctgtcgcctgggctggaatgcaatggcatgatctcggctcactgcaacct

SEQ ID NO: 446781 - DNA, 631 bp, Homo sapiens
cattaaatgaccatggtgagctagatgagacctgctgtaagtatgtgtcttgttttcttatcttatgttttggggtctcaatgtcttcagacaaatttatccagatatatcatgtagcattagcaatagtacataaatttccttatttaaccagtgtttagcctacagaacctactgattgtgaaattttaactacaccattattctgccaagtaaaaatggtaggtataaacaaggaaaatttaatagggcaagaacctcattaaaatggaaatcttgttccattgttttagggacagttttccacaacatgaagccatcaatttctcattgtggttttcagtttgaacgtctctggttatggcatctgtatgaarcttattccttgaaatttatattaaattgtccagcttcagcttaaggtgctttagaaaaaagcaattttttcttggtaattacatagaaaacaagcatatggaaggaaactagaactcaagatttagtctggtctacaagtagaaaataaaaatgcaaaaatcaatgcacagggctacaatcttataacaggtatattatagttttctttagaaaataatatgtttctctacctgatttttgccaaagataattg

SEQ ID NO: 446782 - DNA, 535 bp, Homo sapiens
tttttaataaaatttaagaatccaaaagtaaataaacttgaatctatgttcagcaatcagcattttagtattttaacttacttggaaatgacctaggcactctataaatatgtattatttaatttagaataacataaatttaagatatcaaattacataaaaaattgaataagaagttcatttataaatatctattccatttacacctattaagttattttttaacaattattmataaattatttatgaaaactgagatactaggcaaagctagtcatcattttaaattattgttctcttaaccatttttatagcttgtgaatatcagatgttaatgatccaagtaaggataaagtaaaatatatgagcatttttgcaataactcagaagatacagctgtttacatgaaaccaacaatattatattagtctaatttatcagaagttacacaaagataattttgctcttaggctgaatgtacagatttatgaccttaaattctctaggagagacatatataaccttgtctgatcag

SEQ ID NO: 446783 - DNA, 489 bp, Homo sapiens
atttgttgggagactaagctttcaatttcttattagaaaggagtattttcaattaaggtgatgaatggtcaatatctttgtaatgttttctccttgattccagttttccttttgatatattctgttaccagaggagagttaactcataaaagacctttcctttaggcttctgtttggcatacagagaagtgaagaacagggataaatagacaacgtaataacagtgaccagcaggaaggtgttgcagtcaacaagattaaaacaaaacctaatctgcaaagtgaattgttcaatttcatcattgaaaactgtatatatattttttaaacctgaggggctgaggagattagatgtattgkacatttagaatgttaagtgaatgtaactgtattcatccacatagtgatttcccttagtaacataaaaaattgtacttatactttaaagtggccttttgaaagtagaaggaaactaaattagattttaatt

SEQ ID NO: 446784 - DNA, 545 bp, Homo sapiens
ggaagcctagtttggttctataactttcaataatatcaggcaccagtagttacatgaattaccctgattgagatctttagaatttagggattaaacttgtataaagcttgcaggtaagaccttatggctgctatggctgctcaatttatgtagtattaaatagaatttgataaatttaagcgaggaataattactagattataattattgagagaccttgtaagtggaagaatattgaataagtggcttgatgatcagaagtcataggtcatttttcttttcagtgaggttaggaagaaaaacatagattaaactgatattcttctttagtaagacaatattttgctttttaagaactgtaaaactaatgccrttgcccaccagatcttttaaaatatgtttaacaaaaaatgaccacttggaacatcaatttgataaataacaattaaatgagaagaaaacaaagacaaaaactatcatgtaaccataaaaacaccattttctgcccagaggaagtgtattgttcaattagcaatcataaataa

SEQ ID NO: 446785 - DNA, 506 bp, Homo sapiens
agtcccacttggctatgatgtgttgtccttaatacattgttagattgaatgtgctagtagtttgctgaggcttttgcatctagattcatcgaggattttcatctgcagttttctcttttttgtttgtctgcctttggtatcagtgtaatgctggcctcataaaatcagtttgacagtgttctctcttcatttttttggaaaagttgaagaaagattgatgttattccttctttacttgtttggtggaatttattagtgatgccatcagatacagaactttttttatttttaggaggtttttgattgcctattcattctgtacattagctgtaggcctgtttaggctttctatttctttataaattattcttggtgatttgtatatttcaaagaatttattcattttttctaggctgtacaaatcattggagtatamttgtttatagtaaggtctcataatccttattattgccgtggcatcaattgtaatgtctttttaaaaatat

SEQ ID NO: 446786 - DNA, 347 bp, Homo sapiens
tctgggggcaggagtcctggactctgcctcacaccccagcaaggtgctgggaggtgccctgacaggggcccccacttgagggaggggatgggttggggtcctgggagcaaccttgttactggaccggccccttccctgccaagttgtaggtggttagatcccagggaggtcccgggccccctccctgggagttcccagggccccctactccttccctcctaaaggctggcagggtggaggctccccyacacccagctacacaggcccaggccggggcaggggcatccaggtgggatcctggactctggactttcggtcgccacgcagaccaccccacagagctccat

SEQ ID NO: 446787 - DNA, 457 bp, Homo sapiens
cgccggtccagttcgactgcggtgaccggggcgggaggggggccgggcccagtccctggcggccccaagtccgggatcccggggagggcgggacttggcctccgccgcctgctgccggtggggagggggcgcagctccgccctacccgggacaggctggaacctgttggcctctggatggggtgggaggggccagccacctgaggctcccactrgcccctctcggaggagtctagggactcgaggagacctccaaagtaggggagggccagctgcgaagttttgactggggctgggaacacgtggctcccaggaggggcagcatctctgcccagcaggtggtagggtccgggggcttcagtctccctgggagatgtgggttcaggccctgaagaccccctggggtgcatgtcccctccccaacaagccttaaacctgtaggcgggttctgttggtgg

SEQ ID NO: 446788 - DNA, 582 bp, Homo sapiens
gtgctgacaaattagcctattctttatgtctctgtacctatttatttgagaaaattaatttatgtttctttrtgcccttattgctctatcctaaacctaattcaacaggtaaattatcctgacagcttaaatttactttatccttggagcatgtcttgaagatgtaataaggataatgtgtggggaacagttaagaaattaaacgagtgctcaatgcaaaatgtgtaacatgtgagaatttgagtaagcagtataagaccaaattataaaaatattataatttattttcaacaaatataaaaatatttgaaagaattagtcaaaatataataaaaatgtagtggaggagatcatgaagtcctgaattaaatcaacggtgtgagaaaaaccttagaaaaaatttgtcagtagatgtaaaattactaagtttttgtaatgatagttcagctgtattatattctaaatttagaaaacagacaaaaatattaaatataatctgttatactacaattcatgttgtttatgtagtttatgttgtgcgatatccgattccacagtgttgctagtattacatagatgtag

SEQ ID NO: 446789 - DNA, 582 bp, Homo sapiens
gtgctgacaaattagcctattctttatgtctctgtacctatttatttgagaaaattaatttatgtttctttatgcccttattgctctatcctaaacctaattcaacaggtaaattatcctgacagcttaaatttactttatccttggagcatgtcttgaagatgtaataaggataatgtgtggggaacagttaagaaattaaacgagtgctcaatgcaaaatgtgtaacatgtgagaatttgagtaagcagtataagaccaaattataaaaatattataatttattttcaacaaatataaaaatatttgaaagaattagtcaaaatataataaaaatgtagtggaggagatcatgaagtcctgaattaaatcaacggtgtgagaaaaaccttagaaaaaatttgtcagtagatgtaaaattactaagwttttgtaatgatagttcagctgtattatattctaaatttagaaaacagacaaaaatattaaatataatctgttatactacaattcatgttgtttatgtagtttatgttgtgcgatatccgattccacagtgttgctagtattacatagatgtag

SEQ ID NO: 446790 - DNA, 593 bp, Homo sapiens
ctaaaactaatgtaataaactctaataagccaatctcagtcattattttgaccacacaagagttccaaaaaccttttattatctcttacaaaattttattctattttatttctctttccaactttctctttccaactctttatttaattttatctatatcttttcatttctttaattcaaagcaatattaaagtaaatttgaaactagacaaaattatttttttcaaaaacacacattttcatgcctytacaactttcattaaaaagtgtaacttgctttttaatatacactttatatatggaatattttatatctagtagttttaatcatacatattaactacaattttaactcttaggaagcctaatttttagtgaaaacataggaagtaagtaattatgtacagttttatatcagtatttgtagatgaaatccatttcatgatattttagaaagatatgcttctttaatgttttgcttattaatagatctagatatatttagcttttctagattatagaaaaattagatgacaaagtatgtcagctgaaacagatatttaataattaatgtttcactaattacttacaaa

SEQ ID NO: 446791 - DNA, 593 bp, Homo sapiens
ctaaaactaatgtaataaactctaataagccaatctcagtcattattttgaccacacaagagttccaaaaaccttttattatctcttacaaaattttattctattttatttctctttccaactttctctttccaactctttatttaattttatctatatcttttcatttctttaattcaaagcaatattaaagtaaatttgaaactagacaaaattatttttttcaaaaacacacattttcatgcctttacaactttcattaaaaagtgtaacttgctttttaatayacactttatatatggaatattttatatctagtagttttaatcatacatattaactacaattttaactcttaggaagcctaatttttagtgaaaacataggaagtaagtaattatgtacagttttatatcagtatttgtagatgaaatccatttcatgatattttagaaagatatgcttctttaatgttttgcttattaatagatctagatatatttagcttttctagattatagaaaaattagatgacaaagtatgtcagctgaaacagatatttaataattaatgtttcactaattacttacaaa

SEQ ID NO: 446792 - DNA, 456 bp, Homo sapiens
tgtaaatgcttgtttactctgttgacagtttatttcattatgcagatttttagtttagttgagtgtattagtccattttcatgctgctgataagggcacacctgaaagtaagcaatttacaaaagaaagaggtttaattgaacttacagttccacatggttgaggaagactcacaatcatggtggaaggsaaggaggagtgagtcacatcttacgtggatggcagcaggcaaaagagagggcttatggaaagaaaccctcatgttttaaaatcatgagatctcatgagacccattcactatcatgagaacagcacaggaaagacccgcccccatgatttagtcatctcccactggacccctccctcaacacatgggaattatgggagctataagatgagatttgtgtggggacacagagccacaccatatcactctgccccagcccctcccaaaca

SEQ ID NO: 446793 - DNA, 550 bp, Homo sapiens
aaactatgacacaggtatcctcccttatgtcttccccagtcattataggtctcaagtagccatatgacacccaggatatttatgaagggcaaggatcatctgggtgttgaacttactcaccagttatagcacttaggacagaagataaagctgtaactacgtgtggagggttcaagccctctcagcttgcccaggaggcaaagctaggccatagaggaaggagtcatagtgggtttgacttttcyttgcagctggtagtgaattcactgaggacatgttcccaggcctcaccttggccacctgtcctgaccctagaatcaagaagctcaatactgaaaatatagactaacaattacatcaggcaagtatcaaaaaggttatagaagcaacagttttatgaccttaaaacacaaagtagaggcaacataaacctgtctgactgtaaaacacatagcagagacaacataacctgtctgaccagtagacacatgcaaaaatgtctgaattatattaaactgataattctgaagccatttctattttagtttac

SEQ ID NO: 446794 - DNA, 571 bp, Homo sapiens
agggatggtagtgactcatataatttcctttttacaaagcactatttattcttggtaatcaaatcaacatatggtacattattaaaatagtttttataaagctatttgtcttacactaataaaacatttaaatatgatttatttgtgtaatatctttcctagctaattcttacagtatttagtatcatccatgttttgtatatttcactaatcgaaacatgactaacagtgtgcagtatttatcaaagcttaatgttgtagcaaacacattctatagggaatrtgtccattttataagttctcatacataacattgcaactaaaatgatagattttacgtactatttgttttcccatataacctaagaaattcctgatgtcagaagcttttatttttgaaagtagtaaaaggtgagaagttatttagatttgaaatttgtttgtttcccaaaaattgtaattctcacatcaagtgaggaaatgtttgaaaaaattgagaattacaacaatgggtatctctattagtctgtccgcatgatgctaataaagacatacctaagattgggtaatt

SEQ ID NO: 446795 - DNA, 566 bp, Homo sapiens
aagatcctaaataaaatataaactaatagaatgaaatatactaattaaatgatacaatatgacaaagtgggaaaatgatttattactggggactaagtttattttaatgttaggaaaatcattaaattaatttaccacatcaataaaccaaaggtgaaaattttatggctatctgtataatgataacacattaaacactcaatatcaatttctgattaaaattcattaagaaaaaagggattgatgaatatttatttttcataattacattttatattttagtaataaaacaaacatttcccaaatgtaccatgaatctaaatattaaaacatgcatacctgcagacacttgtatgtacaagaagaaaatataggtgaattcatcatgctaatttgaatgtacagaatggtttttaataaggataccaatataaaaggacataaaataagtgactrataacttgaaattactttttacaatttttagcatgggcaaaatgcaattaaaaagtcaaaggacaaatgccaaacaaacacttgcaacattaatcacaaataagtaaccc

SEQ ID NO: 446796 - DNA, 646 bp, Homo sapiens
acgccacagtataacaaaatatgtttcacagctctattaaaagcattctgtaaaataagttgcttatcaattttagggcattgacttttgaaaattttgatrtttaacttttgattctaaaaatatgcacaaaaatttactatgatattattttccccttgcctatctgcataaatgtgcatggttcttattttttcctttgaatggatagaagaagcataaattctatcatatttacaaacctcaagacagtattaaacatgataaacaatattgctgcatttgaaaatggccttgttgaggccaaaaaggaggtagatataattaagagcttctttcttggtcactgcttaatataaagctttatttttccaactctgtgtttaatatggggatagaaataaagtgagataaactaatattaatgaagcccttaagtaaataatggaggtgaaaagttcgacaagcaataagaaacctgatattgaggaaaaaggaatatatgaaaatgcatgttcatctacatgttatcttggatagatggagtctatcattcataatactgagagctctagttcaggtttcacatgaattttaccttcaatgatagcaaaaaaactctgttccataatcttgaatattttga

SEQ ID NO: 446797 - DNA, 569 bp, Homo sapiens
ccagagctaaggagaatattttagcagtgtaacttaggaaatgctcagcagaagtctattttcagctcagctgaaatgatctggaaatgattcttcctgccaagaggataacatgaaatgtatatagcaaacttatccctattccttgcttaccagctttagtttgtgtaaattgtctctgaaaaaccttccactcagtgaaagagatttttaggtaaattastatcaatgcaacaattttaatttttgttagtatactttcataattacagagacgttgtaaagcagtatagagaactcctgtataccctttacttatattaacatgttgctcatttgtctatatatctctctttccaagcacagacccatttatttttgaataatgtaataggaatctgcagatattatgtcccataatcaatataaacttcattgtattttatgctaatgtctaatgcaatcacaggcctagtcttctataatcctcaatttgagaagggatatgagtataaatatctggaagcacatttcatgttcaaaataatagtcaattgcatgaataaaca

SEQ ID NO: 446798 - DNA, 621 bp, Homo sapiens
cttccttttcacagcggaatagtattccattttgtaggtataccatattttctttattcattaatttttaatggacacacatttcttcatgtgttagttattgtgaatagtgctgtaataaacatgggagtggaaatctttttgaagtatagattttttttttaatgtattgccagtagttggattgatgaatcaaatggtaatttaatttttaatttttttttttgaggaaaatttctattattttctatactggccatttgactttacatttccaccaacagtgttatatagttttaatgcatctgcatatttactaaaatgtacatatgcatatgaacacataaaaacacacatctttttttaaccttggaaactggatatcactttccatgtccatttttgggagtcttaattaatttacttagtactattaaatatctgtgattcatccctattgtactttgtcttaatttaatcatttaacagcaatataatattgttttgttcattaatttattttcctgccaaggaaaattgtgtttattttctgaaatgtgttactgtgaaaagcattgcygtgaaaattcttggaaatgtatcatagagtacatatgacaa

SEQ ID NO: 446799 - DNA, 553 bp, Homo sapiens
gccttaaaatttaacaattatttttggtgtccaaataaacaatctgtgtgctaaaaagaaaacatacatatggcattggattcttgttataaacagcaaagaagactttattcaagactattgcagcaggactcacaactattgcagaggagtgaaggatgttactcaactctaaaggcatcaaggacagttgaaaatgtgtagctaaagagtagagctagagggtcagtggatagaaaaattgttaacaggaacytgattagataccaagactcttgctaaactggcttaacaagattcttgatgaaggcaggatgctacattactggtgggattttaagtggattctatttctgaaggttgtcaatactgtgtactctacaactcagcagttctatcccccagtatataacaaagaaaaattttgtcatatgtactctatgatacatttccaagaattttcacagcaatgcttttcacagtaacacatttcagaaaataaacataattttcttctttctcccatcctctttctccccccctccgtctcacc

SEQ ID NO: 446800 - DNA, 553 bp, Homo sapiens
gccttaaaatttaacaattatttttggtgtccaaataaacaatctgtgtgctaaaaagaaaacatacatatggcattggattcttgttataaacagcaaagaagactttattcaagactattgcagcaggactcacaactattgcagaggagtgaaggatgttactcaactctaaaggcatcaaggacagttgaaaatgtgtagctaaagagtagagctagagggtcagtggatagaaaaattgttaacaggaacttgattagataccaagactcttgctaaactggcttaacaagattcttgatgaaggcaggatgctacattactggtgggattttaagtggattctatttctgaaggttgtcaatactgtgtactctacaactcagcagttctatcccccagtatataacaaagaaaaattttgtcatatgtactctatgatacatttccaagaattttcacrgcaatgcttttcacagtaacacatttcagaaaataaacataattttcttctttctcccatcctctttctccccccctccgtctcacc

SEQ ID NO: 446801 - DNA, 591 bp, Homo sapiens
aattgacatgctaataatcctatcatggatagtaatttctgataatatcattaacataggaaactgacaaaatttcaccattcagtcagcttctaagttttaaaacttgtttaactacaaagcacatgtgtaatttttaaaatrtattgatatctgtataattgcttttctcacctagaaacttggatgaataaacaagaaaggtaatgtccagcaagcatttttttaaaatttatgtcatttatgaggaaatatgtaatttcacttagcataagaagacattagcctattgctgactaagctaaaaaagctggaaaaaggctaacctatttttgatttataaatcgagagagaaacagaaaagatcttgagaaagaaggaaatatgcatccaaatcacctgaaaagcctattaaagcacagattgctggaccatctcagagtttcttttttatttttgagaccaagtctccctctgtcgcccaggctggagtgcagcggcgcaatcttggctcaccgcaacctccgccacctgagttcaaatgattcttctgcctcagcctcctgagtagctgggactacaggtgcctgc

SEQ ID NO: 446802 - DNA, 591 bp, Homo sapiens
aattgacatgctaataatcctatcatggatagtaatttctgataatatcattaacataggaaactgacaaaatttcaccattcagtcagcttctaagttttaaaacttgtttaactacaaagcacatgtgtaatttttaaaatgtattgatatctgtataattgcttttctcacctagaaacttggatgaataaacaagaaaggtaatgtccagcaagcattttttwaaaatttatgtcatttatgaggaaatatgtaatttcacttagcataagaagacattagcctattgctgactaagctaaaaaagctggaaaaaggctaacctatttttgatttataaatcgagagagaaacagaaaagatcttgagaaagaaggaaatatgcatccaaatcacctgaaaagcctattaaagcacagattgctggaccatctcagagtttcttttttatttttgagaccaagtctccctctgtcgcccaggctggagtgcagcggcgcaatcttggctcaccgcaacctccgccacctgagttcaaatgattcttctgcctcagcctcctgagtagctgggactacaggtgcctgc

SEQ ID NO: 446803 - DNA, 570 bp, Homo sapiens
ctttcatcacttctattcaacatagtactggaaatcctaattagcgcaatcagacaagagaaaaaaataaaaggcatccaaactgaaaaggtggaatcaaactacctgtgtgccaatgatatcattgtattcctagaaaccctaaagactcccccaaaggacttctacatatgataaatcaattcagtaaagtctcaggttacaaaatcaatgcacacaaatccatagtgctgctatacatcaacaccaaccaagctaagaatcaratcaataacgcaattcaaactaggaatattctgaacctaggaagtgaaagatttctacaagaagaactacaaaacactgttgaaagaagtgatagatgaacaaaaaaaaaatgaaaataaatcacacactcctggatcagaagaattagtatagtaaaaatgaccaccctgtccaaagcattctacaggttgaattcaattcctatcaaaatgctaacatcatttttcatagaaaaagcaatcctaaaattcatatattttaaaaagcttgaatatccaaagcaatcttaagtaaaaggaacaa

SEQ ID NO: 446804 - DNA, 520 bp, Homo sapiens
tctcaatactacccaaaattttcattgtctttttytccatttatacatttatcaaaaattacagacacatgaacttccactactttggaatttaaattaggaaaggattactaatgagataatattaaagatggtaagggactacaaatattacactgactttagcaaggctttggccaaaattatttccctcaattccttttgcttaatctaaactgaccgatcaacagatcaacagctgcttgaaccagggacccagtttgctgtacttaaaaactctcttgcaatgaacataacctcagtttcccaacaccatcaaagatccataaacaatttccaaaataaaatctaattttacctttcaaattctatcctataaaatctctaatttcttcatcttttatgaagtagacatcttgagctattttcaagttgcagtttttaaaatgaaaccttatgctaatgacttctgtcttcaaatttcttttaccaagaacatgagaattaaaaaaaagaatat

SEQ ID NO: 446805 - DNA, 576 bp, Homo sapiens
tccactactttggaatttaaattaggaaaggattactaatgagataatattaaagatggtaagggactacaaatattacactgactttagcaaggctttggccaaaattatttccctcaattccttttgcttaatctaaactgaccgatcaacagatcaacagctgcttgaaccagggacccagtttgctgtacttaaaaactctcttgcaatgaacataacctcagtttcccaacaccatcaaagatccataaacmatttccaaaataaaatctaattttacctttcaaattctatcctataaaatctctaatttcttcatcttttatgaagtagacatcttgagctattttcaagttgcagtttttaaaatgaaaccttatgctaatgacttctgtcttcaaatttcttttaccaagaacatgagaattaaaaaaaagaatataaggaatatactctgcttttctcccgcgaataataaaaatagttgaaaaaattgttttgccctcagagaaaatatatctattaaactagataaaaacacacacgaataactaaaatctggtagatatttaa

SEQ ID NO: 446806 - DNA, 495 bp, Homo sapiens
ggaagtaaccatttaaattatcctgtgaatgccttactattgtttattgggtgtacaagaggtgtgtaacttgtttttcagttcacaagtttttatattgagaaaaatcatacatatgggaccacactgaaggagactcatccatacttggacctgatttakatgtgatttcctgaaataggggaagataacatattaatacgaaactttataggtcatgggaggagggtgaaacatggaaaaagaatttgtgaccagatggcagattatgtcagattaaaaatgaccacaaactctttaacattctccaattgagatgtgtctaattctcctctccttccatctgtgctggcctatttcttacttactagtagagtacagaagaaatgctgtgagagtttctggcctagtattaaaaaaaaaaaaaaaagccagcttctgcattgttctttattggagccttcagttctgtgtaaggatctcaaatccccatgt

SEQ ID NO: 446807 - DNA, 582 bp, Homo sapiens
gctttgtgttttacattcagatctattatcaatttttagttaatttttgtgaaagggttaaggtatctgctcatttctttctaacgggcagccaagtgttcagaattacttgtggaaaagactattctatctctatctaattgctttttctcctttgacaaaaatctattgactacattcatgtggttctatttctaggatctctattctgtgactttactgatgtgtttgttttcctttttatttatttttaatatcaccgcatcttggtaacctctagctttatatcaaattccaattgttcattactaatatatcaggaaacaatttaactttgtatattaaccatatatcctgaaactttgctatacctgcttattaatgtcaggatttayatatatatatatatatatagagagagagagagagagagagagagagagcgagagagagagagagagagagagagagcttggagattttctattttccatataaataatgatattgtctgcaaacaaagacattcttattttttctcccctgttggtacaccttttattccccccccttttttttctg

SEQ ID NO: 446808 - DNA, 372 bp, Homo sapiens
gattttctattttccatataaataatgatattgtctgcaaacaaagacattcttattttttctcccctgttggtacaccttttattccccccccttttttttctgtcttgctgcactggaaaagatttctaatatgatactgaaaagaagtggtcagagaggatacctttatttgttcccarttggaggagaagtatgtctacttcctcatttcattaagtccttatgattattctgacaaattagcacaaattcagtagacctcttatttgtgcactgtcacagaaagaaggagaactctgtggtgtttttccttgcaaaaacactaatcctactgaaccaaagccccggtcctatgacttcatttaactc

SEQ ID NO: 446809 - DNA, 609 bp, Homo sapiens
tctaagactttttttctttgtttctggtttcctggagtttgaatataatattcacacaattacatttttttttgtatttattctctaagctctcaattttctgaatctcagtttgatgtttgtcactaattttgaataattcttggccattgttacttcaaatatttcttctactccattctcactttcttcttcttttagtgttccaattatgcctgtgtcacacccttcaaagtagtatcacagttctctttttaacatacatttctatgtttgcaattcagactgagwatttttttaatcagcttatctttaagctcacagattttttttggttgtgtccaatctattaataagaccatcaacagtattcttcatttatgttaccatgtattttatttttatcataaccacctggtttttaaaagtttcttagaagcataattgatatacaaagaactacacatatttaatgtgttaattttgatgatgcatgcatgaaaattgtgatgacatatgtgttcatttttggacatatgtaaatacccataaagttatctctacaattatggtaatagacatatacaaaacctcccagagttttcctgt

SEQ ID NO: 446810 - DNA, 609 bp, Homo sapiens
tctaagactttttttctttgtttctggtttcctggagtttgaatataatattcacacaattacatttttttttgtatttattctctaagctctcaattttctgaatctcagtttgatgtttgtcactaattttgaataattcttggccattgttacttcaaatatttcttctactccattctcactttcttcttcttttagtgttccaattatgcctgtgtcacacccttcaaagtagtatcacagttctctttttaacatacatttctatgtttgcaattcagactgagaatttttttaatcagcttatcttyaagctcacagattttttttggttgtgtccaatctattaataagaccatcaacagtattcttcatttatgttaccatgtattttatttttatcataaccacctggtttttaaaagtttcttagaagcataattgatatacaaagaactacacatatttaatgtgttaattttgatgatgcatgcatgaaaattgtgatgacatatgtgttcatttttggacatatgtaaatacccataaagttatctctacaattatggtaatagacatatacaaaacctcccagagttttcctgt

SEQ ID NO: 446811 - DNA, 609 bp, Homo sapiens
tctaagactttttttctttgtttctggtttcctggagtttgaatataatattcacacaattacatttttttttgtatttattctctaagctctcaattttctgaatctcagtttgatgtttgtcactaattttgaataattcttggccattgttacttcaaatatttcttctactccattctcactttcttcttcttttagtgttccaattatgcctgtgtcacacccttcaaagtagtatcacagttctctttttaacatacatttctatgtttgcaattcagactgagaatttttttaatcagcttatctttaagctcacagattttttttggttgtgtccaatctattaataagaccatcaacagtattcttcatttatgttaccatgtattttatttttatcataaccacctggtttttaaaagtttcttagaagcataattgatatacaaagaactacacatatttaatgtgttaattttgatgatgcatgcatgaaaattgtgatgacatatgtgttcatttttggacatatgtaaatacccataawgttatctctacaattatggtaatagacatatacaaaacctcccagagttttcctgt

SEQ ID NO: 446812 - DNA, 638 bp, Homo sapiens
ttgtagcatgtatcattcttttttgttgttttatttaaagtggaactttgtgagattcttttgcattatttaattttattttaaattcaggggtacatgtgcaagtgtgttatatatataaatttgtatcatggggatttgttgtacagattatgttacctcccaggtattaagcttagtactcattagttattttttctgatcctcaacctcctcccatcctccaccctctgatatgtcccagtgtgtgttgttttcctctttgtgtccatgtgttctcatcatttagctccaacttataaataaggacatgtggtatctgtttttctgtttctgttttagtttgctaaggataatggcctccagctccatccatccatgtctctgcaaagtacwcgtattagtcagggttctctagagggatagaaccaataggatatatgtatatattaaagggagtttactaaggagaattgactcacacaattataaggtaaagtcccatgatacactgcctgcaagttaaagagcaactaagccagtagtggatgagtacaaatcccaaaacctcaaaagcagggaagccaacattgcagccttcagtctgtgaaagggccaagaagccctggcaaactcct

SEQ ID NO: 446813 - DNA, 542 bp, Homo sapiens
taggatgagagatatttaatatgttatgaacagattttgccatactatataatacagaacatgttcacaatattaagaacataatctagagtactcaagctatagttacatgcttgttgctagacatgaatagtctgattttcatcaatgttagggctaaaccaaatatataaaagtattacatgaatatagggaaaaagaacttaagaaaatataattttctgctgctttatctatgcttactaattataygaagtcctttgaaatgaattacttattaagtaaaagtacttattaaggaatatttcacagtaagttcagtaagttggagaacaatttcttttaacaattcatatttctgcagataaactaaagattgtaagattattggcaaaaaagtaatgttaattaagaaagacttttgaggtccccactattcatttctagaaataaactgatatcagtttggtattaatttggggaatacctttttaattgttcaaaatgttggactatgcaatgtaattaatgacccaatttca

SEQ ID NO: 446814 - DNA, 604 bp, Homo sapiens
ctttttggtgatttatggaaaaataagaaaatgtattaattttattgttaatgagaattcatttaatttaaataaatttttagttttgcatattttgagatattatatgttgtatatttgttgttatctaatattattttttaagatatgtgaaatataacaactggtagtttttctttaaatcttsaatttttactggtttaactttctaactaattcaacaatataaatggaaaattattggtttctctcttaattttatgtataataaacttttccaggctgtgaaattcaaattttcataattagtgttgtagttaatacaccattattaataatgtttagtcaggagagaatcatacttttatgtttgattgcatattttcataaaaggattataaataactgtccatagcaactttatttttaacagcccagaactgaaaaccacaaagcccaaattcccatcaacaagtaaatggataaacacattgtagtacacgcacatgatggaacactattgagcaatacaaaggaatgaattatcaatacttgcaaaatgtgtattgatttcaaaaaaaatatgctgagtgaaagaagccaa

SEQ ID NO: 446815 - DNA, 604 bp, Homo sapiens
ctttttggtgatttatggaaaaataagaaaatgtattaattttattgttaatgagaattcatttaatttaaataaatttttagttttgcatattttgagatattatatgttgtatatttgttgttatctaatattattttttaagatatgtgaaatataacaactggtagtttttctttaaatcttcaatttttactggtttaactttctaactaattcaacaatataaatggaaaattattggtttctctcttaattttatgtataataaacttttccaggctgtgaaattcaaattttcataattagtgttgtagttaatacaccattattaataatgtttagtcaggagagaatcatacttttatgtttgattgcatattttcataaaaggattataaataactgtccatagcaactttatttttamcagcccagaactgaaaaccacaaagcccaaattcccatcaacaagtaaatggataaacacattgtagtacacgcacatgatggaacactattgagcaatacaaaggaatgaattatcaatacttgcaaaatgtgtattgatttcaaaaaaaatatgctgagtgaaagaagccaa

SEQ ID NO: 446816 - DNA, 610 bp, Homo sapiens
taaaattcaatatatccatgagctaaagtgcattaatttcagtattaaaatttcaatttaatattcacatcaactaatgttacctatgaaattgatataatataaaggtacttagcatgttcattaggtgcaagagatggtaagggtccttagtaggagaaagtaaccactttacatgataaagtacaaaaatgacctatagcaaacattatgtcgaagggtcaaataatgcatgtttgagattcaggatgaaaagccaatacctgttctcaaaacttacattcaccagtgtaatagaaacctggattagkgcaagaagatataaaaaagtgagaaaaggtataagaatttaaatatgttaaagtaaaaatgttttcagtcatagacaaaatagtaatccactgatatatttagaaatgcaaagtaaatatgtaaaaataatatatattattttattgcagcacaaaaaagaatatggaatttaatgcaatttatagtcttatcaaatacatcaaatgcaaaggaataatttaaataaaagatgtgcaaaataagtaaactaaactacaaagtattgttgagacaaaggatagcaaatctaatttaatgg

SEQ ID NO: 446817 - DNA, 632 bp, Homo sapiens
ttgcggtttttcttcacataaaaagtaagtaacttgtttttatgccacacaagtgtgaaaagaaagatatcttaagagtatataagtttataattgaatttygaaaccctaaacagtaagtcacattgaaaattgatctagtgactcataatttgatgtgtttcactatcctagtacaatagctttttcaaagggtagatgtaaagatcttaagcttttttacaaattgctttctcctacacccattgtgattaagtagtgttatcttctgtatgtttgttctaaaagagtataatgaattaatatattcagttaatgagatggtgtcctgatcctcccatctcttaaaaattttcctcactaatttacaaatatgtacataaaaaatttatcacaccatgtatgtaagtatattatttaaatttcagatcacaagccaaaattattttgatgacatttaaatctaaagatttaaatttcattttgactgcctcctgtagatataaattatttggaaaaatataaaatatttttgtctctgcgtaggtcattagctcgtctccttttcctcatgatatgtgggcactaagagaaaagacggcaatggttgaaggctaaaatttaggtaactt

SEQ ID NO: 446818 - DNA, 507 bp, Homo sapiens
gatgacatttaaatctaaagatttaaatttcattttgactgcctcctgtagatataaattatttggaaaaatataaaatatttttgtctctgcgtaggtcattagctcgtctccttttcctcatgatatgtgggcactaagagaaaagacggcaatggttgaaggctaaaatttaggtaacttaaactaggttttctctttttgaaatctaggccattgtagacaatttatcctattaccccagaagcgactgagatggtggaaattaatgattaggtaagtgaaactgatcaacaggtaagaattgaaaaaagggaccagggacttctggacagaatttgcactaatgctttggagccatatagaaaatcatatacagcacatcagttttaccagaaacttgaacactcacctcaagcagctccytgatacatgacactctaataattggatacaattctatcctatcaacatatcaacatattttcaatttatttaacatttgtt

SEQ ID NO: 446819 - DNA, 602 bp, Homo sapiens
aaagtttttgagggtggggagcaggagataagatgggctcccacttctaacatccaagttttatcctcatttaaaaggtaaacatgtaaggttatattttctcaagagttttagctttcaatccttgttaacttccaaggcttgttctttaaccaaggtcctaagtttctttgttcagaaaaaaagttctaattgcaaaaacttgaaaatatagttgactcttgaacaatgcaagagttggagcactggcctctgcacagtcaacaaatcatgtaaaactctgwctccccagaaacttagctagtaatatcttattatttactgaaagccttcttgataacataaaaaatcaattaatgcatattttctatgttatgtatattatatactgcatacttataatacagtgagctatataaaagaaaatgtttaaaaaagtcataaagaaaagaaaatgtatttacagttcattaagtggaagtgggtcatcataatggtcttcatcctcctcatcttaatgttgattaggctgagaaggaggaggaagagaaggggttagtcctgctgtctcaggggtgacaaagatggaaacaaaagtctca

SEQ ID NO: 446820 - DNA, 602 bp, Homo sapiens
aaagtttttgagggtggggagcaggagataagatgggctcccacttctaacatccaagttttatcctcatttaaaaggtaaacatgtaaggttatattttctcaagagttttagctttcaatccttgttaacttccaaggcttgttctttaaccaaggtcctaagtttctttgttcagaaaaaaagttctaattgcaaaaacttgaaaatatagttgactcttgaacaatgcaagagttggagcactggcctctgcacagtcaacaaatcatgtaaaactctgactccccagaaacttagctagtaatatcttattatttactgaaagccttcttgataacataaaaaatcaattaatgcatattttctatgttatgtatattatatactgcatwcttataatacagtgagctatataaaagaaaatgtttaaaaaagtcataaagaaaagaaaatgtatttacagttcattaagtggaagtgggtcatcataatggtcttcatcctcctcatcttaatgttgattaggctgagaaggaggaggaagagaaggggttagtcctgctgtctcaggggtgacaaagatggaaacaaaagtctca

SEQ ID NO: 446821 - DNA, 570 bp, Homo sapiens
gtatatatctgatactatgatttcacagaagcatgaatctcaaaacacatcaaattgagcactttaaatatagcttactgtgtcaatgatatattagcagtacttttttttaattttaaaattttaaaatattaatttaaacagttttcattaaaaccacaatctgtcactgttaagaagtatragaattctttgttcaatgccaaaggtaaaagataaaaaaaaattgttgggattaatatcctagccatctgattctaattcctgttcatttgattattcaaactatttcattgggtttttagtttttcttcttggtgtagctggtataatctctgtaatttactatgttgttaacctgatttcagaaactcattcttttcattattcatccaatatttattgtttgtgttaacactgcctttaaagtcttttcctaggcatgcagataaatattagacagataaatcttattagtggatggaatattttacacacatcataaccccaaaaaaggaagacagttgatcctttccgaaggatggctaagtgtttactccaatcccaaat

SEQ ID NO: 446822 - DNA, 631 bp, Homo sapiens
gctaaaacattcagtaaaccatgttgtaaacagatgtgctgtcatctgggctttgtagttccatttatagagcacagacagaatagatttagtgtaattcttaagggtctaggaatttttaaatgggaaatgggcattggctccaaccagctgcaccaactactaatgggagagtaagcctgtcctttgaagctctaaagccaagcattgatttctcctctctagttatgaaagccctagwtgacactttcttccaatagaaggctgtttggtctacattgaaaatctgtagtgactttcatcagttatcttagctggttttcctagataacttgctgtaaagctgctacatcagcacttgctgtttcaccttctgctgttatgttatagagatggtttcttttcttcaattctatgaaccaacatctactaacttgagacttttcctctgaagcctcctcactttcctcagtcttcatagaattgaagaatgttagaccttgctttgggttaggcttcaaattcagagaatgttgtggctggtttgatcttctattcagacaactaaaaccttctccatattagcaatgactgttttggtttcttatcattcatatgttcactgaattag

SEQ ID NO: 446823 - DNA, 631 bp, Homo sapiens
gctaaaacattcagtaaaccatgttgtaaacagatgtgctgtcatctgggctttgtagttccatttatagagcacagacagaatagatttagtgtaattcttaagggtctaggaatttttaaatgggaaatgggcattggctccaaccagctgcaccaactactaatgggagagtaagcctgtcctttgaagctctaaagccaagcattgatttctcctctctagttatgaaagccctagttgacactttcttccaatagaaggctgtttggtctacattgaaaatctgtagtgactttcatcagttatcttagctggttttcctagataacttgctgtaaagctgctacatcagcacttgctgtttcaccttctgctgttatgttatagagatggtttcttttcttcaattctatgaaccaacatctrctaacttgagacttttcctctgaagcctcctcactttcctcagtcttcatagaattgaagaatgttagaccttgctttgggttaggcttcaaattcagagaatgttgtggctggtttgatcttctattcagacaactaaaaccttctccatattagcaatgactgttttggtttcttatcattcatatgttcactgaattag

SEQ ID NO: 446824 - DNA, 407 bp, Homo sapiens
atttattcttgtaaatcagaaattttgaggggcaatttgttatgcagtaagagaaaactaattctatcatatatctagctgcctaaaatggaaactarttcatttaaaacaaatggatttattttattcaaagaggtttcatggatatataagtgtctaatttgtgacaattcagcaaactgtcttcttctaatgactgcttttttctatgtgtattcaatacttcaataaatattaaaatagaaaaaataatttacaattttaattattttaccagatcttcaaattgttcatcgttcatactaacactatcctttttatgatttattttataaaggtttctaaatttgtcatttgtaattatttttcttttcacctgtggaagttgggtagacaagtaataattc

SEQ ID NO: 446825 - DNA, 593 bp, Homo sapiens
ttttacatgatattttcaggacttcgccatctgggtcaacagtatactttctaaagaatttttaagatgacatcataaagaactgatataattgaacttttatattaaaacttcaatactgacatgaaatcactatttggatatatatttaagccaagaaaatgcctcatgtagttatgctgtaacattgtataaaagaagactttaaaacatgaattttactgcaaaatgtcatgttcactctgcaggcatcttgctaagatgatcaactgaattcaagggatgtctctaggatatcttcagatagaaaccatttaccacatttgagttcttggtgaaaattcagagacataacacaatatttatcaaaaatactattggtagagatcaygccataaaaatttgctaaaattaaacagactaattaccttggtaattaacatcaatagacatgaggccatctagattattcataataaagtgaatactgaaattgtacaccactcagattgataaggaaaactgatttagaatactaatattctcaataatactcatagaaaaaaagtgttatttttatttcagctgtccaa

SEQ ID NO: 446826 - DNA, 624 bp, Homo sapiens
tggtgcccaaaacctcagagatgccagcaatcgcggagccccaagtggtgttacagctcttgcttggggagtcccaaggtttgggccccaagaaaagttgcagctctttactctcgtagctcagccagtgggagcgtgttatagctgtctttctcctgtagtccggtgagcaggaatgtgttatagctctttcattccagccgcccacagctgagtgagttccaagttcttgtcctgtgaccaagaggaataaggtgtgtggacactggagagtaagtaaggcagagaagaattttattgagcgacagaaggaaagccctcaactgtgaraagggaccctgaaagtgggttgtcatctgtgaggctgagtctgggcttgtctgggtttacaatgggagaatgtgtgctgattggtccataggtgttctttgaaaaaatcaccatccaattggttaaaaagcatcatccggaaggaaccaatcaagagagagaaggtaagctggggatagaacttctaactctgatcatgaactctatctggaactagcagctcggttttcaggctttaaactgtcttcggcttgaaggtcgggtttcaccagggactcatccctgtttgcctag

SEQ ID NO: 446827 - DNA, 570 bp, Homo sapiens
tcatgtggagttgaaaatctgcacagcaaaggaaacaatccattaagtgaagagacaacccacagaatgggacaaaatatctgaaaactatctatctgacaaaaggttaatagctagaatatataaggagctccaatgactccacaagaaaaaaaaatccagtmatctgattttaaaatgggcaaataatttgaatagacatttctcaaaagaagacatacaaatggcaaacagacatgtgaaaaggtgctcaatatcactgatcattagagaaatgcaaatcaaaactacaatgagatatcatctcattccagttaaaattgcttatttccaaaagacaggtaataacaaatgctgcagagaatgtgaaggaaagagaacactcgtacactgttggtgtgaatgaaagttagtacaaccactacgtagaacactttgaaggttcttcaaaaaacttaagtagagctaccatacaatccagcaatcccattgctgggtatttatgccaaagaaaggaaatcagtgtattgaagagatatctgcgctcctatgtttgttgcagcactgttc

SEQ ID NO: 446828 - DNA, 604 bp, Homo sapiens
acttactcttaagtgtagattcagtatgtctacatttctaaggttaatattcatctcagaaaaaaaaaagggaattaaggagttgtgacctattattctgaaactttttctcttctgtcctttgtaagtcttcagaatgaatatttttgcttagttcatatgacattgtgtccattaggktcctcaatcttgttgaataactattgtccctagtgctaaagaccatattctagtaactttcatggcactcaatctacctgtatctaggaccttgttttcttagcggtctgatctccaagtggccctatttgggaacagaagccattctggatacatctatccaaggtcctgagtccaactatagatctaggttttgaaatctgacctctcttttctctgaaaaacaaacaaacaaacaaaaccagaaagtctaatgtcagttccacgcttcaaaatagacattatttgatggtatcataaattagaataataaacgtcttgatctaaataagcaataaacatcttaattgtgataagataaaaatatatcatgaaagtaatgataataaaattatttttaaaacctgatgcttatttatatcat

SEQ ID NO: 446829 - DNA, 604 bp, Homo sapiens
acttactcttaagtgtagattcagtatgtctacatttctaaggttaatattcatctcagaaaaaaaaaagggaattaaggagttgtgacctattattctgaaactttttctcttctgtcctttgtaagtcttcagaatgaatatttttgcttagttcatatgacattgtgtccattagggtcctcaatcttgttgaataactattgtccctagtgctaaagaccatattctagtaactttcatggcactcaatctacctgtatctaggaccttgttttcttagcggtctgatctccaagtggccctatttgggaacagaagccattctggatacatctatccaaggtcctgagtccaactatagatctaggttttgaaatctgacctctcttttctctgaaaaacaaacaaacaaacaaaaccagaaagtctaatrtcagttccacgcttcaaaatagacattatttgatggtatcataaattagaataataaacgtcttgatctaaataagcaataaacatcttaattgtgataagataaaaatatatcatgaaagtaatgataataaaattatttttaaaacctgatgcttatttatatcat

SEQ ID NO: 446830 - DNA, 480 bp, Homo sapiens
tagaagtaacttgccttgctgaggactaaaaagaaaattttatattcgagtgctatttcttttgtggcaccaaaactttatttatgacaattaccactgcagagtcctcacagctaatacctagcagggccatgggagtgggggatcccctggcacccccaaactgtaggatctccagcatacaactctagcctggaagagctgcaaacataagactccagcygtccagagctactggatagactgagcccaatgaaaccataagggcagggctgcctgaagccttagtggtccaacccccaccccagtgttcatggaacctggaatatggagccaaaggaaattattctccagctttaaacacttactattgtttttcctcttggattttggacttccttgggaacagccacccttttcttctttcctatttctctcttttgtgatgtgattgtctttcctatgcctgttccatcattg

SEQ ID NO: 446831 - DNA, 591 bp, Homo sapiens
attcataaaatttaaagattaaatgagcaaatattatagctgacaactttctgacagttacagaaactgagcagaaatttttgtcctttttccccatgagttgaagaaatatgcccagtgaagacctgaggtttccttgaaattaaaatggtagttcattcaacacgtgagagaattcataagaactccccaaagttgtttcctggaatcatgattaatataatttttatcaaaaagtgcttaaatcttctttgattaaatattcatcatagttacggggtaagagtcccagcaatttttacatgaagtttctggattggaccataaaaagtatgctgagtgaagatcttttacaagcttaatatttaatagaattagacaaatagaatgagttccataaagtacaattaaattaaagggaatttagaggaaaagsttctaggtccgtgtacaattcacaaaaagtatatttgaagtggtctctaaggaatgggtaaatttatcagcagataaagacaggatagttttatatgacagaaaaggaaatagtgtgagttcaggaaagtctagggtaaagtaaaattaagccat

SEQ ID NO: 446832 - DNA, 523 bp, Homo sapiens
taatcacaagttgctggtcaacttgatgttaattatttccctattattaataggaaaacattgcccaccaattttccaacttaattgattgggttctctgttattattattgttrttattattattattattattattattattattattagggaaatgatttaaaggcaaacacaactccaaagactcagaattttaaaacattaatatgattcagagactttgcagaattgaaatatttaaataatttagaataatcactacttagctaagagactaacttaagctaagagacctaactaacaaatacactggctattacattcccacctacaaaagatccttctggtgtaattttaaatgtttgattgtgaatatcaagtgttgtgtcactcacttttcaaaaaggtcattgtgaggattcggtggatctcttgtggagtagagtaaccacagactttgatatgcatggaatatctagatcactgatcaccactcaactttaaattatgacgatccgtta

SEQ ID NO: 446833 - DNA, 429 bp, Homo sapiens
ctgtataaaacagtgatgttatgaatatagaatgtctaaatgtttcaactgtttaaaaaaccatatggtgtaygtaatgaatctataaatagcaatacttatattgataagacaacactataaaagtcacaaaaagggaaagtggatttaattgtcctaaggattatgaattgtgtgggaaatgattaaagttctaattaatattagacatcaagatgtaagggatctatgacaaaatttatagaaaatttactaaaataaaagttgataatgtataactattaagctaatagatggtaataaactgaattaaaaataacaccaatcaagtcaaaaaaaaagaagagaaaaaatgtaacagaacaggcaagacaaacagaaagcaagaaataatatgataggttaaaaaacaaacacacaaacatatcc

SEQ ID NO: 446834 - DNA, 429 bp, Homo sapiens
ctgtataaaacagtgatgttatgaatatagaatgtctaaatgtttcaactgtttaaaaaaccatatggtgtatgtaatgaatctataaatagcaayacttatattgataagacaacactataaaagtcacaaaaagggaaagtggatttaattgtcctaaggattatgaattgtgtgggaaatgattaaagttctaattaatattagacatcaagatgtaagggatctatgacaaaatttatagaaaatttactaaaataaaagttgataatgtataactattaagctaatagatggtaataaactgaattaaaaataacaccaatcaagtcaaaaaaaaagaagagaaaaaatgtaacagaacaggcaagacaaacagaaagcaagaaataatatgataggttaaaaaacaaacacacaaacatatcc

SEQ ID NO: 446835 - DNA, 446 bp, Homo sapiens
ccaggagactttcctcttttctgtccccatgtacaggaatgcagggtgtgctgaagtccaaatctcaacagaaagaggtagagaagccatagaagaaatcaggctcctaaactgaccatgaagcagcagttgcctgatagtggggaacggaaaataatttatatacagtatatccatttggtgcaggtctgttggtccttttagraggctaacagcagggcaggaagaccagtacaacagctccatgctcttagattccataaatgctaaaaggaggcttgcaatcctgtcctcaaattattccaagatgataccaaattgaatctaaataaagcaacagaaatgtccacatcattggaaagaaagatgaagctgactcaaatcacctattcccaatacaccacgggcctgaaagagaacctaagtattttttgtgggggaaaaaa

SEQ ID NO: 446836 - DNA, 581 bp, Homo sapiens
ataagaacatgctttaaaatatgtggaaacataaaattataagtcccttgtttcataattatttgttataaattataattaaatagaggtacaactgccagtagttatcagttataaaactgaaaaagaatagcaaataaatgatctaatttctttaggagacatgtcttgagtacaatttacatcctcttaggcaaagaacaaaagaaaaacatacatacacattagccaagatttatatgctrtttctttatgtcaaaaactttaaatttatttttatctaaagtatttttctgaggattaagagctttcttgtaatattgaaaatgttgtgttaggttaaaacttgagaatacagtaaatttattagggggatgcacgttgcttaaaatattagaaaactaattgtctgatggtacatattaaaataagtattgcctgaaacttttggcctggtaatgcaatctacactgttgataaattagactaacagtatgtaatgatattagtaagtttaagggtatttaccaaagcattgtgtttaacagtaaacataaaacaaaaagaacactatttgtata

SEQ ID NO: 446837 - DNA, 581 bp, Homo sapiens
tcattctcaggtcagggaatatgctgtaaattcataaacaaaagtacgcaaagtttatttggaaatttaatgaatgtgcactcaaaaaaagcttataatgtgtttcctaggtgttcagtggttgaatagatacaaaattggtagctaacacaaaattaaactaatttttttcatttttacaatatgaataaaattatttgaaatgtaagaagtgctttctgtctcactgtgagaacacaccrttagctcttccaaaaacgtggcagcgagagccttcctaattcttgtaccctaggtgcctagtttgccttactctagctcagtccggccttttccattaatcctcatccattattatttattatgtttcttattgtctttgtgtagactaaaaataaaaacttctttagcttttttttttaatctcatctacctaatatagaagcatagattaggattaacatgactgaatttgaaagccctgttatctggcttcagtattgactccactacttacccaaagtattaggttggcccaaaagtaattgtggtttttcccattacttttaattggtttttcc

SEQ ID NO: 446838 - DNA, 554 bp, Homo sapiens
ctatggcctttttatggaatgtgatattttcctagatgaccagaatcccatttctaaccctatttcaaaaaatgtcaaagataaaacatgttactcacaaatctcagagcaagttggatatgggcagaactctaacaaacttgaccctttctgaaactgtgatgaatgctggaatgcttaagagaactgggtcccacagaagttaattatggaaaattattgttgttagactaaagttggattaattttctcctactccaaggtatattaaccagtctgaaagataatctgttcataggctcaaactctactaggaacaggcccagagccactctgtagccttcataccatgagacaccygggccgtgcttttcccacctggagatatcatggccttcttcccaaggaaggttatatgtctttattcctgggtccaggcaaccagagataacttgaaaataccaagtataagtcccttattcttattgtaccagggcctgctcacatatctgagggcagtgggacaccacaagacagggaatcctttaaggccc

SEQ ID NO: 446839 - DNA, 610 bp, Homo sapiens
gagttatttttctttcaaaggggctcaagataacctcaaatctatgagtaaagcactcgtggacatagatgacattgtccagtgctttcactcctcctatcaggaactgtttctcaaaactctttgttagaactggtactaaagtgtaagattaaggaattctatggattttcacatgaatatctagtttcacctgggtattagctattcaaagtagacaactcttcattcaatgacacatctgacatttccagggaacctgctttaattctgagctctgaagaaatacttagatcacatattctcagaaacaattgccttgctcaactgtaagtatgtgtaggccagtaatttcatgtttttacttgatatgaacacctatagggaagccaagtcctccgagctttttccaggaaaatgctcggaccagaataaaccttctaatcagtggtggaagcctcaggctgggctaaaatcagatctctacataggcttaattttcccacttaggagagactttcaaattggcartggtgggcatctcgtctgctgcttgcttggttcttgggcttctctccatttctctacaactttcacttctaggctttag

SEQ ID NO: 446840 - DNA, 368 bp, Homo sapiens
aagcttatgtgtttaatgtaaaataaatagatcctcgatagccactgaagaatctgtaatttacttgataaatgatgagcaggatttgaaaatcttataccagggaagaaatgtggaacctaaagaagactgaggtaaayttacttgataagttgaagtagaaaagtgtggtgaaaagaaatcagattaaaactctctacagcagtacctcaggacaagttgattagtgcctgaactagtgtcatgaagcaggataaggaaagaaagtgacaggatgaaggaaaggtaagaaagacttagggaagtatttgaatcctggggtaagtaagaagaattgattgtaacagttggttttagagacagagagt

SEQ ID NO: 446841 - DNA, 368 bp, Homo sapiens
aagcttatgtgtttaatgtaaaataaatagatcctcgatagccactgaagaatctgtaatttacttgataaatgatgagcaggatttgaaaatcttataccagggaagaaatgtggaacctaaagaagactgaggtaaacttacttgataasttgaagtagaaaagtgtggtgaaaagaaatcagattaaaactctctacagcagtacctcaggacaagttgattagtgcctgaactagtgtcatgaagcaggataaggaaagaaagtgacaggatgaaggaaaggtaagaaagacttagggaagtatttgaatcctggggtaagtaagaagaattgattgtaacagttggttttagagacagagagt

SEQ ID NO: 446842 - DNA, 368 bp, Homo sapiens
aagcttatgtgtttaatgtaaaataaatagatcctcgatagccactgaagaatctgtaatttacttgataaatgatgagcaggatttgaaaatcttataccagggaagaaatgtggaacctaaagaagactgaggtaaacttacttgataagttgaagtagaaaagygtggtgaaaagaaatcagattaaaactctctacagcagtacctcaggacaagttgattagtgcctgaactagtgtcatgaagcaggataaggaaagaaagtgacaggatgaaggaaaggtaagaaagacttagggaagtatttgaatcctggggtaagtaagaagaattgattgtaacagttggttttagagacagagagt

SEQ ID NO: 446843 - DNA, 610 bp, Homo sapiens
atttcagaatatcaccttatttggatataggtttttacagaggtaatcagcttaaaatgaggcaattacagtaatctctaattcagaatgagaatatgactcataaaaagaggaaytttggtcacaaaatgctgacagagggatgataatgcaaaaacacagagagaatgcaagcaaggcagccccagaccctaggcttcagaacattcctggcttgaagggttctcgacccgccccttcccacgcaggaacccgtctgccattaacgctgtccatggagcccaggccgttcatgcgagatggtgccagcaggcctgcaggatgagctgccctcacctccgctggtgcccctcccacactggttggaactcaaagtctagagctgcacctcccccctgcagccagagtcctcacagcagccactccagatggactgtcgctgccatcatttcattctataattatgtcattcccccactgataagtattcatagataattattccttttaacactaataatattcaggttatttctagttgttttcataaacagtttgattgagaaataacccacatattacaaaatttacctttcaaaagtgtacaata

SEQ ID NO: 446844 - DNA, 610 bp, Homo sapiens
atttcagaatatcaccttatttggatataggtttttacagaggtaatcagcttaaaatgaggcaattacagtaatctctaattcagaatgagaatatgactcataaaaagaggaattttggtcacaaaatgctgacagagggatgataatgcaaaaacacagagagaatgcaagcaaggcagccccagaccctaggcttcagaacattcctggcttgaagggttctcgacccgccccttcccacgcaggaacccgtctgcyattaacgctgtccatggagcccaggccgttcatgcgagatggtgccagcaggcctgcaggatgagctgccctcacctccgctggtgcccctcccacactggttggaactcaaagtctagagctgcacctcccccctgcagccagagtcctcacagcagccactccagatggactgtcgctgccatcatttcattctataattatgtcattcccccactgataagtattcatagataattattccttttaacactaataatattcaggttatttctagttgttttcataaacagtttgattgagaaataacccacatattacaaaatttacctttcaaaagtgtacaata

SEQ ID NO: 446845 - DNA, 606 bp, Homo sapiens
attgccctgacgactggcttccttcagttaacagtgttttcaaggttcatccatgttgcagtttgggtcagtaatttatctttttaattgccaagtaatatttcattgtgtaaatttactacattttgtttatccattcatcacttcatggacattttggtgtttcaacatttaggctattataatgctgctataaacatttgtgtgcaagtttttcagtgacaaatgttttcatgtctcttgagtgtatacgaagcaaagaaacttctggattatttcgtaactttatgcataacacattatagaaactaaaaatgctgtttaaggtggcttcatcattataaacatcatgagcaatatatgattgttccaaattcttaacatgctccstaactttttttttgctatctatctttgttatgttagctttccaagtggttatgaagtggtaccttatttttgtgttgattttatttctgtaatgattaattatgttgagcaagctttcaggtgcttattggccatttgtgcacatctttggagaaatatctattcagatattttgccatttttaatgaattgttattttactattacaacagtaag

SEQ ID NO: 446846 - DNA, 567 bp, Homo sapiens
tacaggaaatacttccactgaaaatgaatgcttgatgctgaccttctggcaagctgtgwttcctctttctttgtccttctatgtaaatgtgatgtcacatgtgacctataatagtcttgtgaggtggagcatatattagagcctaataagaccacctcctcttggatgatgacgaatttaatgcacacgcacacatacatacagtctctttccactgaaacacctaggaacaatgactatgccgtgagcacaaggttgtgctctctaaatattctttcctacttgaaaataaaaatattgctgcttgaaaaaaggactaattctaggtttggggcacaaagtcatgccaggaaatcctataccagaagacaagaaagttaccaaagctttcagggatcatatcaaaaaggactttaggagccaacttgaagaagctccaatggtcaaactatttagagtttgcctaaaactaccccctgactgaaagatctggaaggactacgttggctattggctccatgaaaccacattagagttgacttaaagcaacaagcagttcttggtgtc

SEQ ID NO: 446847 - DNA, 595 bp, Homo sapiens
taggctggaaggctatgccagtctctcttttcacatttttctrcctgcttatattctagccatgctggcagctgattagattgtgtctacctagatcaagggtgggacctcctttcctagcccactgactcaaatgttaatctcccttggcaacaacctcacagacacacccagtatcaatactttgtatccttcaatccaatcaagttgacactcagtattaaccatcactgcaacatgtaagtagggtcaggtcaataagatggatatgaaagttcaaacacaatgacaaatacactgtggacactcaatatatggtaggtattatgattatggtgatattttcaaaacctttactaatttttgtatacatttagatgagaaaaaatgacaaatgcacctacagttgcaggttccttcttatcatatgtgttgatgaagcaatttgttaaatgcaagatagacacagggctttctcttattcctagattatatgattatatatatatatggtatgccattgattaaataacactattttactgagagaaaaataaaaatatacttacatttatttatttaatcaatcactggc

SEQ ID NO: 446848 - DNA, 595 bp, Homo sapiens
taggctggaaggctatgccagtctctcttttcacatttttctgcctgcttatattctagccatgctggcagctgattagattgtgtctacctagatcaagggtgggacctcctttcctagcccactgactcaaatgttaatctcccttggcaacaacctcacagacacacccagtatcaatactttgtatccttcaatccaatcaagttgacactcagtattaaccatcactgcaacatgtaagtagggtcaggtcaataagatggatatgaaagttcaaacacaatgacaaatacactgtggacactcaatatatggtaggtattatgattatggtgatattttcaaaacctttactaatttttgtatacatttagatgagaaaaaatgacaaatgcacctacagttgcaggttccttcttatcatatrtgttgatgaagcaatttgttaaatgcaagatagacacagggctttctcttattcctagattatatgattatatatatatatggtatgccattgattaaataacactattttactgagagaaaaataaaaatatacttacatttatttatttaatcaatcactggc

SEQ ID NO: 446849 - DNA, 535 bp, Homo sapiens
aataatctgattaaataattaatacatataaaaaaagtcatgacctaaaaagagcagaaatacttaattacctaatctaaattgtgtgcttcaggctggataatttgacaggaataaccatctttcaattatatcaacaatattaaactrgggatgcaactttttatgaaatctgctgatcactagtgaagacatatgttactaatgatgcactggcttgccaacttgtttgaaaatgattaaataaagtgttttcatgaatacattaaattaagaggatatagaaaatgtatttgaagaatctgaatcgagtggaaacatatttagttgatgactcatttggtggatatcatgtcaccatggattcatttctttactcttcttttgataaagcagggttcataatgtatatcttttggaagtacattatctatcaataaatctacacatacatttgaatgtcaaatttctcattaaaatcacgtgggtgatctttggatttctcttataaacatatgctcaaatacatagtttt

SEQ ID NO: 446850 - DNA, 640 bp, Homo sapiens
tgctgtcagcttgtctcctgggattttttgcttcaaaacttaaataccttggcattgaagttgcaataatgttaccaatacctcacacttgattaraagtgtatactccctggggctcatggtcaagaatttagacctttctccagctttcccttggcattatgatcaacttgagagaatagtttctctttctggtagtttcaaaaaataaaaataaagtgaaaggtgctgtttaaatggagacagtaaaaagcattttgacacattcctatcaggcctcctcacatttcaccagatgcaaggtgtttctccacagttttctatttccagaatcttctctgacttcaaaaccctgtactctgtgtggacattattgtatgagtgcattgcagcctgctttgttcatgttccttccaagtggtttcttttatattatctatgtaggactttggatttgatctcaaaaaaatgttctatttgggacaaatattttagaactttaaaaaatatatgttttcagatgaaaagtggaggctaagaaaaattaggtaatgtcctcaatattcattagctaattcttgctaggccactgagataagagactcccatcttctgtggtttctaattttggcagatcagc

SEQ ID NO: 446851 - DNA, 550 bp, Homo sapiens
gctgtcagcttgtctcctgggattttttgcttcaaaacttaaataccttggcattgaagttgcaataatgttaccaatacctcacacttgattaaaagtgtatactccctggggctcatggtcaagaatttagacctttctccagctttcccttggcattatgatcaacttgagagaatagtttctctttctggtagtttcaaaaaataaaaataaagtgaaaggtgctgtttaaatgragacagtaaaaagcattttgacacattcctatcaggcctcctcacatttcaccagatgcaaggtgtttctccacagttttctatttccagaatcttctctgacttcaaaaccctgtactctgtgtggacattattgtatgagtgcattgcagcctgctttgttcatgttccttccaagtggtttcttttatattatctatgtaggactttggatttgatctcaaaaaaatgttctatttgggacaaatattttagaactttaaaaaatatatgttttcagatgaaaagtggaggctaagaaaaattaggta

SEQ ID NO: 446852 - DNA, 550 bp, Homo sapiens
gctgtcagcttgtctcctgggattttttgcttcaaaacttaaataccttggcattgaagttgcaataatgttaccaatacctcacacttgattaaaagtgtatactccctggggctcatggtcaagaatttagacctttctccagctttcccttggcattatgatcaacttgagagaatagtttctctttctggtagtttcaaaaaataaaaataaagtgaaaggtgctgtttaaatggagacagtaaaaagcattttgacacattcmtatcaggcctcctcacatttcaccagatgcaaggtgtttctccacagttttctatttccagaatcttctctgacttcaaaaccctgtactctgtgtggacattattgtatgagtgcattgcagcctgctttgttcatgttccttccaagtggtttcttttatattatctatgtaggactttggatttgatctcaaaaaaatgttctatttgggacaaatattttagaactttaaaaaatatatgttttcagatgaaaagtggaggctaagaaaaattaggta

SEQ ID NO: 446853 - DNA, 567 bp, Homo sapiens
ggtgcagtggctcacgcctgtaatcctagcactttgggaggctgaggtggacggatcacttgaggtcaggagttcaagaccagcctggccagcatgttgaatcccagtcactactaaaaatacaaaaattagccaggcggtggcatatgcctgtaatcccagtgactctggaggctgaggcaggagaatcgtttgagcctgggaggcagamgttagagtgagctgagatcgcgccactgcactccagcctgggcaacagagcaagactccatctcaaaaaaaaaattatacaagtagacattaggcaaacactgagagtaaagtaaatatggaaataacatttcatttggtgcctttatctcaaagcatatctttaaagtaactactagcttaaatcctttaactaaacttgtctttttttttagtcatttccaccaagaaataaaaagtctacttttatttaagttatttagattttcaacaaaagttttttgaataattggatgattctttaatattcaaaaaggttaaaaaactgctcaaaattaaatattaatgaatgaaata

SEQ ID NO: 446854 - DNA, 567 bp, Homo sapiens
ggtgcagtggctcacgcctgtaatcctagcactttgggaggctgaggtggacggatcacttgaggtcaggagttcaagaccagcctggccagcatgttgaatcccagtcactactaaaaatacaaaaattagccaggcggtggcatatgcctgtaatcccagtgactctggaggctgaggcaggagaatcgtttgagcctgggaggcagaagttagagtgagctgagatcgcrccactgcactccagcctgggcaacagagcaagactccatctcaaaaaaaaaattatacaagtagacattaggcaaacactgagagtaaagtaaatatggaaataacatttcatttggtgcctttatctcaaagcatatctttaaagtaactactagcttaaatcctttaactaaacttgtctttttttttagtcatttccaccaagaaataaaaagtctacttttatttaagttatttagattttcaacaaaagttttttgaataattggatgattctttaatattcaaaaaggttaaaaaactgctcaaaattaaatattaatgaatgaaata

SEQ ID NO: 446855 - DNA, 512 bp, Homo sapiens
ataatctaccaacactcaagtgatggctgctaacctgaatgtgtctaggtaatagcaggaaacccraggaagtattttctggggtccctaagtgaggagagggcaaatagggaggaccttttagcaaacattgttccagcaaccttattacaaaggacaaactttgtaagattttgacaactacaaacgatctaagttctcctcttgggcaagcagccaccagccagtttttagcattaaaacattgctggttctaaggttgaatagtggagtcaagtgaatttggaaagatcaaattaaaaaatgaaactggggattggggaaagcaagcgggtactaatgagtgggtagcagtgggcttgagccattccctgagactctagaatgtagacccaagcaccttttatgggtacccagttatgtattcatggatgaaaaggaaagtattaaaggtacttagtcaatgtggacacacatattgactttgtcatcttacatatttccaattctct

SEQ ID NO: 446856 - DNA, 327 bp, Homo sapiens
cttttttcccatcatttcacacatttaatgaatttgggtgtcttttacattcaaaacacttacaatcaggccaaaaaaaaaaaaaaaaaactcacccaaaaaaaaaaaaaccctttctttaacacaataggcagtagcaagacagcaaacgccacttcaagactgaatttctgaaactggccctttagctgagagtggccatccttgccggggcgggcgatttactagtttactaacattgttaccaggcagcagccctggcagcattttamtaaatcctcaacaagaaaactcgcaactcgtctgaagtttcagtttgtttgttgt

SEQ ID NO: 446857 - DNA, 586 bp, Homo sapiens
gaagtggcaaaacacattcactggaaaaatgggagatattatttggagtcattatgaaaacaacttgtaggtttttagattttttactctgtttaaatttactaaattaattgttctaagggaaaactatgggtaataaaaggaaaatattaaagaaaaggaaagagattttgcaaagccaaaaacttaactactgataacatccacaaggaattcattcatctctaagagattagcatagccttttacttttggaggtttgacccttaccagactttgttttttgattataaaaacttaccaaatttcttattcctagacttttaacttctgcagggatcatcaatcttgtatgatggatgaactctattattaaaagacataaatgtgactgtacctgcatmgaaaatctgaaatgcaatattgaagcagtagttatcaactttagaaaaacataaaggaaataaaatgaagcattttcattacattattactgatatcatttatatagttctatagatcaattttacactttgatttacccctgtcaatagcaaactttttttcccagatagtttctctttga

SEQ ID NO: 446858 - DNA, 586 bp, Homo sapiens
gaagtggcaaaacacattcactggaaaaatgggagatattatttggagtcattatgaaaacaacttgtaggtttttagattttttactctgtttaaatttactaaattaattgttctaagggaaaactatgggtaataaaaggaaaatattaaagaaaaggaaagagattttgcaaagccaaaaacttaactactgataacatccacaaggaattcattcatctctaagagattagcatagccttttacttttggaggtttgacccttaccagactttgttttttgattataaaaacttaccaaatttcttattcctagacttttaacttctgcagggatcatcaatcttgtatgatggatgaactctattattaaaagacataaatgtgactgtacctgcatagaaaatctgaaatgcaatattgaagcagtagttatcaactttagaaaaacataaaggaaataaaatgaagcattttcattacattattactgatatcatttatatagttctatagatcaattttacactttgatttayccctgtcaatagcaaactttttttcccagatagtttctctttga

SEQ ID NO: 446859 - DNA, 546 bp, Homo sapiens
ccctcccaatttcacttacggtcctacttacatgaaagccatcaccccgcaccacccccccatttatctagacctaaacttggaagtcaccttgtactgcccttcgctgagtctgtctcctaaaggtagagtcctttcccttctcacagccactatccaagttcagtttctcttcatctcatttgtagggtattactgtaacctccaaaatggccttgattctggtctctctcctgcccttgatttttggatttctcattagcttcgcatccctacatacatcctcagctccagccatgccaacctcatgaagatatcttcctcatggtgttctctcaagctctttgccttgcactttctgtcctgccttggctgcattaaaaggggtgcaatacaggaggcagggaaatagtttggaagctaagcaayttgtctgaggtcacatagaaagtaactggtagagctcagatttgaacccatggcttgctgccagtagctttctgagtttgtgcatttatgctgatacagcaattggcatttctcccc

SEQ ID NO: 446860 - DNA, 563 bp, Homo sapiens
atgggcctcacaaaattagagtttatgtttgtttgaaacagtacctgggataaagcttaacctgacacttctctgaagggaaagtttgccagatgcattactagtgtcagcaaaattgaaagaagcatttttcagtcaattatgaaagtaaactgttctcaaacaatcttagcagaaatgctaatttacatacaattgatatgtcacaatcagatttcatctattgctaacatattaccccccagccaataaaagtagtttcttagaagctcccaggagagaagcctctagttcttttactgtgtatatttgaaagtaataaagscttatttctttagaagtgctttcttaatcagacttttccttagtttagccagaacttcacagaaaattagtcttttgctagcgaggcttcctgttacatgaggttttccatttgaacacacgggtgttagtgcaagaaacatcctgtctttcatgtcattcaagtgactgatgaatgtgaaggggcttcttcctcaagtcttctaggtagacagcagaaagcacaataccgagtagcc

SEQ ID NO: 446861 - DNA, 581 bp, Homo sapiens
gtcactctctcccttctcccttgaaaattctcattccagatgggtcctgccccatatccaggaggaaagaaggctacacagggaggccaaaaagaatctgatcagtcagacctcactgggttctgccctcagtctattaccctttggtccaatcacacttctacacggctacccattcttcattgatcctaagcataaaaatagatggttttcccagggtctttaggtcttcatctctgaagtttcccatgtcacataaaactttgattaaataaatttgttaygcttttctcttgctaaccagtcagtcttttgttatagaaatgtcagctgtgctggatgaggaaaggtgtcacatctttctgcccttacaagtgcataaagaggtctgttgcttacaaaatgtctggcgcataataaacattcaaaaaaacaatgtgtcattagcactgtcaggcccggcctattgtggagcgtctgtaaatgcaggtggtgctaagtctgatcacaaaataactgaaatcacagattaccaatgattggtagttgggttgggttagtagtttaagaaattattccat

SEQ ID NO: 446862 - DNA, 476 bp, Homo sapiens
aatgatactaaaccacttatagtttttgttacatctgagctggtaataatttgtataaaatatgtataagrgaataaactgaaaagttaaaagagtaaatctaaagccacgggaatcatgaaagtgcagggcaacttatttatgtgtgtataaaaatagttttctttttattacttccttattacctataaaagacacctatttggatatatacttatttaatcttagcttaaataaaggaaatcagattcctatgttattgtctttgctgcttatgtttactccaacttgtattctccagatttcttgagatttctcaaacctctgacaaagcccacccatatacgacaaggacagaaaccttctttccactgagcaggctaagcagagaacagacaccaacagcgtggttgaggtttgctgaatgtagggatcagggcttggggtagcagaacccagtggggttgggggtatgt

SEQ ID NO: 446863 - DNA, 600 bp, Homo sapiens
tgcctgttatctgtggaatggtgttcttcctgaagctgcacctgttgctagcagggatagatttccattctatcacacgtaatgtcaaaagggttctagggagaaaaattcgaggctccagtyggcttcacttagagacaagcacatcagtggtatgagagagccacactcgggactcaaatacagactgaaagcagatacactgagacttcaccattctccaaaccacctctcccgagctcctcacgattctgacggagacagtaggcttctggttcgtgtagattttagaaaccaacactgtgaaccaaatttcaaagacagcatttaactgattaaatgctggcttgaacacaaggcaaagacaaacacagggcaaaatgtttaagttcatgtcagccttcatttgtatacaaatgtctattgtgcaaataacaaatgatctttgtacatcagaacaggctgtttttggcagatgttcccttggttatctcacaacgggtcagtccttagtttgtgtgtagctatgttccaagctgttcctttgatttgtctcctcactaattaacagtctccccagttcagcgggtactgatgttc

SEQ ID NO: 446864 - DNA, 600 bp, Homo sapiens
tgcctgttatctgtggaatggtgttcttcctgaagctgcacctgttgctagcagggatagatttccattctatcacacgtaatgtcaaaagggttctagggagaaaaattcgaggctccagtcggcttcacttagagacaagcacatcagtggtatgagagagccacactcgggactcaaatacagactgaaagcagatacactgagacttcaccattctccaaaccacctctcccgagctcctcacgattctgacggagacagtaggcttctggttcgtgtagattttagaaaccaacactgtgaaccaratttcaaagacagcatttaactgattaaatgctggcttgaacacaaggcaaagacaaacacagggcaaaatgtttaagttcatgtcagccttcatttgtatacaaatgtctattgtgcaaataacaaatgatctttgtacatcagaacaggctgtttttggcagatgttcccttggttatctcacaacgggtcagtccttagtttgtgtgtagctatgttccaagctgttcctttgatttgtctcctcactaattaacagtctccccagttcagcgggtactgatgttc

SEQ ID NO: 446865 - DNA, 580 bp, Homo sapiens
tgaaaaattctcaccatttaaccttaaaacaccatcagataagaaatgtatatatgcaaagtatttttttttccaggaaaagaaaatagatgtaattcaatctgggttcttaaatttttcagatctaaatgaactttaaaatatgcttggatatatctctgaggaatataaccttaacatttttcagtgttcaacctagactaataataatatcagcaattctggtttggggatcacagaactcacaaaccattcacatctggcacatttcatacccctttcctgattctactgtaagaacagtcaacaggaaatatgttcaccgtaaatgactgtgaggcagtgatgcatgctgcagcttcattcttctgggagagtctgagtttccaccataagaaaagtcagagatgtagttatttcctgtcttcctcttcactgaatccttggacwgtacccattttatgttcttaagtgaaaatgctttcttcactgtgtgtctgaaagtgtacgaagtatgtttctgaacagagtgcctattggatcttctctacaatcatagtagagctcaaaagaactttgt

SEQ ID NO: 446866 - DNA, 610 bp, Homo sapiens
gatagtggggttgttttttttttttttaatggccacatattactctcccctcattgacttctccccttcattctgtatgggcttacaactgcttcagacaataagtatgaagaaagtgactatataacttccgctgctaggtcagagaaagtgacaccgcttctatctcttctagtctcttggactcttgtgcttgaaatacttgctcttaraatgtttcctcttggaacctatcagccgtgctatgagaagcccaagccacgtggagaggccccatacttgtaagtggtttggtcaacagtcccagtaagtccggcttggagcagcccagctaggcatgcgagagaagacaccatcttcaaagtaaatcctccagcctcagttgttccagtcttcccagctgaggccccagacaccacagaacagagacaagccatctctactctgtcttttccaaattctcaatccacagaatctgtaagcctactataaaggctattttatgtcactaaatttggagtagttggttatgctagacaactagagtagtaattttgtcttgggctggcttgatggtataagtggatctaagcaatatatccatggtttg

SEQ ID NO: 446867 - DNA, 338 bp, Homo sapiens
atctgtacagcaaacccctgtgagatgtaatttacctatgtaacaaacattcacatctatcccgaacctaaaataaaatctgaaaaaaaaaaaaaaaaaaaaaaaaaaaaaaaaaaaaagtgtgggtttgctctactaggcaatggtgagcccctgctgggttctgtatgggacatcaagataattgtgcttgtasaggaagtggaccaggcagactgagcggctggggagagaatgaagatctggagatgagttacgtaactattggaatagcccaggatggagaggagatgggcgtccttcaagggctctaggcctctggctccatgcctttcatt

SEQ ID NO: 446868 - DNA, 354 bp, Homo sapiens
ctggctagctggtgagcagcaggcctggctcaggcccctctggtgcccctgatttaggcttcatggccttctctaccctgcaggaattatgctggctcagctgtgcaggttggygactgcaaatatcaacccctctaataggaaaccaggcagatttttctcatgctatcagctgatttttggtatatgtaaataaaacctatgtttttgagagtagcaggaaacattttgttagaaaaccaaatgaatacagggagatatggctatcaggagctgagactgatattataattttccaagtactagtatctgtgtattgatttttacagtaatttgtactttcccatccagctt

SEQ ID NO: 446869 - DNA, 575 bp, Homo sapiens
ttcaatatcgcacggggtggaaacgcccccagtgatattgttcctaatttcaacgtgggagaggatgatactacacggaatgcccctaggggtaaaaacactcctgtgatattgttcttaatatcaaggggaaagaggatgctattactccaaaagtgcagaggatgtgcacccgtctgtgacatagttggtaatttccagggacgaagatattactgacaataacgtgaacactctgtgtgaccaccgtggatcgtcatatccagcgggggagaggggggtgatatgactccccgcatcrcggggggctcatccccttgccatgggagtcctaagagccagggggggataggggctggctcttactccccttaccacggagggggcctcacccccctgcgatggggctcctaagagccaggggcggagaggggctggctcttactccccatatcgcaggaggtgtgtacaacccctgcgatattgggactaatattatcctctccccctgaatataagaaacaatatcacaggaggatgtacaccccctgcgatattggaggtaacatcatttt

SEQ ID NO: 446870 - DNA, 575 bp, Homo sapiens
ttcaatatcgcacggggtggaaacgcccccagtgatattgttcctaatttcaacgtgggagaggatgatactacacggaatgcccctaggggtaaaaacactcctgtgatattgttcttaatatcaaggggaaagaggatgctattactccaaaagtgcagaggatgtgcacccgtctgtgacatagttggtaatttccagggacgaagatattactgacaataacgtgaacactctgtgtgaccaccgtggatcgtcatatccagcgggggagaggggggtgatatgactccccgcatcgcggggggctcatccccttgccatgggagtcctaagagccagggggggataggggctggctcttactccccttaccrcggagggggcctcacccccctgcgatggggctcctaagagccaggggcggagaggggctggctcttactccccatatcgcaggaggtgtgtacaacccctgcgatattgggactaatattatcctctccccctgaatataagaaacaatatcacaggaggatgtacaccccctgcgatattggaggtaacatcatttt

SEQ ID NO: 446871 - DNA, 573 bp, Homo sapiens
ttaggaaatcatgcttatcaatcttgtgatgagtgtgaatataaattcatatgttttatcacatttagacaggcctcttcacaattattttaaaactcacctaagttttcttttaatagcttyattatttcaatgctatatttttattctttgttcagcttggaatttattttgatataaagagcaaagttttgtttttttttccaaacgatttgccgttttcccaagaccattcatccatggccctgcacctcccccgcctggtgtgcaaagcctcccttggacccatgcctgcatattatctgggtctgggctctactccccacagcagcttcactttacaattttgtggagtttgtctcccttaacacctttatcttacatttcttccctgagtcttctcataagtctctctctctttaagtttttgcacatctaaagtgaaagaaacactttaccgtaagtattttaatgtgcttaattgtgtttggtcttcacactgacagagttctggaatcatctgtacagcaggctcatttcaggggccttagacatctgtccatctccatatct

SEQ ID NO: 446872 - DNA, 469 bp, Homo sapiens
acacctagttttgagagttctaatcccagcagcatcactcagtggttggacaaatcccttcacctttctgagcccgtttctaatcgggttgaattagatactctgcatatttaaacaggcttctaagaatctatgaatttggaccctcggtatcctaataagcaggacagacttcatgacagagctacaagatcaccagcagtgatttggggaacctaacgccaaggcctgcgatgcagcctgctctagccaggctcttcctgagccctcactgtgagttccttcacgtagccatgaccatcagctgattggtgttgttaaycaaaaggaagtggtggccttccacctcaagcatatgcacagctataaatgcagagaaggggaagaaacatgaaaaacagtattacagaaaatgaagtcatagcacgctgaggatctgaggagatgttccatgagtagcttggcaatg

SEQ ID NO: 446873 - DNA, 567 bp, Homo sapiens
gttctcccatcttggaggtcagagaaactaactttggcaattgtagttgctcatcaaacctatctggacgtgccttccctccaagactgcagggcagattcccagagtcagcccgcctgggagaggctctgacagttatgtcagttttaaccacataccaggtaccgagcactgcaggcacggtctccattaggtatcagagtgaagccccctgtgactgctccatttacaaaagaagagcttacaaataaagaagggggacttgaacccagtggggcctcagacccttactctcaacycgtagctacaaaaatattcgataaatgtcactttgaggcagtgtatccaccacataattcatatattgttagcatttaagatgaaaacaaccacaacattctgcctctaccaagcaaagcctaaggagcttggtaaggagcagcaagaggtcatgcatggtttcccaaagaggctgtggcagagccagccctgaaagccactctaagaacaaacgcactgcagggtcatggaagtgtaggaccactggctgagactgactctctcaga

SEQ ID NO: 446874 - DNA, 510 bp, Homo sapiens
ttgaccatgggaaaataaagatttatcagttaagacaaaccaatggaggggagaaatgaaaggtcatatgttgaacattcaaatgctacttatagtcaggcagagtatacttaagtaaagcaatatttaaactgtggatattcctaaatctctgccctgggccctccttctgttgaatttactttctctccctagttcacagtatccaggtcgagagcctccctcaccctgctyggtagacctgcagcttgcctgcaaggttttcactcaggtcaagacatctctcatctgcatcccaggctaaaagcccactgtctcctcacacttatgctcccttccagcgctccaggacagcagtaactggaagcgcctctccagctcagagccaggatcccagtttcagagctagacacctctgagcagaggaccagaaagctcacagtactcctcagtaatccagtaatcatcaacattcttaactgtcctcgcttgctccaccaccatctgcct

SEQ ID NO: 446875 - DNA, 510 bp, Homo sapiens
ttgaccatgggaaaataaagatttatcagttaagacaaaccaatggaggggagaaatgaaaggtcatatgttgaacattcaaatgctacttatagtcaggcagagtatacttaagtaaagcaatatttaaactgtggatattcctaaatctctgccctgggccctccttctgttgaatttactttctctccctagttcacagtatccaggtcgagagcctccctcaccctgctcggtagacctgcagcttgcctgcaaggttttcactcaggtcaagacatctctcatctgcatcccaggctaaaagcccactgtctcctcacacttatgctcccttccagcgctccaggacagcagtaactggaagcgcctctccagctcagagccaggatcycagtttcagagctagacacctctgagcagaggaccagaaagctcacagtactcctcagtaatccagtaatcatcaacattcttaactgtcctcgcttgctccaccaccatctgcct

SEQ ID NO: 446876 - DNA, 510 bp, Homo sapiens
ttgaccatgggaaaataaagatttatcagttaagacaaaccaatggaggggagaaatgaaaggtcatatgttgaacattcaaatgctacttatagtcaggcagagtatacttaagtaaagcaatatttaaactgtggatattcctaaatctctgccctgggccctccttctgttgaatttactttctctccctagttcacagtatccaggtcgagagcctccctcaccctgctcggtagacctgcagcttgcctgcaaggttttcactcaggtcaagacatctctcatctgcatcccaggctaaaagcccactgtctcctcacacttatgctcccttccagcgctccaggacagcagtaactggaagcgcctctccagctcagagccaggatcccagtttcagagctagacacctctgagcagaggaccagaaagctcacagtactcctcagtaatccagtawtcatcaacattcttaactgtcctcgcttgctccaccaccatctgcct

SEQ ID NO: 446877 - DNA, 553 bp, Homo sapiens
atccagaagtagtggaaaatgttaaaaccagcaaagcaagagtagaaaagtcagggggtagctggaaaaaaatctatacagggaaagttgagaaagtaaaaattagccatcacttaggcttagataactgacacaaacccagctggttgcaaagttaacaggaaataatatttcttccatggacagactgcagctgtaaagggtgacagtaacccctcctgtaagtaacttctgctctgtttctctaaaatggtagactgtcagaaactatgctgtttgaaattatattacaaagatgagacatccactcttacttgaagtacctctattttgatcggtatgattgaaaattcagtaaaatcttgctatttaagactccctaaagagagaggaactgcccttctaattactggaaagtgtgaagtattgaacaacataaaygcactttccttttaaaagcaaaccgtagttcagtggagtctaatacagactcagtccctcagctgcagctctaaaaagctctgaaaaacaacactttttttttttttggtaa

SEQ ID NO: 446878 - DNA, 526 bp, Homo sapiens
gaatattcatgttcttaaatgtaaaagtacagaaatattaatgcatggaattacaggattctctccagactatattggaatggcatgtaaccagcagggtcaacatgtatgtttacctttctaaattctgagcaatgtctttctcagttctgaaatttagattctaaattttaattccaaattctgaaaaagcttgaattccaaaatacgycttggcacaagcatattggattataaccatgggcaaacaatgtgctaaataagtgaagttctactaagaagtcttccattaaaaaaaagcagagagattagacctgcatttagaatattaaataggggcctaacaaagatcagggtgattcatttctaaagtgaaatctagcaataaaataacgtttctaccaatttcatctctcaggaaagataaagacctaaagtatacaccccatttttatcctagcttaaaactttctagttattaagactattataaaatcctattttatatttcacttcaaatacagag

SEQ ID NO: 446879 - DNA, 468 bp, Homo sapiens
gacttcctcgcgctgtgcctgatcccaatcccgcgtctcccgagggccgggccgcgaccgcactttccgcgctccctgggggcctgggcgccctggggtgcccgrgtcactttccgcacggtctgacctccgtcccctccgcccaggcctgagcccctctctcccggcgcagcttctggatcccgagcgcgggtaggttcaggagcgaagctggcggaacccacctgtattttattcacatggtttcagcacttttacctcggccgatgaaggtagaacaagaaagggcatgaaagcagcgcgtcgttccccgtaacctcctctccttaccagaaagtcccggccgggtaggggacgcggccacacctacctgcgccaggtgaggcgagggcgggcgcagcgcggggccacccgctcctcctcgctctccagccgccgccggggtggcctcagccgccgggcccgcgg

SEQ ID NO: 446880 - DNA, 465 bp, Homo sapiens
tgttaaaagaaaacttcagcagaattaaatttaaagcagtttaattgagtaatgaatgatttgcgaatggggcagcttccagaatcacagcggattcagagactccagggatgcctcatggtcagaacatatttatagacaaaaaaagggaagtgacatacagaaattgsaggtaaggcagagaaacaactggattggttacaggttggcttttgccttctttgaacacagtttgaacactcagcagtgtatgaatggttgaagtatggccactgggattggccaagactcagctattgttaaaggcacatactcctaaattaggttttcaatcttgtctgcctattaagctaggttacagttcatccacaaggactcaaatatagaatacagagtccttctcagatcatacttaggttgctttaacaaacataaatggaagattttgataatggttatatttgc

SEQ ID NO: 446881 - DNA, 551 bp, Homo sapiens
gactcaaacttcttaatttcaaagcttactacaaagttgcagtactaaaaactctttagtacttgtaaatgcctgatgggttcttcctgcttactgcacaggcaaaaccaatttattgagaccacaccatcacaataaaagagtttaattgacacaaggccggccacaccacatgagagatgaagttactactcaaatcaatctcggaaaatttggaggctaggatttttcaaagatagtatggcaggctaaggagtctgtttctgggtgggagcacatgactggtccgtagggttggtggggtcagggaggtcagtggggtcagcagggccagcagggtcagcagggttggtggatccaggtgaagccattggttgtcagaaattcaaaaacctaaaaggtatctcaaaaagcgaatcttagtttctgcaayggtgatgttatctgcaggagtaattgggaaacttgcaaaacttgtgacctctaaataatagctggtaatcatttatgtctacaccttagcagaattcaggctcctcacaccctcctaa

SEQ ID NO: 446882 - DNA, 611 bp, Homo sapiens
gagacctgcctgggcaatataaagagaccccattcttcacaaaaaagaaaaaaagtgcttaaaaaagttctaatattgatagtgatgatggttgtacaactttgtgaatacacttaaaacaatttaattgtatactttcaacaagtaaactggatgttatgtgaattatatcttttgaaaacttaaaaatggaacygcactttgaaaaatataaaaaagaaaaagaatgaaaagatcttggtatgagaaaaaccatctaattttcactacagtgaaaaataacagctgaactaccttctaattatataattatattttaaaagagtactctgttaagcaaatgattagctacccattgaaatagatgaaagggaggagttatttttgagcataagttttttccatccttttgaatctccagtggcttgggtcatgtctggcaagtaaaggaccctaattcaattattgaattgtttgctccctggaatttcacaaaaaaataaggaatcaggtacacagaggaaacttgacttgctcagagctgcacacctacaaaaagtagcagagctgagactactatggcccgtgcttcctgacccgtggccagtgca

SEQ ID NO: 446883 - DNA, 566 bp, Homo sapiens
  misc_feature (1)...(566): n = A,T,C or G
tgctggtctatcaaaattaacttcccttcataggacacaatagggttgttactttttttttaaaggtatacctacatatgaaaataattaattttatctaaatttaatgtaatatgcataaaaatacacctgatgctgtcctaactatgcaatattctcctttgtgtgtcaataaaagtgtattatttcaatacatggagttggttattattttacttgcaacctaaagcaccttaacagatatatcatgygtaacttgtgtatttttttaatttagaagagacaaaaatgaggaccttacattctaaatattaaaatgtgcaatcacatgagtccaggagtttgagaccagcctggcaacgtggtaaaaccccatctngtacgtaaaaatacaaaaagtcccagctactcaggaggctgaggtgggggaatcacttgagctggggaagccaaggctgcagtgagctgtgattgcgccactgcactccagtctgagtgacagagtaagaccctgtcacaaaaaaaaaaaagtacagcgtatattctatagtaaaaaacatgtgggc

SEQ ID NO: 446884 - DNA, 424 bp, Homo sapiens
caacgacccacattaattgggggaatgagctgaaactcacagatgcccccaacctcgctggacagagtaagctcagccttctccctccctcaatgaagtgcgaagcctgcatgttcctcacagtctcacattggaaggaggggcccagtttgtgcaacacaactccagctaarcccacccccaccattcccacgctcaaaggttatagaaaatcaagctcaaaaggaatattaagccgtcatatgtaatccagaaaaggggtaagaaaaggctctgacatgaggatttaggagctgccacacacaaaggggcagagcaaagtgaaagtctgaagaaagctgccaagtatggacaagatgaaatcaatgaactagcagctatgcaaaccttaaaagaaaataacatgcacaaattaaaaataaaa

SEQ ID NO: 446885 - DNA, 506 bp, Homo sapiens
tgggacctgtctacctgaccaaactttatttgccccaataggcatggaagacaggaagaggcagggaaggggatcctgtagcagccaataaggaaaggagggggcaaactgtgttactgaaggggagacctgagtctctgagctgctggagagctcacccagcagtggaacactgaagaaaaatgttcaggcagcctctagtctgccactgcaggaagctgtttgtcagrtaaaggatctaagatccctagtaaacttacttgagcaaagcagctcattggggctagtggaagaaggttagctctagaattgatggagagttttttctctctgtcagtagggacagttaggacagtctcattgtcaacagcccttttgttcatagtaggcacattgattctgacccaggggccagtcagtttggggctctcatctgggcattccagacactgatcttgtgacactttcttgggatgggtaaccctgaggaggaagagggcttaaag

SEQ ID NO: 446886 - DNA, 595 bp, Homo sapiens
aacggcggcactgaggaggctccagggagggcataggccttctgtgagagcagctaggaatgccacttgatgcagggcaggccagtcccaaaactggggcttagcctgggaaaattgttggcttcactcaggaaaggtttcaagaatgagctggtggtagaaaaaaatggcttttattggggcaacagtgttacagctctgtgactgcctctgcagaaccaggatacctcaaaggccgtgtgtttgagtagcagttcagaggcagttctccagttatatttatacatacttttaattacatgcaaattaaggggtgggttactcagaaatttctagaacagaagtggtaacttccaggtgttggcayggcagtcgtaaaccatcatggtgctggtaggcatgcctcttccctgtttcaaccagtcttcaatctggcccgaagtgaaatcccacctgccacctcacctccagtggtgtctgcagtgacattttgttccctctttcaaaatcgttttcaatggggtctcttgtgggtggggcattaagcacaagtgctcagccaactgcactgaaccagaaattctgcatctgtgct

SEQ ID NO: 446887 - DNA, 583 bp, Homo sapiens
tcagggctatcgggatcaaagggagtatacatacaataggcctcacacagcctctcgtagaattgtgctggactttcttcttttccctgaatgacctcagagacctttttaacatttgtggccttctgagctcccctcattaatccttccaagagagcttccctgtctcggtttagcctttgcatatcctctctttcatgtgggtccaactgggggtcggttcctggtaactgggtccttacatactcttgggggttttgataatcagctgrtgcatgttcctctagccacttagttgctgcttggggactctccgcctttcttcgctgttaaagaggaacatgagcaacaggtgccaatcagcccaggtgtggttgtgggtctggataacagtttggagcaaatcaattagggcttgtggctttttggtatagggcggtgtattggttttccagttgagaaggtcgacgcaggtgaagggctggtacccaaaaacacgcctctccaccacgtgaccatcctcatctatcccagtataccgctgctctctcaggggcatttgtatccccgttttgggtcgtaa

SEQ ID NO: 446888 - DNA, 552 bp, Homo sapiens
cttactggcatgtttcaatcttctcttccaactagacttccatagtccatttcccctatgccaggactaargctgactatacaacctttgccctttaaaatgcatttagttgggaaactatcatttgtgtagttctaccttatcaggcagcaactttatagatgaagagcaatagatccatgcttgccaccataagtacaatgtttcagataccctttcagctaattaagaaatgatgtttctagggcagtctgactggaagattaggcacagatgctcacacctgagcaagcagctgaacaagctgtccagagcccattcttctggcaggggaaaatttcatcccctacagaggaacagccagcatgaatgccaacatgatgaaggggggctgagctctataggcccacctgacactaacactcccagctccctgtcccaccttagagttttagttctgtttttttgtctatattccccaaagccactagaatagacactccattagtgtaagtacgtttacattttgttctctactgcctggaacagagg

SEQ ID NO: 446889 - DNA, 552 bp, Homo sapiens
cttactggcatgtttcaatcttctcttccaactagacttccatagtccatttcccctatgccaggactaaagctgactatacaacctttgccctttaaaatgcatttagttgggaaactatcatttgtgtagttctaccttatcaggcagcaactttatagatgaagagcaatagatccatgcttgccaccataagtacaatgtttcagataccctttcagctaattaagaaatgatgtttctagggcagtctgactggaagattaggcacagatgctcacacctgagcaagcagctgaacaagctgtccagagcccattcttctggcagrggaaaatttcatcccctacagaggaacagccagcatgaatgccaacatgatgaaggggggctgagctctataggcccacctgacactaacactcccagctccctgtcccaccttagagttttagttctgtttttttgtctatattccccaaagccactagaatagacactccattagtgtaagtacgtttacattttgttctctactgcctggaacagagg

SEQ ID NO: 446890 - DNA, 566 bp, Homo sapiens
ccatcctgaggcctgcctgtgcatcacactgcacagggtgcctggtctccaaggcacagccttacattgtgcacattctgctgagcggttgactctcccatatttgcaggcatacatgggggacttcttagtatatagagatacacaattcagaaacacaaagtgaagctaaggatggtagcatgaggcatgatttttactaatgtttagaaatagagggatattgaaatacttgaaaacattatccaaaccttcaacaccaaattctcttgctgtgccttcagaacttaaaagattgaaagtgcatcaagtaaaggctgatctatctcaaccaacacatagacattttcaagctctgcaaaagacactcagaaatctcttctctatgcccaccttgccataattaacacagaaaacagatattaygctttggtgttaacattatgttaatataaatgttaactgtgtagttataaataaacaaccagcccatctggtgcatttaatttacaatctaactgattgattcattcaatatgcttgttgagcatctatcacgtgcaagt

SEQ ID NO: 446891 - DNA, 535 bp, Homo sapiens
ttcacccacaatatccctatggaggtaggtgtggtagtttaggggtaaaggaggagaaccgagaggatgtcaatatccagaggattgcaagcaaggtcctctctggacaatgcctcatttgggaacctggcagatccagaaactagctatcattagtatgtccagtggtgacaaactcaattactaaatgaataggccatctgttctgacacattggtcagagtatcaatgtatttatttgtctggkagtattcatacctaatgtggagttggttcaacaagcatttcttgaacacctaatatgtgctaaggccatggaaacaaagatatagaagaggacatagtctttgcactgaaggaactttcagagtgtcaatgcttgccgctgaggaatatgatgagtgctgggggggatggtgagtcagggacaatctgaaagtgagtcacaccccagtacagacctacttgctggggcactctcatctagagcctacctatgggatagacggaaagacactgaactggctgcccagga

SEQ ID NO: 446892 - DNA, 497 bp, Homo sapiens
gtgattcttcaaaatgaataggctttgcgagatagttcagacccgcgaccagcctatttccttgaataatttacttgttgtcaatttgtacagccacattacacatgcaaattgtgctgcctgtgcaaacaccacttggagatgataaaaacaaatttacgaaggctatagaagaaggatttatttcactttctcacccaggtcaagcaatacatgtatctgacgattgtgtgtacccaattttgttgtaattatatcagcaaattattccttataatcttattatttttagcagtctccttgtgcttgggataattagctttcttcactcagtgtaaamacaattcaacttgccagccaggtagggcatagctccattatctgttttgggtttaaatttattccctatattcttggacactttgtgtaaattaaaaatttcatagtccctaatactgtacatgctgttcattcagtgatgaattaaggcccctaaa

SEQ ID NO: 446893 - DNA, 497 bp, Homo sapiens
gtgattcttcaaaatgaataggctttgcgagatagttcagacccgcgaccagcctatttccttgaataatttacttgttgtcaatttgtacagccacattacacatgcaaattgtgctgcctgtgcaaacaccacttggagatgataaaaacaaatttacgaaggctatagaagaaggatttatttcactttctcacccaggtcaagcaatacatgtatctgacgattgtgtgtacccaattttgttgtaattatatcagcaaattattccttataatcttattatttttagcagtctccttgtgcttgggataattagctttcttcactcagtgtaaacacaattcaacttgccagccaggtagggcatagctccattatctgttttgggtttaaatttattccctatattcttggacactttgtgtaaattaaaaatttcatagtccctaatactgtacaygctgttcattcagtgatgaattaaggcccctaaa

SEQ ID NO: 446894 - DNA, 612 bp, Homo sapiens
agtgacatataaatggtcaggtctgagcaggtcccaaaagcacaagtaagttgcatgaagaagtggcccaaatgtctatggttcccactcctgctacactgccttctctctcgcagcctgtgaatgcatggggagttccctatgaccagttgacaaagaaagagaagtttgtagcctagtttacagatggttctgcacaatatgtaggcactacccagaagtggacagctgcagagggctgtagagcccttctctggggcatccttgagggacagtggtgaagagaaatcctccctgtgggcagaactttgggtggtgcatccggttgtgcactttgcttggaaatggctggaaatggctggatgagcaattatataccaactcatgctcagtagtcaatggtttggctagatgtttaggaaagaaacacgatggaacaataagtggcagagaagtctagggaagaggtatgtggctagaactctctgaawgggcaaaaaacatggatatttgtgtcccacatgaatgcttaccagaggatgacctcaccagagaaggattttaacaatcaagtcaataagaagacctactttatggatacctcctgcttct

SEQ ID NO: 446895 - DNA, 510 bp, Homo sapiens
cctccactttcaatttttaattaaaaattcattgctttgaaagacatctaaacacaaattccsctcattttgtggcttataagaactttgaaattggtgcattgttgtaataatcccattcaaatgattctattttgttaggaaaggacaaagtgtttttgatctggagaattttaggagaattatatttgaggttttcaaataaataaatatttaggggttcctgccagatgggaagtgaccagagctgtcagtgcttctttacaaagagcctccagcttatgtgctgtttgcaatgagagtcccagccacacacactgcatgctcacacatgttccatgtccccattgcagggcagtagtgctgccactgcccgggcagggcccaggggccacaatggtgcaggctgaggccaccctgaagactccccattatttggccacaaagaggttttcttgcaaggctagacttgagagtctgagtctgagtctgagtctggcccccagttgt

SEQ ID NO: 446896 - DNA, 545 bp, Homo sapiens
tacaatcttaactacttctcaaggttgcatctttctttccatctcattccacctcacttttttttagattggttttgtcctgtcattgtgcttacccagactgacttgtargagggttccaatatttctggttttctttgcctagatgtggccaaatctctccaatttttggtttgcctgacatgagtcagaaatatttcaaaactatcttcacatactccattaaggagtgtcttttatcctgggtcacacctcccatgccctcagtcacagatggcgcaagtgacatgatcttttacggccacacatggtaaatggtcatgcatgtaggaatccctaggttaaaatacagattcttgctcaggaggccccagggtggggccaaaattctgcattcctaacctgccccgtggtgaggctggtattgctggtctacaggccacaaacattgagtagcagactaggttttacacatctcatttctttcagctgcacaaggtgtatgaaatgctataatactcaatctcctagactgaaacaatttt

SEQ ID NO: 446897 - DNA, 551 bp, Homo sapiens
ttgaattccactctttagaacctttagtcatgtgccattttcctgtgactctcaaaaaaacaaatacaagggagactgagcagtcactgataaacacggataactgctgccacttactgtgcagcctgcaaaatggagttgcccgtgtaagcagcagcccagttacagatcagccaatatggagtggctgcttagtgacttttgctttggactcatgtttcaaaacagtctttctattcatagcatatacttgtcattcacaaagtttccaactggcaccatgttaggcctcctgttattcttgttttggctgctgtggagaatgattctctataagtgtctcttacttatgcctttcagagcgtatttctttattttaaggcagataatccyaagttaccctttaactgtgaaaattcactcagcctgtctccagaaacgtggaatatcagagaaacagaaacttaaatttgtttagcatagattatagccaagtccatataacagccaatgtattaattcataagctttcattttttttaccctgcaac

SEQ ID NO: 446898 - DNA, 600 bp, Homo sapiens
tgctctctctagcaaacggacaaggtaaggggtggcctaccaagaaagaacacttttggtgaacaatcactccgctacagcatcacagaaaacgtggaagtccaggtttaccacttggcctttgctgtcatggatggggatggggcccattcccaccaggctgcaaggaaaacacccaaaatccacccccatccccactggagtggtgttagagatggctatgtagctgggactttcatccctgccaggtgataaggagctcccccacccccaaccccatcatgtccatgtgaaatcagtgaaggccatatgggaagcctgaactttagcccccacttaagagtaatgaaatgcccctattccctgactccattggaatggtatcagaggggacctgaataatcaggaattggagaccaccrcaccctggggtgtcaatagtggcctaatgaggaatgagaactctcacacatactagccctaacaaggaacctctcccctccaagttgggtatcaacagaggccaagagggaactggatttccacccctacctgaccaataggaggtgaggccctctcttcaaaatggttcatcattcc

SEQ ID NO: 446899 - DNA, 598 bp, Homo sapiens
aacaataggattacctgacctgaacaaaggagaaaaattagacagaaaataaatgagcatagcttcagagtcatatggaacactgataaaagatctaatatttgtgccactrgaattccagaaggacaggaaaaagagaatgaagttaaaaaaaaaaaaaagtactggaagagtgactgactgaaaacatcccaaatttggctaaacacataaattttatgttcaagaaacagagtgaactcaaaacagaagggccccaaagaaatctacatcaagacacatcatagtcacacttcttaaaactaaagatagattttaaaatcctgaaagcaatgagagagaaacaataccttacatataggaggaaaacaatgctagtggtaatgaaattcttaacagagaccacggagaccagaaggaagtggcataaccttgttcaactgctgaaagaaaataactgtcaacacagaatcctatatccagaaaaaatattcctcaggaatgaagggaaaatcaaaacattttcagatggagaaaaactaagagaatttgttgccagcagacctaccctaaaagaatagctaacagaagttttcta

SEQ ID NO: 446900 - DNA, 598 bp, Homo sapiens
aacaataggattacctgacctgaacaaaggagaaaaattagacagaaaataaatgagcatagcttcagagtcatatggaacactgataaaagatctaatatttgtgccactagaattccagaargacaggaaaaagagaatgaagttaaaaaaaaaaaaaagtactggaagagtgactgactgaaaacatcccaaatttggctaaacacataaattttatgttcaagaaacagagtgaactcaaaacagaagggccccaaagaaatctacatcaagacacatcatagtcacacttcttaaaactaaagatagattttaaaatcctgaaagcaatgagagagaaacaataccttacatataggaggaaaacaatgctagtggtaatgaaattcttaacagagaccacggagaccagaaggaagtggcataaccttgttcaactgctgaaagaaaataactgtcaacacagaatcctatatccagaaaaaatattcctcaggaatgaagggaaaatcaaaacattttcagatggagaaaaactaagagaatttgttgccagcagacctaccctaaaagaatagctaacagaagttttcta

SEQ ID NO: 446901 - DNA, 598 bp, Homo sapiens
aacaataggattacctgacctgaacaaaggagaaaaattagacagaaaataaatgagcatagcttcagagtcatatggaacactgataaaagatctaatatttgtgccactagaattccagaaggacaggaaaaagagaatgaagttaaaaaaaaaaaaaagtactggaagagtgactgactgaaaacatcccaaatttggctaaacacataaattttatgttcaagaaacagagtgaactcaaaacagaagggccccaaagaaatctacatcaagacacatcatagtcacacttcttaaaactaaagatagattttaaaatcctgaaagcaatgagagagaaacaataccttacatataggaggaaaacaatgctagtggtaatgaaattcttaacagagaccacggagaccagaaggaagtggcataaccttgwtcaactgctgaaagaaaataactgtcaacacagaatcctatatccagaaaaaatattcctcaggaatgaagggaaaatcaaaacattttcagatggagaaaaactaagagaatttgttgccagcagacctaccctaaaagaatagctaacagaagttttcta

SEQ ID NO: 446902 - DNA, 605 bp, Homo sapiens
gagcaaactaaacccaaagcaagcaaagacaagaataaaaatcaatgaaattgaaaacagaaaaacaacagagaaaaatcaatgagacaaggagctgactctctaagagataaataaaactgacaaacttatagcaaggttgacaaagagaaagagaagacacaaattaccagtatcaggaatgaaacctggaatatagctctacagatcctgaaaacatctaaagggtagtaarggaatacagcaacaacattacatacataaatgtcacaattcagatgaaacagaccaatgacttgaaaaaacaaacatactacaacttgcccaatatgaaatagataatttaaacagccctgtaactattaaggaaattgaactcataattttaaaattcccaaaagagaaatctccaacccagatggtttcactggaaaattctgccaaatgttttaagtattaacatcaattctacacaatatcttttaaataatagaaaagaatgaaatgcttcccaatttattttacaaagctaatattaatcttatagcaaaaccaaagacagtacaaaaaaatgaaaactatagactaatattcttcataagtag

SEQ ID NO: 446903 - DNA, 605 bp, Homo sapiens
gagcaaactaaacccaaagcaagcaaagacaagaataaaaatcaatgaaattgaaaacagaaaaacaacagagaaaaatcaatgagacaaggagctgactctctaagagataaataaaactgacaaacttatagcaaggttgacaaagagaaagagaagacacaaattaccagtatcaggaatgaaacctggaatatagctctacagatcctgaaaacatctaaagggtagtaagggaatacagcaacaacattrcatacataaatgtcacaattcagatgaaacagaccaatgacttgaaaaaacaaacatactacaacttgcccaatatgaaatagataatttaaacagccctgtaactattaaggaaattgaactcataattttaaaattcccaaaagagaaatctccaacccagatggtttcactggaaaattctgccaaatgttttaagtattaacatcaattctacacaatatcttttaaataatagaaaagaatgaaatgcttcccaatttattttacaaagctaatattaatcttatagcaaaaccaaagacagtacaaaaaaatgaaaactatagactaatattcttcataagtag

SEQ ID NO: 446904 - DNA, 602 bp, Homo sapiens
ggactaatatctagaatatataaagtratctcaaaactcaacagtgggaaagctagcaatcaaaatagaaaatgggcaaaaggcatgaatagacatgtcactgaagaggacatacagatggaaaatgctaaaattaaaatataacaacaccaaatgctggacatgatgtggagaaattgggtcactcatacattgctgatgggaatgctaaatggtacaaccattcaaccattctgaaaaaccatttggcagtttcttaaaaaaggaaacatgcactaccatcttcagcaattgcactcctgggcatttacaccagagaaataaaaacttagattcacactaaaacctgtcagtgaatgtttatagtagttttatctgtaatagccaaaaactgaaaacgacccagatattcttcaacaggtaactgtggttcatccatttcatggactattacttggcaataaaaagtaatgaactcataaaacacaacaatccagatgaattgccagagaattgtgtttagtgaaaaaatccagtcccaagagattacatattctatgatttcccttgggtaacactcttgatgacaaaattataaaaat

SEQ ID NO: 446905 - DNA, 602 bp, Homo sapiens
ggactaatatctagaatatataaagtgmtctcaaaactcaacagtgggaaagctagcaatcaaaatagaaaatgggcaaaaggcatgaatagacatgtcactgaagaggacatacagatggaaaatgctaaaattaaaatataacaacaccaaatgctggacatgatgtggagaaattgggtcactcatacattgctgatgggaatgctaaatggtacaaccattcaaccattctgaaaaaccatttggcagtttcttaaaaaaggaaacatgcactaccatcttcagcaattgcactcctgggcatttacaccagagaaataaaaacttagattcacactaaaacctgtcagtgaatgtttatagtagttttatctgtaatagccaaaaactgaaaacgacccagatattcttcaacaggtaactgtggttcatccatttcatggactattacttggcaataaaaagtaatgaactcataaaacacaacaatccagatgaattgccagagaattgtgtttagtgaaaaaatccagtcccaagagattacatattctatgatttcccttgggtaacactcttgatgacaaaattataaaaat

SEQ ID NO: 446906 - DNA, 602 bp, Homo sapiens
ggactaatatctagaatatataaagtgatctcaaaactcaacagtgggaaagctagcaatcaaaatagaaaatgggcaaaaggcatgaatagacatgtcactgaagaggacatacagatggaaaatgctaaaattaaaatataacaacaccaaatgctggacatgatgtggagaaattgggtcactcatacattgctgatgggaatgctaaatggtacaaccattcaaccattctgaaaaaccatttggcagtttcttaaaaaaggaaacatgcactaccatcttcagcaattrcactcctgggcatttacaccagagaaataaaaacttagattcacactaaaacctgtcagtgaatgtttatagtagttttatctgtaatagccaaaaactgaaaacgacccagatattcttcaacaggtaactgtggttcatccatttcatggactattacttggcaataaaaagtaatgaactcataaaacacaacaatccagatgaattgccagagaattgtgtttagtgaaaaaatccagtcccaagagattacatattctatgatttcccttgggtaacactcttgatgacaaaattataaaaat

SEQ ID NO: 446907 - DNA, 602 bp, Homo sapiens
ggactaatatctagaatatataaagtgatctcaaaactcaacagtgggaaagctagcaatcaaaatagaaaatgggcaaaaggcatgaatagacatgtcactgaagaggacatacagatggaaaatgctaaaattaaaatataacaacaccaaatgctggacatgatgtggagaaattgggtcactcatacattgctgatgggaatgctaaatggtacaaccattcaaccattctgaaaaaccatttggcagtttcttaaaaaaggaaacatgcactaccatcttcagcaattgcactcctgggcatttacaccagagaaataaaaacttagattcacactaaaacctgtcagtgaatgtttayagtagttttatctgtaatagccaaaaactgaaaacgacccagatattcttcaacaggtaactgtggttcatccatttcatggactattacttggcaataaaaagtaatgaactcataaaacacaacaatccagatgaattgccagagaattgtgtttagtgaaaaaatccagtcccaagagattacatattctatgatttcccttgggtaacactcttgatgacaaaattataaaaat

SEQ ID NO: 446908 - DNA, 616 bp, Homo sapiens
atattgctaccccttctgttctttttactttacctcccatctcaatggcctgctgtgattgctataaacacttctgagttattaaatctttagatgttattgtaagaacrtgaagacttctatggtataatgatcaattatatttataggcagtatttaccctaaatagaaataaaatctgaggaaaaacatacttcaaagtggctgggcgtggtggctcacgcctgtaatcccagcactttggaaggccgaggcaggcagctcacaaggtcaggagattgagaccatcctggctaacagggtgaaaccccgtctctactaaaaatacaaaaaaaaattagccaggcatggtggtgcgcgccagtggtcccagctactcaggaggctgaggcaggagaatcacttgaacccgggaggcagaggttgcagtgagccgagatcacgccgctgtactccagcctgggcgacagagcgagactttgtctcaataaataaataaataaatacatacatacatacatacatacataaaaataaaaatacttcaaagcattgaaagataataattctgatgtagctgattatgatacattgaagtgaagcttttatcgccctc

SEQ ID NO: 446909 - DNA, 616 bp, Homo sapiens
atattgctaccccttctgttctttttactttacctcccatctcaatggcctgctgtgattgctataaacacttctgagttattaaatctttagatgttattgtaagaacatgaagacttctatggtataatgatcaattatatttataggcagtatttaccctaaatagaaataaaatctgaggaaaaacatacttcaaagtggctgggcrtggtggctcacgcctgtaatcccagcactttggaaggccgaggcaggcagctcacaaggtcaggagattgagaccatcctggctaacagggtgaaaccccgtctctactaaaaatacaaaaaaaaattagccaggcatggtggtgcgcgccagtggtcccagctactcaggaggctgaggcaggagaatcacttgaacccgggaggcagaggttgcagtgagccgagatcacgccgctgtactccagcctgggcgacagagcgagactttgtctcaataaataaataaataaatacatacatacatacatacatacataaaaataaaaatacttcaaagcattgaaagataataattctgatgtagctgattatgatacattgaagtgaagcttttatcgccctc

SEQ ID NO: 446910 - DNA, 616 bp, Homo sapiens
atattgctaccccttctgttctttttactttacctcccatctcaatggcctgctgtgattgctataaacacttctgagttattaaatctttagatgttattgtaagaacatgaagacttctatggtataatgatcaattatatttataggcagtatttaccctaaatagaaataaaatctgaggaaaaacatacttcaaagtggctgggcgtggtggctcacgcctgtaatcccagcactttggaaggccgaggcaggcagctcacaaggtcaggagattgagaccatcctggctaacagggtgaaaccccgtctctactaaaaatacaaaaaaaaattagccaggcatggtggtgcgcgccagtggtcccagctactcaggaggctgaggcaggagaatcacttgaacccgggaggcagaggttgcagtgagccgagatcacgccgctgtactccagcctgggcgacagagcgagactttgtctcaataaataaataaataaatamatacatacatacatacatacataaaaataaaaatacttcaaagcattgaaagataataattctgatgtagctgattatgatacattgaagtgaagcttttatcgccctc

SEQ ID NO: 446911 - DNA, 622 bp, Homo sapiens
gtatcaccatgtgtcagcaggacttgaacctgtgttgtcagcatttggaggagcccgagaatcacagctctgctgcagcctctgggttggccacttaggaaccatctagaataagcgctctagcctggaaatccatgttgtcactatgagtcctgcccgtggaggacagtgatgaatttccccttcagagtgayccctggggagaggagccagagtggactgcctgtgtctgtttgtgggagctcattcaaaaaccctctgaggtcccccagatggagctgcacactgaggggccccaggtattatgtaggtgggacaggagcaaggtcttgtgtggtttattcattagcgtggggccatttgctccctcaagctggtaaagcctgagaaaattaaggctcgtgtttttattttttttaattattattaaaaagtatgtattgcctaaggacgtaaaacaatgaaactgttttctaaaacccctttttaaatgaccttcctgagaccagaagatgaagggagaagtagaagtggaaaatgggttgggagtcttttctgactgtgttttgaggacaggatatccgcatgccaagcccgtgggtgagaaaagaggcaaaaggca

SEQ ID NO: 446912 - DNA, 622 bp, Homo sapiens
gtatcaccatgtgtcagcaggacttgaacctgtgttgtcagcatttggaggagcccgagaatcacagctctgctgcagcctctgggttggccacttaggaaccatctagaataagcgctctagcctggaaatccatgttgtcactatgagtcctgcccgtggaggacagtgatgaatttccccttcagagtgacccctggggagrggagccagagtggactgcctgtgtctgtttgtgggagctcattcaaaaaccctctgaggtcccccagatggagctgcacactgaggggccccaggtattatgtaggtgggacaggagcaaggtcttgtgtggtttattcattagcgtggggccatttgctccctcaagctggtaaagcctgagaaaattaaggctcgtgtttttattttttttaattattattaaaaagtatgtattgcctaaggacgtaaaacaatgaaactgttttctaaaacccctttttaaatgaccttcctgagaccagaagatgaagggagaagtagaagtggaaaatgggttgggagtcttttctgactgtgttttgaggacaggatatccgcatgccaagcccgtgggtgagaaaagaggcaaaaggca

SEQ ID NO: 446913 - DNA, 622 bp, Homo sapiens
gtatcaccatgtgtcagcaggacttgaacctgtgttgtcagcatttggaggagcccgagaatcacagctctgctgcagcctctgggttggccacttaggaaccatctagaataagcgctctagcctggaaatccatgttgtcactatgagtcctgcccgtggaggacagtgatgaatttccccttcagagtgacccctggggagaggagccagagtggactgcctgtgtctgtttgtgggagctcattcaaaaaccctctgaggtcccccagatggagctgcacactgaggggccccaggtattatgtaggtgggacaggagcaaggtcktgtgtggtttattcattagcgtggggccatttgctccctcaagctggtaaagcctgagaaaattaaggctcgtgtttttattttttttaattattattaaaaagtatgtattgcctaaggacgtaaaacaatgaaactgttttctaaaacccctttttaaatgaccttcctgagaccagaagatgaagggagaagtagaagtggaaaatgggttgggagtcttttctgactgtgttttgaggacaggatatccgcatgccaagcccgtgggtgagaaaagaggcaaaaggca

SEQ ID NO: 446914 - DNA, 622 bp, Homo sapiens
gtatcaccatgtgtcagcaggacttgaacctgtgttgtcagcatttggaggagcccgagaatcacagctctgctgcagcctctgggttggccacttaggaaccatctagaataagcgctctagcctggaaatccatgttgtcactatgagtcctgcccgtggaggacagtgatgaatttccccttcagagtgacccctggggagaggagccagagtggactgcctgtgtctgtttgtgggagctcattcaaaaaccctctgaggtcccccagatggagctgcacactgaggggccccaggtattatgtaggtgggacaggagcaaggtcttgtgtggtttattcattagcgtggggccatttgctccctcaagctggtaaagcctgagaaaattaaggctcgtgtttttattttttttaattattattaaaaagtatgtattgcctaaggacgtaaaacaatgaaactgttttctaaaaccccyttttaaatgaccttcctgagaccagaagatgaagggagaagtagaagtggaaaatgggttgggagtcttttctgactgtgttttgaggacaggatatccgcatgccaagcccgtgggtgagaaaagaggcaaaaggca

SEQ ID NO: 446915 - DNA, 552 bp, Homo sapiens
gattggtcataccatcaaataacacagaaaaggaacagattcagttcagtttcgggtatgttgaatttgagatgcccgagggcttccaagtggagatgatcagcaggtggctggtaggagatgatgtgatacttcacccacatccccctttcagagataaggcactcatcgccctgtttctaggagtgttggtagctgagggctctcagctgagtgcccctctgcctttgccctcaacagaagagagccacctggcccaaggtcacactgccttcccaggcagtcaacatccaatgactgaccaaagtaggggtataaaggctgggtccctttgcttaaggagaagcatgtctgaaggccactcagtttccaaaactcatttcaggttgtttggggcttttkttctgaccattcagttacttcatctgcgcaatcctcctttcttccctccccactgtgttgatcccaagagcattcctcaatacaattcctgcccgcaggtctccacctaagagtgttttcagaaaaccaactttagacagttgggaaata

SEQ ID NO: 446916 - DNA, 555 bp, Homo sapiens
gacaaacttggggcagaaggccagccatcagtagacatgtccaggtccctggggagaagtctggcaagatcaaggcaggagatcagggtcaatgccaattgggcagagttctagccttggagggacaagagagaaaactaatgaaggaagcctgccatgtggacttggtacaattagaggtaatggaagaggtcctattctggcaggcacargaatgtcagaacactccccagataccatgtgccaagcttagaaagaacctgtaagtccagatggaccttggtggtctgatgaaactgagcctgtctggttcccttgctgttacttgacagttcactcccccaaaggcaacccaaaactatgggctgagcttccttgaagtcagaactgccccaagtcagggcaaacactgaggctcttgctgtaacttgtcttcaacattcaaatgatgaaaagagaggtagaagtgggaccagacgggggtccccagagtgggtgcctcttgaagacagtggagagtccatttccaagtaacatttttagtttctactatgt

SEQ ID NO: 446917 - DNA, 595 bp, Homo sapiens
gggcaatgcatggaacttgggcccaagctactggaaaggagctctggtcagtgcccatcctaccctgggccctgcacagccatctgaactccccagacctgccagatttctgaggtcttcagagagattcctggtgagggatgccaggtctcatggctagctgtttggcaaatgcctccagagggttgctctgctcagggcctgcatctcctgactgtactctgggttctttctgttccagagcatcccataggcagctgctctgattcagaagttttctcacatccacgcctgccttttcaccccatttcctgactgcatcattgctcactgggatggtgctaacagcctcttcatgggtctgctggggccaagtctctctcctttgaattcttcttcttcacaactgctacaatgaactttctaaaatacatgcctatgtcatgctcttgctttaaaaacaatgggtccccttaagatattaccattaggggaaactgggtgtgatattggaactgtcaggactcctttgcagttttttataaacytaaacttatcccaaaataaaaagtttgtttaaagaagtaatgactca

SEQ ID NO: 446918 - DNA, 500 bp, Homo sapiens
ctataagaaatatctggagcacaagttggccatagaattagttccccactgaggaaagagagcctgtcttttctatccctgtgtcaattagttattggtcaaggtggggtcagcttccccagtgaggtgaatgacaattttccagaagagaaggcagcagtgagttgttgtcaatcaacatagctgaagggtggtgcactgatagatccactaaagtccacaccttgcacctagcagcttcactggcttctcacattaaattcattttgtctaggcatagcttctcctgcatcctggttggtcacaatttctaagaaaacttacaagaggagggtttatggaatgaaatatagcccaggctgttgcatttagtcctgagctgtaactgatagtcatcatctccctcttctgccatttaggctttccttatgagttgacccacactctcattmtcatgttgtcctggtcaccagatccttatcaggccatggttgctaaaa

SEQ ID NO: 446919 - DNA, 540 bp, Homo sapiens
tatatatgaactgagaaaaagccatcggatttgatcaccaggaaatgattggtgacctttaaaatgcaatttccatagactggtaaggtcagtaaaccaactactaggaagtaagggtggagaggatgataaatcagtggaagagagaatacagatgatgctttcaagaacactggcctttaggagaaggaaaaaaataggagactgtcttaggaaagaacaggtcaaaggtcagtttctttaagacaagtgtccctcaaactgaaggagagtatttatcaaataagattgcagattcttagacaaggcagtatggggggggggaaagtttaaaaacaaataaataaaaataaaataaaagattgaagacacaagtaggaaragataattggaggagcaagtttttcagagcaaacaagaggaaatgtaatggcctggaagactatcacttcagagaactaaagtagaatttcttctgctgaggcaatagaaaaaatgaagacaaacttaatgaaaagaaatactgaagtgaaaaatgaa

SEQ ID NO: 446920 - DNA, 558 bp, Homo sapiens
gaaaaaatgaagacaaacttaatgaaaagaaatactgaagtgaaaaatgaaaaattttgaaggacttgacattttccttaaaacaggaggagccaattacaacttctacttctaggtaaatgaagtagacatawttttttctattcttcttgctaagtacaactacagaacctgggcattacatataaaagaaatgtaagaaggctctgaaagataaaaagaagaaagcagaccagctggaaacctaaggacacaaggaataatatagtgttgaattccataagttttatttttgcctcctaaatcgtagatttggagctaagcagtcaacccagaaattccaacaagcacaggaaaaacaaacaaacaaaaacctcaagaaccaggaaaggaagaacagcctaacaagacagaaaaacttgcagatggtagtcattctactccagtgaaaccctacagaacacctgaagccctaccacacccacaccagcaaaggccaggtggaaagcctagacttccactctcacaagggtgtaacaagtgcccaaacatacctac

SEQ ID NO: 446921 - DNA, 558 bp, Homo sapiens
gaaaaaatgaagacaaacttaatgaaaagaaatactgaagtgaaaaatgaaaaattttgaaggacttgacattttccttaaaacaggaggagccaattacaacttctacttctaggtaaatgaagtagacataattttttctattcttcttgctaagtacaactacagaacctgggcattacatataaaagaaatgtaagaaggctctgaaagataaaaagaagaaagcagaccagctggaaacctaaggacacaaggaataatatagtgttgaattccataagttttatttttgcctcctaaatcgtagatwtggagctaagcagtcaacccagaaattccaacaagcacaggaaaaacaaacaaacaaaaacctcaagaaccaggaaaggaagaacagcctaacaagacagaaaaacttgcagatggtagtcattctactccagtgaaaccctacagaacacctgaagccctaccacacccacaccagcaaaggccaggtggaaagcctagacttccactctcacaagggtgtaacaagtgcccaaacatacctac

SEQ ID NO: 446922 - DNA, 558 bp, Homo sapiens
gaaaaaatgaagacaaacttaatgaaaagaaatactgaagtgaaaaatgaaaaattttgaaggacttgacattttccttaaaacaggaggagccaattacaacttctacttctaggtaaatgaagtagacataattttttctattcttcttgctaagtacaactacagaacctgggcattacatataaaagaaatgtaagaaggctctgaaagataaaaagaagaaagcagaccagctggaaacctaaggacacaaggaataatatagtgttgaattccataagttttatttttgcctcctaaatcgtagatttggagctaagcagtcaacccagaaattccaacaagcacaggaaaaacaaacaaacaaaaacctcaagaaccaggaaaggaagaacagcctaacaagacagaaaaacttgcagayggtagtcattctactccagtgaaaccctacagaacacctgaagccctaccacacccacaccagcaaaggccaggtggaaagcctagacttccactctcacaagggtgtaacaagtgcccaaacatacctac

SEQ ID NO: 446923 - DNA, 586 bp, Homo sapiens
ggaacacagctaaagcagtgctgagaagtaaatttacatcactaaatacatacattgaaacagtgaaagcctcaagtgaattttctaagctcccaccccaagaaccttgaaaaagataaaaaataaacccaaagcaggaaagaaacaatagagcataaatcagtaaaattgaaaccagaaaaatttttaaaaattaatttaaaaagagagaggattctttgaaaaggttgataaagttgacaaaattctagaaagactgataaagaatagaagaaagtagacacaaattactagtatgaggaatgaaataggggctatcactatagactgagaaagcctctcttccttgacctaactaactatagtcaggctcctatgaactctcttcttgactaggccctaatattggggcttctgtgctcatccgtgtttagtccagttttagcaagaatccagctgggtcagtttagggaaaatccccyacccataatagctgatcaaaatccttattccctacccataataatatcttatcactctggcatgccttcggcaataattctgtcaagtcagtttagccagaatc

SEQ ID NO: 446924 - DNA, 428 bp, Homo sapiens
ttcccttggaaaatgcccaagatacacctaccttatgtcaagttccttgaaacagcaaaaaacaaacaaacaaacaaamaaaaaacactttccttgtgaagaaattctagagtcatgaatactgaaaccaggatcgtattctgtttagctggtgatggagggaatgggaaagaacctggaaaaagagacaagatagacaacagaggtctctcacaccccaaagattcaatcacttcttccaaagaccataacttctctagataatttcggcggggccggggaggaaatggctccagtttatttcccccaagcatttgctgagctgaaatctacccatgtacaacactaataaaattactaactcctgttgactgtgcttgagcataatgagtctgttctctatgttactaagatcacaggagctatgg

SEQ ID NO: 446925 - DNA, 521 bp, Homo sapiens
gggcgttatgtgtggattttcaactctgttgggggatttgtccctcttgtctccccattgttcaaggctcaaccataatacgtgtatatggtaacaatatcgtggtatcagtggtaacaatgtaaatggtatctaagagcttgagattcctaagatctcaattcagcagccttctgctcctttgcttcctttcttttttttttttgagacaggttcttgctctgtcatccaggctggagtgcagtggaggtgcagcctttaactcctgggcttaagtgatcctcctgcttcagcctcccaagtatctgggaccacagatgtgcctcaccatgcccagctaatttttaaattttttgtagagacagaatctcactatgttgcccaggctgatctcaaactcctarcctcaagtgatctgcctgcctcggccttccaaaatgttgggattacaggcgtgagccactgcgcccagcctgctctgtttctttattccttcttccctgaggtgatctattaaaata

SEQ ID NO: 446926 - DNA, 661 bp, Homo sapiens
ctctttatccaagctattgtgattcattttcttgtttattccgtaactgcatgttactgagtaaaatgttgaacttagatatggaaagggacaccagggacccctctgtatatgcagaaggcaataaaaacagaaaaacagactgcaccactttctgctttgtgtatgcttctcatgccaactcgaaagaaaatgagagttggaaatgaccagccctggtaaggcaatggtggaggaagraaatggtgcccggtttgtgggatcttgaaggagagctctagtaaatgccaatcctaaatcaatgaagtggcagtaacagggcaggatatgtgttcgtacaaagggtttccagtttgtagtgtggtgcccgccagccacctttcatcaagaatatgcaatggagaattgcctggaaatggattctttattacacgtggcatggcagagtgaaaatacttggcagccaacagagtactgtgtgtagggagacataaacactcctagcgaggtgacagtgcagaggcctgggtggtatatgcttggtcctgctccactgaccactcacaaattacacagagtcccattaccatgggccctgaaatggtatcattcagagtaattgcatctttttaccctaaaaacaaaacaaaacaaaacagaa

SEQ ID NO: 446927 - DNA, 661 bp, Homo sapiens
ctctttatccaagctattgtgattcattttcttgtttattccgtaactgcatgttactgagtaaaatgttgaacttagatatggaaagggacaccagggacccctctgtatatgcagaaggcaataaaaacagaaaaacagactgcaccactttctgctttgtgtatgcttctcatgccaactcgaaagaaaatgagagttggaaatgaccagccctggtaaggcaatggtggaggaaggaaatggtgcccggtttgtgggatcttgaaggagagctctagtaaatgccaatcctaaatcaatgaagtggcagtaacagggcaggatatgtgttcrtacaaagggtttccagtttgtagtgtggtgcccgccagccacctttcatcaagaatatgcaatggagaattgcctggaaatggattctttattacacgtggcatggcagagtgaaaatacttggcagccaacagagtactgtgtgtagggagacataaacactcctagcgaggtgacagtgcagaggcctgggtggtatatgcttggtcctgctccactgaccactcacaaattacacagagtcccattaccatgggccctgaaatggtatcattcagagtaattgcatctttttaccctaaaaacaaaacaaaacaaaacagaa

SEQ ID NO: 446928 - DNA, 661 bp, Homo sapiens
ctctttatccaagctattgtgattcattttcttgtttattccgtaactgcatgttactgagtaaaatgttgaacttagatatggaaagggacaccagggacccctctgtatatgcagaaggcaataaaaacagaaaaacagactgcaccactttctgctttgtgtatgcttctcatgccaactcgaaagaaaatgagagttggaaatgaccagccctggtaaggcaatggtggaggaaggaaatggtgcccggtttgtgggatcttgaaggagagctctagtaaatgccaatcctaaatcaatgaagtggcagtaacagggcaggatatgtgttcgtacaaagggtttccagtttgtagtgtggtgcccgccagccacctttcatcaagaatatgcaatggagaattgcctggaaatggattctttattacacgtggcatggcagagtgaaaatacttggcagccaacagagtactgtgtgtaggragacataaacactcctagcgaggtgacagtgcagaggcctgggtggtatatgcttggtcctgctccactgaccactcacaaattacacagagtcccattaccatgggccctgaaatggtatcattcagagtaattgcatctttttaccctaaaaacaaaacaaaacaaaacagaa

SEQ ID NO: 446929 - DNA, 573 bp, Homo sapiens
tgatgatgcgggcctacaggagagctcaccagaccctgccctatgtccacagccaagatgggctccggagggaggggaactggtagaaatttcagatagggacctgagatcaggggagactggaattcctcaaggaagcctgggacattgagaaactttaaggagaagtcaccttagccagcttgaagtggcgactaaagaagtgaagtggcaggaggtctgaggcaggtccctgagtctctgccccggagaggagcgggaaagcagcacacagtcttacaccctcccgcttcccatgagggagcaaaagggctgagaaaaacagggaactaggaggggcctcaagatcaaaatgagttgtacttggagtatgtggaccacaaccagagacaatagtgtgatcataaatgsctcaaggaacactggatgaatagacagtgaagacagaagaccagatgcccctcccctccaattcactgacagcatgaagctctcccctgtgtctcaaatacagccccagggagaagttatccctcattgactaagttttagtgcctgtcgccagtggaataa

SEQ ID NO: 446930 - DNA, 584 bp, Homo sapiens
tgaattctaagcaggataaatacaaagaaatctgcatctacaccattatagtaaaactacagaatagcaatggaaaagagatcttagaaggaatcagagaaagaaaagacctatgtacattaaaaagaacaattcttacacagaccagatacagtggaaaccaaaagacagtggactagtgtcttcaaagtgctaagaaaaaaaaaatgactgccaamctaaaattgtaaacctgtatagattatatttagagcaaagccaaatagaaacattgtttagacaaaccaaaaaaaaaaagaaattttacaatcaagtccttattaaaggcaattaatcaaaaccctatagaagaatatcagtaggaaaaaagaaaatcgcagagtaaagataagacacataagtaatgtcaagcaaaaacattgttaacatttaatgaaatctaaaacaaacattgaaagtataaaacaaaaagaatgaagtatctaatttgtagtatcaaaaaaataggaagaattaaaatagcacttgtgcagaaacagggtaggcagattgtttgcactatctgtgagaagggtaaaaacact

SEQ ID NO: 446931 - DNA, 584 bp, Homo sapiens
tgaattctaagcaggataaatacaaagaaatctgcatctacaccattatagtaaaactacagaatagcaatggaaaagagatcttagaaggaatcagagaaagaaaagacctatgtacattaaaaagaacaattcttacacagaccagatacagtggaaaccaaaagacagtggactagtgtcttcaaagtgctaagaaaaaaaaaatgactgccaaactaaaattgtaaacctgtatagattatatttagagcaaagccaaatagaaacatygtttagacaaaccaaaaaaaaaaagaaattttacaatcaagtccttattaaaggcaattaatcaaaaccctatagaagaatatcagtaggaaaaaagaaaatcgcagagtaaagataagacacataagtaatgtcaagcaaaaacattgttaacatttaatgaaatctaaaacaaacattgaaagtataaaacaaaaagaatgaagtatctaatttgtagtatcaaaaaaataggaagaattaaaatagcacttgtgcagaaacagggtaggcagattgtttgcactatctgtgagaagggtaaaaacact

SEQ ID NO: 446932 - DNA, 584 bp, Homo sapiens
tgaattctaagcaggataaatacaaagaaatctgcatctacaccattatagtaaaactacagaatagcaatggaaaagagatcttagaaggaatcagagaaagaaaagacctatgtacattaaaaagaacaattcttacacagaccagatacagtggaaaccaaaagacagtggactagtgtcttcaaagtgctaagaaaaaaaaaatgactgccaaactaaaattgtaaacctgtatagattatatttagagcaaagccaaatagaaacattgtttagacaaaccaaaaaaaaaaagaaattttacaatcaagtccttattaaaggcaattaatcaaaaccctatagaagaatatcagtaggaaaaaagaaaatcgcagagtaaagataagacacataagtaatgtcaagcaaaaacattgttaacatttaatgaaatctaaaacaaacattgaaagtataaaacaaaaagaatgaagtatctaatttgtagtatcaaaaawataggaagaattaaaatagcacttgtgcagaaacagggtaggcagattgtttgcactatctgtgagaagggtaaaaacact

SEQ ID NO: 446933 - DNA, 536 bp, Homo sapiens
ttcactgttactatcaattgttcctccagtatttgcacagtttctgaaagtatttaarccaaagcaatgcttgtcccaactttttttttataatgaggaaaatatgtctggtcttattcatactatcagaatacaagagtaggctttgggcatgaacaaacggtagtgattggagaatcccaaagactgatttctctaaagaaaaatttaaaattgacttcggtattgtatgaaaggagagaaggttggcattccctttgacaaggatggaagaggccctcaggcctgacaacaagcatttagttaaggcattgccacctacttcatggcatctaaccattatttaaataaaaaataaaataaaataaagttaaatatggcaccttttactgctaaatcactgacttttgagaatagtttctatgttgatggttgtttctcatacgatagtgttgggaaaggattcaaatccatcccattgaaggagaaatgcgtttgacttaacaagtgttaaaatctccggagcaagaacatac

SEQ ID NO: 446934 - DNA, 536 bp, Homo sapiens
ttcactgttactatcaattgttcctccagtatttgcacagtttctgaaagtatttaaaccaaagcaatgcttgtcccaactttttttttataatgaggaaaatatgtctggtcttattcatactatcagaatacaagagtaggctttgggcatgaacaaacggtagtgattggagaatcccaaagaytgatttctctaaagaaaaatttaaaattgacttcggtattgtatgaaaggagagaaggttggcattccctttgacaaggatggaagaggccctcaggcctgacaacaagcatttagttaaggcattgccacctacttcatggcatctaaccattatttaaataaaaaataaaataaaataaagttaaatatggcaccttttactgctaaatcactgacttttgagaatagtttctatgttgatggttgtttctcatacgatagtgttgggaaaggattcaaatccatcccattgaaggagaaatgcgtttgacttaacaagtgttaaaatctccggagcaagaacatac

SEQ ID NO: 446935 - DNA, 577 bp, Homo sapiens
acatacttaataataaatcctaaaaatatggttagcattagagtagaaaaagtattaactaaattataaggacaatttacaaatcaaccatctttgtagaatattttaatgcaaacttatcagttatagttaaatcaagcaaagaaaaacaatgaaaaataaaaagacaggacattttaacagcccaattaacaagtttggatttatatattacccaacaattgaagaatatatattcattttcaaatacccagcatatttttgaataggccacatgctacactatgaaacaagtctcaacatatttcaaagaattcatatcatatgggcaaattctttcacaacaataaaattaggttaaaaatcaataacaaaaagaaaactagatttttwaaaaatcatttggaaatttaagtcgtactttccaataacttatgagtaaaaaaagaaaagaaattagaagagagtcaaaatgaaaacatactgaaaatacacatattgaactgaaatgttactaacagaagtgttttttgttttaggtgcttatattagaaaagaaacggttgaaaatgcacaa

SEQ ID NO: 446936 - DNA, 536 bp, Homo sapiens
actaaattgcttgagcaccttgcaaaaattctacaaaactaatttataaattaagtttttctgtctatgcatggcctgggcatttcsttataaaggattcaactttctgttttatttagagcttttgtttttccatgtatattaattacttcccaaactggccattttcgtctaccttcctcacttccatatgcacttttgaatgtgccatgggattttttttttagcattatgctgcctgtggttcacaggaaaaagatacatttgactttaaatagaatgaaaatgatattttttcacacttctgtttagtttgggagaatgcaaacacatcgatatcatgaatgctacataaaattgattaactcaacaaacatttattgtgtacctacaaggtgccaggaactgtgaagaataataataataatggtaagaaaagcaagtttttaccatgagtgcactataccaagttttgtggtacattctttatgttgactctatgatttaattctcaccataatcctatgagctggata

SEQ ID NO: 446937 - DNA, 536 bp, Homo sapiens
actaaattgcttgagcaccttgcaaaaattctacaaaactaatttataaattaagtttttctgtctatgcatggcctgggcatttcgttataaaggattcaactttctgttttatttagagcttttgtttttccatgtatattaattacttcccaaactggccattttcktctaccttcctcacttccatatgcacttttgaatgtgccatgggattttttttttagcattatgctgcctgtggttcacaggaaaaagatacatttgactttaaatagaatgaaaatgatattttttcacacttctgtttagtttgggagaatgcaaacacatcgatatcatgaatgctacataaaattgattaactcaacaaacatttattgtgtacctacaaggtgccaggaactgtgaagaataataataataatggtaagaaaagcaagtttttaccatgagtgcactataccaagttttgtggtacattctttatgttgactctatgatttaattctcaccataatcctatgagctggata

SEQ ID NO: 446938 - DNA, 636 bp, Homo sapiens
ccatatagccactgtgcttgttgtgacctttttgttattataatcagcatgaccccgactgacactcattgagcgtttattctagacagactatgttatgctaagcactttacctatttaactcagtcttcagaaaattgggttgtaatagagaatctgactgcatttttttgatgtgtaaatagtgatccctcatcctcccctcgtgccccacacttggcaaackgataagaaagcccgggtgtttccttctgtggcacccatgggtgattcaaaccacacaagccttcatctatacacagaaattcttacccccagccccactctctaatcacaataaaaaccccaagatagcctcttttctctgtttactcaaggctctcagacctgcttggaaagcatgccctgctctttccagaaaacttcgtcatgtaagtaataaatcttctcagaccccctgtgagtgtgtcacatccaaaccaaattttgggtagggaatccatcctgactctgaagggtgcttggagccaggatagatatcattacccccgccccctttaacctagaaataaacaggcatacagctttacccatggtcacacaggcagtaagttcatccagtcagcagactctgaa

SEQ ID NO: 446939 - DNA, 636 bp, Homo sapiens
ccatatagccactgtgcttgttgtgacctttttgttattataatcagcatgaccccgactgacactcattgagcgtttattctagacagactatgttatgctaagcactttacctatttaactcagtcttcagaaaattgggttgtaatagagaatctgactgcatttttttgatgtgtaaatagtgatccctcatcctcccctcgtgccccacacttggcaaactgataagaaagccygggtgtttccttctgtggcacccatgggtgattcaaaccacacaagccttcatctatacacagaaattcttacccccagccccactctctaatcacaataaaaaccccaagatagcctcttttctctgtttactcaaggctctcagacctgcttggaaagcatgccctgctctttccagaaaacttcgtcatgtaagtaataaatcttctcagaccccctgtgagtgtgtcacatccaaaccaaattttgggtagggaatccatcctgactctgaagggtgcttggagccaggatagatatcattacccccgccccctttaacctagaaataaacaggcatacagctttacccatggtcacacaggcagtaagttcatccagtcagcagactctgaa

SEQ ID NO: 446940 - DNA, 489 bp, Homo sapiens
ccacactcaggtgtattctagaccaggggttggcaaaccgtgacccactgctagcttttgtacctaacatttgactggaagacagccacaatctgttttttccttattgtctatgataattttgtgcttcagaagtagagctgagcagttgtgttacagaccgtatggcccaaaagttaaaactatttacaatctggccctttacagaaaaagtttgccaacctctggcttcaaacatgagtgagagttctaccagcctgacttgtacttttggtcagaagagtaaggttactccagggatttccagctttttccttcctacctattcccctttgttgaaattgcctgtaattcctccagctccactcccctgtttcattagacctagagttggaaggctgtgtgcacttggagctgcacacatctatctgtgcagygggtaccatgaaggggagattaacaccagcttctttttttgagacagagttt

SEQ ID NO: 446941 - DNA, 554 bp, Homo sapiens
tcactgcagtcttggcttcctttactcaagcgatccttccatcccagcctcctgaatagctgagactgcacatgtgcatcaccacacctggctaattttttgtatgtttttgtagagatggggtgtaaccatgttgcccaagctagtctcgaactcctgggctcaaataatccacccgccttggcctcccaaagtgctgaagcgattctatacccagcccccattgagatttctatgttgggtagttggatagactcagtcactgatcatctcagggctcccttcacacacctgtggttagaatttgtgacttagaaaaaaaatacaaattatgacatgtcatgaacctccagagtcacgcacaatgatttgaaacctcatatgtcaaatstgccagtgatgagggtccacagtactttcttctcttttgtcagttggaagcaacagctggacaccaggctgcgtgtgcttgtaaacaatgatttaattaccctgtagacttgtcttctccaagcaggatgaacccagttcttttaacctttcctaagcatggt

SEQ ID NO: 446942 - DNA, 563 bp, Homo sapiens
gcagacttcaaatggattttggaaaccatttgaggaaaacaatggaaaccaaggttgtttgggcctgagtttttccagtctcccraggatgctaaatatttaaatctctgaaggaaggtggatcttcttgagtccaggcttgggttctctgagttattctcctgtctcttggtttcatgggtcagaggacctcgtggccaaaggtctgacaaggtcattttctttttcttttttttttttttctcttcttaggagattgctgatttatttttattttttaacttttatttaaagttcatgggtacatgtgcaggatgtgcaggtttgttacataggtaaatgtgcatcatggggatttgttgtatggattatttcatcatccaggtattaagcctagtatccattacttatttttcctgatcctctcccttctctcaccctctacccttcaagtggccccagtgtgcattgtttccctctatgtgtccatgtgttctcatcacttagctcccactaataagtgagaacatgtggtatttggttttttgttcctgcattagttt

SEQ ID NO: 446943 - DNA, 469 bp, Homo sapiens
ggtcttatttgtgccttagtctcaccaaccttctcacctggctttccattctgctccacttctctgactagtattctataactgtgctattgactcacaccccacaacacacacamacacacacacacacacacaacacacacacacacacacacacacacacacaaaacgtacagagagatctagagagaagtaaggttatcaagtgacgccctgggacctagactgtgggctggaactgtagctagatagagtgggttgccaaagttggactgctggctctggtcaatcagaggccaaaagataagagtgacagcagtttcttcatgcactctaaccaactgatatatctaaatgtttcccttacatccaaaagcttcatcaacagaattttgtaaaagatccggacatattatgagaataatttaaatagattccaggagtgagatcagatagataggcaattttc

SEQ ID NO: 446944 - DNA, 422 bp, Homo sapiens
ataaaggaaagaccaatgagaagtgagcctctccgcagcaggtagtgtcttcatttggtcttccatctttatctttttatgccttttttgctcttttgatcatgctgagaaacttcctctccctctccacatttggcaactttgcctcattttctttcctgtatggtgccattcttttccctgacttaggtctttgcttatgttctttcctccgacatgtaatcatcccactataccctccatgaactccccacctaacttctgctacttgctctttgaagctctgtttatraaatcagttctcaacttcaatgatttctatcctgtaatgacattttttcccttccatcagtaagtcctgtgaatattctttcataactccctggacttcttccttgtatcacttatagcacctgtaatta

SEQ ID NO: 446945 - DNA, 422 bp, Homo sapiens
ataaaggaaagaccaatgagaagtgagcctctccgcagcaggtagtgtcttcatttggtcttccatctttatctttttatgccttttttgctcttttgatcatgctgagaaacttcctctccctctccacatttggcaactttgcctcattttctttcctgtatggtgccattcttttccctgacttaggtctttgcttatgttctttcctccgacatgtaatcatcccactataccctccatgaactccccacctaacttctgctacttgctctttgaagctctgtttatgaaatcagttctcaacttcaatgatttctatcctgtaatgacattttttcccttccatcagtaagtcctgtgaatattctttcataactccctggacttcttmcttgtatcacttatagcacctgtaatta

SEQ ID NO: 446946 - DNA, 526 bp, Homo sapiens
taaggcatcttattaaaaatagtgcaagtttatgttcctctcctaagttgtcttactttggaggttatccagagtgaaatgtccttggtgttacatgttacataagcctcaagacattgtagataccatcttaccagcatcttagaccttatcagtgtcaacatcttaatgggcagctgtggtagattttctcaatgtctggtggattttccactaccttggccttctccccagaatgtccatactcattccacctgttgtcatttctaggcagatgctgtgccctgtcaaaaaacaaaatagtagctgatagtggcgaggttttcggggaagcragcattttcagtttttataaatgcagttatctctttagaaaattagagattaaatctgttataacaaataactgtattataaatataaaactgtgtatttatatttatattatactataaaactgtgtgtgtgtatatatgtatatatatacatatacatacacacacagaagctttaatttgtgtaatca

SEQ ID NO: 446947 - DNA, 594 bp, Homo sapiens
attttccactaccttggccttctccccagaatgtccatactcattccacctgttgtcatttctaggcagatgctgtgccctgtcaaaaaacaaaatagtagctgatagtggcgaggttttcggggaagcaagcattttcagtttttataaatgcagttatctctttagaaaattagagattaaatytgttataacaaataactgtattataaatataaaactgtgtatttatatttatattatactataaaactgtgtgtgtgtatatatgtatatatatacatatacatacacacacagaagctttaatttgtgtaatcatctctagcaaaggctcattttgtgatttttgccgtttgtttgcttaggttaaccttttctaccataagattatatcagtatttaccccatctagttgttttaggattttaatatttgtattttacttcaatttctctaaaatttgtttggctctaaagtatcatgtacagttataactttatttttttccaaatagacagttgttccaagacctcaatatttgcattttaaagggatccctttcatctctcaaattataattcagtgacaaaa

SEQ ID NO: 446948 - DNA, 558 bp, Homo sapiens
gatactgaatgccaaatgccaggcagaaatttccttgatcgagattaaagaaataatcatgacctttgcatttttttctgagaaagagagggcaaaatactttaactgtttctgtaactactgtggagaactacaagtgaccagggttaggccatggcaatccatgattttatactagtttcttccttacacacatttctttctgttgtattcactttctatttcataccaagaagtctttcttatccatgttgtgtgtagaaaacataactcaattttacatatgttatttacagagagactcagaataaggaagaatgaaaaccacattattcccatccagcaacacaccaggagccattgaccctaacacacacattctcatggcaccttacctccagacatgattggggacataagaccrgaccagagagtgtggttagtgagcacttcctaacgaatgtctgagaagctgtactaaatgttctacatatatgatagttaattttatgtgtcagcttagctgggctgcagtacccagacacttagtcaagcatt

SEQ ID NO: 446949 - DNA, 606 bp, Homo sapiens
gggaagggaaggaaaggaaggaagagacttaaagaggataataaggagagggaataagaaagattaaaatagctttcattcacactatgcagccaaactacctatactatgtagcactagactcagkgctttataagtacagtctcatttatttttcatatttgcaccaatttagaaatgaggagacaaaggcagagaaatggtgagtaacttttccaagtgtatgcagcaagtatagagatgggatttcaatttctggttagtctgagtccaaggtgctttgatatacaacactatgcttttcccaataaaataaatgagggaaaaagctttaagagatgaaaaggaaaaaaaatacatacatatatatatatatatatatatatataagcttgaaagaagggcacaggaaaggagtcaggggtatgcagggacaggtaatatgaaaagaagctgaagtggcagccttgccaacctccagttagttttattgtgtctctaccttgtaaaaacatagaagttttcattactgttgggtaattgatggcagatcatatgggaatgaacacaggataaaatgtacatataaaaataaatatggtaaga

SEQ ID NO: 446950 - DNA, 567 bp, Homo sapiens
cctgggtcaaagagccagtttactcactgtctactttatgtctccagagtcttgataactgaaagtaaatgatgacaacactttgcgttaccttrccttacagaaatattgctccagttaaacaacaacaaaaaaatttctgctcatctctgtaacgatgcctatttgtgaggctgacaggctgatgagctatcttgctgttatgggcagaaatgtgtcccctaacccacactaaattgaagctttaatccccagtacttcagagtgtggccacatttggagatggggaccttaaagagaggattaagttaaaatgaggccatcgggctagaccctaatccaatctgacttgcgtccttataagaagagaaatttggacacacggagagataccaggtatgtcggccaacagaagaaagaccacgtgaggactcagtgagaaggtggccatctgtgagccaaggagagaggcctcagaatcaaaccaaccctgctaacacattggttttggacttctagcctccagaactgtgagaaaatgatttctggtgtttaagctacctaata

SEQ ID NO: 446951 - DNA, 526 bp, Homo sapiens
tagtgtcctcactactcctttcatgaagtacgtgggagtgtgggcaggcttgccttagtcccttccatacgggcaaccctgcatatgtctaagaatttcatgctcagcagcattacacaccctccaggccagtgtagtctatggccacttttccattttccttaggattatgatgaagaagaagggagaataagttaagcttccatcctcccagccccagctattcatgcagtggtttccaaaagaaacagatgagaagtatatgttcttcaaacacttaagttgccaagggccagctatgacctggcacaaaagcaccatctatttgctgtaactccatctttatcttckccacagccttcttttctgaatatcaggctcacatacctaaaatcctactcattctctccatttagatatctaacaggcatctcaaatttagtacgttcaaaatggaaactttgatctccctgtcaccaaaagggctctaagaatcttacccatctcattaaaaggaacttcccat

SEQ ID NO: 446952 - DNA, 625 bp, Homo sapiens
ctgtacacttcctaagatcatagatttaagacttaggaaacaaagcaaactgttgctaactcttggaacatagcctagaacaacattactatttagcacatatagtaatagaaaaaaagataaaacaaatacctgaataaatattgatatcttctcaccacatgcaggcaatgacatactaaaccccccgaagtgtcttagagctccttgtgatcctggtgctgtgaagtcagcatggcggagttgccttctgacacatcagatttctagaaagtgtttttcaggcatgakcaacagggagcaagcatcaaaaaacactcttgtagtaacagtattccggtccattggagattctgtctaaaagactaggacctcctctttcaaatcctgctcagccagcaagagaccaatgcccacccttggtgcttggcttatttcccctctgaactacaggagcatacatcacccagcaacggacgaaaatgaaagggacaacttcaacatgatgtctttaaggaggtggagattccttagattgaatggaaaagcataaaatgcaatgacgaaagagatgagctaaaaatacatgtataagcaatgatatgtcagcatctggacagctacc

SEQ ID NO: 446953 - DNA, 506 bp, Homo sapiens
atttattaccaatgcaaataatattttgcctattaaaattgaaattgggaaaaacagtgtgttaaccaatctgttcaaagtaatttcaaaataccatgagaaaattctaagtatgcctgctagacagttcaccatacttagctgagaatggaatattatttgcataaaactaaaagaaaaatttaactataagtaaaaaagacaattagatttagtattgctcagcacgggagaatactttttatttatccrctgtcagtatatgacaaagacatttccagcttggttagtttaaaatatatttgtgccaacagactatttagtttgttataacattctcatttaggtttctaagtttcacaatgtcttaacgcaacaatttttattttactgacaacactccatttgttttgaataaatatatgatgatactaatgataacatgcatttgtgttcttatgactgtgtgcttatgatcataccactaagggctggccctgtactaa

SEQ ID NO: 446954 - DNA, 506 bp, Homo sapiens
atttattaccaatgcaaataatattttgcctattaaaattgaaattgggaaaaacagtgtgttaaccaatctgttcaaagtaatttcaaaataccatgagaaaattctaagtatgcctgctagacagttcaccatacttagctgagaatggaatattatttgcataaaactaaaagaaaaatttaactataagtaaaaaagacaattagatttagtattgctcagcacgggagaatactttttatttatccactgtcagtatatgacaaagacatttccagcttggttwgtttaaaatatatttgtgccaacagactatttagtttgttataacattctcatttaggtttctaagtttcacaatgtcttaacgcaacaatttttattttactgacaacactccatttgttttgaataaatatatgatgatactaatgataacatgcatttgtgttcttatgactgtgtgcttatgatcataccactaagggctggccctgtactaa

SEQ ID NO: 446955 - DNA, 625 bp, Homo sapiens
ctgtacacttcctaagatcatagatttaagacttaggaaacaaagcaaactgttgctaactcttggaacatagcctagaacaacattactatttagcacatatagtaatagaaaaaaagataaaacaaatacctgaataaatattgatatcttctcaccacatgcaggcaatgacatactaaaccccccgaagtgtcttagagctccttgtgatcctggtgctgtgaagtcagcatggcggagttgccttctgacacatcagatttctagaaagtgtttttcaggcatgagcaacagggagcaagcatcaaaaaacactcttgtagtaacagtattccggtccattggagattctgtctaaaagactaggacctcctctttcaaatcctgctcagccagcaagagaccaatgcccrcccttggtgcttggcttatttcccctctgaactacaggagcatacatcacccagcaacggacgaaaatgaaagggacaacttcaacatgatgtctttaaggaggtggagattccttagattgaatggaaaagcataaaatgcaatgacgaaagagatgagctaaaaatacatgtataagcaatgatatgtcagcatctggacagctacc

SEQ ID NO: 446956 - DNA, 451 bp, Homo sapiens
aaaaaaatcaataggacttcattcttgacaaatattgacaatataatgcagaggttagcgatttttctgtaattctgttgattctgattatcttcaaatacttgatgacaggtcctaaaggaagccttgaggaaaaacaacgataaaagagtgcatttgatagcaacaggagcargagatgttgactattctagtggagaaccttcaggagatattccatttttatttgatatttgaagaaaggaagaccaaaagggcaggaatttatacacttaaagtagaaaacagaatgtatttgactcctatagaatgagaaagattgatttgataaaatatgacagtcagtactactatcacacccaacatttaatgagcaattattataggcaatggactgttctacgtaatcgtgaatgtatgaatgtatttaacctgaaagcacagggaagta

SEQ ID NO: 446957 - DNA, 586 bp, Homo sapiens
ataaaacataaacataaaatatatcatatactatctgtgaggttttcataaactcataagatctttttatatttttatataaaaatgaaatactttacattaaaatygttgagataattaaatgagaaaatgcttgtcaatgttattaaaatgtaaaattttatttttcaaagaaagaaaattgtcacttttgatttgtgctaaaaaataacagtagaagcctgcttttaaatattttaagtgtgcaatatcatattacttcccatttactctttgcatttctagacagccaagtttattttttttctcaattcagtttaaaatcagagggaacaaaatttaaaacatgatataatatcaaggttaacatgctagctatgtaataaatgtaaaatttgtccagaaatgcatttgctttgagaaacacaaccatgtgaaattcctaaatattttggccatatggaagatgatatcagaagaataatatattgttctctgtacatcaaaggagggggataataaaaactgtagctattaggtttgtataaaaacagttacagtgttttccattgccaaaaactgcaac

SEQ ID NO: 446958 - DNA, 557 bp, Homo sapiens
tatttctacttcctatgtagagaaaactatgtagttttctctgctggttcactgcaggctgtcttctgcctttacctctctactcagtctagagtgtggcaaccttcctgaccgtggtggacagggtaaagctctgggcagatttggactgtgtgtctgagattttgcatattttactttactttcctaatctcaatgtcgttacctctaaaatgaggacagtatccttcttgctaatttctagtatasaaactgatacataatacattttaataaatattgatcagatgatctaaaaagcaatctcatcatagcatcatggcaaagatgcaatcccttatcatctttcctctagattcttgcaatggtctactagtgttatagatgaactaacttccctaaaagagtctcagtgtgtctgccctcacaacccttcaaatctctgagtcaacacaatatccagcgtgggcccattgtagcctaaaaagtgtgcatctctcctctcctcagaaccttccagagcttactattgcacaagaatgtgagtttgtgtagtg

SEQ ID NO: 446959 - DNA, 541 bp, Homo sapiens
aattgaaatttaactacaattatacctattagtattatttttataatttacatctatttttatggcacctttacattgctagagttgatcctcacaacagccacataaaatgctgagttcaaatatcatcttaattttaccaatatggaagctgaagctctgtgcaataaacaaattgccaaaagccacatagctggcgagtgactgctcaatgtttttctcctccttcttttgattccaagytccagacccttctcaccaagacttaccaccatctcttttgactcttatgtctaacatagttggggagacatccttagcattaaatattctcttggggaaatatacaatcagttgttgcatacataatttgagagggggctagttttgtccatttctgaaaatttgggaggagcatacaaacagctgaggcaaggattctgagaataattagactcatatctcacatgtcataaattgttgccacatatatggttccagttctattctcaccataatcctgaagtatagagagacagca

SEQ ID NO: 446960 - DNA, 558 bp, Homo sapiens
agttttattttaattttcttgctcttcaaatataaaattgactcttcttaaattttactaagtgagaaaatatgattcctgcagataccacaaatatcttatctgtygttcttctttttcttttttctgttaatccttattttgtgacctctctctgagaccacatatgtgctcttaagggcgaggactgtaacttaacttctctcagtatttacagcactggaaaagctgcccccatttcaatatggctttgttgaaatggaaatttttgatagtcattattctctcccttcactcttcacacttactttaaattagtatttccacgatggttttgtgaaatattacaccaaattctcaaagttaaaaatggattttcattaaacaagtttgggaaacaatttacagtattttgctttttggagatttctcattttacattattagcacagtaacatctcagagaagtgctgactattttagtatgttaaattaatgcatattagtatcttgtagtactaactggaaaattataaactctttaaacagctaaaagtt

SEQ ID NO: 446961 - DNA, 558 bp, Homo sapiens
agttttattttaattttcttgctcttcaaatataaaattgactcttcttaaattttactaagtgagaaaatatgattcctgcagataccacaaatatcttatctgttgttcttctttttcttttttctgttaatccttattttgtgacctctctctgagaccacatatgtgctcttaagggcgaggactgtaacttaacttctctcagtatttacagcactggaaaagctgcccccatttcaatatggctttgttgaaatggaaatttttgatagtcattattctctyccttcactcttcacacttactttaaattagtatttccacgatggttttgtgaaatattacaccaaattctcaaagttaaaaatggattttcattaaacaagtttgggaaacaatttacagtattttgctttttggagatttctcattttacattattagcacagtaacatctcagagaagtgctgactattttagtatgttaaattaatgcatattagtatcttgtagtactaactggaaaattataaactctttaaacagctaaaagtt

SEQ ID NO: 446962 - DNA, 558 bp, Homo sapiens
agttttattttaattttcttgctcttcaaatataaaattgactcttcttaaattttactaagtgagaaaatatgattcctgcagataccacaaatatcttatctgttgttcttctttttcttttttctgttaatccttattttgtgacctctctctgagaccacatatgtgctcttaagggcgaggactgtaacttaacttctctcagtatttacagcactggaaaagctgcccccatttcaatatggctttgttgaaatggaaatttttgatagtcattattctctcccttcactcttcacacttactttaaattagtatttccacgatggttttgtgaaatattacaccaaattctcaaagttaaaaatggattttcattaaacaagtttgggaaacaatttacagtattttgctttttggagatttctcattttacattattagcacagtaacatctcagagaagtgctgactattttagtatgttaaattaatgcatattagtatcttgtagtactaaytggaaaattataaactctttaaacagctaaaagtt

SEQ ID NO: 446963 - DNA, 515 bp, Homo sapiens
ggtgccagcttgcagcaatcctatttggtgtcacatacagtgttttgtatttctttgggatttagtaacctacatttggatattatactattttggctgttccataaattataagccacttacatcatcttttgtctttcattgaaatctactgcatgaaatatttttatttatgatcatctactcctcctagaaagtaagttcaatgagattagcttgttttcacgattttaataatcatcaatgtctagttcacagttggtatataatatatatattgaattaatgaatgaatgtttgagttatgtgtatgattgtcttactgaggtcaaagagctaaactgcagccctgtggatagggatttttccctaaaagaaattgtcatttgtgtcactyctgaggaattaaatggggacttaagaaacagggcaatagaaacttcctcttttctgtggaagtcagtgatagatttttatttgcaggctggagatatggatataagggatgagccacc

SEQ ID NO: 446964 - DNA, 467 bp, Homo sapiens
gggatagataagtttttctctgacatcaccatttcatttcagagttaattaatctggtgttattacagtcttgctacatcctaaacactttcattcatttatgcaacatatcacttgtggatctagaaatttacctccaaagagaacagtttggggtgatcttcatcatcatccattaattactcatcaacgtttcattatttccaactactatgcacttaatttttttttagaaaaagaggaattatgatacatcccagttaaagagaaaagtctcagatttttactgtgctattgccaagtatatagagagaaataattcaagaataaaacattattttttattttaaaaataaaagtggttgtcagataaaayatgctttaaacctatgagtagacacatgccttccagtgctagttgttcaaattgtcacttagtaagtaataatttccatttctgcaggtaa

SEQ ID NO: 446965 - DNA, 358 bp, Homo sapiens
attgcagtgagctgtgatcatgccactgcactccagcctgggcaacaaagcaagaccctgtcccaaaaattwaaaaaaaaaaaaatggtcctaagaggtagctattgcattcctacttgaggaactaaggaacaaagaccaatattatacctttgccttctattttgaggagttattcatcaaaagtgtagatcaaggactgcctactaccgaagcatattttttcctgggccctatccttaatcagaatctctgggaagaggtatggaaactagcatatttaataagtcatgccctttactaaagtcttacaccaatgttggagaatcactgagcaagatgtccaatcatcatatta

SEQ ID NO: 446966 - DNA, 358 bp, Homo sapiens
attgcagtgagctgtgatcatgccactgcactccagcctgggcaacaaagcaagaccctgtcccaaaaattaaaaaaaaaaaaaatggtcctaagaggtagctattgcattcctacttgaggaactaaggaacaaagaccaatattatacctttgccttctattttgaggagttattcatcaaaagtgtagatcaaggactgcctactaccgaagcatattttttcctgggccctatccttaatcagaatctctgggaagaggtatggaaactagcatatttaataagtcatgccctttactaaagtcttacaccaatgttggagaatcactgagcaaratgtccaatcatcatatta

SEQ ID NO: 446967 - DNA, 551 bp, Homo sapiens
tcagcaagattttttaatttttttgtagagatagagatctggctttattgcccaggctgctgacaaactcctgacctcaagcaatcctcctgccttggcctcccaaaccactgagattacaggcatgagccactgtgattgaccaataaatatttttaagtaaatgaataatgaaaaagatattcctgacttttctttgtcatctgcttttatgtaaatcaaagttgcattttcccctgttcaggtataatagaatacttgaaattttaaaatattctgcctgatttgaaccattggccctacccacaaataatctgaatctttaaatatagccactgtgatttgtccagatctgtcacatatttattgaacattgatcatgcagaaaacaatgcagggatrtaatagcccctgcccccaaagagcttacaaaatagaaaagacaagtacattaatagttataaggaaaggtataaacatcagaagacaagaaaatatacaattgttaactgaaagacaaattttaaagagagacatctgctgggtgtggt

SEQ ID NO: 446968 - DNA, 548 bp, Homo sapiens
gatgaaataaatgagtagcttgaaacttggtgttcaacttgagcttgggagtctatacttactgkgtaattaaaagacatttaaggtttcttccagtcggggtttgaagaaagtagtacattcaaatgggatcgatgagtggcatttaatgtgtccacaaaggtgtggacagagtaagtgacaccaacaagagacaatgaaaacattctgccagcaacagcaggaagagttaccatcactgaagcaggaaggagaagcaggaaagaggaaggaaacattactggaagccgcagagaaaagccagaactgtaagaaagtggccccgcacatgagggaaggccttctgcggaggagcacagctaacctatggtcaagcaaggaggcagacagaggaataaatactcagcttaattcctggcttgctcccaccagtgccctgctagagctcactattggctgaacgcaactggaagccagaaggcaatgaagccaaggaaggatgcagtttatctaggttctcctcccaggggacagagcagggcagagaa

SEQ ID NO: 446969 - DNA, 548 bp, Homo sapiens
gatgaaataaatgagtagcttgaaacttggtgttcaacttgagcttgggagtctatacttactgtgtaattaaaagacatttaaggtttcttccagtcggggtttgaagaaagtagtacattcaaatgggatcgatgagtggcatttaatgtgtccacaaaggtgtggacagagtaagtgacaccaacaagagacaatgaaaacattctgccagcaacagcaggaagagttaccatcactgaagcaggaaggagaagcaggaaagaggaaggaaacattactggaagccgcagagaaaagcyagaactgtaagaaagtggccccgcacatgagggaaggccttctgcggaggagcacagctaacctatggtcaagcaaggaggcagacagaggaataaatactcagcttaattcctggcttgctcccaccagtgccctgctagagctcactattggctgaacgcaactggaagccagaaggcaatgaagccaaggaaggatgcagtttatctaggttctcctcccaggggacagagcagggcagagaa

SEQ ID NO: 446970 - DNA, 548 bp, Homo sapiens
gatgaaataaatgagtagcttgaaacttggtgttcaacttgagcttgggagtctatacttactgtgtaattaaaagacatttaaggtttcttccagtcggggtttgaagaaagtagtacattcaaatgggatcgatgagtggcatttaatgtgtccacaaaggtgtggacagagtaagtgacaccaacaagagacaatgaaaacattctgccagcaacagcaggaagagttaccatcactgaagcaggaaggagaagcaggaaagaggaaggaaacattactggaagccgcagagaaaagccagaactgtaagaaagtggccccgcacatgagggaaggccttctgcggaggagcacagctaacctatggtcaagcaaggagrcagacagaggaataaatactcagcttaattcctggcttgctcccaccagtgccctgctagagctcactattggctgaacgcaactggaagccagaaggcaatgaagccaaggaaggatgcagtttatctaggttctcctcccaggggacagagcagggcagagaa

SEQ ID NO: 446971 - DNA, 588 bp, Homo sapiens
aatttttgaggccctaacatagtctgctataatcataacgtaagatgagtttctgttactattccatcatcacagatggttcctttcggatggcgctgctctagagtttgaatttctggtctttgaccttgggcagttttctgttttgtgaaatatgcataataatagtggttttatttctacaaggttgctgtgaggatcaattaaaacaattgatacaaagtgcttagcatagtgcttacatagtagaaaactttcaataaatgttagctatgattgttataattcccatagagtcaggcattgcgattggcatttctgggagttcagtaccatttccacatcaaattatatttcttgcattagctattggggcagatattgaggtaggtatagaaggctgccctgtgagaaattgggacagtggacatgaacagaacaattgaagccagaaaatctttgagttgataaatccattgtattgaatgctcccaaaaaatgattctyggcttatgaccaagcccactagttcataaaatagttcaggaaaacagatagtatctcttgcttgtatatcctcagcttctc

SEQ ID NO: 446972 - DNA, 588 bp, Homo sapiens
aatttttgaggccctaacatagtctgctataatcataacgtaagatgagtttctgttactattccatcatcacagatggttcctttcggatggcgctgctctagagtttgaatttctggtctttgaccttgggcagttttctgttttgtgaaatatgcataataatagtggttttatttctacaaggttgctgtgaggatcaattaaaacaattgatacaaagtgcttagcatagtgcttacatagtagaaaactttcaataaatgttagctatgattgttataattcccatagagtcaggcattgcgattggcatttctgggagttcagtaccatttccacatcaaattatatttcttgcattagctattggggcagatattgaggtaggtatagaaggctgccctgtgagaaattgggacagtggacatgaacagaacaattgaagccagaaaatctttgagttgataaatccattgtattgaatgctcccaaaaaatgattcttggcwtatgaccaagcccactagttcataaaatagttcaggaaaacagatagtatctcttgcttgtatatcctcagcttctc

SEQ ID NO: 446973 - DNA, 510 bp, Homo sapiens
ggggatgatgagaataactacttcacagaactactgtaggtgtcagaaaaaataataaaaacagccaaaatttatagtctaaataaatctctaaagagtcaggtggtcaaggtagctcacacctgtagccccagcactttgagaggccaatagggagaaytgcttgaggccaggagttcaaggccagcctgggcaacatggcaagaacccgtctctccaaaaaaaaaaaaaaaaaggcggggcacggtggctcacgcctgtaatcccagcacattgggaggccgaagcgggcagatcacctgaagttaggagttcaagaccagcctggccaacatggtgaaaccccatctcctactaaaaatacaaaaattagccaggtgtggtggcatgtgcctgtaatctcagctacttgggaagctgaggcaggagaatcacttgaactcgcaagtcagaggttgcagtgagctgagatcatgccattgcactccagcctgggcgacagaatgagac

SEQ ID NO: 446974 - DNA, 620 bp, Homo sapiens
ctatctttctataaactctctgatttcacttcattctgagctaaaagtaggatatagcatttcattgactttctcatgtttttttaaaacttcaatttcatgaagcattggtgaataatataaattttactaaaatattcatatgggaaacattgcatagcaggagttctactaatcacacacacacacatgcacacacacacacacacacacacgccctttctcaagtcagcattccctgcggtctttacctgctcataacccagcttgtactcagacaccatgcatcaatgactgtggcccatgtatggcccagtataagtcagcagatttagtttttttcccccacaagtaatccaatcacactagtaaactgtgtaatttttgtactgtatgaaagtttctaattttattaaaaattgagttgttagatggataattttatatgccatatagtctttagccaactcactagttctgcccctcatacttcacttgcytttccaaagccgagtttcccacacacgtcctttcctgtagcctgtaacaaacagcctgagaaacatcatctgtcttgaactcgttctgatatttttctcttgggaaacagctctgccatg

SEQ ID NO: 446975 - DNA, 584 bp, Homo sapiens
cctttcctgtagcctgtaacaaacagcctgagaaacatcatctgtcttgaactcgttctgatatttttctcttgggaaacagctctgccatgttatgtgccactccaatcactcctgtaattaaaaaaacacacacacacacatttttctccatcttatttcacatataattcaagtctcatgagttaatttatcaatttaattcaacaggaaatatcgaactcacaattttcacatgtggcattaaatctcaaagtaactttagagttaacatgtctattcagtaagctaaaacaatrttgtgtcatatattatgctattaccttaagttttaaaaatgagtaaaaacacatgaaggggaaattatagtatttattataccacgtaggctgtgctagacacattgatttctttgcccaaagtatcctgctttcataagaaatgatctctcatccacatggttactacaggagcagccattatcagagctgcctcatattatcttacaaaagttgattgttagcacctcttccaactccacattcagtgatatcatactggtctcttgaaatcagccatcgtga

SEQ ID NO: 446976 - DNA, 548 bp, Homo sapiens
cagggttttagttagttttagttctgcaggcatagcagaaagcctgtcactgatgctgaggtamgttgtaaatactctctcctggaaggaaagtgagatccaccctttgccttgcccaggcttttcatggcagatagtgggacattggggacctacagggaaaggatgaagaagtcaatttgaaggtacccccaaaggccacttccatcacagagaaagcctactccaaacccttctgcatgggtttaatatggacaaaaaaattttaaggtgcttatttcatttggtcttggttgatcttatcaaggaaccctccttttgtcctctgcctcccacttggtctagaatacctctctagacaccatcaaaatcccttctcagattaaatgaaagaaaatcatggccaacatagagtcaactcttacatcacacttttcaactacaatacaaatttcactaattcaatctaattagtgggagaccaatctcaccataatagttcaactgtctcactatatttatgcaagtgcagtttttctacttctcaa

SEQ ID NO: 446977 - DNA, 548 bp, Homo sapiens
cagggttttagttagttttagttctgcaggcatagcagaaagcctgtcactgatgctgaggtaagttgtaaatactctstcctggaaggaaagtgagatccaccctttgccttgcccaggcttttcatggcagatagtgggacattggggacctacagggaaaggatgaagaagtcaatttgaaggtacccccaaaggccacttccatcacagagaaagcctactccaaacccttctgcatgggtttaatatggacaaaaaaattttaaggtgcttatttcatttggtcttggttgatcttatcaaggaaccctccttttgtcctctgcctcccacttggtctagaatacctctctagacaccatcaaaatcccttctcagattaaatgaaagaaaatcatggccaacatagagtcaactcttacatcacacttttcaactacaatacaaatttcactaattcaatctaattagtgggagaccaatctcaccataatagttcaactgtctcactatatttatgcaagtgcagtttttctacttctcaa

SEQ ID NO: 446978 - DNA, 531 bp, Homo sapiens
agcttgtatttacgagctagaggaaggaaatctttgctaattttcctggcaacagcaatatactttatgggagtcttcaaatttgagttgctgaagtacgtaattagcaatattatttacaaactttaggtgtgccagtgttcagcgtacctcatgaatgacccactcttatgctcctcaggctgaggcagagtgacatcatggttgagaccacgaacctgggtgtcaggcagacctaagcccaaatctagtacttatgtgacctttggcaggtctcttaactgcatatgccccagtttccttctctgtaaaatgagataaaagtaattcctgctttgttgagtcattgagaatatcaaacatggaaaaatcatgaaacacttggcacaggcgaggtatggtggcttgcgcctgtaatctcaacactttgggaagccaaagcaggaggactgttggaggtcaggagttttaaaccagcctgggcaacaaagtgagaycctgtctctaaaaaaaaaatcaaagaattagcca

SEQ ID NO: 446979 - DNA, 545 bp, Homo sapiens
actgaaaagaagcctcaacaagttctctcaatattaaaacactttctttttatcttatttcttttttagaacatttcacaagacgagccctccctacacagtgacacaatttggacctcaactttacttatcttttgctagcctccatctccccccttgaatatttcctttccattcatcctttgtcatatgaaataataacatctacagatagagatctttcttttccatcatacttcctattactgacaattattcataccaagtttggaaagagatacatttgttactgaagatcataaaatcctggacaaaaatatccttgggatttagctccgtagctayacttatgttacattctccatctctcccaccctcacccccattaattatatattaaggatagtgtttcctttgaagaacacattacagaagaatgatctggatagtactctcttaattacgccaatcacaaaacacaaaaccatgtccagagagggttattttacttaccaaaaggatcaacgctgttacatacacgccca

SEQ ID NO: 446980 - DNA, 589 bp, Homo sapiens
acatggcatgacctttgagcaggcacaaagcaagcctttaaaagcatactcaattgtcattctttctttagagtaccagaattctgggaaaactgttggcatggatccacaaatacatttcacactgattcaatattaacagcctctctcagcgcttgttttttccaagtacttaaaaccacaaatttgttaatcatagcagaagtcctgtgagatggagcccccacatctcagactgagaaactragacccgggagagtactgcttttctctgcattaaatccacagtcaaaattagatgtttgtaaagaacctaagcttcccaaaagggaatcccaggccttaataggaataaaagatgcctttggctattttggagttcacagttatagaaggttttagaatacagtcttttaaatgtggctacagagagacaataccttttctaacaatggagaactttctgctgtcttcccatagcgtgggcaaatcaggtgacctttttcctgaatcctttatctagaaaggacaatgtattggacacaaaattggcagtctctgatatgaaaatgcttttgggcagaatcat

SEQ ID NO: 446981 - DNA, 589 bp, Homo sapiens
acatggcatgacctttgagcaggcacaaagcaagcctttaaaagcatactcaattgtcattctttctttagagtaccagaattctgggaaaactgttggcatggatccacaaatacatttcacactgattcaatattaacagcctctctcagcgcttgttttttccaagtacttaaaaccacaaatttgttaatcatagcagaagtcctgtgagatggagcccccacatctcagactgagaaactgwgacccgggagagtactgcttttctctgcattaaatccacagtcaaaattagatgtttgtaaagaacctaagcttcccaaaagggaatcccaggccttaataggaataaaagatgcctttggctattttggagttcacagttatagaaggttttagaatacagtcttttaaatgtggctacagagagacaataccttttctaacaatggagaactttctgctgtcttcccatagcgtgggcaaatcaggtgacctttttcctgaatcctttatctagaaaggacaatgtattggacacaaaattggcagtctctgatatgaaaatgcttttgggcagaatcat

SEQ ID NO: 446982 - DNA, 600 bp, Homo sapiens
ggcttcataaatgttaatccagaggttgcaaattaaaataggactgaaagtagaattttttaaatggaggcagtagattggtcctgagataactgtgaatggtggcatatatataaagtaaattatatcttaactttataaaaggaggagccagtactcagatcsaagcaattattgctgttttagaatccaagccagccaggtattgccagatgttcacatttttataggaaatttcccaagtttcaaacatttgcaactcataaaaagaaaaaagcaccactgtccacgtctccaccctccagcaaaacagaacaaaacatgttcacaggcctaccatggcctttaggctatcagtctgggatccacatattagttattataaaagctgtgatttaaaccctcctactcaccaagtttaaaccaaacagttgtgatttattttgggtaccgggggaaggtagcggggtgcaagatttttagaagcattggaagtttccacagagaaaacctataccttcccatttctaaaatcagattttaatctgctgtgaaccactgcaaaagtgaccatgtagtcccaaaaacagtgtatgatat

SEQ ID NO: 446983 - DNA, 583 bp, Homo sapiens
tgatttctttcagcagtgtttcattctccttgtagacatcttgcacctctttggttagatggattcctcggtgtttytgtgtgtgtggctattgtaaatgggattgaattcttgacttggctctcagcttgaactttcttggtgtgtagaaattatactggtttttgtatatttattttgtacctgaaactttattgaaatcatgtgtcagttctaggagccttttggtggagtctttagggttttccaggtatagaatcatatcatcggcaaagagagaccgtttgacgactttttttcctatttggatgacttttctttctttctcttgcctaattgctctggctaggacttccagttctatggagtggtgagagttggcatccttgttttgttccagttcttaatggaaatgcttccagcttttgcctgttcagtatgatattggctgtgagtttgtcttagacaactcttattattttgaagtatgtggaacaggattttggcctaagggtaaattagtacatctagagcacatggccctcatcactggaaatgaggagggtgtaagacaggtcccaga

SEQ ID NO: 446984 - DNA, 572 bp, Homo sapiens
catccccaacattaagaaacctacagaactcctcaaataccaatcttaaatgcccccttttccataaagccttttctgattcccttgggactatagctcttccttccttagaacccccatagaagattgttcacccccattctatcacctggtgtcccctccattttgcattctccatcagcatccctctcaacacctgctaacccattcatccactaaatgtaggatctttccagtgtgtcgagttattctcgaagtgcctcacagataagagacctcaagaaaattgtaatgtgatcaggccgctactagaagcccttcrctatggctcattgctatttctgagttttaggctaggacctctacacatgccagaagtggtagcattttccaggtaagcagggacagaggggcatccaatccttctttagtgctcagcataactgggctctcgtcctgcggactccaatccccatcagtcctaaaactgctccttgatggccattcagaaggtgtccctcaagtggcacatggcagcagtccagtagacacccacctagctcatgtgtcac

SEQ ID NO: 446985 - DNA, 524 bp, Homo sapiens
gcctctatttatgaaaactatgaccaaagtaactaaaactctaagtatatatgatatatacttaaaacagaggaaagataagatttattgccaaataccaggttgtggaggacttagaaaatggctgctgccctgcctgccttctgctttcctgatgaaggctgaccctctgttgctrttatgggccactctgttgctaaaacttgtttgttgtgtggtaattgttttccaaagacaacaagaaccttcacttaaaatagcacttcagaggcttgccctggctttcagtgtgtccagcatggccattaagacagcaaggtgagccactgacctacagggacatgggtgattatgcacggtctagttcaaggttacatactcaggctccacataagcctttcaaaatcatcgagccattattcgtaaatctgagatgtaaaatatgtatagtattgagacccccttttccccagagtgggaagactttgcacccacatgaatgttttgacttccccacccagtat

SEQ ID NO: 446986 - DNA, 616 bp, Homo sapiens
tccaagagtcccgcaagaatggaatgaagaaatggctttgtaattccctttcccatcactcataaattactcatatcagggaaacaaactcaaatccattagcaacagagaggagtgccatgtcatagttgggtgggagctacaaatgaagagatctgaactgcagtaaatgtcaacatctgtgtttggtactgagggttcctggaagcacccccaaaagagtggaaatattattagaagcacctttattcacaccgaatcatttcactcaattaccatttacccactgaaaaaccaaagctacagcatgtgattactaaagatctataggagcagagtgaatagagcagaatcatgtttctcttttgtcctgaggtgcagcctttacactgttaagctctcaggatcctgtatgtcaatccattcattaatataatagaatcaaactgagtttcaagcaacaaggatcatcttgagttcagcattttcatcttaaatctattccctatagtagctttaagataaagtaaacacagrtaagtcattgaaatggttcaagaacgccctgaaagagtagatgtccgtgtttggggaggaaagaatgtccccacggtaa

SEQ ID NO: 446987 - DNA, 550 bp, Homo sapiens
agaacaataggagcatcacggttccatttatttctagtagaaagtttgcttgttcaaattaaggtaactgtcaactctagccacacctgtgtcctcaccgcccactgtcctgaacaaggcagcccccacacctgactatgcctaccatgctcccctctttagtcctgggaaggctattcagttttctggaggtttatgttcaaatcttgtttcctgcttggcaacatccccagaccaatgagactgagctctaagtggtctctgattcactggcacctggcatctgaaccactcacctgcacctgtcctgctaccagctatgcttccacaagtaagcaccttgctctccagctcacaggttctttaggggtaggtaccatgttatgtatacctttcaacccatcatatttatatgaccatttgaatgtctgattaatatccctatgaaggcagakatcacgtctgtatataacttgattatgtataacttatttttgagtgcctgagcactcagaatttatgctatgcccctagcttaaccagggttttc

SEQ ID NO: 446988 - DNA, 521 bp, Homo sapiens
tttccccacttttatgttgttgttgttgctttgagatggagtttcgctcttgttacccaagctggagtgcggtggcgcaatcttggctcactgcaacctccacctcccgggttcaagtgattctcctgcctcaacttcccaagtagctgggattacaggtgcccactaccacatccagctgatttttgtattttaagtagagatggggtttcgccatgttggccaggctggtctcgaactcctgacctcaggtgatctacctgccttgccctcccaaagtgctgggattataggcatgagccacagcatccaggcccacttttaaaatatagratatgttgtgataatttactttataatttccttcataagttacacgatatcaagacgaattacagaataataatatgttttgttggttagtggggctcatgaacacaggcttagggattgttagtgggagtgattcttaatctctgatcctccaggtttgtggttaaaaggttagtggcagagaaagt

SEQ ID NO: 446989 - DNA, 592 bp, Homo sapiens
cagccatgttgaaagctttggctttaacctgagtgagattgaaagctattagaagrttttgaacagaaatgactaatgtttaataggatcactctcaggccctacattaatagactgaaggggcacggtctagatatcaattagaaagctattgcagtaatctccttgagaggtgatgatggcttccatcaggatagtatcagtggaggtagagagaaatgctcagatgctgggcacattttgaaagtggagtcatcagggttttccgacagattgaatggaaggtatagaggaagggaatagaggaagggaagagtcaaggatgactctaacatttttagcctgagtgattggaagaactgagtcatcattaactatatcggggaagatacagaaagagccatttatttgaggagagcagaaattgaatttcagccatgttatattagggatacatagctacatgatccagcctctgtccaactctctgatgagaccagagccctggtgacaacttccttgcagccttgtgggacctgcaacaggagatgcagctaagcagtgtcctgattcctgatctacagaaaccatg

SEQ ID NO: 446990 - DNA, 597 bp, Homo sapiens
ttctctggacattcattcaaatcattgaatctatcaatatttcattcctttttattgctgaggagtatccacagtttgtgtgtattacagtttgtttaattagtcacccattgaaagacatttggattgtctccagtttttcactattaggaataaagatgtggtaaacatttgttttcagccttttgtgtgagcataagttttcatttrtctgggataaatattcaggagtgcaattgctgggtcatatagcagttaccttctaaatttttatattttttattttattttttaaattttgagacagtgtctcactctgttgcccaggctggagtgcagtggggtgatctcggctcactacaacccctgcctcccgggttcaagcgattctcccacctccgcctccaaagtagctgggattacagccacacaccatcatgtccagctaatttttgtatttttgtagagatgaggtttcaccatgttggtcaggctagtcttgaactcctgacctcaggtgatccgcctgcctcagcctcccaaagtgctgggattacaggtgcgagccaccatgcccagcctaagtttttaaagcaa

SEQ ID NO: 446991 - DNA, 622 bp, Homo sapiens
ctcctgggctgctacggcctcacgaggtcttcagagtctgtttctctgctttgcagtcctgaccacagcaccaagaggtgaaagggctttggggcactgacactaagatagataaacacacgtgaaattgacatataaaccaaaacaatatactacttcgtaagcagaaatgtaattattgaagagactagacacatgaattgtcttctcaggacaatctcttcctgcaaggacattgactgtgttaaacatgttataatcaaaagatttcttagtgaacatatactcagaaaaagaggagttggctgggccagtgacatattctgagagctttatctgtgagtccactgctaattaartacacttgtcaatgggacagagtactctcgatgggtgagaggatgttcagtggatggaattctgggccttccacccaaggtgccactagaacagctctacctatactggttttatttattggggttttgttcaagatttcattagaaaaaaaatggttccactatttacaaagttagaaaatcctccatgtagtccactgacccaagcccctccctcactgctgccaaacgttttttgtctggctgacctttccttgattctc

SEQ ID NO: 446992 - DNA, 622 bp, Homo sapiens
ctcctgggctgctacggcctcacgaggtcttcagagtctgtttctctgctttgcagtcctgaccacagcaccaagaggtgaaagggctttggggcactgacactaagatagataaacacacgtgaaattgacatataaaccaaaacaatatactacttcgtaagcagaaatgtaattattgaagagactagacacatgaattgtcttctcaggacaatctcttcctgcaaggacattgactgtgttaaacatgttataatcaaaagatttcttagtgaacatatactcagaaaaagaggagttggctgggccagtgacatattctgagagctttatctgtgagtccactgctaattaaatacacttgtcaatgggacagagtactctcgatgggtgagaggatgttcagtggatggaattctgggccttccacccaaggtgccactagaacagctctacctatactggttttatttattggggttttgttcaagatttcattagaaaaaaaatggttccactatttacaamgttagaaaatcctccatgtagtccactgacccaagcccctccctcactgctgccaaacgttttttgtctggctgacctttccttgattctc

SEQ ID NO: 446993 - DNA, 538 bp, Homo sapiens
tatcctcccagccggcatctagcatagtgcctggcacattctaaacagtaaattgtggttgaataaatgtgagtgaacttaggaactggagtttgaagccagtttgtctgatgtccaagatcaagctccttccttgctgccacgctgcttcagctggtatttatataatatttccattttcctatgataaggaaattgaaattcaaggaatctcaaacctagctggagaaagaagcaacttcctcacagattcaaaagaagataattagggaaaggtagatttccaccatccacatgatgcaagatttttctcagtcccttctctgaactcacagaagaggcaccctgtctacttggcccaccgtgctcaatcccttgygggaaggagcacatgagcgagcaagtgcaggatctggctggctgctctggacgctgacacaggagcaagctccatgcgtggcctgggccagaccaggcatattgcctcaaggggaatgctgtgtcgcccagacgagggtgcctgtgaccccgaagcccc

SEQ ID NO: 446994 - DNA, 566 bp, Homo sapiens
ggttttagaaactgccaggaactgagggtaaagaccaaacatataccatatttcttattatatcacattatcacaatgtgctttggcttaatagacaaataagttggaaaataacgaaaagactagagttttctttgaatttttggagggctactctcaatgaatatttctcatttatgttatcaagttatgcttttggtggaaacagccactgatttggcaatgcatagagtgaaacacagcctcaattcyggccctcccaaatgccattaaataactgaaatgtgattaaagttttagatgttacagaaccttgccaaaattcattagcccccaaaatcacctccagtaatgtacttgccattctacaaagaagcaatgataggtgaaactcaggagatgccttgagtaaccttgaagttctaggttggaaatgcaagatattacgcccaagttttatttccatttattttaagtaatggttctgcttataataaaaacaaggacagagtctgtgtttatttgccttatacattccagaatttcatttccaggtccataactat

SEQ ID NO: 446995 - DNA, 566 bp, Homo sapiens
ggttttagaaactgccaggaactgagggtaaagaccaaacatataccatatttcttattatatcacattatcacaatgtgctttggcttaatagacaaataagttggaaaataacgaaaagactagagttttctttgaatttttggagggctactctcaatgaatatttctcatttatgttatcaagttatgcttttggtggaaacagccactgatttggcaatgcatagagtgaaacacagcctcaattctggccctyccaaatgccattaaataactgaaatgtgattaaagttttagatgttacagaaccttgccaaaattcattagcccccaaaatcacctccagtaatgtacttgccattctacaaagaagcaatgataggtgaaactcaggagatgccttgagtaaccttgaagttctaggttggaaatgcaagatattacgcccaagttttatttccatttattttaagtaatggttctgcttataataaaaacaaggacagagtctgtgtttatttgccttatacattccagaatttcatttccaggtccataactat

SEQ ID NO: 446996 - DNA, 594 bp, Homo sapiens
cagcctcaattctggccctcccaaatgccattaaataactgaaatgtgattaaagttttagatgttacagaaccttgccaaaattcattagcccccaaaatcacctccagtaatgtacttgccattctacaaagaagcaatgataggtgaaactcaggagatgccttgagtaaccttgaagttctaggttggaaatgcaagatattacgcccaagttttatttccatttattttaagtaatggttctgcttataatamaaacaaggacagagtctgtgtttatttgccttatacattccagaatttcatttccaggtccataactatgtgttagaatgatgagatcttggagtgtcaggctaggtgaggttgggctatggtaacaacctcccccctaggtggactatttttctcttatgcttcaagaccattgtaggtttgcagggtgctctgttctttgtctcctcattctaggaataatattgtcagagcaactatcatctcaaatattatcgttgctatgataagggtaaaaaagagttttggaggaccttacactggcaatataatgttctcttctaaaaacaacaatca

SEQ ID NO: 446997 - DNA, 594 bp, Homo sapiens
cagcctcaattctggccctcccaaatgccattaaataactgaaatgtgattaaagttttagatgttacagaaccttgccaaaattcattagcccccaaaatcacctccagtaatgtacttgccattctacaaagaagcaatgataggtgaaactcaggagatgccttgagtaaccttgaagttctaggttggaaatgcaagatattacgcccaagttttatttccatttattttaagtaatggttctgcttataataaaaacaaggacagagtctgtgtttatttgccttatacattccagaatttcatttccaggtccataactatgtgttagaatgatgagatcttggagtgtcaggstaggtgaggttgggctatggtaacaacctcccccctaggtggactatttttctcttatgcttcaagaccattgtaggtttgcagggtgctctgttctttgtctcctcattctaggaataatattgtcagagcaactatcatctcaaatattatcgttgctatgataagggtaaaaaagagttttggaggaccttacactggcaatataatgttctcttctaaaaacaacaatca

SEQ ID NO: 446998 - DNA, 596 bp, Homo sapiens
tgggagacattaatgtattccttaatgctgagggacttaaaaatcatttatttccttgtaagtgtgtatgatttcaaatgcttacattgcaaccttcagagaataagtaataaaaatgacctyataaatattcttaaatgttgttgagagagaatatatgcctaaagcatataaataggggacaggccttttttcgattctggatatatatgtcatatgaacagggaaaaagaggatgatcccagaaccaagcaaattgcctgacacctatgacaaattctaagtatttgttgaacaaaggattcttttgtataaggaaagtatgtttttacagagaaattcacagacttgaagatgacacctagaacagtacctgcctggtgcctggtagtttctgggttgtatgtattgtattgaattgtaagtgttgaatcagtgaatgaagacagaaaacgtgagtgtacatgaaaggggagaaagagagaagagatactgaaaggagaacacacagtacacccaaccaagcagagaaagtggacaaatgatcaaacatgaaaagaaaaatgtacagagaggtaagacacggtaacattagg

SEQ ID NO: 446999 - DNA, 596 bp, Homo sapiens
tgggagacattaatgtattccttaatgctgagggacttaaaaatcatttatttccttgtaagtgtgtatgatttcaaatgcttacattgcaaccttcagagaataagtaataaaaatgacctcataaatattcttaaatgttgttgagagagaatatatgcctaaagcatataaataggggacaggccttttttcgattctggatatatatgtcatatgaacagggaaaaagaggatgatcccagaaccaagcaaattgcctgacacctatgacaaattctaagtatttgttgaacaaaggattcttttgtataaggaaagtatgtttttacagagaaattcacagacttgaagatgacacctagaacagtacctgcctggtrcctggtagtttctgggttgtatgtattgtattgaattgtaagtgttgaatcagtgaatgaagacagaaaacgtgagtgtacatgaaaggggagaaagagagaagagatactgaaaggagaacacacagtacacccaaccaagcagagaaagtggacaaatgatcaaacatgaaaagaaaaatgtacagagaggtaagacacggtaacattagg

SEQ ID NO: 447000 - DNA, 417 bp, Homo sapiens
ccaactgtggaagtgggaaagagggaccatcatcttttgaacacacacccccactggmgaagctgaagttctgtttgcaggggaagtttccaactttacctggagctgagtcaatgcaggcagccgagcgaaacacaggagtagaggtagcagcagaagggccctgggggttcactgcatctcctagcaggccattcctgcctggcctggcaccacagggatccatggggagagcagccagaggagcaggactagaactccacagagggaaggaaatctctagctgaactttgtaacagtttgaacagggtgagaagcctcctggccagatctcaggggagggcgcaaatccagtatgcagactccacatgcaggggaagaaccaagcccatttatttcgcaactgggaggcaggta

SEQ ID NO: 447001 - DNA, 576 bp, Homo sapiens
ttaacacaatccaacaaagacaaagacaaaaagaataagaaaatatgaacaaagcttccaagaagtctgggattatgttaaatgaccaaacctaagaataatcagtgttcctgaggaagaagagaattctaaaagcttggaaaacatatttgggggaataattgaggaaaccttccccagccttgctagagacctagacatgcaaatacargaagcacaaagaacaactggaaaattcatcacaaaaaagttatttgcctaggcacactgtcatcaggttacccaaaattaagatgaaggaaagaatcttaagagctgtgagacagaagcaccaggtaacctacaaaggaaaacctatcagattaacagcagatttctcagcagaaaccctacaagctagaagggattggggccctatcttcagcctcctcaaacacaacaattatcagccaagaattttgtatgcagcaaaactaagcatcatatatgaaggaaagagacagtcattttcagacaaaccaaaggctgagagaatttaccattaccaggccaccactacaagaactgctaaaagga

SEQ ID NO: 447002 - DNA, 451 bp, Homo sapiens
aaaaacaagattggggaaagtccgaatacatgatcatttacttttagtaaaaaaacaaagtgatttgcctcaatgtcacctgggtaaacaggaccctaaatcataagcttgctaattgttctttcctatcatagcatcagcctgtgtgtgtgtgtaactatgtaaacatttattaatgaatctttaaagcttttatagaatcaagccaggattttgtaagtaactaaaatagtgttacaaagaaatggattaaattaggggaactgtgtgagagtctctcacattttatctttcaacattagattaatcacaagcacaaaaatactatcttattgagctaaaaaaattctttgattagagttctcttaatgatgactccagttcactttttatgtgtaaatcaaaccacagggtgctcagaaratattaattggcaatgagaataatcatt

SEQ ID NO: 447003 - DNA, 609 bp, Homo sapiens
atgaataaatgtggtaaactaaatatggtataaacaacttatttttctgggatttgtaggaagtgatggtcaatggatatgcagtttaggaggttatcagtgatcaatgatttaggagattactctgtgatcttatacactaagatcacctaaggttttaggtttaaggttttaggttttagcactgtgtataattctcgctttctgatacctaagacagcactgcatgtaaagaagccattagtgcctactcatgccccatgctaataatatctgcaagatcatgtctatttcagactctactgcattttctaagtggagacaccrtctccaaatgcaatggatgcttttacaaagaggatcctcagaatggagaacactccatagagctaccagtggaagacacgcattcccctttctcatgtaagtgtgtggcaggctgagaggcggtgggataactgaatgaattgatccaggattttttactccttagctcagctagatctgggttcgtgtctcacaaccaggaaaaattagacacacagacatcaaagagtgagtggagtagaatttattaagtgaaaaggaaagcactcagcaaaaagaggg

SEQ ID NO: 447004 - DNA, 527 bp, Homo sapiens
agaatgttaagcatatggggttatctggcctcaaagattggaatgaaatcttttgtacaatcgtccattgctagcacatgctgaggcccaagtttctgtcagaggctcactgagaccttcctaagctaccgaatggaatttttgtcaaaagaggtcttgtggtcttggcacaggttcaggggctggtctggacaaataggagaaaggaaattggagaacctactgtgtaccaaacagtatactgascactttacatagattatctcatttaatcctgccaacaatcctcctgtgagataactattattatcacctccaactgagaaacaaaaggaagctgaagctactagaattaagggtccagactttgaaccaataactttttatgggaaagcataatactttttccactgcacagtataagattcatgcaatttagaaggaattgatacctccctcccccacatccatgaatgggccctgatggacttaaggtaactctcatcatcccttcacctcaaccagca

SEQ ID NO: 447005 - DNA, 530 bp, Homo sapiens
aagcaggggtagctattcttacatcagacaaaagaaactttaaagcaacagcagttaaaagagacaaagagggacattatataaggtaaaaggccctgtccaacaggaaaatatcacaatcctaaacatatatgcacctaacactggagcttccagatttataaaactattactaatagacctaagaaatgagatagacagcaacacaataatagtgggggacttcagtactccactgacagcactagacaggtcaacaagacagaaagtcaacaaagaaactatggagttaaactatgccttggaacaaatggacttaacggatatatacagaacattccatccaactacagcagaatatatattctrttcaacagcatgtggagcattctccaagatagaccatatgataggccacaaaagagcctcaataaactaaagaaaattgaaattaggccaagcactctctcagaccacagtggaataaaattgtaaatcaactccaaatggaaacttcaaaaccatgcaaa

SEQ ID NO: 447006 - DNA, 546 bp, Homo sapiens
cagtcacaattctgaaacgaacattctcctacgcatttgtgccagacagaaatttcattagaagtttatcctcggggtgtgcrctttagaccaacatttttttttttacaggctcagatctgatgtcagaaccctgagttctggtctctgcctcacctcttgctagcttctaacagagctgtatctgattctctctctccctaggcagcaagagcatctgtcccactcaaaagagcagcaacagacctggagaaaggaactccatttctttctcattatatatattctccatatgtttaaatatttacacacacacacacacacacacacacacatatcaatggaaacaaatgaaaaacagacctaagttcattattaaaatcccggctatgaacttccattttctttcctggaaaacattttttggggatcttttgaactctaatgaaaatgtggtgaaattcataattgaaatatgttttaagctgcctaaattgtctttgcctgaaggctgattatatacttattaagatgtctctgacccca

SEQ ID NO: 447007 - DNA, 645 bp, Homo sapiens
tgctcaggcagaacaaaggcaatctgaatgtctgattcacccccacagggctctaacaaagcagttaggctttggaaaagggtaaaaattcagcagacacaagacaagcatgctatcccaccttgattctcaygcccactgtagatactaatgattgggcattaaatactccttcccaccaggaactcatgcctcagaatcttttttaacacgggattccaattccccattaccaatcagtagaagttgctacaaaagatgaaatttatttgccaaccttgatataaaaataattgaagtttttgcttgatatgagctaaatcatatactggggaaaagaaaatgcagcaagatatcaaaatttgctcaagatctatggggaagagcaagatggagactggcaactgtggaaacattttcaaatcctagaatttgtagggggtaactcttgtcaaattcaacattagccctccacagccccaagaaactctgtaagcgaccatttaccttaccttggaggactgtataatcaaaggaatcagaatcacctgaaagcttcacagcatgtcaagagcaagacccacaccactctcccaggagcatatggaccttttctaaaaccaattattggatagccacgcaaca

SEQ ID NO: 447008 - DNA, 581 bp, Homo sapiens
tatgttattggatagacttaagtaaagacacgagcagaaaatacaactataagaaagaggaatgagcaaagtaacgggaagggaaccaagtcattaggggcaaagatggccaacagtccaagaagagagggtcaagggagggctataagaagtaacatagaatagctaataatgaggatacagaagatagcatagaataatgaggaaggaaaaggcagattggagaaaaaaaggaaagaaggggtgggggctgctacggctttaatgcagccacgtatcaaagaggagctggtcagagtgaagactgcagagatcctttgtagcagcagggctttaaacatttcaagatactataaatttcatatttctttcgagaaacattctaaatgctttacaaatattaactcatttgatctcatagtaattgaatgttgtaagatacaaagtattattaaccccattttacagacgagaaaattgaaagagagttgaactgacttgccaagatcacacaggtagaacatggtgaaggtaagagttgtgcgctggcggttrggggctggaatacacaggtcttaacc

SEQ ID NO: 447009 - DNA, 558 bp, Homo sapiens
aatgtggacaaaatatcagtaaggatagaggagatttcaaacataaaaataatcaaactgaccaagctgaaattaataaaacactatatccaacagcagaatatgtacctttttgaagtacataargaatatacaacaaaatagactataaaaagccataaaggaagtcacaacacatcttaaaggataaaaataacagagtatgttttatgaccaggggagaattaagttaaaaataaataacagaaagataactataaacatttccaaatatttaaaaataaaataaataaaaataattaatgggtcaagaaaaaaatacaatggaaattagaaaatgttctgaagtaataacgaaaactcaacatagcaaaacagtggcaaacaattaagacagtacttagaggaaaaatttataggtttagatcatatatttaaaaagagtaaggtttaaaatcaaatatctaagattttatcattagatgcaagaatgaaagatcagcaaatgaagcccaaataaaatatgataaagaacataataaagaataataaacataa

SEQ ID NO: 447010 - DNA, 569 bp, Homo sapiens
attattttaagagaagtaactcagggatggaaaaccaaacatcgtatgttctcactaatctgtgggagctaagctatgaggacacaaaggcataagaatgacacaatggattttggggacctgggrggaagggtgggagggaggtgaaggataaaagactacaaatagggtgcggtatatactgcttggttgatgggtgcaccaaaatctcacaaattaccactaaagaacttatgtaaccaaacactatctgtactccagtagcctatagaaaaataaaaaagaaaagaaaaaaattttttggtatataccatagcaggctcactatttctctttttttcaaaagtgttttgttgattcttacaacctttctgtttgattgttcatttttaaaaacattcttaaaatgagatttgctttcactttcaaatgaattagctttgtcaagttatgcggaaaatcctattagaagtatttcttggtattggactagatttgtaagttgattgggtgcagttgaaatctttaaaaaccactattaaatttgtggatttaagcccaaaagaccc

SEQ ID NO: 447011 - DNA, 569 bp, Homo sapiens
attattttaagagaagtaactcagggatggaaaaccaaacatcgtatgttctcactaatctgtgggagctaagctatgaggacacaaaggcataagaatgacacaatggattttggggacctgggaggaagggtgggagggaggtgaaggataaaagactacaaatagggtgcggtatatactgcttggttgatgggtgcaccaaaatctcacaaattaccactaaagaacttatgtaaccaaacactatctgtactccagtagcctatagaaaaataaaaaagaaaagaaaaaaattttttggtatataccatagcaggctcactatttctctttttttcaaaagtgttttgttgattcttacaacctttctgtttgattgttcatttttaaaaacattcttaaaatgagatttgctttcactttcaaatgaattagctttgtcaagttatgcggaaaatcctattagaagtatttcttgktattggactagatttgtaagttgattgggtgcagttgaaatctttaaaaaccactattaaatttgtggatttaagcccaaaagaccc

SEQ ID NO: 447012 - DNA, 489 bp, Homo sapiens
ggctcactatttctctttttttcaaaagtgttttgttgattcttacaacctttctgtttgattgttcatttttaaaaacattcttaaaatgagatttgctttcactttcaaatgaattagctttgtcaagttatgcggaaaatcctattagaagtatttcttggtattrgactagatttgtaagttgattgggtgcagttgaaatctttaaaaaccactattaaatttgtggatttaagcccaaaagaccctaaatagtaatcagaaaaatcatgatgattgcaaaacttggactttctagcatttgtgcactatactgtatatggtagatattctcttggtgtctttattattgtagttaactaataacaaatcaccaatgtagatttaaaactgagagtaaaaattcttttccaaggaatataaaaatgacgctgaattattatatatactccaaatgcataaaatgctatttcttattttcttctg

SEQ ID NO: 447013 - DNA, 590 bp, Homo sapiens
tgtagcactcactgcgcaggtctgcagcttcactcctgaagtcagcgagaccacaaacccacctgaaggaagaaatctggacacatctgaaggaacaaactcccgacacatcatctttaagaactgtarcactcactgcgagtgtccgtggcttctttcttcgagtcagcaagaccaagaacccaccaattccggaaacagtacctactgccattatcccaatggcataaccattttatgtccacaattcacttctatagttataggtagaagtttcatgatttacatgagtacatctatcggtgtagattttacactaagattcaatctaacatccgtaatagctgatgttttgaagacagtaatgtaggaaagatatattttaatcacttttcatttaagtgaccatatataaaaaaataaaccaataatttagcagttccaagtctccaaaggacattttcaaatgtacatcaagaaatggttacagagatgtttaagaagcgtcttcatgtctacatcctgttgtaactgctgtactgttttctcttccagctgcttctctttgccttcaagagggactcgggtaa

SEQ ID NO: 447014 - DNA, 529 bp, Homo sapiens
cgtcttcatgtctacatcctgttgtaaytgctgtactgttttctcttccagctgcttctctttgccttcaagagggactcgggtaagatggatgttttgcttgacttcttggatatcctggactttctgtagctctttatttttccttaatctgtttattatacatttagcttggcgtttctgtttgatctcttcaactctcttcattgcatcaatagttttattccataggtctcgctggatttgataggttcatttctatgttattcaaattcaaatgaattatccactgtaagctctttaccagctgcttcccggaatgctttagtccacctaactttgcaaggattgtgctgctttttaacttttttatgccgtttagatttacaaaatctgaacaccttgcaatcattgcggatgaacgttatgccatggccagggtagatgggccccaaacagaaataatgcttcttgatacacgtgttgaacccgcgtgggtccccaccagccaaatgccaagcttgagagg

SEQ ID NO: 447015 - DNA, 529 bp, Homo sapiens
cgtcttcatgtctacatcctgttgtaactgctgtactgttttctcttccagctgcttctctttgccttcaagagggactcgggtaagatggatgttttgcttgacttcttggatatcctggactttctgtagctctttatttttccttaatctgtttattatacatttagcttggcgtttctgtttgatctcttcaactctcttcattgcatcaatagttttattccataggtctygctggatttgataggttcatttctatgttattcaaattcaaatgaattatccactgtaagctctttaccagctgcttcccggaatgctttagtccacctaactttgcaaggattgtgctgctttttaacttttttatgccgtttagatttacaaaatctgaacaccttgcaatcattgcggatgaacgttatgccatggccagggtagatgggccccaaacagaaataatgcttcttgatacacgtgttgaacccgcgtgggtccccaccagccaaatgccaagcttgagagg

SEQ ID NO: 447016 - DNA, 582 bp, Homo sapiens
taatatttattttatgtgtgtatttactatattacatattktagtataatatttatttgctatatcccattctgggatataaatgttctccatacaggatttaatttcattgagagcttgcattcacactgaagattttactaagcatttattaagtgtctactatgtggaggatattaggattcagtggtaaataagacaatgttgttgccctcctgggatttcattctgtcagtgagtcagacattaagtaacacattacagaatgcattgcttcatgacaaatagtctaggtggcgtgcaagctaagcatggggtcctgtgagcactgaaggaggaactgtgacttactgtggagggtcagggaaggcttccttggaaagagacatggacctgattctggaggaggattagaaattagggaaattggtgaaaggtttccacagatgagacattacatatgaaaaaccactaataaaaggattaaaaatgtagtgattcattttaagaaggaagcgttgtaaagatctgagtttggaagaggaggaagaaatgttctgaatttttcatttctcctgtttc

SEQ ID NO: 447017 - DNA, 196 bp, Homo sapiens
tcatccctttggtgatatcatatttccctgattgttcttgatccctgtggtcatgtgtcattgtctggagatttgaagaagtagatactaattccagttacagactgactttatctcakaaaacgcaacagtcagcctgttccaagattctgggcaggctgtgtggtgtgatccataggacttgggctgctgtggt

SEQ ID NO: 447018 - DNA, 570 bp, Homo sapiens
atggtatgtctttttctatcttttgactttagcccatctatatctttatagtttaagtgagtttcttatagacagcatacagttaagtcatgctttctgtaaaaacatacaacacaataatcttttgattggtgtttttagactattcatatttagtataattattttgtgattagatataccaacttgctaggttttttttttttttttttcctgggttcacaccattctcctgcctcagcctcccgagtagctggggctacaggagcccgccaccacgccckgctatttttttgtgtttttagtaaagacggggtttcaccatgttggccaggatggtctcgatctcttgacctcgtgatccacccgcctcggcctcccaaagtgctgggattacaggcgtgagctactgtgcccagctgctaggtttttataaaaatacatttttttctttttggcttttttggggttaagtgaacattctttatgatactttatgattgcatttaaaataaaataaagtattatttatatttctctttaaagtattttcagtatttgccatagggt

SEQ ID NO: 447019 - DNA, 521 bp, Homo sapiens
tttccccacttttatgttgttgttgttgctttgagatggagtttcgctcttgttacccaagctggagtgcsgtggcgcaatcttggctcactgcaacctccacctcccgggttcaagtgattctcctgcctcaacttcccaagtagctgggattacaggtgcccactaccacatccagctgatttttgtattttaagtagagatggggtttcgccatgttggccaggctggtctcgaactcctgacctcaggtgatctacctgccttgccctcccaaagtgctgggattataggcatgagccacagcatccaggcccacttttaaaatatagaatatgttgtgataatttactttataatttccttcataagttacacgatatcaagacgaattacagaataataatatgttttgttggttagtggggctcatgaacacaggcttagggattgttagtgggagtgattcttaatctctgatcctccaggtttgtggttaaaaggttagtggcagagaaagt

SEQ ID NO: 447020 - DNA, 581 bp, Homo sapiens
cagcctgggtgacagagtgagactccttctcaaaaataataataataatagtaaattaaataaataaacaatttttgttgttgtaattcttatttttgactctgaatgcaattttttatctggctgctttcaagatttgctctttaaacttttattctcagaaacggttgactatgggtcaatcaaacttgggtgattttgtttttgtatttgttgttggtttttttttgtttttttgtatttaccctgcctgcaatttttctgggctttgtggatttatatcttatggtttttcattaattttagaaaattcttgactataatctcttcaagcattccttcttccttgktctctcttctccttctgtttctctaattacacatatattagactttatatatcatattatgaatactctcttctgaattatacacttttttctctggaggtttcaatttggacaatttctactgacttatcttcaattctcattctttcctttggcgtatccagtctgctactgactgttgaaggaattcttcatttctttcatttttttcttagcatttccatttgactc

SEQ ID NO: 447021 - DNA, 602 bp, Homo sapiens
caaattatcctcccgccttggcctcccaaagtgctgggattacaggcrtgagccaccgcacccagcctaccttattttctgtgtcataggaatcactgtcttcctttgcttgatgtccagtatcttcaaaactgttgtctcctgtatttttttctgattttttggttgtttcaggtgggagagagtaaatccagttagcgtttcttcatcttgtccaaaagttgaaggcttggggggtgggtggtgggaagagtagggcttttagtactagtgcgaggacagagtcagtgctgcacactagttataataacctcaaactgtaaacaacccaaacatccatcaacagaaagtaaataaagtgtggtatattagtaaaactatcctgtaacaagagtgaatacatgatagctaaatgtaacaacgcggatgattctcacaaacataacgcaacccaaagaggccagacaggaaagatacatcctatgggattccatttatataaaaatttaaagccagcaaaactagtctgaagtcaggacagtgagtacccttgaggggagcatagtacgtggaaggagacacgagaggacttctggggttct

SEQ ID NO: 447022 - DNA, 587 bp, Homo sapiens
ctgttggaatttgataattttttccacagtggacatatattatctactaataaaagtgttttaaaataggacatacataacattagtaattttatattgtcacagaaaaacaattacaagaatggtgacccagattaattgtgaatttgaggaagttgttccaagttcaaatccagactcccaaattgaagtagaggaggtcagtttatacacccacatggactacaatgaagtctttacccctgtcagttgtttagaaaaatgttcagcacttcaaaaccagaaccaaggtaaaacgtttattttatattgttgtaaaacatttcttactgatatacacatattcttttcagtgagttttttgtttgagttgaataaaaaawtttttattaaagatccacctgcataactctaagctttgccacattagggcagtatttcctcattcatattaatcctctttgtaagttgggttatttttggagtttaatttgctgggcctcaaaacaacctgcagagatttgatcatagtatgccttcaacatactgctataatgacattggcatctttttaagatcccatgata

SEQ ID NO: 447023 - DNA, 606 bp, Homo sapiens
acatttatcaatatcagatactagtttatatatttaatggttttgttgctgtatcctccttaccagtctaaaacccactgagagcagagactacttctatgtcttttaagtactgtgtccttagtayttataacagtgcttggtacataatatataccaagtaaatgctgttaaccgacttgactcctccaaggatgctacttctttactagtccatgacttgatacaaacaaaaaactattttatacatatatgcttaaaaataattttatattcggtgtgccattacaacttgaagtaggcctcagatagtcaagaaaaattctattataataaaacaaatgtttacaatgttagactattttaagtcttcatcatctacatatcttttatttggtttattcatatcaaatataagctttccaattccttatttagttacctaaattctataataaaatactaagttgttaacttcttggaattctgacatgagtagatgcaatgagtttttaattagtaaaacattgcatattcttaataatttgctgtgctaaactctgaaatggcttttaaaacacatttttaagaaatgaaaacaaacat

SEQ ID NO: 447024 - DNA, 637 bp, Homo sapiens
ttgctccagctgaaactgctcctgaccaagtcagaaactgacctctgtggtgtccaatttaaagtcaatttcagttctcgcctctcaggaaccatcagcagcattggacacagtggcccattccctttttgaaacagctttattcacagattctagatctcaacctcactggctgctctttttccttccctcccctcctcccgctcctcagagtcccttttaggttctgcatgttggagtgccctaagttttagtcttggccttgttcaatctagtctgtcctgtgactttcaataccaactatatgctgaaatggcccacgtttatatctctgcgacctgtctcccctagctagactcatctggacagctccatttgagggtttgtgttggaaagaaatggcttgttcctccccacccctaccccaaaatcactcatcayctatcttctctatcttaggatgtggcagtccattcactcacttgctcatgccaagaatttagaagtcaactttggtttctctctttttctcggtctgctttcagcgcatatcacagtgtatcataaattctgttcgcttcttactaactgtaccactatcatcatgcctgagtccaagtcactctcatctcttgcc

SEQ ID NO: 447025 - DNA, 617 bp, Homo sapiens
cttgcctggcctatgaagcagcttcctaagtggcctcgctgattctgctctctgtccctgtggtctctattccatggggcagccagagtagtcctrttaaatcatgaatcagctcatattgttcccctgctcaaaaccctccagtggctcccaacacatgtggaacaagctgcagcacccttacagtgatttggccctgtctccccagtactgattgctgccactctcactttgctccagcacatagaccttctttctgctcccgaaacacaccctcctgggtgtggcctcagtacccttgcgtttgcagttccttctatccagaacactccttcctccaggtacttcatgacttgttttattcctttctccactttattttttttttcatcttttttatcttcacctgaaatgatatatttatttaagctccatgaggagagaaacgttgtctctcttgggtactgctgcctctctatgctgagagaagtgcttgaaataataatagatgctcagtagatattaagtaacaagacaatcaatggtataaggtattttccaaattttaaattctgattccacccctttggtacactggatattggccatattctttt

SEQ ID NO: 447026 - DNA, 502 bp, Homo sapiens
acatatttttctttaccaaaacttgagaaatggtaatttattaaagattagttgcagtgtataatctgaaaccatgtcaacaaactttcattctgttacattaaaatcccttggtttatcttagtcttttaatagatatcttacccttgccttattttgtgatattagttggaaaatattgagtcactaatatacgtgatcttacaawtgtggaaaaatttcattattcaatgtcaaagaaacaccacatgcattagtaactatcaatgttattagatagaaaagcctgtcaatattgggaagctgtccaaataatgctggcaaatggaagttttccaaaattcaaatttttaatttaaagcttgaatcttatcttgagcagtgagtactgtcagtttacttgaagtgtcagatttattctactcattttcaaaaacatatctgccagatccaaatctgtataaccataatttttctgtcggtcacttcttaaagtgaaaat

SEQ ID NO: 447027 - DNA, 607 bp, Homo sapiens
tcataaaagggagggccctgtggctcaccgctctccccaggcagcctggggaacaggacctgcaccggcccaccttgcggctgctactaggagctagtggagggcttgctgggccttcctagaccaggaaaagaaacttaattaacctttaattaggcaaaatatataggtgtaaagtcttatgctataaagctttactaagaccaatcacaaggaggtcacattttcacacaaaaktgtttgaactaaaccaaaaaggaaaacaaaaccaaaccaaaaaccctgaatcttcttgaaatgacaacactccttaaaggctaagtgccttggatggccatatatttgcataatgacttgctttttgttcctttgtttgttctcactaattgctttagaatacctcttttactctgctctttgtcatcttgatagagcccagtcctttgatatggacaatgggatccttaaaggcgcagtgtaaaaaaggaagcctggcctggcctgtggagcgtgggagaaccagagcctggaggagaggactagatggatccctggagttttccctttagagctttctggttaacatcaagagaaaaggagttagagg

SEQ ID NO: 447028 - DNA, 542 bp, Homo sapiens
agcttgaagtgacacattttagttctgattcttaaaaagcaaaaggcagacctacatatcaaacatagaggctggaaaggatgttaaggggatgaaaygtcatcagaaatgtcagcacataggctttgaactctggtctcctgcctagatcagtgggtgctatggtagtgcatttgcataagtgcagtttacataagaaaatgccaagttgcactgcaatactatttactttccatgtaaataattacttcagtcaactttgctttaaaataaatcccatagcaataatgcttgataacaaagatatgctcctattcactttctatacatatttaattctcctcaaactgatggaagaataaaatagaaacagaagtgttttcattatctccctcattgatccttgagttggggaccaaaaaaaaaaaaaactggcactgacaaactttattgtaacacacactgaaataggaattaaaatataattaatgtacacatataattaatatacatatatagcaaactgagcatacaaatgttta

SEQ ID NO: 447029 - DNA, 628 bp, Homo sapiens
gaagggcaatcaaggcccctgctggctaaatcatgacatagtgctggagaggtaggacagtgaagctgtattgctggccttccarttgaaagtaacctgcttctggtgttctttactaacaggtgttgagggaaaaagaaacatttgccagatgaacagcctggcttatgtaagcgctcacctgtggtagctcttctgtacctgggtttgcttggacatctcagcttccatcgtagtggccatgtgtcagctgtgtacagaagggtctgctgacccagatcttattcctaatgataggggtgtttgatgatttttagtggaaatgatacccagtcatttctgtgtaccggaggatgcaataacaaaactgatttttttaaaaataacatttcaaaatttagatattcaaaattaggtagtaatcttgaaaatagtcacttggaagatcacagtgttgctgtttctgtgttgctgtttcttagaacatttctagaactctgatgtcacaaaacattctttggagtatcttcagtggtggcaagccttcattcttatcagatagatctggtttggggtaaacacctaaagtaatctggagtcaaatcaggcagttaagagtaatgacatt

SEQ ID NO: 447030 - DNA, 628 bp, Homo sapiens
gaagggcaatcaaggcccctgctggctaaatcatgacatagtgctggagaggtaggacagtgaagctgtattgctggccttccagttgaaagtaacctgcttctggtgttctttactaacaggtgttgagggaaaaagaaacatttgccagatgaacagcctggcttatgtaagcrctcacctgtggtagctcttctgtacctgggtttgcttggacatctcagcttccatcgtagtggccatgtgtcagctgtgtacagaagggtctgctgacccagatcttattcctaatgataggggtgtttgatgatttttagtggaaatgatacccagtcatttctgtgtaccggaggatgcaataacaaaactgatttttttaaaaataacatttcaaaatttagatattcaaaattaggtagtaatcttgaaaatagtcacttggaagatcacagtgttgctgtttctgtgttgctgtttcttagaacatttctagaactctgatgtcacaaaacattctttggagtatcttcagtggtggcaagccttcattcttatcagatagatctggtttggggtaaacacctaaagtaatctggagtcaaatcaggcagttaagagtaatgacatt

SEQ ID NO: 447031 - DNA, 628 bp, Homo sapiens
gaagggcaatcaaggcccctgctggctaaatcatgacatagtgctggagaggtaggacagtgaagctgtattgctggccttccagttgaaagtaacctgcttctggtgttctttactaacaggtgttgagggaaaaagaaacatttgccagatgaacagcctggcttatgtaagcgctcacctgtggtagctcttctgtacctgggtttgcttggacatctcagcttccatcgtagtggccatgtgtcagctgtgtacagaagggtctgctgacccagatcttattcctaatgataggggtgtttgatgatttttagtggaaatgatacccagtcatttctgtgtacyggaggatgcaataacaaaactgatttttttaaaaataacatttcaaaatttagatattcaaaattaggtagtaatcttgaaaatagtcacttggaagatcacagtgttgctgtttctgtgttgctgtttcttagaacatttctagaactctgatgtcacaaaacattctttggagtatcttcagtggtggcaagccttcattcttatcagatagatctggtttggggtaaacacctaaagtaatctggagtcaaatcaggcagttaagagtaatgacatt

SEQ ID NO: 447032 - DNA, 628 bp, Homo sapiens
gaagggcaatcaaggcccctgctggctaaatcatgacatagtgctggagaggtaggacagtgaagctgtattgctggccttccagttgaaagtaacctgcttctggtgttctttactaacaggtgttgagggaaaaagaaacatttgccagatgaacagcctggcttatgtaagcgctcacctgtggtagctcttctgtacctgggtttgcttggacatctcagcttccatcgtagtggccatgtgtcagctgtgtacagaagggtctgctgacccagatcttattcctaatgataggggtgtttgatgatttttagtggaaatgatacccagtcatttctgtgtaccggaggatgcaataacaaaamtgatttttttaaaaataacatttcaaaatttagatattcaaaattaggtagtaatcttgaaaatagtcacttggaagatcacagtgttgctgtttctgtgttgctgtttcttagaacatttctagaactctgatgtcacaaaacattctttggagtatcttcagtggtggcaagccttcattcttatcagatagatctggtttggggtaaacacctaaagtaatctggagtcaaatcaggcagttaagagtaatgacatt

SEQ ID NO: 447033 - DNA, 665 bp, Homo sapiens
tgtatcaatacagaatggaacactgctatattaagatgcactcctctgggaagttcttgattgacaaaaatagtactgtgttaagtagcagcagtattttcatggccagaaagtaataaaactaaagatgagctttatgaagagaaaagattttacatgaaaatccatggagcaattcttaggacttgcttccttcaggatcaggttaaggggcaaaaygtgaaatgtgaaagtggaaactgataatttgctaatctgttaattacctgcacagctggtcctgtagtcactgtcatttataggcatctgaagaaaggatgggatagttgctgcccgggatcacacaaactcagtgtatctctggcttccttaggcttgtacagtaggaaaacaaaatcaggatattcatattgaacccattatagattagagttgagccaggggtatgcaaggaatttactctttgagacctacttcattacagagagttggtagagagtcagagttaggttggtgacattaacttttcagttttattgcagtgtcattttaagtcagggattttactgccactttttggcatagcagtttgggctagtgtatttctctctctcttaatgtgatccttcatgttgatatacctaccttgaaaatggtggtgaatt

SEQ ID NO: 447034 - DNA, 665 bp, Homo sapiens
tgtatcaatacagaatggaacactgctatattaagatgcactcctctgggaagttcttgattgacaaaaatagtactgtgttaagtagcagcagtattttcatggccagaaagtaataaaactaaagatgagctttatgaagagaaaagattttacatgaaaatccatggagcaattcttaggacttgcttccttcaggatcaggttaaggggcaaaacgtgaaatgtgaaagtggaaactgataatttgctaatctgttaattacctgcacagctggtcctgtagtcactgtcatttataggcatctgaagaaaggatgggatagttgctgcccgggatcacacaaactcagtgtatctctggcttccttaggcttgtacagtaggaaaacaaaatcaggatattcatattgaacccattatagattagagttgagccaggggtatgcaaggaatttactctttgagacctacttcattacagagagttggtagagagtcagagttaggttggtgacattaacttttcagttttattgcagtgtcattttaagtcagggattttactgccactttttggcatagcagtttgggctagtgtatttctctctctcttaatgtgatccttcatgttgatatacytaccttgaaaatggtggtgaatt

SEQ ID NO: 447035 - DNA, 603 bp, Homo sapiens
attcaactaaaaagcatggatatgtgcagagggaatgggagcagtgttttgcagggaaaccactttaaaactggagttttataggcttaggttttgtgagtttcatatttgtgtttaattgtgcattttagcctattacgtgattattaattaatattattacttacattcagcaaatattaattgagcaccaagaatgtgcaaagcactgttggggtgatgcggggaattcaaaggtgacaatactatgaatgtgccctaatggaaattayagtctggagaaagataaacacacacacatccacagatccatccattcatagatatatatgtaagtaaacataacatttcagcatcatatgaatgccaaaatgaaatacaaacctgtgggagcaccaaggagagaactattcattttgactgaggtattggagtatctttcagccgtaactgaatgtgaaggataggtaggattttactaggcagagccacagtgtggactgtatactggaagctaagggaactggactgtgaactccacagggatactgtccatttataagctttttgtatattcagcagcttgctataaatatttattga

SEQ ID NO: 447036 - DNA, 552 bp, Homo sapiens
tgggtgggtacgcatatccaaaccatatcatttggcccctgacccctccccaaatctcatgtccttctcacatttcaaaatacaatcatgycttcccaacagttccccaaagtcttaactcattccagcattaactgaaaggtccaaagtctcatctcagacaaggctagtccctttcacctgtgagcctgtaaaatcaaaaactagttagttacttccaagaactaatttataaagaaaataggtgtttttaataaagaaaggttttttttataaagaggtaatttataaagaaaagaggtttaattggctcacagttctgcaggctatgcaagaagcatagcaccatctgcttctagagaggcctgagggagattttactcatggtggaaggcaaagcaggagcaggcatcttacatggcaggaacaggagcaagagagcgcgtacggggaggtgccatacacttttaaacaaccagatcttgtgagaactcactcactgtacaaggggggatgctgctacaccattcatgatgactccaaccccatgac

SEQ ID NO: 447037 - DNA, 582 bp, Homo sapiens
tttccttgggtcatttttactttctgcctacttcatctccacctctaagtaaagcatttcattttattaatgtttttcataccacttattttgctagtattatactcattttagaacatttttaaatatccaataaaaatgaattgggcacttacaaatattttgtactataagactgtttttgaatattgtcattaaaacagttatttcaggatttcccagtttatacaatgcatatggcaactgagatacttatgatctgtattatgtgtttataagaataaagttagtaaaaaagatttattctagaaatcagttgagaagacatttaaaaatgtcatgtgcagttgggattcttcagcaccttttcttatggtgtttctttttttattttcttaaagtatgtttttaccatatatggggacgattttttccccctggtatttaggctttgcgtaaactccaaacagaactatcaaacaaacatattagaggtttcrctgcagaaaggacaatatttattttttgtgtttgagatttctgtgcagtaataattaaccttagattttgaactatcattgg

SEQ ID NO: 447038 - DNA, 500 bp, Homo sapiens
aaatttaaattaaaaacaatttactatcagagtcttcatattggtgtttgtgtgtttgatttatttgcttgacacctacccacattatgcaggatatactgaattggttatamttaccataatttataatatttaggtatgtatacttgagaaaggataccttgttctgaaattatgcaagggctaggtattgagaattatggacaattttctttactactgcaactctaagatatggtctctaaggatgaacttacagttgacaaagacaaatctgtgaaatattaaatgcataagttaagtgacagcttgaggcagcaaatatgggaaatcaggatggttattaaatgaattaggggttcggaatagggaaaatgaattcttcaggatgaggtgatctgggcttgcggtcaggtctagatatgagttgggagaagctttggaggcatctcaggagagtgtaaaagacaagcagacgtgtagcgtgggaaaggaacgtt

SEQ ID NO: 447039 - DNA, 614 bp, Homo sapiens
tgttgcgtttgcattaaaaatgatgatgatttatgctcggtgaaattgtggtctgtggctctatttagggcattcttgctattaagctgcttattagttatggtcagtgatttaaagcttaagacctacattagaggactgtaaaattatttattctttaatagataatagtaaatttgaagcagacattagattaattataatcttgtacattaacgaatacggattagtcctttgtctctttttaggtcttttgaaattcaagtaaatggaaaatgagttgattgagttagagagttcagtgaatttacttttgcctcctggtttgtaaatagttaacaccttttccaaatttctcattgtgggtccttctccacactaaacaaatgcaagttctygcaataacttgtctttgttccatgttgacattccttaaattagctgaaaagatctgagagggaggctttttgcctgatttgggggcaggggctgtgggggatggaaatgtagttaaggataagcggactttaatttggcattgcagaagggagtttgtcattattcctattactagtaattatgtataaatttacatatatgtgtgtatatattta

SEQ ID NO: 447040 - DNA, 616 bp, Homo sapiens
atacctataaaaaggggtagacattacrtctctacttgcttcttatcattaaattaaaattcatattcctttctatggcaaggaaacgagtcctgtatagtcttgtaattcatctccctccaccaaacttcatccacactgacttctttaggccaagcttgttcctatatcaaggtgagcctggaagcctgtacactgttccacagtggtacacctcctctagccctatagaatgcaaaatggaagcacagagacattatacaatggttagccagtcacattacatcaagtaaaaacaacaagttaccatgaagtttatttattggagtggcttcagtatttcttgagaaacacaaatgatgaccctgatttgtatgatcaatcagcaagttttcaaaaaggttactgagtatatgacagtaatttctagagccaaagatatacccgcatgaataagctttcatcctgaaaaaaaaatcaccttctgaaactccatgctagttatctgaaataataaaggtgaagtacaaattatgtgatctatcataacctgaaataaacatatgttgctactctgtgatttggtctttatcccagtctgacccatttcttgaga

SEQ ID NO: 447041 - DNA, 604 bp, Homo sapiens
cctggctttctctttaatgaatcatttgtaaagactttgattcttcagacactctttgggctctctgacgtctcctatttggagtcaacaagcagggttaattcccatgtatcatttaaatgatcagcttatatgaagggtatagtaagattttataatctttggagactagttggctagaaggtcaaattaagtgcccgtcaacctagatttttagttaatgacttactgatctggttttgtcagcataaacacaatgtgttctttcattttgggacccttcccataatattcctcaagcttaagtctcactttgctcttagtaataaatcagggttattcccttcctgctttctgacaggttaattctaaagaagagctcctgggaataagaaaataraaacaattcgaggttgtggattgttgcaataaattctgggatttaatttcttttcttaccaaattcaaaattgcattaggcttacctgaccactacgaagtatgatctttactacctgtgaaaatccttagttgatggagaagattcacttgaattcctcctcacttttctttggggacccattgcctcttcattaaaccaggg

SEQ ID NO: 447042 - DNA, 596 bp, Homo sapiens
atttggaacagttcctgccattaatgagtgctcaataatgtaaatcatttgtattataatctaggaacaatgcagaatacaatgtgggaaatgagcactgttttttaatagccacttggaagtatagagctatggtgaaaactgtaaaacagggactaccacatcagttactgtgaaaataaatgaggtaattatgacaagcaccaacatcatatttatagtagctgctcaataaatgttaactagaaaacatgatgaaaaatgtctcaatctcccaagccaaccaagggggaacacrgaagggaagtagtatgttgaataaaaataaactgtgtaaccaaagagatcataataaaattgtaaatattacgtgcatctattaggattataatgaaagcagcagccataccacaaagccaaacataaactgatctccatagataccccatttgcacgatgagttacattacacaatgacttggcaatcattatcttatagcgcagggtggtgggagcaggcagggaggccaatgagtctccctttgtcaagggaagatctctgatggaagtttgatttttgcctcgtttattcctca

SEQ ID NO: 447043 - DNA, 605 bp, Homo sapiens
cacccctcgtgtggtttccatagataaaacatcaacacaattatcaatgggactactcccagagccaccagtttaagacatggttctacatcaggtggcttaaagtccatgttgaggcaatcacagagttgttagttcatcaagataaaaacaaataaacacaacaatcaccgtagatgcacaaattcacaaaatttctaaaatgatacaaggaaaaactaataccaaagaagactgccaattayaagaaacaaatttattacaaagtgaaaaaggagcaatctgaaaacgtctttaaaattactgtttaaaattctcataagaaaagaaaagaaaggaggtactactatcccttaatgacaaaacgagaatatatgaaacaaaatgagcagaaattaaagagaaatggagggtactaaaataagccaagcagaaattctaaagatagaaaatcctgacattacagctattactaaaaagccaaaaagtaacagatgctggcaaggttgctgagaaaagggaattcttacacactgttgctgggagtgtaaattgttccaatcattgtggaaagcagtgtggcaattccgtaactgaaaaccaaa

SEQ ID NO: 447044 - DNA, 620 bp, Homo sapiens
agttttgtcttcctttaaacataatgatatgtagttgcttatattcaatcaatccatgactttgattaccaaaacaatgtgctgaggtagacacagaaaggaatttcrccttctaggcataatgtagtaagtcacaggaggccagtgaatgttctctctgctaaaatctagaaaaagctggataaaccacaacaccatattttttagaggcataagagatctgagaaagcaaggagaagtagacaaacaaaagttcctaagagaggagaactttcttaaaatgggctaaggagaaatcagcaaaacgtttaatgatcaccggcacaggcggaggggtgttataattggaaaattaagagaacaaacacatctgtttccccactggacacatactgaattcaagaggtttgtgggaggctaaaaaagagaggctagaagcttccaaaatacagaaataaacaaaatgaatgagggttcaggagaagcataaaatgtaaactgtcagacctgaaagaaaaaaactgaccaaattcaaatcatagttggagattttagcaaccctctatcagaatcataaataaatgacagtaatgatactgaagagctagataaatctacct

SEQ ID NO: 447045 - DNA, 620 bp, Homo sapiens
agttttgtcttcctttaaacataatgatatgtagttgcttatattcaatcaatccatgactttgattaccaaaacaatgtgctgaggtagacacagaaaggaatttcaccttctaggcataatgtagtaagtcacaggaggccagtgaatgttctctctgctaaaatctagaaaaagctggataaaccacaacaccatattttttagaggcataagagatctgagaaagcaaggagaagtagacaaacaaaagttcctaagagaggagaactttcttaaaatgggctaaggagaaatcagcaaaacgtttaatgatcaccggcacaggcggaggggtgttataattggaaaattaagagaacaaacacatctgtttccccactggacacatactgaattcaagaggtttgtgggaggctaaaaaagagaggctagaagcttccaaaatacagaaataaacaaaatgaatgagggttcaggagaagcataaaatgtaaactgtcagacctgaaagaaaaaaactgaccaaaytcaaatcatagttggagattttagcaaccctctatcagaatcataaataaatgacagtaatgatactgaagagctagataaatctacct

SEQ ID NO: 447046 - DNA, 515 bp, Homo sapiens
  misc_feature (1)...(515): n = A,T,C or G
aaanaaattcatgtatatcagtactgtgggaaacggtttgacgattttgaacattttaaagaacatctttgaaaacatacaagggaaaaaccttttgaatgtccaaatcatcatcaatgatttgctagaaatagcatcctcaaaggtcacctcactgcatgccaaactggagtagggacaaaaaaaagaaagaagctctatgaatgccaggtttgtgacagtgtctggggtttatatgtagattatcatcattatattgccagactcatattattatctactattttaaaaatatttgtcttttatattcacttgtactctcaatttctaaattgttttccattcaagtgtaaaatattttccaggtttttttcctaataggttagataaatggtatattttctgaacccctgaatgtctaagaatatatttatataccaacatacattaactatcttgcctctacrtgaaactgttagcccacaacataatttcttttaaaattctgcagacaa

SEQ ID NO: 447047 - DNA, 607 bp, Homo sapiens
cagcagtcagtcagtgctgctaaacaaatagtagaataagtgaacaagacagtatagctacttgtctgattttttaggtagtacagtctaatctctttggatatgtactaatatctgaaaaacaacaataacaacaacagtatagcctttaccatgtgccacataccattcaaagcacttctatgtattaattaatttgctcacttcatcttcataataacctaatgaagtagattctatttttatcttcattttacagatggggaaaccaagattcagagaggttaagcaacctgcccaagatcccgtagctagtggtgatggagctaggatttgaacccaggtcatctggctccagagctggcaaatctaccgcttgatcactgaccttttgtttgtgaatagattgatttaatactctttaatcaggcatccaaaggctttcctactctatcagcaccatttgcctggacaacctgtatatactagccaacgctctcagttcttagaccmccagttaaggcaggtacaggtctgcacatctggctcacttcattcctctgcctggaactttgtctgccttttctttaccatcaattcaaataca

SEQ ID NO: 447048 - DNA, 607 bp, Homo sapiens
cagcagtcagtcagtgctgctaaacaaatagtagaataagtgaacaagacagtatagctacttgtctgattttttaggtagtacagtctaatctctttggatatgtactaatatctgaaaaacaacaataacaacaacagtatagcctttaccatgtgccacataccattcaaagcacttctatgtattaattaatttgctcacttcatcttcataataacctaatgaagtagattctatttttatcttcattttacagatggggaaaccaagattcagagaggttaagcaacctgcccaagatcccgtagctagtggtgatggagctaggatttgaacccaggtcatctggctccagagctggcaaatctaccgcttgatcactgaccttttgtttgtgaatagattgatttaatactctttaatcaggcatccaaaggctttcctactctatcagcaccatttgcctggacaacctgtatatactagccaacgctctcagttcttagacccccagttaaggcaggtacaggtctrcacatctggctcacttcattcctctgcctggaactttgtctgccttttctttaccatcaattcaaataca

SEQ ID NO: 447049 - DNA, 580 bp, Homo sapiens
gacttgctgagactcaggaagaagggagaatgtgatccggattttgcaagctgaggttgggctatgtttcttcctttgaaagtgagctgtgagggggaaayacagatagccaaagctgccctgctatgtgcctggctggtagcagagactcagtaaatattattgaaggggtgaaaaattcatgaaaaagtgagagaaaccacattcagttaactagaaaaaagaatgaaaaataaaagttttgaagatgtcaactccaagattcctttttttttttttttttgaggcagagtctcactctggcacccaggctggagtgcagtggcatgacctcagctcactgcaacttccacctcctgggttcaagtgattcttgtgcctcggccatctgcatagctggtattacaggcgtgcacaccacacctggctaattgtatttttagtagaaaggggtttctccatgttgtccaggctgatctcaaactcctgacttcaagtgattggcccacctcggcctcccaaagtgctgggatcataggtgtgagccaccgcacccaaccaactctaagactcttaaaca

SEQ ID NO: 447050 - DNA, 580 bp, Homo sapiens
gacttgctgagactcaggaagaagggagaatgtgatccggattttgcaagctgaggttgggctatgtttcttcctttgaaagtgagctgtgagggggaaacacagatagccaaagctgcyctgctatgtgcctggctggtagcagagactcagtaaatattattgaaggggtgaaaaattcatgaaaaagtgagagaaaccacattcagttaactagaaaaaagaatgaaaaataaaagttttgaagatgtcaactccaagattcctttttttttttttttttgaggcagagtctcactctggcacccaggctggagtgcagtggcatgacctcagctcactgcaacttccacctcctgggttcaagtgattcttgtgcctcggccatctgcatagctggtattacaggcgtgcacaccacacctggctaattgtatttttagtagaaaggggtttctccatgttgtccaggctgatctcaaactcctgacttcaagtgattggcccacctcggcctcccaaagtgctgggatcataggtgtgagccaccgcacccaaccaactctaagactcttaaaca

SEQ ID NO: 447051 - DNA, 580 bp, Homo sapiens
gacttgctgagactcaggaagaagggagaatgtgatccggattttgcaagctgaggttgggctatgtttcttcctttgaaagtgagctgtgagggggaaacacagatagccaaagctgccctgctatgtgcctggctggtagcagagactcagtaaatattattgaaggggtgaaaaattcatgaaaaagtgagagaaaccacattcagttaactagaaaaaagaatgaaaaataaaagttttgaagatgtcaactccaagattcctttttttttttttttttgaggcagagtctcactctggcacccaggctggagtgcagtggcatgacctcagctcactgcaacttccacctcctgggttcaagtgattcttgtgcctcggccatctgcatagctggtattacaggcgtgcacaccacacctggctaattgtatttttagtagaaaggggtttctccatgttgkccaggctgatctcaaactcctgacttcaagtgattggcccacctcggcctcccaaagtgctgggatcataggtgtgagccaccgcacccaaccaactctaagactcttaaaca

SEQ ID NO: 447052 - DNA, 580 bp, Homo sapiens
gacttgctgagactcaggaagaagggagaatgtgatccggattttgcaagctgaggttgggctatgtttcttcctttgaaagtgagctgtgagggggaaacacagatagccaaagctgccctgctatgtgcctggctggtagcagagactcagtaaatattattgaaggggtgaaaaattcatgaaaaagtgagagaaaccacattcagttaactagaaaaaagaatgaaaaataaaagttttgaagatgtcaactccaagattcctttttttttttttttttgaggcagagtctcactctggcacccaggctggagtgcagtggcatgacctcagctcactgcaacttccacctcctgggttcaagtgattcttgtgcctcggccatctgcatagctggtattacaggcgtgcacaccacacctggctaattgtatttttagtagaaaggggtttctccatgttgtccaggctgatctcaaactcctgacttcaagtgatyggcccacctcggcctcccaaagtgctgggatcataggtgtgagccaccgcacccaaccaactctaagactcttaaaca

SEQ ID NO: 447053 - DNA, 514 bp, Homo sapiens
ctttctaacaagctcttagttccctaaattgcagaacaaagccagcttcctgctaacccctttggaattcaattacagacatactcaaatgtgttccctgctccagcaccctcagcactaaatagcatataagcacttttgcagggcttaatgtatacttgttgaaaaatgtacattatttttcattgactttaaattggacaaatgctyattgaaaagaataaagtgaattggtgttggagagagcattaaaaagagagagagaaagagaagagccaataaaaacatgtggtttctaaatgtagatccactaatttctctttgtggcagtcatttggtctatattgtttgaatgcactaggagacattgtacatattaatgaaattaggtttgttaagcttgtttgctagagatgtaagccctagtaaaaaaacttcaactttgagatctgacagtctcaggtctgccacttactagctgtgtgatcttgaacaaggaattttgcctcttttg

SEQ ID NO: 447054 - DNA, 600 bp, Homo sapiens
tctgttttgttcctgctgaatccacagttgttagaacaatcttggcgtgtgtttttgcatgaattttgaaacatagggtacacatcaaatsgtaaatagggccctcacataattggtgaagtctagaaaagtggacttccccagggaagtgatatttaagctgagactaggaataaattggttaagggtgggcatggtaagtggcagggataaagaaactgtgccctcagacaccgagagaaggctggggtcctgaagaagtgtgtcctgggtcttaaaggactggttcctgggaaggatttggatgttgatggatgccttcattcaataaaggctgtagacacacttaagtttcagaagagcatagtagtgcaggattttttttttctgttataccaatgaatgaatgaatgcttgcttgctgcctactatgtgccaggaagaaagggggtgtcattgataaagccacaaaaaccctatagcaaggtggtctcatttagtggctttgcagaagcagcaatggctcctgaagacacagaccttgctatcacttagctgtgtggccctgagagaatcacctaagctctctgaattaaatgt

SEQ ID NO: 447055 - DNA, 397 bp, Homo sapiens
acaatgtgtttccttttgcttggaagcagaaatataattttgggacaattcaaatggccatatagtyctacagatggccaccagaatgttgaaaaagtctcacttgcaaaccagtaaaatcattctgatgttttattgttgctttttaattataaataattcaagcatacagatgattatagagaataatacgataaacatcagtacagtcactatccagttttggcaaagcttgaaattttaccttatttgcttcagattttttttttctttaataagtaaaatattataggccgggcgcagtggctcacgtctgtaatcccagccttttgggaggctgaggcaggcagattgcttgagcccaggagtttgagaccagcctgagcaacatagtaaa

SEQ ID NO: 447056 - DNA, 397 bp, Homo sapiens
acaatgtgtttccttttgcttggaagcagaaatataattttgggacaattcaaatggccatatagtcctacagatggccaccagaatgttgaaaaagtctcacttgcaaaccagtaaaatcattctgatgttttattgttgctttttaattataaataattcaagcatacagatgattatagagaataatacgataaacatcagtacagtcactatccagttttggcaaagcttgaaattttaccttatttgcttcagattttttttttctttaataagtaaaatattataggccgggcgcagtggctcacgtctgtaatcccagccttttgggargctgaggcaggcagattgcttgagcccaggagtttgagaccagcctgagcaacatagtaaa

SEQ ID NO: 447057 - DNA, 397 bp, Homo sapiens
acaatgtgtttccttttgcttggaagcagaaatataattttgggacaattcaaatggccatatagtcctacagatggccaccagaatgttgaaaaagtctcacttgcaaaccagtaaaatcattctgatgttttattgttgctttttaattataaataattcaagcatacagatgattatagagaataatacgataaacatcagtacagtcactatccagttttggcaaagcttgaaattttaccttatttgcttcagattttttttttctttaataagtaaaatattataggccgggcgcagtggctcacgtctgtaatcccagccttttgggaggctgargcaggcagattgcttgagcccaggagtttgagaccagcctgagcaacatagtaaa

SEQ ID NO: 447058 - DNA, 580 bp, Homo sapiens
agttaagtgagtgaacattcaaatatttctctatacaatgtgttagaaacactaggacaagcattaccctaaaacaccaaggagatgtgagccgcattgagtagagaaatatggaagtgcgaagggaaagcagtgtgcatgattggtggcattggttgatggtatcggacatrcctttgggaccagagagaattttcaaatgaaaacacttaagtaaaaaccatgttcttcctttcaacagggcgttgttgctggcgctcgttccaaaggagaacacaaacagaaaatctttttaaccatctcctttggaggaatcaaaatctttgatgagaagacaggggtaagtaaagcaatcacatggcattgtgaaattttatccattgacagatgtacccttaaaagcctctactctctgggcaggaatatacaacaagcataaaaacacataaagcaactgacaaacttgatcaactctgatcatccatcaaagcaggtctctttgctgacttggccacagtatggctgcactgtgtttcttatagtgtaatggtgataaaagtgtcacactatcctggtaatc

SEQ ID NO: 447059 - DNA, 524 bp, Homo sapiens
ctatacaatgtgttagaaacactaggacaagcattaccctaaaacaccaaggagatgtgagccgcattgagtagagaaatatggaagtgcgaagggaaagcagtgtgcatgattggtggcattggttgatggtatcggacatacctttgggaccagagagaattttcaaatgaaaacacttaagtaaaaaccatgttcttcctttcaacagggcrttgttgctggcgctcgttccaaaggagaacacaaacagaaaatctttttaaccatctcctttggaggaatcaaaatctttgatgagaagacaggggtaagtaaagcaatcacatggcattgtgaaattttatccattgacagatgtacccttaaaagcctctactctctgggcaggaatatacaacaagcataaaaacacataaagcaactgacaaacttgatcaactctgatcatccatcaaagcaggtctctttgctgacttggccacagtatggctgcactgtgtttcttatagtgtaatggtgat

SEQ ID NO: 447060 - DNA, 592 bp, Homo sapiens
ttcttttttatggcctgatagtatttcattgcatatatataccacattttatttatatattcattcgctggtaccacacttaagttgattccatttcttggctatcatgaataatgctacagtgaacatgggagtgcagatagatcttcaatacactgatttcatttctttggatatgtacgcagtagtgggatttctgggtcataaggtagtttaaagtaatttttcttaatgtgtatgtatctctgtttactcatccataagatggagataataaatgtacctatgtcttagggttggtgaaagattaatttaatcctctaagacttagaatagtgcagagtaaaataaaaagctcgaggtgttaaataatattacattattggttatattgtcccatctcctgtacagtctttctatgtcctctaagcagaawtaagaaagccttttatgatgtccctacttcatcttctgcttgctgtatcctagcacatgatcatctgtgtcatactgagttgactcacactcccatcagactacaagctccacacaaggtaccctggatcatttattgttgtatcggccaggcctg

SEQ ID NO: 447061 - DNA, 531 bp, Homo sapiens
ttcttactgaggaccttctctgtgacaaccccatgctaagtactttataatccccagaacatttctaaaattaagtgtgatttaatatatgagaaaccctgaggcttggtggtgataggtaacttgttcaggatacaaagctggtaagtagcagagctgggattaggccctgcatctgtctgccccgaagcctaccctcttagccacaatgctacactcactggagatatcyaagtcctgcagtaaatgcattgcctcctgtgtttctgtttagcgtcttctgtgagccggtgagatggaggtggagctgcagaatgggactgggcaggtgctggcactagggtgtgttgaggatggtgttggccatgcactgcacactttacatgcatttattcaatttaattctcctaataaccccactatatggatactattattatctctacagatagagaaagaaaaaaaaaggacagcttacaaagttaagcaacatggtgatgattaagtggcagagcctgaaatggaacccag

SEQ ID NO: 447062 - DNA, 492 bp, Homo sapiens
ttctaaaaggattagtggggtagcctatcagtaacaataatggccaatttttatttagcatttaattgacaaatgtgaaaaacaagacatggaatggttaagtgacttgctgaacccactcaggtggtaagtgacagagctgggttatgaaacaggccattctcagagcctgtggctcagctctaaaaactgtcatctaacctcagtgcccttcagtgagtgagtctgttcaccccctttttcctccccttacccccacagtggtatgttcctcttgcctgtgtttgccactgttgccattctatttaattttgttagtccttcatgtttctgtctccaayattcacttagaattgtattgtaattgattgaatgtatatttgtcatcatttctaaaacgtggttttcttaggcttggaaactgtttcttttcatctttgtaccccctactgtctagtatgccacctggcccattattagggctgaattagc

SEQ ID NO: 447063 - DNA, 504 bp, Homo sapiens
ataagtactgtgtagtttttaaaaattcggggtaatgtgatagggagtgactgggagggatagcaaaattagatgggatgrgacagggatggtgtctctgataaggggacacttaagctgagagttgaattctagaagaagacatgaatgaaaaaattagagggaagggtgttgcaggtggaccagtgctagcaggtgcttgtacacacaggcagaaattggtgtagataaaacaagagttcctttcctggctggagggtgtgccccagccctgatgttgtaacaatggctgtgttgtctggactgtgtcatgacagatctgaaaacagtgtctgaacagtagtacatagaagtaggttacagccggctctaagagtaacaggctctgaatttccaagatgagcctgaatttagaatattttgtcccattagaacactcacttctcttgaacacgtggcctgtgagggctggagaggggctcagggtatgggtgtgtcaacctt

SEQ ID NO: 447064 - DNA, 605 bp, Homo sapiens
atacaataggcttcatgtgcatagtcagtgagtttctgattttccatctaagaggagcctaagtagaaactgacatttgaataattatttcaccattcatttctatgaggacacatagtactctatgtatatttacatactaggatctgcaccctgagcacacatctacacccaggacacataactctcgtttagttttctatgatttcacttttcttctcttcatagaawcttgactctaagaggtaagctatagcctgaacatgtaagctttgagtgggcatggaagacttgcgtattactaatattcccgtcttacaggtcctgtgatggaagacaggcaatatgcccagttggaagagtatttgctttgtggctgtgaaactctagatgggaattctggctccattgctagtcatgtgactgctattaaagacacacctaagactgggtaatttataaaggaaagaggtctaattgactcacagttccacatggctggggaagcctcacaatcatgtggaaggcaaatggtgagcaaagtctcgtcttacatggcggcaggcaagagagcatgtgcaggggaactcccctttataaaacca

SEQ ID NO: 447065 - DNA, 536 bp, Homo sapiens
gttgcattttttttttatggagtcctgctctgttgtccaggctggaatgcagtggtgtgatctctgctcactgcaacctctgcctccagggttcaagcgattctcttacctcagcctcctgagtagctgggattacagatacacaccactatgcctggctaattttttttttttttttttttgtatttttagtasacatggggtttcgccatgttggctaggctggtctcgaactcctgacctcaggtgatccacccgcctcggcctcccgaagtgctagaattacaggtgtgagtcactggcctggagttgcctttttgagcattttctgaggtagatatctaaagacaactcaaatttatctgtatataaaacactgcagaaaggagattgtgtacaaaaattaatcctgtgagaaaaactacccatttccatagtaaatccatgatttgtcattttatttgtatatttatatatttgtatcttttatttatttatttattttgagacagggtcttcctctgctgcccaggctg

SEQ ID NO: 447066 - DNA, 466 bp, Homo sapiens
atttgtgagactgatcttctctgttgcactttgttgatgacacagyttcactgaagatggcctgcgctgattagtcaaagggctgtgccctgcaggcgagactgccctgcccccttccttgtatctgtcctttacaaagtgagctctaactggactcagatctcaataatgactgcaaccaagaaataataataagaaccatacagagacacagcacctctgtctgccttttatgtgacactagagataaaatgggtgagacaggtacaacatgtagggccaaagaatggtgattactgttctgtctcttcaaagatattgctgttgatggctctgcttcccaacgggcataaatacaagactcaaaagactgaggtaacaactggagtcttctacacaccaggatcctatgcagcccattctttggttaggaactgtggctgcagtttgaggaagcttggccact

SEQ ID NO: 447067 - DNA, 549 bp, Homo sapiens
gaattaattaaagtataagatagtgagatgataatggtgatgcttaaggtattatatcggctgccttttattaaggagattttgtgtaccaggctctgagttaggcagctttcacaaagaatcattttataaatgagaaaaacaataccaaggcctgaggtccattggtacttgaggtcagatctgactgattccaaggcttatactcttggacccagtgttccactgtacagtagacayacaaacaattgctttcctatacaccagcattcaaactagcaaaaacgaagtataaaacactcattcttaaataatatatgggactgaaagaaacaacataactacttcagcatagagaagcagctttgaatatatgacaaaacacaatatgttcttatagtagaagactcatagtaaatacagcgtttatttcaaattgagttatattaaattgagttataataaaagactcataatatggcatttagttcaaattagaaatgaatatggcagttatttcaaattaagtcaattacaaaattgaaatga

SEQ ID NO: 447068 - DNA, 555 bp, Homo sapiens
aacagagctgggatttcaacccaaacaatttgatgcattttcatttgggttgaagcattcatgaataaggtggagttctcagtgacttcctgttcttatttggtgattctgagactgatatcactacctgtccagtagcttctggaaaaggtcatctgagtccttgccatattatttatgattacaatagcgtctctagagagccgaagtccactttctttcaagaatgtatggttgttgaggcatctgattctctacctcccaggctattcaaattgtatgttcaaaaggaggcaatgaaaaacacacacttagttcaactaaaatctctcatacctttccttgtagtagaggtttatgaaaggtctacgttattttatatttaactgagggcacttgtagtttcatccttgaatcatttttacccaccatcacatagtgcataccacattcctcctgcgcacaaacaggcacgcccatgcttaggcccatgacactccatcacgtgactggcgctaaaatayaaacgttcccattttgtgtggtataagatac

SEQ ID NO: 447069 - DNA, 609 bp, Homo sapiens
taagtaatttaatcttcacagtgtttaggagggtgatatggtttagctgtgttcccacccaaatttcatcttgtattcccacatgttgtgggagggacccagtgggaggtaattaaatcatgtgggcaggtctttccctgctattctcatgatagtaagtctcatgagatctgatggttttataaagaggagttcccctgcacaagttctctctctttgcctgctgccattcatgtaagttgtgacttgctcctctttgccttctgtcatgattgtgaggcttccccagccaygtggaactgtaagtccattaaacctccttcttttgtaaattgtccaatcttgggtatgtctttatcagcaatatgaaaacagactaatacagaggggtaggtatttttatttttgccgtttttttttttcagatgggaaaacaaatctagagtggctgagtaatctaaccaggggaaactggtaagtggtggcaccaggattttaccccaagcagttagcgccagagtccacgttccttatccctatgctaggttgctgactttcagcagcagaacagcagactatctcatgctctagaagtcatgtgggcttgag

SEQ ID NO: 447070 - DNA, 609 bp, Homo sapiens
taagtaatttaatcttcacagtgtttaggagggtgatatggtttagctgtgttcccacccaaatttcatcttgtattcccacatgttgtgggagggacccagtgggaggtaattaaatcatgtgggcaggtctttccctgctattctcatgatagtaagtctcatgagatctgatggttttataaagaggagttcccctgcacaagttctctctctttgcctgctgccattcatgtaagttgtgacttgctcctctttgccttctgtcatgattgtgaggcttccccagccatgtggaactgtaagtccattaaacctccttcttttgtaaattgtccaatcttgggtatgtctttatcagcaatatgaaaacrgactaatacagaggggtaggtatttttatttttgccgtttttttttttcagatgggaaaacaaatctagagtggctgagtaatctaaccaggggaaactggtaagtggtggcaccaggattttaccccaagcagttagcgccagagtccacgttccttatccctatgctaggttgctgactttcagcagcagaacagcagactatctcatgctctagaagtcatgtgggcttgag

SEQ ID NO: 447071 - DNA, 609 bp, Homo sapiens
taagtaatttaatcttcacagtgtttaggagggtgatatggtttagctgtgttcccacccaaatttcatcttgtattcccacatgttgtgggagggacccagtgggaggtaattaaatcatgtgggcaggtctttccctgctattctcatgatagtaagtctcatgagatctgatggttttataaagaggagttcccctgcacaagttctctctctttgcctgctgccattcatgtaagttgtgacttgctcctctttgccttctgtcatgattgtgaggcttccccagccatgtggaactgtaagtccattaaacctccttcttttgtaaattgtccaatcttgggtatgtctttatcagcaatatgaaaacagactaatacagaggggtaggtatttttattttygccgtttttttttttcagatgggaaaacaaatctagagtggctgagtaatctaaccaggggaaactggtaagtggtggcaccaggattttaccccaagcagttagcgccagagtccacgttccttatccctatgctaggttgctgactttcagcagcagaacagcagactatctcatgctctagaagtcatgtgggcttgag

SEQ ID NO: 447072 - DNA, 609 bp, Homo sapiens
taagtaatttaatcttcacagtgtttaggagggtgatatggtttagctgtgttcccacccaaatttcatcttgtattcccacatgttgtgggagggacccagtgggaggtaattaaatcatgtgggcaggtctttccctgctattctcatgatagtaagtctcatgagatctgatggttttataaagaggagttcccctgcacaagttctctctctttgcctgctgccattcatgtaagttgtgacttgctcctctttgccttctgtcatgattgtgaggcttccccagccatgtggaactgtaagtccattaaacctccttcttttgtaaattgtccaatcttgggtatgtctttatcagcaatatgaaaacagactaatacagaggggtaggtatttttatttttgccgtttttttttttcagatgggaaaacaaatctagagtggctgagtaatctaaccaggggaaactggtaagtggtggcaccaggattttaccccaagcagttagcgccagagtccacgttccttatccctrtgctaggttgctgactttcagcagcagaacagcagactatctcatgctctagaagtcatgtgggcttgag

SEQ ID NO: 447073 - DNA, 552 bp, Homo sapiens
taatttgagaatataatttaacaggaaggtttttataaatatcagtacctgaaatttactgataattttcatctgtccttttcatatttctaatttgcatattctaactaatgaaatcctgtcaaataagattaaaaaatcagggatttcaaagacactgaagttcacttaaataaattagaagtcagttgggttgactgaakaacttataagagcatttacccaggaaggcaagcctgtaatcggttttgaatcttatttctaggccacggtgttacatctggttctgttgtaatagtcattttcactccaaagttgtactaggaaaatgatctggagtacccagattactctctagctaattccttagtttttatattcaggattcattgaagcattttatccattttaaaattatacagatttaagtgtactgcatgatgttttgttatacatatacacactcaaatgatcactacagtcaagccaattaacacatctctcattttacacagcaacattttttttctggtggtaagagtgtctaaaatc

SEQ ID NO: 447074 - DNA, 560 bp, Homo sapiens
aatagattccctagaatattaataatttctgtgaaccccaagaaggaaaaaaatgtacttaaaacagacaaatgatatcaaaagtttatgaggccaaatatctatcagtaatgctaacattttttgaatgcttactctgtgccaggcacttttctaagcattttgccttatgaatccccacagtaatcctgggggtcaatgccccattttacagaggaagaaactgaggcacagggaggttgcataactcacccaaagtcagtgacagagctgatatttgaactcaaggtccggggtcttcatcatcatgctctacttctcttaatatgtttatagaattttttgttctattttggaaagaaggaggaaaggaaccatgaccttttcctctgactttaagctgggatgagaggaaattttccatcacagtcttctacattctgactgtgggtgactaaacaactagaaaattctggttttcagggatttaaaacaaagacggaactaggccatccagatgtcatttggaaggstgtgtaaagagagcctagttacataaa

SEQ ID NO: 447075 - DNA, 556 bp, Homo sapiens
attactctttctgtgctaccctctctccaaccagttcttccagaaatgtagaaactcagtcttccaaaattgtcatccaagagtgaatgataagaaaatattctactcagaattgtctttcatttaaattatttaaaaattatttataaatatgatacatatatttataagtattataaataaatatactaatattcattaataaaatagagaagtcaagggttttataaaaagttgttttataagcaggaaaggtaaacaaaagaaagttgaaatccaatagaagttataacaaaaggataagagaatgattaacagcaagttttgagtgtatctaggcaaatacaccatagcaaactgacacagataaaaatacattaattaaaaagtattgtgggctgggatgatttaaaattaaatgtaggcagtagaagaatgtaaatactgataagggccagtggatatggggctaccatgttgcagaactccacggracactaatttttagtatatgttacatgaatggtactccctggaattgtgcaatgtagcattt

SEQ ID NO: 447076 - DNA, 587 bp, Homo sapiens
aacacattctttgttgctgttccaatatacctattgtcttccctgcattctgactggctggctggctgggaaaggggatggtgctggaccgcactcaatcattatggttgtctacaaatagagtaggtgtatgtgaactgagatttttcagctttgtatacccagcaagccaatcagagcacagaaagaacaatagctgaaggttttactgctctttaagtttccccactgattcccattgcgactgattatatcacagaagttatataaaaatcacattaaataccaactaaatcaagacttttcatgccttttttttcaaagcaatgaaattcaggacaaacactataytatgcatgaagatcaccacctggagatctaaactcttcattccagacgtcgtatttgaaaatggaactagagaaaagtgtggtttattcattttgttattttctgtggtgcttgcacggctgttttgaaagcctaccgtaggagagctcaattaagagccttcataattttcaccagttaactttgattaaataggctgtcttggaagggaattcagtaaatttaggctataaatt

SEQ ID NO: 447077 - DNA, 564 bp, Homo sapiens
gcaaatgtaatacagtactcagtaaatgttaggtcttaatactattcacattttactcagatgtatcttcattgttttaaaaacatgtctgtttaataaaaacagcttacatttgcaagtgcaccttttgactttttaaaccttttaacgtcaattaattctcttctctccaaacatcaattttgtgagttgggtgtagaattattttatcctcccttgattaccaagaagggtaagataaagaggaattaagtggcttgcctaaggcagtgctaatgcaagtattagaacctatgttcctgactcatttacttccattacatgagtggggtttcaaacttttctccccaggcagtggagaatgrgcagtcgaggtttgcatcagaatgcaaaagatgttttctgccttgcaaaattgtttgcagactagggttagggattgtggagagggcagaaatgcgttggctagaggaagtggcagcgtttacaaaggcatggctaacttttcctgaagaaaataataatgtcagcagcactcacacttctgaatatattaggtttgta

SEQ ID NO: 447078 - DNA, 562 bp, Homo sapiens
aatctgcacaacaactctgtgagatagatactatcattactggcattttacagctaaggaaaatgagacaggtatagtaatttgcccagggttacacagttaataagtatcagccaagttttgaactgatactgtccaactccacagtgcatgtttgtgatccttacattatactagacaaatgtataggactttggagaagggaataatcactgtagagtgagatagttgtcagtggaacttggactggaactttactgatggagtttggtacaatcagacaagaagtatgaaggatgactagatgatagaaacatcctgagcagaaccaccaaggtcaaatgttgggggaaatctatggtaggatgtttatgaggtagtctgtttaagggaacagtraaacccaaatcatgtgttaatttggcttacagggacctgagtgatctggcccttgtgtaccatccttactgttttcctctacctgcaagccacgctggcttgctttctgttctttgaacatgcaaagtttgctggcatcctaggacctttacactctgatttc

SEQ ID NO: 447079 - DNA, 548 bp, Homo sapiens
gtgaacagcacttctgtagggctggcctaagtcaggcagttcaagataacctgaaggagtcgaataacatctatccagkgagtcctgcaagacttcaggctctttctcatccagcagctccctgctgagcctggaaaagtaggaaaaagtaaagaataagccagggggaatcagaaaccacacagccccagctacatttcatggctaacataaggaactgtttaaacagaaaaaggacagatccattaatgaggtaatgaattattgcctttatgttgggatagaccagggccaggtagaaaagaatgaaagagaaagacagggagagggagagggagagagagacagaggagaaagtgagctcagcgaattggccgggtgacacactgatgaaggggtcaaaggacactctgagttagtgccctcgggacacacagagaacagtgatcatgaaaagagtgggctcaataattttccataaacttgcttaagattccatgcagttgccatacagcctttgaggtatggtcaacctacagtaagttagt

SEQ ID NO: 447080 - DNA, 466 bp, Homo sapiens
tcacccctatctggaagaccaggtggaggcttatcaccttcatagtaaggtactcactgtccacgtcaagagccaagccaaggtactgttcctccaatgagtgaacagcacttctgtagggctggcctaagtcaggcagttcaagataacctgaaggagtcgaataacatctatccagtgagtcctgcaagacttcaggctctttctcatccagcagctccctgctgagcctggaaaagtaggaaaaagtaaagaataagccagggggaatcagaaaccacacagccccagctacatttcatggctaacataaggaactgtttaaacagaaaaaggrcagatccattaatgaggtaatgaattattgcctttatgttgggatagaccagggccaggtagaaaagaatgaaagagaaagacagggagagggagagggagagagagacagaggagaaagtgagctcag

SEQ ID NO: 447081 - DNA, 548 bp, Homo sapiens
gtgaacagcacttctgtagggctggcctaagtcaggcagttcaagataacctgaaggagtcgaataacatctatccagtgagtcctgcaagacttcaggctctttctcatccagcagctccctgctgagcctggaaaagtaggaaaaagtaaagaataagccagggggaatcagaaaccacacagccccagctacatttcatggctaacataaggaactgtttaaacagaaaaaggacagatccattaatgaggtaatgaattattgcctttatgttgggatagaccagggccaggtagaaaagaatgaaagagaaagacagggagagggagagggagagagagacagaggagaaagtgagctcagcgaattggycgggtgacacactgatgaaggggtcaaaggacactctgagttagtgccctcgggacacacagagaacagtgatcatgaaaagagtgggctcaataattttccataaacttgcttaagattccatgcagttgccatacagcctttgaggtatggtcaacctacagtaagttagt

SEQ ID NO: 447082 - DNA, 489 bp, Homo sapiens
ttatttggtatgctctggaaattaaaccaaaggcacatctcttattcaagttagcttctccctcagccacaaacagaccttggttgtggttaacttgacttccacaaaataaaaaatattttcttaatattagcacataaagcaaagaaacaccaaagttattatcattgcttacattaggtagaccatctcttagaatcttaaaatctcatcaaaagtgcaagtaaagctaggtgtggtggcatatgcctataatcccagatacttggaaagctgaggcaggaggattgcttgagcccaagagtytgagaatgtaatgagctacgatcacaccactgcattccagcctgggtgacagagtgagaccctgtctctaactgatatgaagataaagatttagaattactgagagctcttatctaacttggtatatccgactcggcacaaggatcgagatacctgtttcagcctaagttatgtcaagggtaa

SEQ ID NO: 447083 - DNA, 573 bp, Homo sapiens
cagaagaaagaagcttggaaaatagaacacacacacacacacacacacacacacacacacacacacacacacacacasagagacacaaacacatgagaaaaatcactgtttcattcagaggtaacttaatgttttgttatctttcagtcttttcaaaatatatatttgaaattattttaacataattgaaactaaattttatagctttatatcttttttaaggattatgtaataaacattttccaagttatcaaataatttagattaacttttattttgtatagtatctccatgtcacatagatagcctaaattgtattttttcatttggatattataccatccattatggaaggacttttaaggttttgacaatgtagccattcttgtaatataaaaaagaacactaaccttttcacattttaaacttttcagaatcaaattatgattaaagctgctattataaacatccatgtgcaggattttatgtggacataaattttcaactcatttgggtaaacctttaatatattgttaatttgatactctttaaatacttaaataaactcagcaa

SEQ ID NO: 447084 - DNA, 573 bp, Homo sapiens
cagaagaaagaagcttggaaaatagaacacacacacacacacacacacacacacacacacacacacacacacacacagagagacacaaacacatgagaaaaatcactgtttcattcagaggtaacttaatgttttgttatctttcagtcttttcaaaatatatatttgaaattattttaacataattgaaactaaattttatagctttatatcwtttttaaggattatgtaataaacattttccaagttatcaaataatttagattaacttttattttgtatagtatctccatgtcacatagatagcctaaattgtattttttcatttggatattataccatccattatggaaggacttttaaggttttgacaatgtagccattcttgtaatataaaaaagaacactaaccttttcacattttaaacttttcagaatcaaattatgattaaagctgctattataaacatccatgtgcaggattttatgtggacataaattttcaactcatttgggtaaacctttaatatattgttaatttgatactctttaaatacttaaataaactcagcaa

SEQ ID NO: 447085 - DNA, 508 bp, Homo sapiens
tgggtgtgctgggccagggagggggccctgtcagtgtcagtctcactgcagatgtccgatttgggaaacaagtgcctattacctcatattctcccaggttttttgtcatttaagtttacctcatcttagtttgaggcctggctgcttatgaaaatatcagtaatagctgattattggcagtcattctccccccaacctgcctatktttcaggttcataaaattttaatcatgggcgtagaagtgagtgacttcataatctccctggtctttcccatcattctcttattgacggaggcaactggtggagtggagaggcaggggagcactgttgggccagctttgtgaagccatatatcttcttgctagttggttactaaataaaaaatatttgtgataatcatacagagtacttaagaagtatatttattattaatggtaatagattttaatcactgacaaaaatcactttggttattatttattctaatatgcattttgcatactact

SEQ ID NO: 447086 - DNA, 555 bp, Homo sapiens
gatttctctcaccatacattagttttgccttctcaactctgtatgcccaccaggaaaactccttattaatccttcaaaacccagccagatattaccaccagaatttattacttccctccctgggctccctcagcaatttgagtatttttcttatgtgtctctctcccccattagacagtgcacttgtgaggaatcattatcaccatatcttattcatcttttacaactagtgcctaaaatacaggagatayacaatgcatgttctttgaatgaatgatgaaaaatatcttccagaagaacatctttctttgccttttttaaatccctaattcacacagtgtttgttttttgttttgttcttgcatttttaaaaattataaaaccaatgcaagcttacacagaagggtataaagtgaacagtagaagtctgactccatagattaattgctatctgtagtttcctgtatatcctttcagagacgtctatgcatttgcttttacacactctacataccttcttgaaatttccttttttacatagaaatatgaaacaac

SEQ ID NO: 447087 - DNA, 555 bp, Homo sapiens
gatttctctcaccatacattagttttgccttctcaactctgtatgcccaccaggaaaactccttattaatccttcaaaacccagccagatattaccaccagaatttattacttccctccctgggctccctcagcaatttgagtatttttcttatgtgtctctctcccccattagacagtgcacttgtgaggaatcattatcaccatatcttattcatcttttacaactagtgcctaaaatacaggagatatacaatgcatgttctttgaatgaatgatgaaaaatatcttccagaagaacatctttctttgccttttttaaatccctaattcacacagtgtttgttttttgttttgttcttgcatttttaaaaattataaaaccaatgcaagcttacacagaagggtataaagtgaacagtagaagtctgactccatagattaattgctatctgtagtttcctgtatatcctttcagagaygtctatgcatttgcttttacacactctacataccttcttgaaatttccttttttacatagaaatatgaaacaac

SEQ ID NO: 447088 - DNA, 555 bp, Homo sapiens
tagcttctctaaaggtcttccttttgtttggtattcaaagcataaatgctcatcaaaattgttttcagattttctaaatataccactttgttctgtctcatctgtaagtttcatgctacattttaaatcaagtcttaaatcacatataatctgtgtgtttgctcacatgcawgtatctaatagggacaagttcaatagcctcctggtgagacttaataatgcctgtctccttcattgccatactttttacagagctgcttattaatcttgccatattccaagatcaagggtatggtcctgtttacagtccttagcctggcgttccagccctccatgactgaggccagcttcatttttcaacctcatttgccactgccctcttctgcctgccagctgctaccatcacaggcctggcttttttgccatctgcctttgcacaggccctgcctttctcctggaagggtcaccacctatctcctcatgtccatatctgacctcatctccaaatcctaactcagatgctatcttatccatgaaaccagtgcctgtaccttt

SEQ ID NO: 447089 - DNA, 573 bp, Homo sapiens
cctgtgggatgtggtgtgaggagcattggatgggaaagaaaaggcccccaggataaaataaacatggaaaggatgaggacacagggtttgactgtgtaatggaaatgttttttctgtttgaaacgaacaaacaaaatacttctataatttgtattctgaaaggagaatttgtaggtgggaagagacctctaactaaattatgcaattctgcctgcgttctgccgcccacagacacaggcattgtgctaaacagggctgctaaataggtatggacggtggagattgggacagttgataaaatattaatagtaacatgttagttggcaaatggtaaatactaactgcaataaatagcaaagttaattatttataaatctaagatataacataaactcattaggacacattcatgaacattgataaatgggcctcctaaaatagaaacttctcagaagcattarctgcactatctgccacttcgtccacgtcacggcaaacagcacacgctacattgctcattttttatggggcactctgtgctttagagaaataatgagtttatctttatcctca

SEQ ID NO: 447090 - DNA, 552 bp, Homo sapiens
caggttaattcccttcagagctgttaygtgagaaagaataaacttctttgttctttaagccactgtattgttgagtctctttgttatagcaacttagccttttacctgaactaatacaaacatgcagcttcctttgtaagcattcagagtagctttacaaataaccagttagccatcattttagaaaacagccttaactgcccaagtaggtgataatcaaatacagaaattcctgctggtggctatcccaaaatttcttcatcctggttaaaaagtatttaacaattgaagcagatcacttatgtagagacctacttagtttttatgctttcatgcaattgattcaacaaatatttgactgtgtctaggtgctagggatattgacaagtcactgcattcataaaaggttgatttcatgcatgtgtgtttgggggagggggttgttagttttattttctttttgagcaacatggtcttgctctgccacccaggctggaatgcagtggcatgatcatgtttcactgaagcctcaatctcccaggcccaagccat

SEQ ID NO: 447091 - DNA, 552 bp, Homo sapiens
caggttaattcccttcagagctgttacgtgagaaagaataaacttctttgttctttaagccactgtattgttgagtctctttgttatagcaacttagccttttacctgaactaatacaaacatgcagcttcctttgtaagcattcagagtagctttacaaataaccagttagccatcattttagaaaacagccttaactgcccaagtaggtgataatcaaatacagaaattcctgctggtggctatcccaaaatttcttcatcctggttaaaaagtatttaacaattgaagcagatcacttatgtagagacctacttagtttttatgctttcatgcaattgattcaacaaatatttgactgtgtctaggtgctagggatattgacaagycactgcattcataaaaggttgatttcatgcatgtgtgtttgggggagggggttgttagttttattttctttttgagcaacatggtcttgctctgccacccaggctggaatgcagtggcatgatcatgtttcactgaagcctcaatctcccaggcccaagccat

SEQ ID NO: 447092 - DNA, 560 bp, Homo sapiens
ggaaattgagatcctgagcagttactgattctctgaaattttcccctcccctacccaccaggttactttcttgaaaagttaactcctgggactgtctgaaagattaaaaaactgcatctgcaaagaaggctgataaacaagtagacccaaagccagtattagcgttatggtcttttgattgtctgcaaaatatggacagtaggtcagaataacagccaaatcctcacctattttccgaaacattcttctgattatagcgtctgtgaaaatctcttagttcctccaagagcccagcagcaagcatgtcatccaccctcttatccaagcgctcatctagaacttgaatcaaattagcccatcaaccagcaagcaagttgtaggtacctactatatacttacatgacgagtgaacaggtggycacaaaaaaagagaatttgtccaaacggaagaaagaattcagattccaaagattattataataattcatacgttactcacatttaagactttgcaactccaaataaaaatgaagcatagtcagaatgaagcacatgcctcc

SEQ ID NO: 447093 - DNA, 564 bp, Homo sapiens
acagaggcactggtgttgggtgtcgtcttcccaccaggcattgcctgacacaggctggtccccccsctgaggccctgcgtggttctgtgcctgccccttctccattgcccctggtcctgggggtcatttggctgcttcctggctacttcaagggctggttggaggctgcctttccagaatcctggaaaagctgcttctacctgaggttctgggcctcactgggctcagccccaggctgggggccacccctgacaccccgtctctgtacctatcctgcgaccctggctctgattctgggtgggggaaccttgctctctgcaagacgtgagttcttcctgctcttctcaacttttgaaactcaaaagccaggaagcctcctgggatccccgtacttggtgtccccgcccttcccggaggcactgagtacagacttacagtggggaaggacggaagggagaaaggaagagagcaggggcctaggtgggtgcagggcagggaagagaggccagttctgcagcctccccagacagtggccctcgggatccctttacattttaaaaaact

SEQ ID NO: 447094 - DNA, 555 bp, Homo sapiens
tttgcttaacaggtaagaaaaacggacacctagagaagctacgagatttcaccaaggtcctagagctaagaagggatggagctagcatttgaatttcactccctctgcctcctcagcattcacagaactaattgcagaactaaactaataacagcttgtgttttgtggagcatttattacrtgccatgcgttattccagacacttcacatatattaactaatattagtatctacctcaaatgtgtgggagagatgatatttccttcccattttacccataaagaaagaggttaaggggcaggagcagtggcttaggcttgtagtcccagcactttgggaggccaggtgttcgagaccagcctggggaacatagcaagacccccatctctacaaaaaacaaaaaattagctgggtgtgctggatcatacctatagtcccagctgcttgggacgctgaagtgggaggattgcttgagcccaggaggtcaaggctgcagtgagctgtgattgtgccactgcattccagccttgtctcaaagtaaaatttaaaaaaaag

SEQ ID NO: 447095 - DNA, 555 bp, Homo sapiens
tttgcttaacaggtaagaaaaacggacacctagagaagctacgagatttcaccaaggtcctagagctaagaagggatggagctagcatttgaatttcactccctctgcctcctcagcattcacagaactaattgcagaactaaactaataacagcttgtgttttgtggagcatttattacatgccatgcgttattccagacacttcacatatattaactaatattagtatctacctcaaatgtgtgggagagatgatatttccttcccattttacccataaagaaagaggttaaggggcaggagcagtggcttaggcttgtagtcccagcactttgggaggccaggtgttcgagaccagcctggggaacatagcaagacccccatctctacaaaaaayaaaaaattagctgggtgtgctggatcatacctatagtcccagctgcttgggacgctgaagtgggaggattgcttgagcccaggaggtcaaggctgcagtgagctgtgattgtgccactgcattccagccttgtctcaaagtaaaatttaaaaaaaag

SEQ ID NO: 447096 - DNA, 605 bp, Homo sapiens
tctcttttatctttgctcctcagtgtctaacactgcttgacacatcagtggcaccatgaaacatgtgtggaataaacaaacaaggccttcctaccatccatcatatctgcctctcctcctggactgggagcactatgaggtcaaggaccaagccttatttatttctagctcctctgagtctagcactggacctggtacaaaagagatgcttggtaggtacttactggatggatggatggatggatggatggatggatggatggatggatggagttgaaactgatggatcaatggaggaatgaatggaaggttggacagagtaaatgaatagaatgggcggatggaagtgcaggtgggtggatggatggcagatgggtgaatgaaaggctggatagataaatactacagtccaggtcgtgaacgtgggaaatattgctttctaccccccccacacaaaagccaccattttagaagagctaaaatcattttagaacagctamaatgaggccagagaatgactcagctagagtttctatgagagatatttaaaagaaaaaaaaatgtgagaaagacgggtctcggaggctctgaacttcttaagcaaa

SEQ ID NO: 447097 - DNA, 603 bp, Homo sapiens
accatttcgtcctccttgcattctcacctcccctaactttgctaccaccacttacttttgactctcttttttcttgtttaactgttgtttacagtcatctttatcagtcgtggatgtgtgtattcctctgaaatccgaggttttggcttttacaaactatacccaaatgaagggtctcacttacatggcttcaggaaccatctttaccagggtttcccaacccccaggccacagacaggtatcagtccatggcctgttaggaaccgggccgcacagcaggaggtgagcgggcagccagcagcatactgtctgagctccacctcctgtcagatcagtggcatcattagattgtcacaggagcacgaatcctattgtgaactgcacatgtcaggggtgttggttgcactctccttatgagagaatctaatgcctgatgatctgargtggaacagttcatcctgaaaccattctcccaccctctctatggactacgaaatctgtcactagtaccaaaaaggttggggaccactaattgttgcaacagtgaatcataatttatctccagccccagcctgtttccccttaccaataattttctaaatg

SEQ ID NO: 447098 - DNA, 332 bp, Homo sapiens
acaagacccaaataacatattcgttcttacctgatgtggactgcttcatcatgttatgcattaagagacaaagtataaaaagtaaaaacatgtagaatttatttaaataatatttaagacatctgacacactcagcacaagtttaatagttaacaaaatctttttttataacatctaaatctactttaatggaatcttaactttgcattatcaataaagagatcggattttagaatttctctgtgtgyattaaacaatgctggtcccccaaaaacatttagtaatgagaaaaggaaagcgataagttattatacaatttacaaagaataaag

SEQ ID NO: 447099 - DNA, 570 bp, Homo sapiens
aatggaaaaagatatgcgacaagatattgtattaatagggtgttagaatcaaataaaaggagggatagatgtagtaagagaagcagattttatagctatccscattccaagaataaaaaacaaaaaaataataggcgagttcattgtgggcatctgtcaggaacaaggaaggatagagctctgaaagctgactgcagtcactaacaaaaacccttttgagacatattccaagaacctgaaaaactggtaatggacccttccttatactcggtgtcttgaaaggcagtaaactgtctaatgggatataaaaatagagtctttttttcctcccccactctaatattctcctattttaaaaaccttctttatatggcactgcaaataatagcacacagcaagaactgtactttgcagtattattgagcatctcaagtgtctgaaaggtacaaagctaacaaccaaatgacttcagaatggaaaatgtcccagaatttttaattttccttctaaaacagaaatataggggaagcaaaaacaaccttaatctaaaatccagcttaaaatgacaac

SEQ ID NO: 447100 - DNA, 570 bp, Homo sapiens
aatggaaaaagatatgcgacaagatattgtattaatagggtgttagaatcaaataaaaggagggatagatgtagtaagagaagcagattttatagctatccccattccaagaataaaaaacaaaaaaataataggcgagttcattgtgggcatctgtcaggaacaaggaaggatagagctctgaaagctgactgcagtcastaacaaaaacccttttgagacatattccaagaacctgaaaaactggtaatggacccttccttatactcggtgtcttgaaaggcagtaaactgtctaatgggatataaaaatagagtctttttttcctcccccactctaatattctcctattttaaaaaccttctttatatggcactgcaaataatagcacacagcaagaactgtactttgcagtattattgagcatctcaagtgtctgaaaggtacaaagctaacaaccaaatgacttcagaatggaaaatgtcccagaatttttaattttccttctaaaacagaaatataggggaagcaaaaacaaccttaatctaaaatccagcttaaaatgacaac

SEQ ID NO: 447101 - DNA, 538 bp, Homo sapiens
gtttttattgatgattcataggtactaacacyggacaatacctttgctttatgtgcactgaatatgaaacatatttttaacattaaacaaacaatttataatgtatatcccttattttcctctaggtttttgaatgaaaccaaacagtggctacagaaatccactattatctaccattcaagtttaatagctgtattaactgagcattttcatgtagaatatggagcttgtcactataagattaaatttgagaggaacattgaaaattatcctccctctccctgtccagatctttcttaatcacatctgcaagcaagatgtcatttggagtcaagtaaaaaagagcacattgaactagtagccttgaaacttctactccatttttttttctaattggacaaaggaaaaaaggaaagaaacagaaacccacagtacagctcaaagagaagggtttgttgacacaaagaggtgagacattcgtgaaagtataaccaaaacactccccaggaagacgctgacgatggaaagaaatgtttcc

SEQ ID NO: 447102 - DNA, 620 bp, Homo sapiens
gcattttcatgtagaatatggagcttgtcactataagattaaatttgagaggaacattgaaaattatcctccctctccctgtccagatctttcttaatcacatctgcaagcaagatgtcatttggagtcaagtaaaaaagagcacattgaactagtagccttgaaacttctactccatttttttttctaattggacaaaggaaaaaaggaaagaaacagaaacccacagtacagctcaaagagaagggtttgttgacacaaagaggtgagacattcgtgaaagtataaccaaaacactccccaggaagacgctgacgatggaaagaaatgtttcccatacgtgaactacactgggtagaaaggctgtgaagaagtaacagttacaaaggcaaaggcaatggacgaagatggtccttcctcatctctttactactccyggctttgccaaacatagcaaaagaaatcacttttcaaaaatggttttccaatggtcgaccaatatttaaactgacaaaaatcaaatgtatgttcctttcattttctttgggaagtggaggaccctgagaaagaaactgtagctactgaaacttcttttgcacagtcccgctctcgctgctggc

SEQ ID NO: 447103 - DNA, 620 bp, Homo sapiens
cttgagagtgaaggcaaaatgtcataccttctgaaaatgaatcatctcccattctgctacaaaaatgtagcataatgaaaatatgaagagacaaaaacagaagcttcaagagtacaggaagctcaggataaagaggggtgtcgaaagccccaggagttgtcctattcgcccatacagagaaccaaaaccaacaggaggacattgacttctccctcacctggagtcagtggagtgggaatgatggctggagagaggccagtgaatttggggaagtgaacacttaggactgattagttctggctgcaataaagatttcctgaayctacctgaattgaagaaatatctgaagcctgatatttcaagcataattgcccatacacagcctcagctaatacttctctccctgtacccctctcctcatactgaaacagtaaaacacagagaagaaaacctcgttgataaattgaaaaaggatgctaatgagtgggatgagatatctggaataattctctgcccctgtattagaaagaatgaaagatctagataataatgttaaaagtggaaattttggcaactgtggaaccagtctagaaagaaattagttcaaattaaaacaggta

SEQ ID NO: 447104 - DNA, 433 bp, Homo sapiens
cacaactggctaatttttgtatttttagtagagacggggtttcaccatgttggccaggctggtctggaactcctgayctcaagtgatctgcccgccttggcctcccaaagtgctgggattacaggcgtgagccatcatgcccagccagtattcttcctttttgagaattgatcctgttcatctttttcttcccctctcaattatacaattcttaagggaagaaactatgtcttactccactcaatccccaatgcatcaaacctttagtaaccactaataatccttgtttgaataaataaagagcacaggccctacggacaatgtaagtcagtaagtgcacttgagtcactatctcaagcacactaccatttgaatttaaatttctggataaaaatctccacaaaactgataaggcacccttcaagcaagacac

SEQ ID NO: 447105 - DNA, 567 bp, Homo sapiens
tgtacctctaagaaagtttgttatccttactgaaggaaattacagttaggtcgcttctcagccttttggctaagatcaagtgtgaaaattatacttagattactatgtaattaggcctggtagatcctgggtagacttcactgaatgcaggatgcaatatttggaaaagtacttactttggagtcctaatgcctgggtgctacttctattagtgccagaaattaatagtgtgactttgggataatcacttaacatctttgagcctcattttccttatcttcaaaaaaaaaaaaaaaagaaggaatcagatgaaatcatctttaccagattaggtctatctttaggtcccccagtgtaactgggtttctgtcttggtctcagtccatccttgcattatcctggactttatttattggaatcccaatatctgagaattcaatttatgtctttatcgtactgaagtctataaagatgtttttaaagagtcactagactccagtggggcaacttgctccagatatcatcatagtctcattaaaaagyatttattgactactaatgtgtata

SEQ ID NO: 447106 - DNA, 648 bp, Homo sapiens
acatttctgttggattgaggcaggatttttatcttttgcctgttgcctttttctccggaattctgaaaactaaaataacaacacaaagaagcaacagcaaaagccacagcagcaatactgcagacctccatctaaactagctactaaggttctttctgcatctggtcccacctgctctgcttttccttttgtattgcacaatwtaagattataggatgcagcccattagcttccatttgcttagggggggtccctctctccttccccacccccatctgcatgcacatgtgctcagccagatgcatgctcacacacgtacacacattatgctttatcccatcatgcttcctggaaattaagatttcaacattgattcctagaaaaaatgttagagacagtcctctgcagaagtaggcattttagtcttctggcacactaagactctgggtgttacatccaagaagggtatacccaagagaaagaatgaatatacatatcattgggtgaatggtctctgtttagttccgtatatgtaatagttaatgataagctatttccgcgtctggaaataacttgtcggtttgtcttatttttctgtaatatgatttttttttaccttttgcatttgtctggaaagtcgcaaaagac

SEQ ID NO: 447107 - DNA, 648 bp, Homo sapiens
acatttctgttggattgaggcaggatttttatcttttgcctgttgcctttttctccggaattctgaaaactaaaataacaacacaaagaagcaacagcaaaagccacagcagcaatactgcagacctccatctaaactagctactaaggttctttctgcatctggtcccacctgctctgcttttccttttgtattgcacaatttaagattataggatgcagcccattagcttccatttgcttagggggggtccctctctccttccccacccccatctgcatgcacatgtgctcagccagatgcatgctcacacacgtacacacattatgctttatcccatcatgcttcctggaaattaagatttcaacattgattcctagaaaaaatgttagagacagtcctctgcagaagtaggcattttagtcttctggcacactaagactctgggtgttacatccaagaagggtatacccaagagaaagaatgaatatacatatcattgggtgaatggtctctgtttagttccgtatatgtaatagttaatgataagctatttcmgcgtctggaaataacttgtcggtttgtcttatttttctgtaatatgatttttttttaccttttgcatttgtctggaaagtcgcaaaagac

SEQ ID NO: 447108 - DNA, 603 bp, Homo sapiens
actatttttaaagttttaaactttctatacaacacagaaaactgagtgcccaccattccattaattctccagtcatttacccttggatgctgggctacctcagtgctgctaggaattcagcatgccatgctaagacatgggctttccatgcatttaagaaggacaactgctactacttgttaagtgcctgtttacatggcaggcgcagtgctaactactttgcacctgttacttcctttaatcttcctaccaatcctctaagttatgtattattatcctgttttattgataggaaattgtgggtagccatgagagactgacaatagagtctcaytacagactgtattttttgtaggcaagactacataaatcatgtgcctgttttgttgttcaaaattccaccgacattctttatgcagtagagctaaaaggcatacagacacaaatgtatgaactgtcctctttttgtaggcaagaatccacaaaatatttaataacacggtcatgttttcatcactgaaaacatacttgaggaagctcattataatggaatgagacaatacttttcattaatgactttcatttatttttaaaatttgaaca

SEQ ID NO: 447109 - DNA, 596 bp, Homo sapiens
gttaggggtaggaaacaggatgctttattcaaggaaagtcataattctgatcattgcagttcagtggaccaatgatattaatatacaacagcaggaaaagatggccaattttatgtgawtcatcctctaaaaggaagtacacaggatattattttatcatttcatcattatgccacagatgagtcaccacaaaaataaattccaacaggagcaaggaaaaaaaaaccctaatgttatagtagaaaggaaataatgaaaattaattttacagttttttttggggggggagacaatgacaataaactatatatatatatatatatatctcatggtatcactttaaaataagccaaattgttagtttctattgcagagtcatgctcaaccatggataacaatctggcctaaagcttcagatgagactcaattttatgaaactgtgaaagatttgacacagtaacagcctcacagaaaaaaatataaaatatctccaaagatgcctgaaatttatcaactgatcataaattcttgtctttcatcaataaaaatgaattttgttcaatgaaaatacctcctcatagaaataacatttcttc

SEQ ID NO: 447110 - DNA, 589 bp, Homo sapiens
ttatttacacatatgatcatttatttacactgaatcttaaatatattcatactaaaatattattttatagtgctttatgaaaatcatacctctctatttgaatatctagtgactaaaattaacaatagaataaccattggtctagctcaataaatcccaaatgaatggatgaactaagtgttttaacatattatatgattatacaaaatgatattcactagtacgtattgttgaaataaaattaatatttttctaacgttcaaatatgcaaggaaacctttaattcaatacaggttgaacwttcctaatttaaaacataaaatgctcaaaaatttaaagtttttgagtgctgatatgaggccataagtgaaaaattctacacctgacacctttgctttatgatggttcaatgtatacacactttgtttcatgcataaaaaaactattaagaatattgcatacaactaccttcagggaatgtatttgaggtgtttataaaacataaacaatttttgtgtttagacttgggtcccattcccaggatatctcattatgcacatacatacaaatattccaaaatctgacaaac

SEQ ID NO: 447111 - DNA, 596 bp, Homo sapiens
ctcattcattcattcagcaaatatttattgagatctactatatgttaggcactatgtttaccactggaaggcaggcaccaggtaagtacaaacacagaamctgagatggatggcattgcattttcatttgattacaaatttattcttgcttataagttgattacctaccttattaagagctgatttgtttcaagttttagaactccaattgtgtccttaaatttttgtctagcttaaaacatagtgctagatttcaagaagtaaattgtcaaacaggtttgctgtttagtttttgtaaaaaaggaaacttgtaggcagaaacaaaaaccaaaataaataaaatctaaattatggtaataactaaagatagttgaggcattaacagagtttgactgaactctcaagtctcaagcaaatttctaaactaaactgttttcttctgttaatcagtttaaaagggaataccttgtgctaatttttcttggtgttggtaacattaataaagctctgtgaaatgaggccagaaggaacagaaattgagtcaaaataatgataacacctcttacatattcttaccatcttgtctcctagccaca

SEQ ID NO: 447112 - DNA, 521 bp, Homo sapiens
tctatattgaccttctgtacccactttactagattcttctattaattctaatatttttcataaagtctcaygatttttatagaaatgtgcacaatttcataaggaaataaaataagattatttcatttttaagatttattttggagttaatcatatgaatgcattagttataaaggtacagttatataatggttgctaaatacaaaatggtaataataggaatccataacttgctccttgttttcaatgaaagtttcttcagcgttcatatatagtggttgaaatgagtcttggtgattaatttttatcatgtttaaagactttccttttcttcctattctccttcaaaggatttaacctttaattcactgaggcaatgaaatataacacaaaagctcctgatgttaaccatttatttatttttggaaaaaaactctagatgataatgctaacatgttggattttattgggtaatatattttatttataattttcacagttactgttttatgtgaaattgg

SEQ ID NO: 447113 - DNA, 521 bp, Homo sapiens
tctatattgaccttctgtacccactttactagattcttctattaattctaatatttttcataaagtctcacgatttttatagaaatgtgcacaatttcatawggaaataaaataagattatttcatttttaagatttattttggagttaatcatatgaatgcattagttataaaggtacagttatataatggttgctaaatacaaaatggtaataataggaatccataacttgctccttgttttcaatgaaagtttcttcagcgttcatatatagtggttgaaatgagtcttggtgattaatttttatcatgtttaaagactttccttttcttcctattctccttcaaaggatttaacctttaattcactgaggcaatgaaatataacacaaaagctcctgatgttaaccatttatttatttttggaaaaaaactctagatgataatgctaacatgttggattttattgggtaatatattttatttataattttcacagttactgttttatgtgaaattgg

SEQ ID NO: 447114 - DNA, 521 bp, Homo sapiens
tctatattgaccttctgtacccactttactagattcttctattaattctaatatttttcataaagtctcacgatttttatagaaatgtgcacaatttcataaggaaataaaataagattatttcatttttaagatttattttggagttaatcatatgaatgcattagttataaaggtacagttatataatkgttgctaaatacaaaatggtaataataggaatccataacttgctccttgttttcaatgaaagtttcttcagcgttcatatatagtggttgaaatgagtcttggtgattaatttttatcatgtttaaagactttccttttcttcctattctccttcaaaggatttaacctttaattcactgaggcaatgaaatataacacaaaagctcctgatgttaaccatttatttatttttggaaaaaaactctagatgataatgctaacatgttggattttattgggtaatatattttatttataattttcacagttactgttttatgtgaaattgg

SEQ ID NO: 447115 - DNA, 521 bp, Homo sapiens
tctatattgaccttctgtacccactttactagattcttctattaattctaatatttttcataaagtctcacgatttttatagaaatgtgcacaatttcataaggaaataaaataagattatttcatttttaagatttattttggagttaatcatatgaatgcattagttataaaggtacagttatataatggttgctaaatacaaaatggtaataataggaatccataacttgctccttgttttcaatgaaagtttcttcagcgttcatatatagtggttgaaatgagtcttggtgattaatttttatcatgtttaaagactttccttttcttcctattctccttcaaaggatttaacctttaattcactgaggcaatgaaatatawcacaaaagctcctgatgttaaccatttatttatttttggaaaaaaactctagatgataatgctaacatgttggattttattgggtaatatattttatttataattttcacagttactgttttatgtgaaattgg

SEQ ID NO: 447116 - DNA, 518 bp, Homo sapiens
atatatctttttacatactctactttggttatttggtctacawggcaatctgcattataaaagagagaattttctaccccccaactaagaacatattttcacccctttggaggtgattttactccctgttgagaatgcatgctcaaccgatatacctggtttgatgtcgccataatgaggcaggagaatagggtctggaggcagggaacctaagtccatttcacactgacttcttagaactaaattgaaagaaaaaccctaactttccatgcctgagtagcaaaaggaccaggggctactccctttgcaaacccccaccttttctgtgcggcagatggataattgaaagtacctctgatcggttgcttttcccaaccagacacttgcctaggaatgtaacttcgtaacttcacctcagcctctgattgcgggcaaccacttcatttacatggggtgaacaccaagtaggtggccaatgggaaacctctagggggtatttggacctgagaagattctgt

SEQ ID NO: 447117 - DNA, 518 bp, Homo sapiens
atatatctttttacatactctactttggttatttggtctacaaggcaatctgcattataaaagagagaattttctaccccccaactaaraacatattttcacccctttggaggtgattttactccctgttgagaatgcatgctcaaccgatatacctggtttgatgtcgccataatgaggcaggagaatagggtctggaggcagggaacctaagtccatttcacactgacttcttagaactaaattgaaagaaaaaccctaactttccatgcctgagtagcaaaaggaccaggggctactccctttgcaaacccccaccttttctgtgcggcagatggataattgaaagtacctctgatcggttgcttttcccaaccagacacttgcctaggaatgtaacttcgtaacttcacctcagcctctgattgcgggcaaccacttcatttacatggggtgaacaccaagtaggtggccaatgggaaacctctagggggtatttggacctgagaagattctgt

SEQ ID NO: 447118 - DNA, 641 bp, Homo sapiens
cctgtatcagtctggagctgtctgtaaatcacctactcttagcttatagtgtatatcagtatgttataaagagcaaattttgagatggatggttgagaagtccagattgtcattattgtattatatttttacctaacaagataatgtccagatcttttagaaacaccccccaaaaagtatgtcagaagaaacctatttacttgaagtttcccagaaaatgaaattaaactcaccaataatgtcaaagactgctgctatggcaagattgattattttcttcatttggccawtttttatgattaatgaactcaaacgtgggtgtcagattttgttggggccaaaataaatgactcttcattttaacaaatatcataaaaccaaatgtcttcagaggaatgcagaaatcacttttctagaaaagaggactccctgcaagacggcaaaatgagttcatgatttatgaaaccccttctgtttcaaacatactgtgatcaaaggaaaaaacaggaaaccaaagaggcaggaaggaattctaaacgaggttaacctctttgttgaccagaaatgcaacagaaacatatgctaggtcaagaatcaggcaatgttggactcaattgcttcctatagggtgaggagactaa

SEQ ID NO: 447119 - DNA, 575 bp, Homo sapiens
acgtaccacattttctttatccagtctatccctgatggacatttgggttgattccatgtctttgctattgtgaacagtgctgcgatgaacatatgcatgcatgtatctttataatagaatgatttatattccacccagagaaccccagtaagaattttcaaagaagtttaagatgaccaaagagataaatgaaaaagagaaaataataaaggtgagaggagaaatttaaaaaacaaagaaataaagggacttaatagttcaaaatattgggaacgaaccaataatttcaggtacattagaaactgttagtrtcaaccaaactaaaagctggttctttgaatgaaaaataaagaattttactggcttttgcctcaagttcctgggaagtagcctctacatccttggaatttgccaattgataggtatctttgttatttatggtgaccctggtagtttatggcaatgagatcattcatgagcactggccatgtcagaaactccaaccttgtgtgcatggccagtgattccagcgatcatgcctacctaaggaaatcccaatcagaagcctcagcaca

SEQ ID NO: 447120 - DNA, 549 bp, Homo sapiens
gatcttctactctactaatgatgttttatttctgattgaaaaacctgacccaaacatgaaaaactattaatttttwaaaaatctgggtgacggacacacaaatattggttataatattttctctatgtgttgaatttatgaaatactttctaattaagaaggaaataaaagaaagtcacagattttcaaaggatagaaatttcaaaaagaaggaaaaataaccatagaaaaagaatcctgcaaaataatcatattaatacacaaaggctaatggttgcttctgacatcataggtatctgacataaataagtctaatcctgcccaaatcttatttgtgtaaaattaatttagtctcagcacgttttgcttcatcaataatctgttttagaaacaacattctctcaagctgtaacttctctcagcgaactagcaccttggcagtttatgactcattccctccgacaagacaacttaatacatatttagtctaccacaatagagaatgatttttagatctattggaaacacggatttaataactaaaactgc

SEQ ID NO: 447121 - DNA, 549 bp, Homo sapiens
gatcttctactctactaatgatgttttatttctgattgaaaaacctgacccaaacatgaaaaactattaattttttaaaaatctgggtgacggacacacaaatattggttataatattttctctatgtgttgaatttatgaaatactttctaattaagaaggaaataaaagaaagtcacagattttcaaaggatagaaatttcaaaaagaaggaaaaataaccatagaaaaagaatcctgcaaaataatcatattaatacacaaaggctaatggttgcttctgacatcataggtatctgacataaataagtctaatcctgcccaaatcttatttgtgtaaaattaatttagtctcagcacrttttgcttcatcaataatctgttttagaaacaacattctctcaagctgtaacttctctcagcgaactagcaccttggcagtttatgactcattccctccgacaagacaacttaatacatatttagtctaccacaatagagaatgatttttagatctattggaaacacggatttaataactaaaactgc

SEQ ID NO: 447122 - DNA, 553 bp, Homo sapiens
ctaacttacaagggatgtgaaggagctcttcaaggagaactacaaaccactgctcgacaattgttaaaaactaaagttgttggggaacaaattgtacttaaaatatatttattgtgtaatctgataaaatattttaaattctggtgttacaaagwtttagtgtttcttttgttctttttacaaaacagaaacccactaaaatgttaactgattgacattatattttttgctttcgtcagtgttaaatacttgttgcacagtagtatgagttgtttctatcatttactcttctacaagccagttgagacgtgttacgaggactcaaaatattctaattggcggtgaccaaatgtcatacaattatgaagtatacaagccattctaaccttcacagtaaatttttttaccctctggttgcatacttaaatagaattatactaataatgcatattttctgaatgttaatgtcatgtgaaattgctactaagttaaacgttgcttcccatggttttctgggtgatgggtgtttattctgcttattcagtgcctctct

SEQ ID NO: 447123 - DNA, 553 bp, Homo sapiens
ctaacttacaagggatgtgaaggagctcttcaaggagaactacaaaccactgctcgacaattgttaaaaactaaagttgttggggaacaaattgtacttaaaatatatttattgtgtaatctgataaaatattttaaattctggtgttacaaagttttagtgtttcttttgttctttttacaaaacagaaacccactaaaatgttaactgattgacattatattttttgctttcgtcagtgttaaatacttgttgcacagtagtatgagttgtttctatcatttactcttctacaagccagttgagacgtgttacgaggactcaaaatattctaattggcggtgaccaaatgtcatacaattatgaagtatacaagccattctaaccttcacagtaaatttttttaccctctggttgcatacttaaatagaattatactaataatgcatattttctgartgttaatgtcatgtgaaattgctactaagttaaacgttgcttcccatggttttctgggtgatgggtgtttattctgcttattcagtgcctctct

SEQ ID NO: 447124 - DNA, 576 bp, Homo sapiens
tttctttttcacactgtttgctgttggcttatagaaatgctactaatttttgtatgttgattttgtatcctgcaacattactaggtttgttcatcagttcttatagtttccttgtggagtctttaggtttttccaaatataagatcatrtcatctgcaaacaaggataatttgacttcttccgttccaatttggatgccctttaatctttctcttgtcctatttttctagctgggacttccagtactatgttgaataacagaggtgatagtgggcatccttgtcatgttgcaggtattagaggaaaggcttttcagattttccccattcagtatgatactagctgtgggtctgtcatatatagcttttattatgttgatgtatgttccttctatccccagttttgctgaggggttttaccatgaagagatgttgaattttgccaaatgcttttttagcatgaattgaaatgatcatatagcttttatccttcattctgttgataggatgtatcacattcatttatttgcatatgttgaatcatccttgtatcccagggataaatccgacttggtca

SEQ ID NO: 447125 - DNA, 552 bp, Homo sapiens
gactacaatagggctgctagacaggtgacacgacgccatgatggttttgagatgtcattgacattcccacagctaattaaattcctacatctagaatcacttcaaattgacttttatgttcatcttttatttttagtattaaacggtgggcagttgaacacaaaacttttgttttaaactcaagagacaaattatgaattcaaaattgaagctagctgtcctttctaatacactgcatttctaatgcaatgcaggacctcacttgtgatwtttaataaatgcatacataaataaaataattttgagctatgtagaatctttaaggaaagactcattttgaaatatttagagtatttaggaaaaacattaaaacaaatgcgaaggactgaactgcctgatacacaaagtgacttacattttagattatgtctaaacctgtcagcagctttagagtgcataaggcatcatattgctgctccaaacccttctactgcagattgtgttgaacactgagaaaatacacagcactttcaaaccctgggtttaagtctt

SEQ ID NO: 447126 - DNA, 575 bp, Homo sapiens
atattgttaagatttatgagatttttctcttccactggtcattcattcattcattcagttaacaattcctgagcacacactctgtgccagaaattgtgcttggtatcagaaatacaaagtcacatgttcatattttatgtcaaggagttttagtctacagcagaggtcagcaaactacagtagatgagtcaaatcctgcttgtcacctgtttttgtaaataaagttttattgagccatagccatgctcattggtttatgtattatccagagctgctttcgtgctaccacataaatagcatagtgaaataggtgtgacagagaccctctggccacaaaacctaaaagatttactmtttggctctttatagaaaaagtctgccaacccctagtgtaaaaaatatggcaaatgagaaagtcatcaatgactatccagtgaggtgtatgttatgaggcccaacatactatgggaacataaaagagaaatctagattaggttagagggtcagcaaaagtcttctagatggcatgatatttgagctagttttggagggctgagtagagtcaattagataaa

SEQ ID NO: 447127 - DNA, 597 bp, Homo sapiens
agatgtgaaagagcctgatacattctggaaacttcaagtactttgttatgtctaaaatgtaagtaagaaggaggaagtggtaaaaacagagactagggaagtagagggagtcctgatggttcagagcattcattattgattcattatcaataaataaaaaagcaatttaaagtatgaagcaaccacaaagtcacagaatctacatttccagttatcatggtccaaaaacacatttaaggacaggtcatttgtactctaagtgtttgctatacaaaccttggtccaccacatcacctgagagcttgttagaatcttagaccccagacctactgaatcagaacctgtgtttttaacaagatccctagatgatttataaggacattaaggtttgcaaacattggcctaggcaacaaatggataacaatatagtctctgtttgaaattgttgcaaaactaacatagaggggaaaatgtgttaagcagagaaagcactgggcatcattgagttagaggatgttataagtggagagaggraaagggaaggcttttaagtaaagaagcaaatagtaaaatttttctttgtcatattaaatggaa

SEQ ID NO: 447128 - DNA, 570 bp, Homo sapiens
gaggccatggttgcaatagacatttatatggccagtcttccacaaagagatggtctgcatttcctgtaaggcagagacaatgtcattcccactctatgaagaatgtgtctaaaaataagtgagcatgatattttaatgcagggtacatataagtagacaygaaaaagcaagctttcagctttactaagggtggatactcccagttggacactagatatagcactaaaggtacatctgagaaatgctaggaaatgatctttccaggccatagagactctctcatccccaaaatatcagtattaagaaggcaaggcattgggattacataataagaaaagttatggctgtgctaagaactaaggtaaaatctccctaacctctaagaatataggatttttctcgtgaattgggggtttaagtattatccaggaagtcaagcctaaagactgaaatatgcaaaagactgtaggaaatgttggtgagtcttacttaaaacatctgaacatggggaagcaataaaagttcctacagattggaaatgctggggcctgagagccaaaaataaataaa

SEQ ID NO: 447129 - DNA, 541 bp, Homo sapiens
ttctataaataccctactcagcatcccctgtgatcagattcaggaagcggtcactgtagattatgacaaatgaccatcctaacaaatactaaatcaacctgaagatacaagatcagtgtctcagcctctcagttctgtttgttgaaggcctccatcaacacttacctgaacgtccagcaaaattatgtttatccatatgtatcaaaggtccgcatatccactctcaggttaatgattgattaggactcatagaagtcagaaaagctgttatactcatggttacagtttactcagagaaacaatacagattaaaatgagccagtgaaaaaggtgcatagggcagagcccaagagaaatcaggcacaggtttccaattgtcctctcccagtggagtcacatggacagrgcatcattctcccagcagtgatgagtgacaacatgtacaaactgttgctaacaaggaaagtttacctgagccttggggtcctgggattttactggaggttgatcacaaaggcatggagtgcacacacaactgacc

SEQ ID NO: 447130 - DNA, 609 bp, Homo sapiens
gcagtgttgtaactcacactccttatatttgtaaaatattgtacttgatttatactttagattttcttccttatatcttttttagctttgctttttcttccttcgttttctgttttattgaagtctttaatcgaaagaataaagatagattaatgatttagtttgttcttaaaatacattaaattttatcatattcatttataaagtgcactattcagtataagctagctacatatagtgtctatagttttattcaataactaaaaattctaaaacaaatactgatgtacatcattgtatagttatgctacttaatagtttatttttgcagtcaaattttctctttgaatgcttttcttagcagrtcaagtccaaaacagatagaatttcattatcatttactttgaagaatgacaaatattttaaaactttatgctcaaaagagtcactgagaaattttaaaataaataaattctaaagattctaaaaaattaaattgccctttggtggatgagctcactctccccatatttccgtatgtttgaaaccaatgcataaagtttcataacaaattgaactgagagatataatatttaaaaatactcaata

SEQ ID NO: 447131 - DNA, 604 bp, Homo sapiens
tcacttgtcagatgaatggcatctatcagtagttaatttccactgtcaggtttttaatgaattgcttattgtttctagtaagaagagaaatttmttaacagcagaaattaaaaattgtattcttgtttatatctttgtggattaaaatactaatttaaatggtaaagcctctgttacaataagaagtaatttgctagatgtcaatttaggaaaaaaaatctttttcaaaagaatgctatttctaatgcacagaggaaaatgttctctgaggtatattacatgaaaatttcggtgttctaattattgttgacagaaacaatatcaatccaggaatgatcctctaacctgttgagcatatgttaacaaatagcatatcttaaaatgcctttgtaactcttatgtctaactctgcaagaggcttggacttttttgagagttagggccatgatgattgtgtgatctttattgctccaaattcagcatcctgacaggtattaggtagccactcaaagagtgtcagctggataaatgaatattcttggacattcatttactcattgattatctgtttccttatatttaagtatcatgaagaaagataatt

SEQ ID NO: 447132 - DNA, 604 bp, Homo sapiens
tcacttgtcagatgaatggcatctatcagtagttaatttccactgtcaggtttttaatgaattgcttattgtttctagtaagaagagaaatttcttaacagcagaaattaaaaattgtattcttgtttatatctttgtggattaaaatactaatttaaatggtaaagcctctgttacaataagaagtaatttgctagatgtcaatttaggaaaaaaaatctttttcaaaagaatgctatttctaatgcacagaggaaaatgttctctgaggtatattacatgaaaatttcggtgytctaattattgttgacagaaacaatatcaatccaggaatgatcctctaacctgttgagcatatgttaacaaatagcatatcttaaaatgcctttgtaactcttatgtctaactctgcaagaggcttggacttttttgagagttagggccatgatgattgtgtgatctttattgctccaaattcagcatcctgacaggtattaggtagccactcaaagagtgtcagctggataaatgaatattcttggacattcatttactcattgattatctgtttccttatatttaagtatcatgaagaaagataatt

SEQ ID NO: 447133 - DNA, 583 bp, Homo sapiens
gattacttaagaaacttgcttttcattagyttccaagggtgaatgtacacacacaatatgacatagtaatcctacttacttttatgccctacttaatgcatatacacgtaggcacacatgtacaagaattttcatgacaaaattactggaaactccaagccagaaataatccaaatgcctattggcagtagaattaatacataaattgtagtatattcatctaatggaataacatacactgaaaatgaatgaactatatataaaacagcatggattagtttcacaaatataatgttaaacagatataccaaccagaaaagaatacatactgtaattttccatttatgtaagggtcataaatggacaaaagtcatgatagtggttacacttgagggagatagtatataatgactgagaaagagcacaggatagggcttctggaatacttggaattttctatttctggaccagggtggcagttacatgaatgtgtttacactgtgaaaatgatcaaggtatttagttttttccctcttaattgaagtaaaacatagtagtaaaataataaggtatgaagaagatg

SEQ ID NO: 447134 - DNA, 429 bp, Homo sapiens
gttttattctaaaataaattcacaattgacaaatatagtaatggaaaattcagacaaatctgtttcaaaactgcatagccaactggaacttatctcctctacttttcttcaactgctcttttgatttttttttttaaagaaaaactgaaggtaataagctcaaggaaaggaacataaatatctagtgagcccacactcaattttagtgattacaggcactaaaatttctatagagattataggaarttggcaattcaaatgctctcacttaatacatactgtgcaatgaactgatcatttttctgttattgctatcatttcaaacaggaatttccatgtagtggacattttagtaaatgaaaactattctaattttcttaaaggccagaaatctagtgcaaaataatttagtccaaatttgctcaagct

SEQ ID NO: 447135 - DNA, 521 bp, Homo sapiens
ttcttgacactatagataaggagtgggggacagtattagctaatgtttttcatcattgcccccaggtgagaacattctcagttgttaaaaagttcagagagggccaaaattttagtttcttcacatatttccaattgaaagtgtacttcaatcatgccataatgaaaaccatgttctttagccataaattatccagagaaaatcagtattttattattagtatgaagacttgttcattgtttcttgaaatttccctaaaatcaggtgatatttgcgaatattttagtttaaccaattccttttcatttaaaactcaattataccaactcagctatccagatagaagtatcaacacagtacatgtcatgcctagagcaaaactaaaattcagatcactcctctcccattccagaagcacaaaaagagcttgtaaatattccgtayatgccattgggcacagatttgtaccttcgaggtttcagctataactcaagtttggctaactttcaacccagcacttc

SEQ ID NO: 447136 - DNA, 521 bp, Homo sapiens
ttcttgacactatagataaggagtgggggacagtattagctaatgtttttcatcattgcccccaggtgagaacattctcagttgttaaaaagttcagagagggccaaaattttagtttcttcacatatttccaattgaaagtgtacttcaatcatgccataatgaaaaccatgttctttagccataaattatccagagaaaatcagtattttattattagtatgaagacttgttcattgtttcttgaaatttccctaaaatcaggtgatatttgcgaatattttagtttaaccaattccttttcatttaaaactcaattataccaactcagctatccagatagaagtatcaacacagtacatgtcatgcctagagcaaaactaaaattcagatcactcctctcccattccagaagcacaaaaagagcttgtaaatattccgtacrtgccattgggcacagatttgtaccttcgaggtttcagctataactcaagtttggctaactttcaacccagcacttc

SEQ ID NO: 447137 - DNA, 535 bp, Homo sapiens
gtatttccatatccatatacttgaagcctaaggctgctattatttctaagcatagagagtaaacacagcctctctttgttttactaattgctttgtttccccaagctgcaagtacaacatctgccagaccagaatgcactccttccacacaccacagaaccacgtctggataaacgacctacacatcatggtgtaagggcaagcgctttgcaggcagccagaaggcagttttcaagaggcaaagacctcaagtggaaatgaagctgaatcaccctccaaaatctttagagtggttatggagttgttgattctgtaatgatttcatactgtctccaattttattgattttgtttttcaatagagctgttaaagattacgattctaagataagcagaatgtgggcagatgctcacattctcacacactgttctgccaagatatttttacatctttctgcacataaaacaaaatgaagacatgtgctatagatgyatgctaccagtaaccccccatccccagaagaagggagtttact

SEQ ID NO: 447138 - DNA, 485 bp, Homo sapiens
aaaagatgtaaaatatttcgataattttatatcaataagttgttgaaagtataatatcctagayacacattttaaataaaacatattaaaattaatgtcacctttctttaatttttaaagaaagatatctgtgctaggtagcctccaagatggtgcccagttatttctccctcctggtagtcacacccttgttcagtgccctcccagattgcactagcattgatctgtgtgatcaaaagggtatggtagaagtgatggtatgtcacttctgagattaggccatagaagactggtttcagtcttgggcttgtttccactctcagaccactaagtcagtgagaaccctatggagaggaccatgtggtaaagaattgaagcctcccagaacagccatgtgaatgaacttgataatagatctccaaatcacagtcaaatcttcagagactccattccctgcctacggcttcactgcaactccatgaaag

SEQ ID NO: 447139 - DNA, 577 bp, Homo sapiens
aaagtgcttgtatttgtaatacactaaaaaaacccttgacagcttgacaataagacaaataaatgattaaaaagagagagaaaggtttgaacaaccattttacaaaaaagcataaatgactctcaaaagcattatgcttagccaaagaagccagatattaaagagtaaatactgtatcatttcatttatattaaattacagaaaggcaaaacagaagatcgttttttgccaggggtggggaacattcactgcaaaaaaaaaaaaagcatgaaataatttttggtggtgatgggaaaaaattcagggaatgaggtcaaacccagagtgctgccagtaaaatctgtggcctcaggctcacaatcaaaccaaagctatggttgtaatttggttgagatttcaggaaattgtggaagagtgtctcattttcctctcagcagaaattgcttctaagaattttaagracaagactctttggccctctctgctgtgagggtcttcacaagtaaccccaaatagagaaagactctactcagagaaataggtggacgtcacttttgtctaatgaattggattataa

SEQ ID NO: 447140 - DNA, 614 bp, Homo sapiens
gaggggactgacaatgcaaagaccttgaagtaataagtttcttgtcatggctggaatagagatgaatggtagtatattttatctgagagctggcagagagccagagtgcataaggaatgataagcgctttagatttcttttctgagtaagacaggatgccaacagaggattcatttttgtatttgttattgtttcagttctggtaagaagacatgagatctatcattgtaacaaatttttacctatacaatatawtattgttgaatatagataccatattgtatacaatatctttagagcttattcatcttccttgactgaaacttaatttgtcactcctcatttcactgtcttcccacctgacaaccaccatccctttctgggattctatgaatttgcctagttttagatacatcatataatagaatcgtgatatatttatctttctataactggcatatttcaattagcataatgtcttccaattcatacatgttgtcacatactgcagaatttccttcttttttaaaaaatctgaatagtatccccttgtatgtatagcgtacattttctttatccattcattaatcagtagacattcagggtgtttccac

SEQ ID NO: 447141 - DNA, 614 bp, Homo sapiens
tcttgtaatataattctttccagacttcttgacatgtctagcattgagttctgctggttaactattttgtaagttcataaattgtgcataatactgcaccaattacctaagtaactggcttaaattacacaattttggactcaaaagtcttgtaaacttttattataattctgattgtgttacttgcccaacaaagaaacagtttctttttcacaaaatgatccaataattctttctttctttcatgtgattacctgtatcacctgtagttcrtttattcttctacatactctaaacatttttgtattaaatcacacaattagaaatcttgatatgcatacacatatttatatagttgccttcttgtgaaagatcttttacttttttcaactttaatgttacacctttagcttacattaagtcacttttttatctttctgctatagggaatttgacatttctgcctttctttttccattcaagacatatttcattcaagaaatatgtattgggcacctatgaggcattagggctattcttttactgtagtattaaatatttataatatatattatatatgttatatatataatatatatttattataaggtaat

SEQ ID NO: 447142 - DNA, 532 bp, Homo sapiens
tcctttgtgaaacggcaaactaaatatgaaaaactgctgataaggaggaatagacttatgcccagaggataaacttaacagagctcacctagcctggctggcattgacccctgcctctacatttttagtacatgtctcataaaagagaaactgcctgtgcttctaggattcttttatataagtgccaggagatgtgtcaagtacaacttgcttctccarcatattgatacatttagagtttttaaagaaaactcaagtgagtcagcaggtatactctcaagccacatacctaggaggatgctcagaataactaccctttactgagcaccatactactatgactccataagaccagcttgggctcagaaagacctgtgtccaaaatcacacttcaatcacttggggaatcttcttcaaagagtttgaaaaattcccttgcatatggcagacctccagctaggtaaagagaattactgtgaccccctctatcccctcatttcccaccaggtttcctaatatctcaatttagaaa

SEQ ID NO: 447143 - DNA, 612 bp, Homo sapiens
tggtcctattctcccccatccccatcccatcccatccatgcacccaggcttatttccagtggtgtcagaacctggcttggcccctagcaccattctataatggaacagatcttggctgacctcaaatatggcattgttttgatatgcccataggttctacataagacctactttttaaaaacaaagtttttttttatcattcacttaattacccagtaatttgccaatcaaaacttggtggacatttttcagaacagatagtaaaagagagaattctctgcctttattttctccttttcctgaccccccgttgcttactcaaccaagtccaaacttctgagcctggagtacaaagtcctgaatgatcacrctcactttgcctacctcaacagcctcatctcatgcccttcctctattcttcagctctcagctgcagtcatgcttcaattcttgcagttctagaacttcctctctccaaatctctttgttcatgctgctctgtctccctgcctacattctctccagttctttacctggaaaactttcattcaaagttgaagactctgtccaggggtcacttcctctaggagtcattccctctccttctcccat

SEQ ID NO: 447144 - DNA, 608 bp, Homo sapiens
gtgttggaattccagctgctagaagagcaggattaggtggttgaagatgggaaaggtctatgaagtcagaggtaactgcttaagcaaagactctaaaagaagccagaagttaatcaggaaaggatgcaatgagcatggtagacagagattgggatgaagtgggtgagaaggccaagaagatggacaaaggctggggctggggaggcctggaaagttgcactaaagactattttgtagacaaggggcagccagtgaatgttttaarttgggaagatatatatatatatttaagaaagatattctgagagctgagttaaaggtggatggggagagaggtgactacagtcagatacatcttgtagaggaggaatcattaacatcagaatcacatggacacttattagaaatgcagattcctagagcctaattcagtccattgtatcagaagggatccagatagagccctggaatgtatatttttaaaccagccttcaggtggcacttagttcaactgggattaagaactatgtcattattaacctcagctgcatattattatagaatcagttgggaagacttttaaattcctgatacgggggctgctcatc

SEQ ID NO: 447145 - DNA, 551 bp, Homo sapiens
aatcccaaagctacataaattgttttagagcacagaaaattaattaaaaattctttttgaagtaagtgtaacattgatacaggaacctgatttttaaaaatagtacaaaaaagaaagttacaggccaatatccctgatgaatattgatgaaaaatcctaaataayatatcagccaacagattttaatacctcattaagaaaatatatcattatcaagtgaggtttatctaagggatgaaaggatggttcaatatgagaaactatattaatataattccctataataagtctaaaagacttattacctccttaaatcctgaaaaagtttttgacaaatttgacacccattcctaaaaaaatctctccagaaaataagaatgatgcatatttcttcagtttggatatttaatttgatttatttgacatgaaaacatgaagatacacacacacacacacacacacacacacaaacatcataccacacacatatctatgtatctacatatatatcttagttaatgaggatatgctacattcccaataggagttgg

SEQ ID NO: 447146 - DNA, 527 bp, Homo sapiens
atacaccaacagtgaccaagctgagaatcaaattaagaactcaaccccttttatagtagctgcaaaaattaaaaattaaaaatcaaaaaataaaaccttaggaatatacctaaccgtggaggtaaaagacttctacaaggaaaactacaaaacactgctgaaataaatcatagaacacacaaacaaatggaaacatgttccatgctcgtacataggtagaatcaacacagtgaaaataaacatactgtcaaaagcaatctataagttcartgcaattcccatcaaaataccacatcattcttcacagaactagagaaaaacaattctaaaattcatatggaaccaaaaaagaacccacaaagcccaagtaagaataagcaaaaagaacaaaactggaggcatcacattatgtaatttcaaactatactagaaaaccatagtcaccaaaacagcatgttactggtataaaagtaggcacatagaccaatgtaacagaatagagaacccagaaataaaccgaaatactt

SEQ ID NO: 447147 - DNA, 529 bp, Homo sapiens
caagtaagaataagcaaaaagaacaaaactggaggcatcacattatgtaatttcaaactatactagaaaaccatagtcaccaaaacagcatgttactggtataaaagtaggcacatagaccaatgtaacagaatagagaacccagaaataaaccgaaatacttatagccagytcatctttgacaaagcaaccaaatacatcaagtgaggaaaggacatcctattcaacaaatgatgctggataattggcaagccacatgtaggagaatgaaactagatcctcatctctcaccttatacaaaaatcaactcaagacggattaaggacttaaatctaagacctaaaattataaaaattccagaagataatgtcggaaaaacccttctagacattggcttaggcaaggatttcatgaccaagaaccgaaaagcaaaagcaattaaaagaaaaaaaggataaatagctgggacttaattaaactaaagagcttttgcactgcaaaaggaacagtcagcagagtaaacagacaa

SEQ ID NO: 447148 - DNA, 619 bp, Homo sapiens
ggacatgaaattgcaggttgacagttacttcctgtcagcactgaagatattattctgttatttttggcactgactgtagttaaggaaaagtctgctctctgagagctttaaacatcttccattttctttgatgttctgccggtttgttacagtgtatctagttgtggatttatttttatatattttgttcaagacttgaggatgcacttccratctgagaacttacattttttcaattttagataactaccatttagtatggttttaaatctttcttttctccttcccttttcaccattaacttattatgtcataccttctcctcttaacatctgacaactcctctgtcctcatcattcaaaacaagtcttgtttgtttgttttattttttcacctaaattagtttctttcatggtaactttcttttctttttctcaaattcaacttaccaacatttctgttggttctaacttaaaaataagcccagaaaatggccacttctcatcactcttactgctatcactgtatcctaagccacgattagctttctgcttctacacttgtctcccacagtctattattagtgtttacaatttcaaattgcaccccccaccctgac

SEQ ID NO: 447149 - DNA, 473 bp, Homo sapiens
taataattaaagccttaagctaaaataattcaaaacagaccttggggccagctgcagtggctcatgcctgtaatcccagcattttgggaggctgaggcaggaggattgcttgaacccaggagtttgagaccagcttgggcaacatagggagatamtgtgtctacaaaaatatttttaaaaattagctgggcatagtggtgctctcctgtagtcccagctactctggaggctgaggtgggagtactgtttgagcccaggaggttgaggctgcagtgagctgtgatcatgtcactgcactccaggctaggtgacagagtgagaccctgtctcaaagcaaaacaaaacaaacagaacagaccttgagacttgccctgtcttttgcagaaaaactacagatgtaataacagaagcaatcctttcccaatctcctgtagctctcaaaaccctcaactgtacacacaacctcttaatat

SEQ ID NO: 447150 - DNA, 588 bp, Homo sapiens
tctacacttgtctcccacagtctattattagtgtttacaatttcaaattgcaccccccaccctgacactccatgtcactcttatcttctccatggcacttatcgcaattagcatgatatctttaaaaaatgttttcttcttcttctgattctgcttctgattatgttcactgtctctcttcctcaccactctataagctctggtgataaggataagaatgcttagaagaatcagaattttttgcctattttgtaaactctgtaggttaagcacctagaacagtgtcacacatagaaagaattcagcacatttttgtaaaggaatacatatgttttaagaaagaagaataaattttgcttaggttaattgagtattggtcatttcctttagaggtgaaagttctttagacttgatatttttcgtttagrtaggtgagggttggggaactctgaaaaatgatgagaaatatatctcaaagaagaactgtagagaatcagcactccatcctggatcttagcattcacgtgcttttaaaagtaaggccatcgtgacagcgttctaagttaggagatgagacatgcagaagaa

SEQ ID NO: 447151 - DNA, 530 bp, Homo sapiens
cttgattggccatccacaagttaggggtgatgtaaaagcctaatgcttaaaattacagtctttggagtccagtgacacagattcacatttgaactttgctgctaactagcttaggaatatgactttgcaaggttatccagttattctaagcctccattttctcatctgtaaaatggaggtaataatcctatcagagakttgtcccaaggattagataaaatatgtaaagcactcaacatggtgttaggcacatactaattgctcactggctgacagttttatcattattcctgttcccaatttcatttctactttgctgttaacagttaatatgagttatttccaggctgttaaaaagcaataaaagtagtaatgccaaagtagtgacatgaaaaaatattacataaaaaagatactgatttcatttggatttagttcaacagaaaatcagaattttagagctgaatggagcttatacatttccattatttcttacatgcagtaaaccaaggttcagagtaacttgacaa

SEQ ID NO: 447152 - DNA, 485 bp, Homo sapiens
agagaagagcacaaatgataggtttccagactgatcaattatacaaagggaacacatcagtgtagccagtacctgcattaagatgatgaacatcacctggacaccagaagtgccactaccctccttgtaacctctttctgatcactactcatcccctgcaaaggtaactgctaagctgaatcctaacagcatagatcagttttgcctggttttaaattttatatatatggaatcatacagttggcaatttctatgtctggcttcttttaccccacattatatttatgagtatgacatatgttgagtgtagktacagatttttcattcttattgttgtacggtattccactgtgtgactataccacaatccatttattcattctattggtgatgggcattgcattgtttctgtttgggggtatcatgaacatttttcttcttgacttttggtgagcaaatgtatacatttgattcagttctaacca

SEQ ID NO: 447153 - DNA, 485 bp, Homo sapiens
agagaagagcacaaatgataggtttccagactgatcaattatacaaagggaacacatcagtgtagccagtacctgcattaagatgatgaacatcacctggacaccagaagtgccactaccctccttgtaacctctttctgatcactactcatcccctgcaaaggtaactgctaagctgaatcctaacagcatagatcagttttgcctggttttaaattttatatatatggaatcatacagttggcaatttctatgtctggcttcttttaccccacattatatttatgagtatgacatatgttgagtgtaggtacagatttttcattcttattgttgtacggtattccactgtgtgactataccacaatccatttattcattctattggtgatgggcattgcattgtttctgtttgggggtatcatgaacatttttcttyttgacttttggtgagcaaatgtatacatttgattcagttctaacca

SEQ ID NO: 447154 - DNA, 562 bp, Homo sapiens
agtctatggtattttgttatagcagcctgaatgaatgtacagatatatgcattaggtagrattagatgtacagggatatttgcattagataggatttttgtatctatataaataagtgagactgtacggtaatttttctatgttatattatactatggttactcccagtgttctcattgcttcaatcagttgtttattgagttacatttatgtgagaagctttatgtgaatgtcagttctaggaatatgaggatgcttatggtgaacacagtccctgtacttgtagtgcttggaatttagtagggaagacaaatgataacagcagaatgtaacaaacttattatcattttattgtgataagaatacttaacatgagatttacccttttaacaatttttttttttattttttatttttttgagacagagtctcactctgtcacccaggctggagtgcagtggcatgatctcggctcactgcaagctgtgcctcctgggtccacgccattctcctgcctcagcctcccgagtagctgggactacaggggcccaccacaatgccc

SEQ ID NO: 447155 - DNA, 562 bp, Homo sapiens
agtctatggtattttgttatagcagcctgaatgaatgtacagatatatgcattaggtagaattagatgtacagggatatttgcattagataggatttttgtatctatataaataagtgagackgtacggtaatttttctatgttatattatactatggttactcccagtgttctcattgcttcaatcagttgtttattgagttacatttatgtgagaagctttatgtgaatgtcagttctaggaatatgaggatgcttatggtgaacacagtccctgtacttgtagtgcttggaatttagtagggaagacaaatgataacagcagaatgtaacaaacttattatcattttattgtgataagaatacttaacatgagatttacccttttaacaatttttttttttattttttatttttttgagacagagtctcactctgtcacccaggctggagtgcagtggcatgatctcggctcactgcaagctgtgcctcctgggtccacgccattctcctgcctcagcctcccgagtagctgggactacaggggcccaccacaatgccc

SEQ ID NO: 447156 - DNA, 606 bp, Homo sapiens
catattattatttgtattttaaagatgaggtacctaggtcagagaaattaaagaatttgcctgagatgaaacacgtggtaagtcctaaagctggaaatgaagttcatgtctgacttgacttcaaagcaggtgttcttttttctcttatgcttttacccaattaccaaacatcagacccagcagggagttgtttggttccagtccttttattttataaatgaagatagtatcaagaaggatgctttggaaattaggcctagagtttgctctttttrgattcagtttctcctacagtctcagttctggtctggtcaatagcttcaaaccaaagaacaaaaattccttctgaaccctttgcagagaaaaattgttacagagcaaaacatcaaaatgttaacagctttgttttggaatatagggacttgggtaatttttgtttatttctttttgtctgaggtttctaaattttctgtataagcatgtgttgcttttaaatgttttaacttaagctctgtttgtcggtctctagcctctttctgcctttcccctctgtacaacccctagtactaggcaccgtacaaattactccaaatggtgaaaatcaac

SEQ ID NO: 447157 - DNA, 606 bp, Homo sapiens
catattattatttgtattttaaagatgaggtacctaggtcagagaaattaaagaatttgcctgagatgaaacacgtggtaagtcctaaagctggaaatgaagttcatgtctgacttgacttcaaagcaggtgttcttttttctcttatgcttttacccaattaccaaacatcagacccagcagggagttgtttggttccagtccttttattttataaatgaagatagtatcaagaaggatgctttggaaattaggcctagagtttgctctttttagattcagtttctcctacagtctcagttctggtctggtcaatagcttcaaaccaaagaacaaaaattccttctgaaccctttgcagagaaaaattgttacagagcaaaacatcaaaatgttaacagctttgttttggaatatagggacttgggtaatttttgtttatttctttttgtctgaggtttctraattttctgtataagcatgtgttgcttttaaatgttttaacttaagctctgtttgtcggtctctagcctctttctgcctttcccctctgtacaacccctagtactaggcaccgtacaaattactccaaatggtgaaaatcaac

SEQ ID NO: 447158 - DNA, 667 bp, Homo sapiens
attgatatatgccaacattgggaagaggggaaggcccattctttctgatgtggacttctatgaatcattttcttggggtggttttatgctgataacttaattaggggttctaagtaaaaatgttagaaagtggggagtttcttcrctacagaggattcttgagcatttcatagcttatggaaagcagaaacagacttggggtgctctgaggagataagtctaaagctggctggtttgggatgacttttattgctttatttgattgtaagagtaatacatattccctgtagaaaatttggaaaatataaaaatgtcaatggaataaaataaccatttgtttatgtttcagtgtgttttattccagttcttctctttgtctctttctctatatattacatgtaaatataggtaaaaatcatactatatttatttttcgttattaaatttctttataaacttaattttaaatagttgtataactttttcattatatgaatatgccataatttttactatttctcataaagctgaatacaattatttccagggattttttgttattttgacaagaatgaatatcattattcacaaatatttgcctggattcttgactatatttttaggctagattcctagaaatagagtttgtagtccaagagtttgaaaa

SEQ ID NO: 447159 - DNA, 581 bp, Homo sapiens
cagaagcgttttatctaatttcaaagggtaagttttacctacttggaaacagacacctctgatagctttcctttcwtgttgcatcctctttcttttttcacttagttttattttatacaagactttttaatcattgaccattctatgtcattcatagggaggtgattattattaaaatattgtgtgtagatttccaattatatgatatatatttacatatctcattaaaaattaagtggctaccctttcccctttcaaatcgatgtaaaaatgcacactttgaagagtatacttatccggacagtcaggcagaacttttgaaatccaggtcacccaggaaaagctaggatatacagttgtcttgcccatatagtacccatctgactctagaacacaggagattctttagactgattatagaaagtgataatatgtcaatgacaataatgcattgtggaggtaaagcattctcctatacattacctcatttaattttcccagtcctcctctgagactgagaaggcaagtgttattatcgacatttcatgaataagaaaactgaaactcaaaaagactaactg

SEQ ID NO: 447160 - DNA, 581 bp, Homo sapiens
cagaagcgttttatctaatttcaaagggtaagttttacctacttggaaacagacacctctgatagctttcctttcttgttgcatcctctttcttttttcacttagttttattttatacaagactttttaatcattgaccattctatgtcattcatagggaggtgattattattaaaatattgtgtgtagatttccaattatatgatatatatttacatatctcattaaaaattaagtggctaccctttcccctttcaaatcgatgtaaaaatgcacactttgaagagtatacttatccggacagtcaggcagaacttttgaaatccaggtcacccagraaaagctaggatatacagttgtcttgcccatatagtacccatctgactctagaacacaggagattctttagactgattatagaaagtgataatatgtcaatgacaataatgcattgtggaggtaaagcattctcctatacattacctcatttaattttcccagtcctcctctgagactgagaaggcaagtgttattatcgacatttcatgaataagaaaactgaaactcaaaaagactaactg

SEQ ID NO: 447161 - DNA, 624 bp, Homo sapiens
catgctgggacaggttactgaggctgggtctgggcagggtatcctatgtgatgtccaaaaagcaggagtgggcaatgaaagggtaaggagtcttggatgattttttccaccttcaccattcccacacagctctggccaccattgccttgcatctgcaatctaacacaacagtcttctaactggtctcctgctctgcatcctacaacacattcttcacttagcagccagagtggtgctgtttttcaaatagtaatcaratcatgttttcccttgcctaaaactctgcaatggcttccctcataaacttacaggccttacaggctctgattcatttcccatttcctatttcctacatttcccattaaatcaacaaattctctacccttcctaattctgcttcagctaatctagccttttttaaacaacccaaagcctttcctgccttaggttcttgcttgtgtggtttcctttgcctggaagactcttcccctgagatccttctgaatgcaagatttcagctcacatgtcacctcagagaggccttccttgaccacccaggctgaactagatccccctctctccctattattttccatcgtgccatctattttatttttttcataa

SEQ ID NO: 447162 - DNA, 516 bp, Homo sapiens
aaatcaacaaattctctacccttcctaattctgcttcagctaatctagccttttttaaacaacccaaagcctttcctgccttaggttcttgcttgtgtggtttcctttgcctggaagactcttcccctgagatccttctgaatgcaagatttcagctcacatgtcacctcagagaggccttccttgaccacccaggctgaactagatccccctctctccctattattttccatcgtgccatctattttatttttttcataacaccgagagcttgtgaaattacctatttcattcatttatttcttgtctcttttcaatgagctaactttcttgagagtagatatttatggcttattckctgtggtatcttcagtgtctaagacaatggtcaccacatacttggagttttgtacatatttaagaaataaaatgttcctggcatacaattattagctagtcttataattatacacaggagaactgggttgccataaagatgacaaaggtgtgtggttg

SEQ ID NO: 447163 - DNA, 536 bp, Homo sapiens
tgccagattagtttaggcagagggccacagacctaagagagggaactgggggcacattaaacttttatggagtgagaggattatgaaaagtctagtgcatagggcaccagatttccacactggtccataacacatgagaagtgggtaggtgagggaatraatgaaagttagcatgaaggcactaggtacgtaacaaaggaaagaagaaagggaacagaaagatgtcagcagaaactgagcagcaacatggcatctgaagaaaagtcatcaaaatgcagttggctttgacggtggaaacttgaatttgttttcattaaatttccctgtattcaaaatttttataatgagcaagcttttgtaatgaaaaagataccaaaacttttttcttcttcttctttttttttaaataacatgtttgcctattttctctacaggtttatggtacagaatcagattcttttttttttttaagcttttgggaaccttgaaaatattctagtgtgaagcccttctccctttcctactataatcaaaca

SEQ ID NO: 447164 - DNA, 535 bp, Homo sapiens
catatgccaggtgtccaccattgtatcaaggatgaatagaaagtattggaaaggctgttaactcatttcagtgcattcacaaaacaacttttcatgctattctatgagataaagatattcctggtattttaagcctaataatcaggaatagggaagaagccaaggttttgaacagttaggtatagtattttcaaaaygctagtgagcactatactttgcattttcttcaatatttgcagtaatagttttttgttctagcctcaagctcaactggaagatagttgatgcttactatttttctttaatccaggaattatctaaaacaagagagtggaaaatttaccaatgctatttttagagaaggagaaataattaaagcattgttacttactagatgtgtgacgttaatgataattaccactgttaattgtttatcttatttttctaggcactttgcttatattagctcagtccacatgacaatcctatgaggcagacgttattttttctattgtacagttatagaaaatgtaat

SEQ ID NO: 447165 - DNA, 535 bp, Homo sapiens
catatgccaggtgtccaccattgtatcaaggatgaatagaaagtattggaaaggctgttaactcatttcagtgcattcacaaaacaacttttcatgctattctatgagataaagatattcctggtattttaagcctaataatcaggaatagggaagaagccaaggttttgaacagttaggtatagtattttcaaaatgctagtgagcactayactttgcattttcttcaatatttgcagtaatagttttttgttctagcctcaagctcaactggaagatagttgatgcttactatttttctttaatccaggaattatctaaaacaagagagtggaaaatttaccaatgctatttttagagaaggagaaataattaaagcattgttacttactagatgtgtgacgttaatgataattaccactgttaattgtttatcttatttttctaggcactttgcttatattagctcagtccacatgacaatcctatgaggcagacgttattttttctattgtacagttatagaaaatgtaat

SEQ ID NO: 447166 - DNA, 581 bp, Homo sapiens
acctggttcccttgccctactgcatttggttcgatttggcaaatgggaggcaccggtaggagtgggagagcaggaagagggtgacagagacatatattcctatccctcacccattagcttctacagggtcatggaggttagccagatctccctactgaatgcccaggctttgctgtcagtccagctatccctctccaggtgttaactgttctctctccttgcctcttgagatctagggttagtgccctctccaggtgttattagcctagaggcactgcaccgtctcttattgcttttctaaacaatgtctgcatatttataaataagccctttattaatctcttctcaaatttccaatttgaatatgccatctgtttctaccagggccctaactgatacaaaagtgcyttaatcctttcttctcatggagcagcagcatctatatcagctgagagcttgttagaaatgtagactcctgggcccctcctagacctactgagacagaatctgcatcttaataggttccccaaaggactgggatggacattaaagtttgaaaagcactggtttaacacatcagt

SEQ ID NO: 447167 - DNA, 563 bp, Homo sapiens
accatgcttcaccctccatttaccagtgtctgtgccccttctacagagtgaacagccttagctctccttcctcagctgggagctccggcctcttctgcttttctctctccttccttttccacatactttgagctacacatggattaggaaggcacaggctggatactgggtgccacactggttataccctcctaagggtcatcacaatctttgcttttcttctaggacttgacctcttcctgratcagagacaatggggcgttcacccttcttctctcttagggcaatagcagagaacttctgaagaaactcactccaatgcacccaccctacagcaagccagtctactcccttccacttggagtcaccttcacctccccattttccatcttcatatttgttgcgcttggatttttttttaaaagacaatttggggtgccagctctcttacttgggaattcatgctccatcatcagtgttccttctctgggtgtgtatgtgagtgcaactgggagctgacagtctgtgacccccaactcagagcgctctgtacttttgagtga

SEQ ID NO: 447168 - DNA, 563 bp, Homo sapiens
accatgcttcaccctccatttaccagtgtctgtgccccttctacagagtgaacagccttagctctccttcctcagctgggagctccggcctcttctgcttttctctctccttccttttccacatactttgagctacacatggattaggaaggcacaggctggatactgggtgccacactggttataccctcctaagggtcatcacaatctttgcttttcttctaggacttgacctcttcctggatcagagacaatggggcgttcaccsttcttctctcttagggcaatagcagagaacttctgaagaaactcactccaatgcacccaccctacagcaagccagtctactcccttccacttggagtcaccttcacctccccattttccatcttcatatttgttgcgcttggatttttttttaaaagacaatttggggtgccagctctcttacttgggaattcatgctccatcatcagtgttccttctctgggtgtgtatgtgagtgcaactgggagctgacagtctgtgacccccaactcagagcgctctgtacttttgagtga

SEQ ID NO: 447169 - DNA, 563 bp, Homo sapiens
accatgcttcaccctccatttaccagtgtctgtgccccttctacagagtgaacagccttagctctccttcctcagctgggagctccggcctcttctgcttttctctctccttccttttccacatactttgagctacacatggattaggaaggcacaggctggatactgggtgccacactggttataccctcctaagggtcatcacaatctttgcttttcttctaggacttgacctcttcctggatcagagacaatggggcgttcacccttcttctctcttagggcaatagcagagaacttctgaagaaactcactccaatgcacccaccctacagcaagccagtctactcccttccacttggagtcaccttcacctccccattttccatcttcatatttgttgcgcttggatttttttttaaaagacaatttggggtgccarctctcttacttgggaattcatgctccatcatcagtgttccttctctgggtgtgtatgtgagtgcaactgggagctgacagtctgtgacccccaactcagagcgctctgtacttttgagtga

SEQ ID NO: 447170 - DNA, 565 bp, Homo sapiens
acttggaggttatgttgtaatgtgtgaatattggagggacacaaacattcagacctgtgtaacctcttattaaatttttattttaatctattcttccttgtgcaacttataattcatccttcatttatgagatggttttgtctttttattcagtttctttcctgagttcaggccattcttattgcatttcttcctgtttctttccatatccattttttagttcttaaatttttgattctatgtattaaaagatacttctctaaatggttgcttaagaatattratttattttggagtttagttatggttttcttctgctgtatggtttattgggagagaagtttcaactgaaactcacatttttgtttgcttactttcttcttataggatctttgcatagcactgggttgcttttttagatttgattcatagatattttgtggacaggatttctagttttaagggtaccctctttcttggtatcatgaagcacagtttctctaatagatgatgctaatggtgatggaaacagggagaggggtgagtatattttatttctctaatt

SEQ ID NO: 447171 - DNA, 590 bp, Homo sapiens
gtgcttggtaaaaaataagaaagactttcaaaagtatacatttggtttaagtaygcctgaaatatgaaataactagaataacaccatccttcttgaccttgatcataaggcctttcataggtatctctcaatacctcaagtgaaagaaagtagttagaaccttgaaacactttttaaaacctgcagacagcttaattgaaggggtcttgtgaagagttcattgtcaggggtttctagcaagtgttatttcttcctgaattccacgaaccaagttctctgaagtttacattcacacaggatgaacaagcccactgtggtgggctttaaaagggataaaagacctgctgtggttttctttgggggacaggtttaacacccgcacctacacacccagacccagcacctggcaggatggcagagaagcaggtggcctcccagagttacagcttaaactaacatcacatacatttaaagcaagtgctggtaactagaaaagtaatttctgacagtaagcaaatggctcttaaataataaaataaaatgtgtcaggtggtagaaagcagtgacaaaagacaaacatttggctaaat

SEQ ID NO: 447172 - DNA, 613 bp, Homo sapiens
agtggctctttcttacctaatccacagtggaacaggaatcaatagaaaccacatcaagattgtgcttggtaaaaaataagaaagactttcaaaagtatacatttggtttaagtacgcctgaaatatgaaataactagaataacaccatccttcttgaccttgatcataaggcctttcataggtatctctcaatacctcaagtgaaagaaagtagttagaaccttgaaacactttttaaaacctgcagacagcttaattgaaggggtcttgtgaagagttcattgtcaggggtttctagcaagtgttatttcttcctgaattccacgaaccaagttctctgaagtttacattcacacaggatgaacaagcccactgtggtgggctttaaaagggataaaagacctgmtgtggttttctttgggggacaggtttaacacccgcacctacacacccagacccagcacctggcaggatggcagagaagcaggtggcctcccagagttacagcttaaactaacatcacatacatttaaagcaagtgctggtaactagaaaagtaatttctgacagtaagcaaatggctcttaaataataaaataaaatgtgtcaggtg

SEQ ID NO: 447173 - DNA, 629 bp, Homo sapiens
caatttcaaatttttcaaggtaaaaatctctaagaaaaagaagagaagggaacaattccccctttctttcagcaggaagaattaaggcttttattcttaatttgtattttctttttacaaactatatcatttgtagaaatcttgacatcttawtgactctactagagttttcctttatatgttagagacaactcagatttaatgtagaaagagtcatgtagagattaaaggctatcatgttaatcaatgcccagcaaaatataaagcacacacttttaaatttgagccttctattacatatcaggataatgtaataaaagttaaagttattttatagaaaactttaacaaaacttttaaggatttactatgcaacaggtgctgtcctagggaacaaagatagaattggcaacaacaacaaaaaattctctctcttcatgaagctcacattaatgttacatagaaagacaatatatttataaacaattacatatatcacaatcttatgcagcaataaatgatatatgcaaaatagcagagaaatcagatccagtataagggaatactaacttaggtaacagagccagtgaaatctttattgaaaagatggcatttaaaatagagatgcaa

SEQ ID NO: 447174 - DNA, 629 bp, Homo sapiens
caatttcaaatttttcaaggtaaaaatctctaagaaaaagaagagaagggaacaattccccctttctttcagcaggaagaattaaggcttttattcttaatttgtattttctttttacaaactatatcatttgtagaaatcttgacatcttattgactctactagagttttcctttatatrttagagacaactcagatttaatgtagaaagagtcatgtagagattaaaggctatcatgttaatcaatgcccagcaaaatataaagcacacacttttaaatttgagccttctattacatatcaggataatgtaataaaagttaaagttattttatagaaaactttaacaaaacttttaaggatttactatgcaacaggtgctgtcctagggaacaaagatagaattggcaacaacaacaaaaaattctctctcttcatgaagctcacattaatgttacatagaaagacaatatatttataaacaattacatatatcacaatcttatgcagcaataaatgatatatgcaaaatagcagagaaatcagatccagtataagggaatactaacttaggtaacagagccagtgaaatctttattgaaaagatggcatttaaaatagagatgcaa

SEQ ID NO: 447175 - DNA, 667 bp, Homo sapiens
ttggcaacaacaacaaaaaattstctctcttcatgaagctcacattaatgttacatagaaagacaatatatttataaacaattacatatatcacaatcttatgcagcaataaatgatatatgcaaaatagcagagaaatcagatccagtataagggaatactaacttaggtaacagagccagtgaaatctttattgaaaagatggcatttaaaatagagatgcaaattatgtgagtaagcaagtcatacgaatatgtcatctgaggattaaagaggaagtgcaagggacatgagacaggatgtatttgacatgtcattgccacacagtcagtaaagagaagagattaaattggagaatgaatgacagatgataatatatacgttttatatggtttcatagttttaaaatttttttctaattatagtgagaaatcagaggattttgaacctagcatttacattactaatgacttgaaaggatgacactacttatcttaagaaaatcagactaaaaatggattaaattgcaagcagagaaactaaactctgccacaacaacctggcaagaaattgaggaaggtgagaatagtaattgtgttgagaattgatagtgttaagaaattattttgtgattcgggctaaatacatttgagtcaattttgatctg

SEQ ID NO: 447176 - DNA, 554 bp, Homo sapiens
aagggaatactaacttaggtaacagagccagtgaaatctttattgaaaagatggcatttaaaatagagwtgcaaattatgtgagtaagcaagtcatacgaatatgtcatctgaggattaaagaggaagtgcaagggacatgagacaggatgtatttgacatgtcattgccacacagtcagtaaagagaagagattaaattggagaatgaatgacagatgataatatatacgttttatatggtttcatagttttaaaatttttttctaattatagtgagaaatcagaggattttgaacctagcatttacattactaatgacttgaaaggatgacactacttatcttaagaaaatcagactaaaaatggattaaattgcaagcagagaaactaaactctgccacaacaacctggcaagaaattgaggaaggtgagaatagtaattgtgttgagaattgatagtgttaagaaattattttgtgattcgggctaaatacatttgagtcaattttgatctgaaaaaaatggacacaatttaaaaccacttattgagttt

SEQ ID NO: 447177 - DNA, 554 bp, Homo sapiens
aagggaatactaacttaggtaacagagccagtgaaatctttattgaaaagatggcatttaaaatagagatgcaaattatgtgagtaagcaagtcataygaatatgtcatctgaggattaaagaggaagtgcaagggacatgagacaggatgtatttgacatgtcattgccacacagtcagtaaagagaagagattaaattggagaatgaatgacagatgataatatatacgttttatatggtttcatagttttaaaatttttttctaattatagtgagaaatcagaggattttgaacctagcatttacattactaatgacttgaaaggatgacactacttatcttaagaaaatcagactaaaaatggattaaattgcaagcagagaaactaaactctgccacaacaacctggcaagaaattgaggaaggtgagaatagtaattgtgttgagaattgatagtgttaagaaattattttgtgattcgggctaaatacatttgagtcaattttgatctgaaaaaaatggacacaatttaaaaccacttattgagttt

SEQ ID NO: 447178 - DNA, 554 bp, Homo sapiens
aagggaatactaacttaggtaacagagccagtgaaatctttattgaaaagatggcatttaaaatagagatgcaaattatgtgagtaagcaagtcatacgaatatgtcatctgaggattaaagaggaagtgcaagggacatgagacaggatgtatttgacatgtcattgccacacagtcagtaaagagaagagattaaattggagaatgaatgacagatgataatatatacgttttatatggtttcatagttttaaawtttttttctaattatagtgagaaatcagaggattttgaacctagcatttacattactaatgacttgaaaggatgacactacttatcttaagaaaatcagactaaaaatggattaaattgcaagcagagaaactaaactctgccacaacaacctggcaagaaattgaggaaggtgagaatagtaattgtgttgagaattgatagtgttaagaaattattttgtgattcgggctaaatacatttgagtcaattttgatctgaaaaaaatggacacaatttaaaaccacttattgagttt

SEQ ID NO: 447179 - DNA, 554 bp, Homo sapiens
aagggaatactaacttaggtaacagagccagtgaaatctttattgaaaagatggcatttaaaatagagatgcaaattatgtgagtaagcaagtcatacgaatatgtcatctgaggattaaagaggaagtgcaagggacatgagacaggatgtatttgacatgtcattgccacacagtcagtaaagagaagagattaaattggagaatgaatgacagatgataatatatacgttttatatggtttcatagttttaaaatttttttctaattatagtgagaaatcagaggattttgaacctagcatttacattactaatgacttgaaaggatgacactacttatcttaagaaaatcagactaaaaatggattaaattgcaagcagagaaactaawctctgccacaacaacctggcaagaaattgaggaaggtgagaatagtaattgtgttgagaattgatagtgttaagaaattattttgtgattcgggctaaatacatttgagtcaattttgatctgaaaaaaatggacacaatttaaaaccacttattgagttt

SEQ ID NO: 447180 - DNA, 575 bp, Homo sapiens
acactacttatcttaagaaaatcagactaaaaatggattaaattgcaagcagagaaactaaactctgccacaacaacctggcaagaaattgaggaaggtgagaatagtaattgtgttgagaattgatagtgttaagaaattattttgtgattcgggctaaatacatttgagtcaattttgatctgaaaaaaatggacacaatttaaaaccacttattgagtttaggatgcagcatgaatcgcaggtttggagcaarcatctacagttggacgttcccatgctaattttgaattgagcatgagatatataaggttagaattattataattttctcatggataattttatatgacttagaaatataatttttctaatctgaagaattatgaaattttgtcacctttctttatcttcaaaatggccaaaaagacttctaaatggtaagtaacttttcagggtcatatatatacttagggacagaccatatctcctaagactatatcacttaccactacatataatgcctacctactttttttgagaaacatcaagtgtgaggagtggagataaactga

SEQ ID NO: 447181 - DNA, 595 bp, Homo sapiens
tgaaggaaaatgagatatttaacttctgagcaatgcaatttaaagctttgccatgggaagttagatcccttgcttgggttctagaataaagacgatatggaaaggatatgtactgatccttcaaaaataagtaacataagagcaaaataaaaatttgtataaatcatgtagatgttgggatcatttttactacagcataaacyaggtgtctttgattgataagtcttcatgcatattactcccaggatgctggggcatagcttatgctttccaggaaaaagattataacacattagtctgaggattttgataagtcatggacaaaagacctaaagaatctgccagtcaggaatattcaagcaaatcactaaaatcagttgatgaatcttagtagatgactctgaaacttctaaaagcaaattacagtatttcccacagaaaaacaacaaattaaaatctcaagtaacttacacatagactttcaacaaatataagattacacaaacacatgcacacacacctgcaaacaactctaataagtgtgttccgcaggaataataaaagaacttctcagtagctctctaaaaccctaccc

SEQ ID NO: 447182 - DNA, 595 bp, Homo sapiens
tgaaggaaaatgagatatttaacttctgagcaatgcaatttaaagctttgccatgggaagttagatcccttgcttgggttctagaataaagacgatatggaaaggatatgtactgatccttcaaaaataagtaacataagagcaaaataaaaatttgtataaatcatgtagatgttgggatcatttttactacagcataaaccaggtgtctttgattgataagtcttcatgcatattactcccaggatgctggggcatagcttatgctttccaggaaaaagattataacacattagtctgaggattttgataagtcayggacaaaagacctaaagaatctgccagtcaggaatattcaagcaaatcactaaaatcagttgatgaatcttagtagatgactctgaaacttctaaaagcaaattacagtatttcccacagaaaaacaacaaattaaaatctcaagtaacttacacatagactttcaacaaatataagattacacaaacacatgcacacacacctgcaaacaactctaataagtgtgttccgcaggaataataaaagaacttctcagtagctctctaaaaccctaccc

SEQ ID NO: 447183 - DNA, 595 bp, Homo sapiens
tgaaggaaaatgagatatttaacttctgagcaatgcaatttaaagctttgccatgggaagttagatcccttgcttgggttctagaataaagacgatatggaaaggatatgtactgatccttcaaaaataagtaacataagagcaaaataaaaatttgtataaatcatgtagatgttgggatcatttttactacagcataaaccaggtgtctttgattgataagtcttcatgcatattactcccaggatgctggggcatagcttatgctttccaggaaaaagattataacacattagtctgaggattttgataagtcatggacaaaagacctaaagaatctgccagtcaggaatattcaagcaaatcactamaatcagttgatgaatcttagtagatgactctgaaacttctaaaagcaaattacagtatttcccacagaaaaacaacaaattaaaatctcaagtaacttacacatagactttcaacaaatataagattacacaaacacatgcacacacacctgcaaacaactctaataagtgtgttccgcaggaataataaaagaacttctcagtagctctctaaaaccctaccc

SEQ ID NO: 447184 - DNA, 537 bp, Homo sapiens
tataagattacacaaacacatgcacacacacctgcaaacaactctaataagtgtgttccgcaggaataataaaagaacttctcagtagctctctaaaaccctacccttaaataggaacaagcaagcaagaataaccagaagttacaggcaggtgtttaacatgacatacagaatctacaataaacaggtggaaagaaatttaataagaatttagaagttattctttgaaaaaatttagagaccctaattaatatattcaaaggtaaaataaaattactggctatgtgattcagtaaaaataatattataaaaagaagtgtgcaaagactaagatagamtcttaaaaattatgataaattcaaaagcaatgaaattactaaaatagagtagaagaaataaacataaataataattagaagagaaagtttaaataaattacagaatcaattgagagatccaacatctgaataataggagtttcagaaagagaaaacagagtaaaaggaaggaataaattatcaaggaaataatggaaga

SEQ ID NO: 447185 - DNA, 654 bp, Homo sapiens
attttactcaggactattgcaatagaaaaaagatactccagtatagaactggtctctattctgaatacagcaggaacaagtggggatttatagccaaggagaaggagggtcgatggatggaaaactgctaaaagaagacatgaattctgggggaaattctggctggactaacctaaaggtgtcctgctgaaagcaatccaggtgatcagataccgatggtggggcatgagaagtgttaatcagaggatgattatgtatgaagggtgaaagattttttattttatctaaaactggagtttacaaggaagtacacaggtgagactaagagaaggtttagaagcctgactaaattttggtagagcaaagaatctttgccaagacctargtatctcatcaaccaaaaaatggaaatagttccagagaaaagcgtcctcaattaagtcattatgtattcccataaatagctttccaacaaacaggaatcagaaataaacacagacacacaacatgcaaaatgtacaaaaaaaaagcaagtattcagagaagagaattagaaagaatagaaacaatgaaactacactagcaaagatcacagatatttgaattactggaaacagaacataaataagtatatatatataataagttcagaga

SEQ ID NO: 447186 - DNA, 513 bp, Homo sapiens
ttagaagcctgactaaattttggtagagcaaagaatctttgccaagacctaagtatctcatcaaccaaaaaatggaaatagttccagagaaaagcgtcctcaattaagtcattatgtattcycataaatagctttccaacaaacaggaatcagaaataaacacagacacacaacatgcaaaatgtacaaaaaaaaagcaagtattcagagaagagaattagaaagaatagaaacaatgaaactacactagcaaagatcacagatatttgaattactggaaacagaacataaataagtatatatatataataagttcagagaaataaagtgtaaatcaaacaaatgagaaaggattaagagactagtagaaatcggcagcagatatgaaaagaaattaaaattttagagtctcaaccaaacctttgagcagaaagtccccatccttgattaaatcgttgccttcaggctctggcaaagtgaaacaaatctgaacactagttaaaagccataggc

SEQ ID NO: 447187 - DNA, 654 bp, Homo sapiens
attttactcaggactattgcaatagaaaaaagatactccagtatagaactggtctctattctgaatacagcaggaacaagtggggatttatagccaaggagaaggagggtcgatggatggaaaactgctaaaagaagacatgaattctgggggaaattctggctggactaacctaaaggtgtcctgctgaaagcaatccaggtgatcagataccgatggtggggcatgagaagtgttaatcagaggatgattatgtatgaagggtgaaagattttttattttatctaaaactggagtttacaaggaagtacacaggtgagactaagagaaggtttagaagcctgactaaattttggtagagcaaagaatctttgccaagacctaagtatctcatcaaccaaaaaatggaaatagttccagagaaaagcgtcctcaattaagtcattatgtattcccataaatagctttccaacaaacaggaatcagaaataaacacagacacacaacatgcaaaatgtacaaaaaaaaagcaagtattcagagaagagaattagaaagaatagaaacaatgaaactacactagcaaagatcacagatatttraattactggaaacagaacataaataagtatatatatataataagttcagaga

SEQ ID NO: 447188 - DNA, 609 bp, Homo sapiens
agcaggacggctctagagatctgggctgcttctcattcctaagctgcttttaagctaattttctggytttttggctaccatgcatgtgtgatgagaccattttccttgttagttctaatagggtacaataggacggttttccttgttagttctaatagagtacaatgggactgttttccttggtaagttcctttgggttctcagggatacctgctccttggctgggcatcatggccttggcttactgcctggccttcagggtttgggaagctgaataagtaacctggcagggacccatcacactatagatgctaagtaagctcttcttctaaccaatctctctgtaatatatcaccctgtaatcaatttttgtgaatatactaatatactaaatttaatatttacttaaatgttttacttgtttatgctcctgtcatcttgtgaggttcttgagaacataccctttgtatgaattgttcattggtgtatcctcagcacctaggacatatgactagcatattttgtaccccataaatattagttgatttcataactacatggatgataatcaatatggactcattagtggagtagaaataatcaaataca

SEQ ID NO: 447189 - DNA, 647 bp, Homo sapiens
tatttcacatcaaattggagtgaatgacattaatttaaaatctaagttgcattactaatcttctcactcattgtacagtgttttgtttggtatattttgtctctttctgaaaaatggacattcatgttttattcacttgtatctaacattatcaggtaatgaggttttaaaactaattcatctaatcacagaggatttaataatataactctaatgtaaaaccacaaaggacagaaaacctcatacctaatatattaatgtgttcatttatttagaatatcagaggtaataggggattgtgactgagaacacagcctcccaaacaaagatactggatttgaatcctgataacagacaaataatagtaatagtgcctgcttactgtcattgtgagaagatttagtgactaggaagmagagggtgtggtatatagtaggtataagaattttcatttttgcatggttctgatgtgcagtaatttcattgaccatggtttaaatagcatcagttccccaaaacacaattacaactgcagttatgacattatattaactgtggtacttgctcaaagtagaatcttctctgctagctcctcaggacactaaaaaactacataaataatagatgtgcatgaagatcagtggcca

SEQ ID NO: 447190 - DNA, 647 bp, Homo sapiens
tatttcacatcaaattggagtgaatgacattaatttaaaatctaagttgcattactaatcttctcactcattgtacagtgttttgtttggtatattttgtctctttctgaaaaatggacattcatgttttattcacttgtatctaacattatcaggtaatgaggttttaaaactaattcatctaatcacagaggatttaataatataactctaatgtaaaaccacaaaggacagaaaacctcatacctaatatattaatgtgttcatttatttagaatatcagaggtaataggggattgtgactgagaacacagcctcccaaacaaagatactggatttgaatcctgataacagacaaataatagtaatagtgcctgcttactgtcattgtgagaagatttagtgactaggaagcagmgggtgtggtatatagtaggtataagaattttcatttttgcatggttctgatgtgcagtaatttcattgaccatggtttaaatagcatcagttccccaaaacacaattacaactgcagttatgacattatattaactgtggtacttgctcaaagtagaatcttctctgctagctcctcaggacactaaaaaactacataaataatagatgtgcatgaagatcagtggcca

SEQ ID NO: 447191 - DNA, 604 bp, Homo sapiens
taagttctttgttaattaaggtatctaatccttttctgctgaagtagttaaaagatattcctctttcaggtcttcatttctgagcttaagaacratagtttttcatttagacattttaattttttaatcactgcagttatttagccttttgggcatctgtattagattcacagattgattaaactttcattcgtcagtttttttaactctataaactaaagataacattactacttatctcacacagttattgtgtgaattagacgtgtatatatgtgccaagccttataatacaggctgtcccagttgaggaattatgtatatgacagttgattttgtcattagtaaaacttattaacttcttatccaagtaaaactataagaagttgatggatctttggatcatatttttgtaaaaaaaaaaaaaagctataagaagttgagttagaacaataaaaagacatatttgccatccctagaaagctcacagtcttgtgggaggcagagagaaaaggtgctttaacagagataaaggctaaaataaacattaagggactaagacagcaccccatcgacctaagccaatacatactggtgacaccag

SEQ ID NO: 447192 - DNA, 559 bp, Homo sapiens
ttttttatctcatggacattgtaaattttgtaacttataatctttttttatttatcactcagatctatttttagatctacagtaggcttgtgggttattacagtttatctgcagtaggcttgtgagttatttttctctttcttgattccactttgttcccacttttttttctgaaatagcgctcttatctttccattttatacacccttgtaagagatcttaaatcattctggtaacaatatatgaaatgcataatagataaaaatcamcctcatagcttgattctctctgcattggtaaatgtgttttctatttattaaaggttgaagagttctctgtatcctttcccagttttctgttaaatcacgctacatagaatccctttccaatgagctgatgctttggacatgaacaaactttacagaaaagcctctgaaccatagctactacctctgtgctagtaaaagcctcatttagtccttgccttgaactatgtcctagaaaatgatgacttttgacaaatgtgaaagaatagccactagaactgctcacctcgtgg

SEQ ID NO: 447193 - DNA, 559 bp, Homo sapiens
ttttttatctcatggacattgtaaattttgtaacttataatctttttttatttatcactcagatctatttttagatctacagtaggcttgtgggttattacagtttatctgcagtaggcttgtgagttatttttctctttcttgattccactttgttcccacttttttttctgaaatagcgctcttatctttccattttatacacccttgtaagagatcttaaatcattctggtaacaatatatgaaatgcataatagataaaaatcaacctcatagcttgattctctctgcattggtaaatgtgttttctatttattaaaggttgaagagttctctgtatcctttcccagttttctgttaaatcwcgctacatagaatccctttccaatgagctgatgctttggacatgaacaaactttacagaaaagcctctgaaccatagctactacctctgtgctagtaaaagcctcatttagtccttgccttgaactatgtcctagaaaatgatgacttttgacaaatgtgaaagaatagccactagaactgctcacctcgtgg

SEQ ID NO: 447194 - DNA, 552 bp, Homo sapiens
attgtataggttataatatacaaatatacaattataatatacaagtataggttataatatacaatatacccaggggaaagggtggcagctttataatataggggtgaagacctacgagaaaaggaggagacaattatggaaaaaaaatgaaagattaataaaaatccatgtgtataaataaagtattatataaaccttaatttatagaagtaattttattactttgtttgtagccagtgggctatgttgaccctggctctggtaaacatattatttacactcaatagtcrtatgaggaatgacacacttgaattctaagaagactggaggattgatgttagagcaagaaaggcctcagcaaccgtgcatcggtaacttcattatacacacgagggaattagaatgcaacagactgtacagaatgtgtgcagatccacaatgtgttaagaagcaacgcaaaataatttgacttaagattgctaaaaacatttaaaagaaaccagttccaatgtcattatgccagttctatctgtatatgacaagccaggtgac

SEQ ID NO: 447195 - DNA, 620 bp, Homo sapiens
atgcaacagactgtacagaatgtgtgcagatccacaatgtgttaagaagcaacgcaaaataatttgacttaagattgctaaaaacatttaaaagaaaccagttccaatgtcattatgccagttctatctgtatatgacaagccaggtgactcaggaatgttttcatcttggatcagtggataggtgatcacaataaaaatcaaaacaagaggaaacagcactgaaggatatgcacttagaagacctctaaatcttttctagttctcagacaatgttgtagctgttggatctgctcatagatctcagggttctccttgggttcatatcttataattttacttattttttttttttgctctggcatgtgtgattcagtttttcttttatatgagtttgctgtaaacaaaattttaaaaaataactrtcatttaacaggatgactcccttaatgttttcaattttaaaattatttttaaaaaacttgaattgctacaggaagggaatgcatgttagcaagaacagatgccagtttttgatgatttttacagaactttgataccttacaggcattgtctccttcccaacataatgcagtcacttacggtcataaattcaaccca

SEQ ID NO: 447196 - DNA, 620 bp, Homo sapiens
atgcaacagactgtacagaatgtgtgcagatccacaatgtgttaagaagcaacgcaaaataatttgacttaagattgctaaaaacatttaaaagaaaccagttccaatgtcattatgccagttctatctgtatatgacaagccaggtgactcaggaatgttttcatcttggatcagtggataggtgatcacaataaaaatcaaaacaagaggaaacagcactgaaggatatgcacttagaagacctctaaatcttttctagttctcagacaatgttgtagctgttggatctgctcatagatctcagggttctccttgggttcatatcttataattttacttattttttttttttgctctggcatgtgtgattcagtttttcttttatatgagtttgctgtaaacaaaattttaaaaaataactgtcatttaacaggatgactcccttaatgttttcaattttaaaattatttttaaaaaacttgaattgctayaggaagggaatgcatgttagcaagaacagatgccagtttttgatgatttttacagaactttgataccttacaggcattgtctccttcccaacataatgcagtcacttacggtcataaattcaaccca

SEQ ID NO: 447197 - DNA, 561 bp, Homo sapiens
tagtaccctaaaacttaaagtataataataataataataataaattagtgtatttcttgcatgcaagattgatttaaaatttttaaatcatcaattttatttttaacattaacaaaataaattatactattattaccaaaaaacaaaatggcttttatccaaaacacaggcaataacaaatrctggcaagaatgtggagaaaagggaactgttgtacactgttgctaggaatgtaaattagcacaaccactatggagaatagttcagaggttcctcaaaaatctgaaaatagagctatcatgtgatccagcaatcccattgatgggtatgtaccacccctgcaaaagcatgcactcccttatttgttatagcactgtttttttagccaatatttggaagcaacctaattatccatcaacatatgaatggataaagaaaatttggtacatatacacaatggcgtgctattcagccataaaaaagaaagagatcctgccgtttgcaacaacatggatggaactggagatcattatgttaagtgaaacaagccaggcacagaaa

SEQ ID NO: 447198 - DNA, 626 bp, Homo sapiens
ttgtttattttgttctgtgccattttcagaaagttttgccaataaaataaatcatttagcagtttcctcaataattttcaaagctaggatataccaaagaagaagctgctttctgataattgaaagctgactgcaacattttaatttttaaaasattttcacatttttataaatgtatcatcataacactgtcatataaatgaaaagaaatataatttttcccatgttggaaatgaatgatttaaagattgactttggagaagtgagtaaaagtgtttagttcaaaaggaaaaaaaaaatctcaccactaaatatcactatttcaatatccatagtacgtctattggtggtaatattttgttactttggctttggcaataaaaatattattatatgcataaaatattttatattttatattcatatatgtttccaagcctcatattctaaaaagcctaaaaacaatgacaaacccagtaacactgaccaccttggcaagcagacggtagccttctatatagcattttacattcaaataaatcaggggaccccgaataactgattaaatctagatatggtgcaaaaaatgtacagaattggtctgaaacaacctattatcctaaaaa

SEQ ID NO: 447199 - DNA, 561 bp, Homo sapiens
tagtaccctaaaacttaaagtataataataataataataataaattagtgtatttcttgcatgcaagattgatttaaaatttttaaatcatcaattttatttttaacattaacaaaataaattatactattattaccaaaaaacaaaatggcttttatccaaaacacaggcaataacaaatactggcaagaatgtggagaaaagggaactgttgtacactgttgctaggaatgtaaattagcacaaccactatggagaatagttcagaggttcctcaaaaatctgaaaatagagctatcatgtgatccagcaatcccattgatgggtatgtaccacccctgcaaaagcatgcactcccttatttgttatagcactgtttttttagccaatatttggaagcaacctaattatccatcaacatatgaatggataaagaaaatttggtacatatacacaatggcgtgctattcagccataaaaaagaawgagatcctgccgtttgcaacaacatggatggaactggagatcattatgttaagtgaaacaagccaggcacagaaa

SEQ ID NO: 447200 - DNA, 627 bp, Homo sapiens
tggccatcttgctcacagtaggcacactaattttgatctgggggtcagtgagttggtggctcttgtctgggcatcccagacaccamtttcatgacattttcttaagatgggtaaccttcagtggggaaggtgcataaaacaactgttatcaattatactttttggctatttcttttggtctttttgtttttttctcttttgccttgtccctactgttgtgaactttaactactacatttaaaagttgtctcataggtgtatgaagtctcatggttgcttttgggagcttccttctaatgtcagggacagattgaataatgtatacccaggtgagcttgcccttctgcagagtcagggtctgtgttagtgtatttccttaatgcctcaaccaaatgaccctgaaagaaaggggattttcatctttgccctgagttatttctctaacctcgtcataactgactggcttaatcacacagtttttctcttgctttttttttcacagcatatcaaacataatatttgtaagtcatgacaagttaaaccaaagaacatgatcaacttaacaaactcctcagaaaagctttctggattctctgaaaactccaaattttttcttttgtaaagcca

SEQ ID NO: 447201 - DNA, 526 bp, Homo sapiens
tgctatgaagactaaataatttatataaggcaaaaatagagtgccttgtgcataactggtaactgctacaaggtcttacctgttttggccctgtctttaccctaagccatacatccattacctctaggatttaacttcctaccattttctcccttactcttaccactcaggccctgcaggattccctcctgttgggtcaccacaaactcccctctctgaaggccctttcctccttctgtttgttgcctagatgtctgcaggactggcttcttcctgttagtcagatttctgtttagatatcaccttatcagagaggtcttttctgacttctatctaaaatatctttctctttcttaycttactttattttcttcctagtactgatctaacacatctttattgatttttattgtttacatccttccatagcgtgaaagtccataaagaacaagcgctttattttgttcatgattgtatcctagcacatggaatatcatttgtcatataacagggattatgcttttta

SEQ ID NO: 447202 - DNA, 523 bp, Homo sapiens
gagtgaggtttacttttctattgacgtcctataacttaaatattaagacataaagttgacaatacttaagtagtgataaaaagtcagtaagtcttaagttcctttataaacaaataagagaaaaatcaaagatatttatttaatacgtrtgtatagatacacaaacatcttaacaaaacagtgaggaaatacttattacaattaaagtcctcatttttttaactggccatgtgattgtagcttgtatttgtaaccactttctactatccattctatttcccccttttcttcagcaagcatctcatctggtcatggttctttacctggtgaagtgtcccaaatcttcattcctgaagggtctgagccattagttctgcctggattggagtattgttgtttcccattgaactgagttacagggcatggttatattaagaaacactgtcagggatcttctgtgttccagagttactcttccttatctccattgtagagcaatggttcgatttccccttggtttcct

SEQ ID NO: 447203 - DNA, 526 bp, Homo sapiens
ggtgcagtattttcagtttactattttcttaggtagagtctgctctaatgccttccatttggcttttctcatcataatatccctcatctccacacgttagggaaccagtgagggaattctggcagctgataaatacgtttattccaattatacattctggaactgtggaaatgaccacaggataggtttggagacccactgttccaactgtaagccatactggaactaaaactccactgatcaccttacctccaaaagcccttaccctgattggaggccacagtgatgttttctgtgttctggaatcagwatgaattcagagccagtgtcaagaagtcctcagaatgtctgattgtttcccttttttcaatgcacagttaccttggtaaaatgctggaggtccctttgggtgaggatttggacaaaaattaacagtataaattttcagtattgtacccaggtccttctttaaggacttccctttcatttagaggtctgcaagctggctcaagtctggaaattgatt

SEQ ID NO: 447204 - DNA, 625 bp, Homo sapiens
aaagtgttaaaatcacacttttgctagttttcatttttccctacttttctttctcttgtggagtacaaagaataaatgctgtcatgggattaacatttgaaagaaagtgataatagaaatgaggaatatgtaatatttcatattataggtatttcagaggcaagataatcaatggaattaactgacaaaatgaaattcacctgtgctctaaatgattgaaaccaatgtattaagacagtgaagaagtaaactacccgaatccaggcatcatgatattaatgctactaaaagaaaattacctgattcaaaagatttccytacacagtgattactatacaatgattctcagaaactacatagagacaaataatacaaatctataaatattattctatagtatacctaaacagttaagagtaaagagacctgaatactaaatatataactacatattttaaagcatatatcagaaagtcaatttaagtagaatgccaggttcacctgcaaaagggtgtaagtagcaacaacattacctgaggcgctgcagagcttattgaatgtgttcacaaaatgactacaatctctctgggaagttgccgacagtacgaaggtgccacagaactca

SEQ ID NO: 447205 - DNA, 636 bp, Homo sapiens
ccaggttcaagttattctcctgcctccagctgtctcacaaatagctggggttacaggtgcccgccaccatgcctggttaatttttktatttttagtagagatggggtttctccatgttggccaggctggtttcgaactccggacatcaagtgatccgcccacctcggcctcccaaagtgctgggattacaggagtgagccactgccctcgccccagaattgtatttcctgtagttctggtagccaggttgccagcatgatcaggttctggtgaggactcccttctgggttgcagagagtcacctcctcacactgcgccctcaggtggcggagagagtacttgttagctctctccttaaacgggcactaattccgttcatgagggctttcatcctcctgacctaattatctctcaacggcttcacctccaaaaattttcctactgaaattagggtttcaatgtataaattgtggggggagccaggaacatttggtccatagcatgccgagtacctggaaaatatggaaacgcatgtaaaaagaaagttttctgcctggtgcaggtggaatgattgtatccacaaaagctacaagagtttacatttgagctgtatctagaagaatgggaggattttct

SEQ ID NO: 447206 - DNA, 636 bp, Homo sapiens
ccaggttcaagttattctcctgcctccagctgtctcacaaatagctggggttacaggtgcccgccaccatgcctggttaatttttgtatttttagtagagatggggtttctccatgttggccaggctggtttcgaactccggacatcaagtgatccgcccacctcggcctcccaaagtgctgggattacaggagtgagccactgccctcgccccagaattgtatttcctgtagttctggtagccaggttgccagcatgatcaggttctggtgaggactcccttctgggttgcagagagtcacctcctcacactgcgccctcaggtggcggagagagtacttgttagctctctccttaaacgggcactaattccgttcatgagggctttcatcctcctgacctaattatctctcaacggcttcacctccaaaaattttcctaytgaaattagggtttcaatgtataaattgtggggggagccaggaacatttggtccatagcatgccgagtacctggaaaatatggaaacgcatgtaaaaagaaagttttctgcctggtgcaggtggaatgattgtatccacaaaagctacaagagtttacatttgagctgtatctagaagaatgggaggattttct

SEQ ID NO: 447207 - DNA, 636 bp, Homo sapiens
ccaggttcaagttattctcctgcctccagctgtctcacaaatagctggggttacaggtgcccgccaccatgcctggttaatttttgtatttttagtagagatggggtttctccatgttggccaggctggtttcgaactccggacatcaagtgatccgcccacctcggcctcccaaagtgctgggattacaggagtgagccactgccctcgccccagaattgtatttcctgtagttctggtagccaggttgccagcatgatcaggttctggtgaggactcccttctgggttgcagagagtcacctcctcacactgcgccctcaggtggcggagagagtacttgttagctctctccttaaacgggcactaattccgttcatgagggctttcatcctcctgacctaattatctctcaacggcttcacctccaaaaattttcctactgaaattagggtttcaatgtataaattgtggggggagccaggaacatttggtccatagcatgccgagtacctggaaaatatggaaacgcatgtaaaaagaaagttttctgcctggtgcaggtggaatgmttgtatccacaaaagctacaagagtttacatttgagctgtatctagaagaatgggaggattttct

SEQ ID NO: 447208 - DNA, 589 bp, Homo sapiens
taaaaaaaaattgaaacttgaggtcagcaagtaggtatcaggataaaaaagatgaagtgggatgcacaatcataactgtgataataattttaataatgttaaaaatactgaattagaattatgaaaaccaccatgcttaaggttatcataagccaaagaaatgaaatttaactacttatacatagtagctaaatagtgttcttgttgtgcagaaaagcccaaactataaaggattaattctgtcttgaacaagataatcctctgttctttccacaagcctactgtataacatctctagggatctactgtccatcagattccttccccatatgttccctagagtgtaggagtatgtttgatgtggttacccrggtgattttattattcatgtggcctatttattcatgtggtctattgccacatgaatcatcacacctgctttaaatgcactgctacaatttaaatgaccatggtaggaatgacaccttcagctattgtttttctgtcacaacagtctgctttaacttccctatattgtatctttcagtcttctggtcatccacccaaatctacccaaattttactatat

SEQ ID NO: 447209 - DNA, 589 bp, Homo sapiens
taaaaaaaaattgaaacttgaggtcagcaagtaggtatcaggataaaaaagatgaagtgggatgcacaatcataactgtgataataattttaataatgttaaaaatactgaattagaattatgaaaaccaccatgcttaaggttatcataagccaaagaaatgaaatttaactacttatacatagtagctaaatagtgttcttgttgtgcagaaaagcccaaactataaaggattaattctgtcttgaacaagataatcctctgttctttccacaagcctactgtataacatctctagggatctactgtccatcagattccttccccatatgttccctagagtgtaggagtatgtttgatgtggttacccgggtgattttattattcatgtggcctatttattcatgtggtctattgccacatgaatcatcacacctgctttaaatgcactgctacaatttaaatgaccatggtaggaatgacaccttcagctattgtttttctgtcrcaacagtctgctttaacttccctatattgtatctttcagtcttctggtcatccacccaaatctacccaaattttactatat

SEQ ID NO: 447210 - DNA, 589 bp, Homo sapiens
taaaaaaaaattgaaacttgaggtcagcaagtaggtatcaggataaaaaagatgaagtgggatgcacaatcataactgtgataataattttaataatgttaaaaatactgaattagaattatgaaaaccaccatgcttaaggttatcataagccaaagaaatgaaatttaactacttatacatagtagctaaatagtgttcttgttgtgcagaaaagcccaaactataaaggattaattctgtcttgaacaagataatcctctgttctttccacaagcctactgtataacatctctagggatctactgtccatcagattccttccccatatgttccctagagtgtaggagtatgtttgatgtggttacccgggtgattttattattcatgtggcctatttattcatgtggtctattgccacatgaatcatcacacctgctttaaatgcactgctacaatttaaatgaccatggtaggaatgacaccttcagctattgtttttctgtcacaacagtctgcyttaacttccctatattgtatctttcagtcttctggtcatccacccaaatctacccaaattttactatat

SEQ ID NO: 447211 - DNA, 654 bp, Homo sapiens
ttggaaacactcatctctatcaagtaatcttctgttaattccttttgtgtagtgtctgttaactcttgaatttctccaagtatcctatcttgaaatcctccattcttcaccttttttgctatatccacaatctcttttattatgtcctagattggctctgtcagaaatcctgtgatgtcgtgcacagttttctggatgcagttttctccagcagcaatttgttgtttcaagcttgatggctttcattgcttttctgtaacaatgattccaaatttaacagtgtaatccttccagatgttctatcagggttctcttccatagagttgaaaattatttccataaagcaycatgcgtaatgagccttaaaggtccttatgacccctgatagggcactttcatctgcgttaaaaacctgttcaggcagatacctcttcttttcaatgatttcttttatggtatctgggaactcatctgctgccttttggttgatagaaactgcttctcctattaccttgacatttttaggccaaacccttttttctaaaattatcaaaccatcctttgctggcaataaattatccagctttgatacttcatcttccttttgatttaagttccatataatggtttagttttcttcttgaatgatattac

SEQ ID NO: 447212 - DNA, 609 bp, Homo sapiens
taccaccacctggagttaatgagaaaattccgctgccgtctgtggtggtggtgcagggaggttwgtggaaaggtgggactttcaccctcttcagtgaatgaaggggacacggggcctctgtattgtttttctgcaacttcttatgcatgtgtaattacttagaaatgaaaagcttaaatactaaaagaaacacaaagaagaagaaaacacatttaatggttgctcaaatttgatttcaaataatctatttcccttacaaacacatagaccagtagaatgtaatagagaccacagaaatgaatccaaacttatatggtcaagtaacttttgaaaagagcaataagaggttacagtaggtaaaaaatagtctcttcaatacatggttctgggaaaactggatttccacctggaaacaagtaaaattggacccatttattatacaaacacaaaaaaagctaaaatggacaaaagatctaaatgtaaaacccgaaatcataaaacgtttatatgagaacacagagaaaaattccttgtcagcagccttggcaatgattttctttttattttgatagcataccaaaagctcaggctacataaacgtattagtcc

SEQ ID NO: 447213 - DNA, 566 bp, Homo sapiens
ccaccctcacatctctctcctgagagctgttccattgcttaataaaattcttttctgcacctctcaaccttcagttgtcagcataagctcattcttcttggatgtgggacaagaactcgggatgctgccaaatgcaggtacaaaaaaggcagtaacactttatttagccatctgacccctgttggcacctggtggccacccatgcaataggaagcagcgatggggttgggccagctctggagctgtggggcacagtgyggcaacaggactgaaaaggactgaaagagctgttaacaagtccccattctgcaggctgtggttgcactaaaagagctgttagcatgctgtaacacctcctctagggctttgaggacacaagcttccctgtttgggtgccatcatcttaccctcatttggatgttggagtctcctgaaggagtcacttgcgacacacctggttcagccacaagccctgcacggagcatgaacctgtgccagcacttggagtggctagccggacctggcactcactcacccagacacaccctcaactggcagctgagtgc

SEQ ID NO: 447214 - DNA, 566 bp, Homo sapiens
ccaccctcacatctctctcctgagagctgttccattgcttaataaaattcttttctgcacctctcaaccttcagttgtcagcataagctcattcttcttggatgtgggacaagaactcgggatgctgccaaatgcaggtacaaaaaaggcagtaacactttatttagccatctgacccctgttggcacctggtggccacccatgcaataggaagcagcgatggggttgggccagctctggagctgtggggcacagtgcggcaacaggactgaaaaggactgaaagagctgttaacaagtccccattctgcaggctgtggttgcactaaaagagctgttagcatgctgtaacacctcctctagggctttgaggwcacaagcttccctgtttgggtgccatcatcttaccctcatttggatgttggagtctcctgaaggagtcacttgcgacacacctggttcagccacaagccctgcacggagcatgaacctgtgccagcacttggagtggctagccggacctggcactcactcacccagacacaccctcaactggcagctgagtgc

SEQ ID NO: 447215 - DNA, 636 bp, Homo sapiens
atcccccattattacactagttatagctttctttcaatgtgaggggttatggataccaaagatgttctcatttattgatagtacctcctctgtaccttttaaacttcaagattttagactcttagcacagtgaaggtatatgtcagttagatttatagatgttatgatattaattgggaacaacaatggtatcgattttataaggactgagccatatctttttactgactgtgaactctcagttccagtggaagtttccttgagggacaaccaagcccagttcatcacagaatacatcagtccttttagggttaattatgacaattcttcaggcacacattaaaaagcacatgagttgacactttgatttctcatctgcagctttcaaagctagaattcttgaaattgtttttcttccctgttaactttctcctccacatccaattttctgtcaggttctctcacttgtatttcctgaatattgttagaatacttcccctctgcaagttcattactgtcactrcccatgatccggctccttctcctctcatttatagtattatcctcttaacttttatttctccagctttgaccctcccctgccattccttcccatgctgctgtcactgattttta

SEQ ID NO: 447216 - DNA, 567 bp, Homo sapiens
catatgagaaatataacctttcattcttctctgtgaattcctttacatatagtaatatattcttcagaattaaagagcagagaaaaaattacaccgtaaagtttttacagatttatgaatgcataattgatatatcttaaaaactacacctatttaatatataaaatttgatgagtttggatataagtgtacacccatgataccataacctcagttaaggtagtaaacatatccatcactcccaaaggttttcccatgtccttttttttttgtttttgtaagaacacttaacatgagctccatcctcttaacaaatttttaagtgcacaaactgtactttgaattataggtattatgctgtataccacattatctagaacttacttattttgtataactataactttatacccactgaacaacaataaccattgtgtcctcctcctacctcctggcagtcaccrttctattttgcctttctataccttggccattttagatatctcatataagggaagtcattcagcatttgtctttctgtcactgacatttcacttaatatgatgt

SEQ ID NO: 447217 - DNA, 656 bp, Homo sapiens
gcttgacgtttcacaaattccatatttttggtcataaaattggtaaaaacaaagaatgaagaatagatatacattcttcaaggactgcaaccctgcctttttggctgacaaatgtgtcctcagggtctaatgcagtaactaatgcataaataaatgtgcatttaatgggtgggtctgcttctgttggatttgttttcttattatacacatgcaattattcagacttataattgttatatattctaaaccactagacaatgaacactttgatagtataaatgtttccttaatcaacagaacatgtttacttctttcttcgcatttttgctcacaatgtataaatattttaaatgaatatccccatcacactcccttctgcctggttaacacttagtcccttgccgtagaacaaattcttagtcctctgcaaataatttcaaaattaatctttttcctacagttctcatgttagttttgcaattgtgtcctatcattacttcttttgtatttaaaattctatatttatattttccttgtgattatgtgatttcttggtatacaaataaattattgttattcaaataccatgacttctgaaaattagtgttgtttgaaagtttytttggttctatcctttattttatttttcaaaatgg

SEQ ID NO: 447218 - DNA, 563 bp, Homo sapiens
atgacaattagtttttagctggaaatgttggcaaactccagtaacacaaggatcattcaataattaggaaggggagacaacatattgaaaatacaacatgttcccatcacatacccatgtgtactcacacactgtgcttcatcttctgctattatgaatgaatgtttaggcttctatattatgctaagacttccccttttatactatatgccatatccacattcacatttggtctactaaagaatatagctcctctgattctgtcctcttttggataattcaggtctgcttctctgttaggttatrtaaatcagcttaaaaatatacaaccattatggtacaactcctgcatcaaaacatgtttattatataaatatcctctatcagctcacgtttcatttcttttttatattgagatgtataatgaggtgggcattagacatgtggctatttatatttaaattaattaaagtaaatataattaaatattcattttctgagttgcacattttaagtgttcagtagccactagtgactatcatactggatagtgcagattatat

SEQ ID NO: 447219 - DNA, 563 bp, Homo sapiens
atgacaattagtttttagctggaaatgttggcaaactccagtaacacaaggatcattcaataattaggaaggggagacaacatattgaaaatacaacatgttcccatcacatacccatgtgtactcacacactgtgcttcatcttctgctattatgaatgaatgtttaggcttctatattatgctaagacttccccttttatactatatgccatatccacattcacatttggtctactaaagaatatagctcctctgattctgtcctcttttggataattcaggtctgcttctctgttaggttatataaatcagcttaaaaatatacaaccattatggtacaactcctgcatcaaaacatgtttattatataaatatcctctatcarctcacgtttcatttcttttttatattgagatgtataatgaggtgggcattagacatgtggctatttatatttaaattaattaaagtaaatataattaaatattcattttctgagttgcacattttaagtgttcagtagccactagtgactatcatactggatagtgcagattatat

SEQ ID NO: 447220 - DNA, 569 bp, Homo sapiens
gaaaatggttatattaattcacttctctttccaaacaaacacaaactaatgttagatggcagatagacctaaatattatacatatatttatcaaattgctagaagaaaacacataaaagtcttcattarctcaatctctgaataaatttcttaaataacatgcagtatgcaatatctattacaaacattgataaatggtgcttcattaagaaaaaaaaaatctggttttcaacaaacctgataattaagggaagtgatgcaaagacaactgtctgggaagagaaattttctctctctctctctctctctatatatatatatatatgtttgtataatatataatatatataatatacatacacatacatatgtatatatatagaaaaataggttgaattgaatgtgtgcttcacagaaaggtatcaaaaagtttcataaacttgtggaaatgttttattatcattattgatcacagatatgcaaattaatattacaatgaactatcattacatatcagaatatctaaataaatggctgaaaataccaagagtttctgaggacgtggaata

SEQ ID NO: 447221 - DNA, 563 bp, Homo sapiens
atgacaattagtttttagctggaaatgttggcaaactccagtaacacaaggatcattcaataattaggaaggggagacaacatattgaaaatacaacatgttcccatcacatacccatgtgtactcacacactgtgcttcatcttctgctattatgaatgaatgtttaggcttctatattatgctaagacttccccttttatactatatgccatatccacattcacatttggtctactaaagaatatagctcctctgattctgtcctcttttggataattcaggtctgcttctctgttaggttatataaatcagcttaaaaatatacaaccattatggtacaactcctgcatcaaaacatgtttattatataaatatcctctatcagctcacgtttcatttcttttttatattgagatgtataatgaggtgggcattagacatgtggctatttatatttaaattaattaaagtaaatataattaaatattcattttctsagttgcacattttaagtgttcagtagccactagtgactatcatactggatagtgcagattatat

SEQ ID NO: 447222 - DNA, 563 bp, Homo sapiens
atgacaattagtttttagctggaaatgttggcaaactccagtaacacaaggatcattcaataattaggaaggggagacaacatattgaaaatacaacatgttcccatcacatacccatgtgtactcacacactgtgcttcatcttctgctattatgaatgaatgtttaggcttctatattatgctaagacttccccttttatactatatgccatatccacattcacatttggtctactaaagaatatagctcctctgattctgtcctcttttggataattcaggtctgcttctctgttaggttatataaatcagcttaaaaatatacaaccattatggtacaactcctgcatcaaaacatgtttattatataaatatcctctatcagctcacgtttcatttcttttttatattgagatgtataatgaggtgggcattagacatgtggctatttatatttaaattaattaaagtaaatataattaaatattcattttctgagttgcacattttaagtgttcagtagccactagtgaytatcatactggatagtgcagattatat

SEQ ID NO: 447223 - DNA, 560 bp, Homo sapiens
ttctccaatttgctttcagcagtgctctgcctttcctaggaaacatggaatggctcttaacctgcctctgacaaaaatgtggtctcatttgcctgatgagtgattgctttaggcaaggtcatctgacaaaattatgccaattcaattatacagagaagttctctcaatgtgaatgtattctatgatgaattttcttgttcctgatggagatgaaagacagatgatttttttttctgcttcttgattttggcctccrcatgtgacaccagttgccatactagaactactagaagacaacattccgaggagggcagaatggaaaactacattcttattcagccactgagttagccatatcagtattgccttactgccagaaatgtttttattttatctgttactttcacatgcaaaacattgtaacttttatttttcatttcttatatttcaaactgattcctacaaattatagagtagattctaaacattttaaagtagaatataaataccattggaatgccagtaacattttgctaacttggaagagagccaaaggaatc

SEQ ID NO: 447224 - DNA, 475 bp, Homo sapiens
gaactttcatttgtatgggtaatgtatgagaattatagcatgtactgatgaggaaatgtgctatagcctcaactgaccaaatagaagaataaatgtagcacagagaaaagctaacagtgtcttgtatttttaatgatttaggtaagtaaatgcattaaaatggttttgwttaacttggcatattagttctcaaggtgctgataaagacatatccaagactgggtaatttataaacgaaagatgtttaattgactcacagttccacagggttggggagacctcgggaatcttacaatcatggcagaaggggaaggaaacatgtccttcttcacatggcagcagcaaagagaagtgccaagcaagaggggaaaagcaccttatgaaaccatcggatctcttgagaacctacttacttactgtcaagagaacagcatcacggtaattaccccatatgattacattacctcccattggg

SEQ ID NO: 447225 - DNA, 633 bp, Homo sapiens
aagaactttcatttgtatgggtaatgtatgagaattatagcatgtactgatgaggaaatgtgctatagcctcaactgaccaaatagaagaataaatgtagcacagagaaaagctaacagtgtcttgtatttttaatgatttaggtaagtaaatgcattaaaatggttttgtttaacttggcatattagttctcaaggtgctgataaagacatatccaagactgggtaatttataaacgaaagatgtttaattgactcacagttccacagggttggggagacctcgggaatcttacaatcatggcagaaggggaaggaaacatgtccttcttcacatggcagcagcaaagagaagtgccaagcaagaggggaaaagcaccttatgaaaccatcggatctcttgagaacctacttacttactgtcaagagaacagcatcacggtaattaccccatatgattacattacctcccattgggtcactaccagaacacatggggattatgggagctacgattcaagatgagatttgggtggggacacagccaaactgtatcatcccacctttggtccctccaaaatctcatgtgctcacattttaaaatacattsatgcccttccaaaagtccccccaa

SEQ ID NO: 447226 - DNA, 563 bp, Homo sapiens
agtgcaagctgtcggtgaatctaccattctggggtctggaggtcggtggccttctcacagctccactaggcaatgccccagtggggactctgtgtgggggctccaatctcacatttcccttcctcactgccctaacagagtttctccatgagggttccatccctgcagtagccttctgcctggacatccaggcattccatacatcctctgaaatctaggcagaagtccccaaacctcaattgtggacttctgttcacccgcaggtccaacaccacatggaagttgccaaggcctggggcttgcaccgtctgaagcaatggcctgagctgtacatttgcccctattagtcatggctggagcagctgggacacagggcaccaagtcccaaggctgcacamagcagcagagacctggacccagcccaggtatggacttttcccctaggcctccagggaaggcctcttttccctagacctccatgcctgtgatgggaagggctgtcataaatgtctgtgatatgcactggagacatttttcccatccctttggtgattaacattcag

SEQ ID NO: 447227 - DNA, 563 bp, Homo sapiens
agtgcaagctgtcggtgaatctaccattctggggtctggaggtcggtggccttctcacagctccactaggcaatgccccagtggggactctgtgtgggggctccaatctcacatttcccttcctcactgccctaacagagtttctccatgagggttccatccctgcagtagccttctgcctggacatccaggcattccatacatcctctgaaatctaggcagaagtccccaaacctcaattgtggacttctgttcacccgcaggtccaacaccacatggaagttgccaaggcctggggcttgcaccgtctgaagcaatggcctgagctgtacatttgcccctattagtcatggctggagcagctgggacacagggcaccaagtcccaaggctgcacacagcagcagagacctggacccagcccaggtatggacttttcccctaggcctccagggaaggcctcttttccctagacctccatgcctgtgatgggargggctgtcataaatgtctgtgatatgcactggagacatttttcccatccctttggtgattaacattcag

SEQ ID NO: 447228 - DNA, 507 bp, Homo sapiens
gcttctaactcaatctacagtcaataaaatatgaaatctgcactcctcggtgatattaatttcagagaatctaacagcagccaactgttactttcttgacatgacctagtgcaaattttttctaaagttgatgattgttctacacaaagsgtccaaaggatgccacgtccttggaaggcaaactggtaaaggagatatacttccagaagagattcagaatctttcctttaaaatggaaaatattatttcagagcatggatcagagagatttcaagaggaaagttgccagcgggaaaaaaatgtggaattgaggacataccaaataacatgaaaacaatgtttgtgggaggaaataggagactagcaacttcctgtgtggcacaggtgtactggaatgtggagtgggcttactatggtcttcaaggttctagtaaaagcagactgggtcctggtggatatcagaactgtaattgattatggtctgtgtcctaaataggtgtggtttca

SEQ ID NO: 447229 - DNA, 507 bp, Homo sapiens
gcttctaactcaatctacagtcaataaaatatgaaatctgcactcctcggtgatattaatttcagagaatctaacagcagccaactgttactttcttgacatgacctagtgcaaattttttctaaagttgatgattgttctacacaaagcgtccaaaggwtgccacgtccttggaaggcaaactggtaaaggagatatacttccagaagagattcagaatctttcctttaaaatggaaaatattatttcagagcatggatcagagagatttcaagaggaaagttgccagcgggaaaaaaatgtggaattgaggacataccaaataacatgaaaacaatgtttgtgggaggaaataggagactagcaacttcctgtgtggcacaggtgtactggaatgtggagtgggcttactatggtcttcaaggttctagtaaaagcagactgggtcctggtggatatcagaactgtaattgattatggtctgtgtcctaaataggtgtggtttca

SEQ ID NO: 447230 - DNA, 507 bp, Homo sapiens
gcttctaactcaatctacagtcaataaaatatgaaatctgcactcctcggtgatattaatttcagagaatctaacagcagccaactgttactttcttgacatgacctagtgcaaattttttctaaagttgatgattgttctacacaaagcgtccaaaggatgccacgtccttggaaggcaaactggtaaaggagatatacttccagaagagattcagaatctttcctttaaaatggaaaatattatttcagagcatggatcagagagatttcaagaggaaagttgccagygggaaaaaaatgtggaattgaggacataccaaataacatgaaaacaatgtttgtgggaggaaataggagactagcaacttcctgtgtggcacaggtgtactggaatgtggagtgggcttactatggtcttcaaggttctagtaaaagcagactgggtcctggtggatatcagaactgtaattgattatggtctgtgtcctaaataggtgtggtttca

SEQ ID NO: 447231 - DNA, 595 bp, Homo sapiens
gaaatatattctatccagctatgtctattataatcttcagtcagtacactttaggacttaaatattacataacttacatcgttcaagccctcattctttcaatggactataacttttgtctaaatatatgaaggtcatcaccttcagaaaaattaaaaatgttaaagtatatcatggtctatcaaagaatataaagaacaaatactactcaaacatacacaagcacatacacacataataccactttgctgatgggaaacagtaaagtcagcacagttaagatattattttgggtgtctataaacaatgattcctattttagtcttgtcaaatgcttaaaatgaccctggaatctttgtttattaaayacaggttagcttgtggactcactttaagagccaggtccaaacttttttgggaattagcttgttcttgaaatataataacaaaaaaacaacaacaaaaaacactaactggcttgcaggtgatgtgtttgtataccctaaattcctcataatgcataaaagtaacctggctttctggaatacctcacaggtgaacaccattagcttcctagctggttctcagctttctg

SEQ ID NO: 447232 - DNA, 596 bp, Homo sapiens
gtttggaatcaccaacatgtgacacggtgtgctctgtgtcctgcctgctcctaaccactctgccacagtctccaccaccttcccttttccatccctgtggtctgatggctcaggggttgctatgcagtkgatggccctccttttaggttccctatctgtaactttggcatgtctttcctgagctagacctgctgccggagaagaaactagatctctaattctgagacctctgctacaatgtgcattcagagactcaactctcccagtcaaaaggacttttagagattacttaacctgaccccttcattttacacccagatgagacagccgaggcccagaggagttcacataaggaatctgttcacgttcgaatcccacatcctgattcctaatcctcctaagctgccctacccaggacttctgacccacaaggtcagtcctaggaccttgggtccagtgctttgggtctggctcctcctgccccttggggagtggcctgcaggctgggccctcccaagcatttttcagttctccagcccccctggttgatccctagatggttaaagatgagaaaatagctctggatggtgcagaga

SEQ ID NO: 447233 - DNA, 574 bp, Homo sapiens
attttctctgtaggttgcacgcagggttctatatatttttgttatataaaggtcactaatcctctcattcaaattttctgtatccttaagaattttttgtgctggattaatttgtttctgtttgataggtatttaaaaatatccaaaatggtggtaaatttgacagttttacattgtatatctatcagttgtgctttaaaatttctctttatgttgtcgagttcataaaagttcatatattcttgaaagtaactgctttcattattatataatttactttctaatttagccctaataatgtgttttgagttattatctatttgtcttgatattaatatttckgccacaggtatccttggtttaatgttttactaactttttctatttaatatttgaattttattttctgctgggtatgactttgaaagcatttatattttacttttattgttttatctagattcatttctaacttcttattctatctttagattactacctgtttttctttgcttctttattttcttctctcttatattctgttgaattaataaaattatttttatactccaag

SEQ ID NO: 447234 - DNA, 567 bp, Homo sapiens
taaactatgagctttgggtgataatgatgtgccaatatagcatcattgattggaacacatattttactctgatgtgagatgttgtactggggtacactgtgcatatkgggggcaggagtatatatggaaactctactttcggcccaatttttctgtgacacccaaactgttctaaaacataaagtcttttttaaagtatatattatttcattgtatagtaactcagaattaaaatctttgtatgcctatttattttttttttcttattttcttgaaacaaacacccactggagactgtattccatagaaaattcagaggaacagtgcaaataaagaagagagattgacagtttcatcgagttatgtgcattggtcgttatgtgttttattttcttttaaataaaacaaagcagtactaatgggagagtcgtagggaagatctggtattgtaacaagtgttttgatgccagttttgccaccaaaacaaatttgaggacattttagccattgaattgccttcatttctatcaagtttggtcactaactgaaagaaaacctgagggatgg

SEQ ID NO: 447235 - DNA, 567 bp, Homo sapiens
taaactatgagctttgggtgataatgatgtgccaatatagcatcattgattggaacacatattttactctgatgtgagatgttgtactggggtacactgtgcatattgggggcaggagtatatatggaaactctactttcggcccaatttttctgtgacacccaaactgttctaaaacataaagtcttttttaaagtatatattatttcattgtatagtaactcagaattaaaatctttgtatgcctatttattttttttttcttattttcttgaaacaaacacccactggagactgtattccatagaaaattcagaggaacagtgcaaataaagaagagagattgacagtttcatcgagttatgtgcattggtcrttatgtgttttattttcttttaaataaaacaaagcagtactaatgggagagtcgtagggaagatctggtattgtaacaagtgttttgatgccagttttgccaccaaaacaaatttgaggacattttagccattgaattgccttcatttctatcaagtttggtcactaactgaaagaaaacctgagggatgg

SEQ ID NO: 447236 - DNA, 571 bp, Homo sapiens
acttaacttttatataatggtgttatttctttcagaagagctcaaacatcccataggtttcaaagaatgagtaattcattgtggcacaatatcttacacatcgactctgaaagtgaaacgttttccttgttgatctatttctgttccactttggtttgttggcttgtatcctagatctttctattctagaagatgagttttgtcttgacacaatcaaccccaccttgttgttgaatagtaaaatctgtctgagttcttgactaattcgtggaaatgttgggaggtggtgtagaggttctgtttggggggggcrgtgagtaaaaggatttgcatgaaatggcatagatctccaaagaaaccaggcctttaaatttgcatggggtctattctctgagcttgagctgaacgcaagtcatggagtaaatcagttggactgaagcatatttaataaattaatgggcacgtgtatacctatgtaacaaaactgcacgttctgtacatgtaacccagaatttaaagtataataaaaaataaaactaaattaacacatagttatatacttaaaaactct

SEQ ID NO: 447237 - DNA, 617 bp, Homo sapiens
agctttttaaatatatatatttcaatatatttaggggtacaagtggtttttagtgacctgaatgaattgtataaaacttttactgtatccataacctgaattgtgtacattgtacccaataggcaatttttcatcccttacttccctcctcctttcccctcctctgagtctctgaagtccattatattactctgtatgcccctgtgtacacatggcttagtttcctcttataaatgagaacatatcatatttggttttctattcccgagttacatctcttaggataatggcctccagtttcatccaagttgcagcaaaagatattatttcattcttgtttatggctgagtagtattccatggtataaacacaccacattttctttgtctgcacgttggctgatgggtacytaggttgattccatatatttgtgattgtgaattgtgcttcaataaatatatgcaatatttatgcaattacttcttttccttaggcagatacccagtagtaggattgctggatcaagtagatctgcttttagttctttgagaactttctatactgttttccatagtgtgatacactacaacattgtaacaggtatgatatcaccacgc

SEQ ID NO: 447238 - DNA, 519 bp, Homo sapiens
ctccttcaatgaaaagaaagcttggacctaaggtatttcactccatttgccttctctcttacagaaaaggtgaagcttcaggatagtgttgtaattatacttccctcaggtggccatttttccccatcagagagagaatactggggccaggccacagtgcagaaaaaaaatgagctgcccctttttcagggtctgtgggtcaaattggtcccaatggcttaggatgcatttcaagggtgaggctgttaatgcctgagtgtttcccatctgaaagaaaaaaaaatggccatagttttggtttgtttgtttcccaccccctgcccaagaacctgcaacggtccctggaccctgctaatcggaatagttgcgctcactgacgcagcagcagaaacactaggtttcctcctagaccatgaggaggamtgaggaaggttggatttagtggcccttgctgacgcattcttgaaaacctgcacccttgcccattctcctagaccacaaagaggaccaagaaaaatc

SEQ ID NO: 447239 - DNA, 408 bp, Homo sapiens
ctgtgtaagtaatgaggactagagggatggtcttattctgttctggctgctataacaaagtactaaaaactgggtagcttatgagcaatagaattttatttctgacwgttctgggggctaggaagtacaagatcacagcagattcagtgtctggtgagggctcgcttcctggttcatagacagtgcctcctagctgtgttctcatgtgttggatggggcagggtgtctctctggggcctcttctttagggcactaattctatttatgagggctctatccccatgagctaatcacctcccaaaggccccacttcctagcaccatcacatcgcaggtgaggatttcaacatatgaatttagggaagacccaggcattttgaccacagcaagggggcaaagctatggagtg

SEQ ID NO: 447240 - DNA, 605 bp, Homo sapiens
tcctgtatctttttttttttttttgcagtccaaacctaataaaatttcagcttttgtgtgtttgacagtctttatttcaaattcattactgaaaaataatttcatgaatagaaaattttaagttgacagcttttttgttgttgttcagtaaaggcgttattttattctattctggttgcattggttgataacagaaacataataaaaaccatcatattgctttttatcacttgtatataatgtgcctttcttcattggctgctttcatgattttttctttaaaacttgttttaagcaatttcattaatatacaccttggtattgttttcttcatgtttctttgcttagggcttattgaccatcttggatctgtgtattggtagtattaattaaacttgtaaacaattattgggcatttattcaattttttctcccttattttttcatactcartttacatatattgtagccagttaagatgttccacagcttaaatgatgtttcattcattttttaaacattttctgttctgtttaattttggatagtctttctattttgtcttcaaattcactaatcttttattttccaatgttaaatttccta

SEQ ID NO: 447241 - DNA, 558 bp, Homo sapiens
aagcacagcccctatgaagtggacatatgcagtctgcagtggccttggactctgaacaaacctcaacaaacaggcagacktcattggatatggggctttgggcatgcctcgtcacagtgatgggatggcctcaggagctatgggattatagcctggcagccatgctgactgaagtaatcccaggcttaaagtgttccaatggcgtagtgctgtaatcgccaccatggtgctgggcataaggaacatgcccactggcctacccagaccctctaaatgggcttaactttgaagtgtttccagacaaagctagtctataaagactggagtaagtacctacttcttcaaatgcacaggcactgatgcatggcaatgaagatcaaggacaattagggaaaaatgacatcaccagacagataaaataaagcaccagtaccagccctaaagagatggagatatatcaactgcctgacaaataacttaaaataattgttttaagaaaggtttgtgtacttcaacaaaatacagagaaacaattaaaagaaattaggaaaacaataa

SEQ ID NO: 447242 - DNA, 558 bp, Homo sapiens
aagcacagcccctatgaagtggacatatgcagtctgcagtggccttggactctgaacaaacctcaacaaacaggcagacgtcattggatatggggctttgggcatgcctcgtcacagtgatgggatggcctcaggagctatgggattatagcctggyagccatgctgactgaagtaatcccaggcttaaagtgttccaatggcgtagtgctgtaatcgccaccatggtgctgggcataaggaacatgcccactggcctacccagaccctctaaatgggcttaactttgaagtgtttccagacaaagctagtctataaagactggagtaagtacctacttcttcaaatgcacaggcactgatgcatggcaatgaagatcaaggacaattagggaaaaatgacatcaccagacagataaaataaagcaccagtaccagccctaaagagatggagatatatcaactgcctgacaaataacttaaaataattgttttaagaaaggtttgtgtacttcaacaaaatacagagaaacaattaaaagaaattaggaaaacaataa

SEQ ID NO: 447243 - DNA, 558 bp, Homo sapiens
aagcacagcccctatgaagtggacatatgcagtctgcagtggccttggactctgaacaaacctcaacaaacaggcagacgtcattggatatggggctttgggcatgcctcgtcacagtgatgggatggcctcaggagctatgggattatagcctggcagccatgctgactgaagtaatcccaggcttaaagtgttccaatggcgtagtgctgtaatcgccaccatggtgctgggcataaggaacatgcccactggcctacccagaccctctaaatgggcttaactttgaagtgtttccagacaaagctagtctataaagactggagtaagtacctacttcttcaaatgcacaggcactgatgcakggcaatgaagatcaaggacaattagggaaaaatgacatcaccagacagataaaataaagcaccagtaccagccctaaagagatggagatatatcaactgcctgacaaataacttaaaataattgttttaagaaaggtttgtgtacttcaacaaaatacagagaaacaattaaaagaaattaggaaaacaataa

SEQ ID NO: 447244 - DNA, 558 bp, Homo sapiens
aagcacagcccctatgaagtggacatatgcagtctgcagtggccttggactctgaacaaacctcaacaaacaggcagacgtcattggatatggggctttgggcatgcctcgtcacagtgatgggatggcctcaggagctatgggattatagcctggcagccatgctgactgaagtaatcccaggcttaaagtgttccaatggcgtagtgctgtaatcgccaccatggtgctgggcataaggaacatgcccactggcctacccagaccctctaaatgggcttaactttgaagtgtttccagacaaagctagtctataaagactggagtaagtacctacttcttcaaatgcacaggcactgatgcatggcaatgaagatcaaggacaattagggaaaaatgacatcaccagacagataaaataaagcaccagtaccagccctaaagagatggagatatatcaactgcctgacaaataacttaaaatawttgttttaagaaaggtttgtgtacttcaacaaaatacagagaaacaattaaaagaaattaggaaaacaataa

SEQ ID NO: 447245 - DNA, 574 bp, Homo sapiens
ctgcatatgctaaatggtagttctaaaacaccctccctaccttctgtgccgatagcaataagcatcatatgttgtgttttctaaactgtaaagcagtatgcaaggtatatatcagatagtgcttgatcaccatttaacagaggagatgactgaggctcagaatggtgaaaaggacttcctcggtgtcacagagtcagggagaaggccatggaaacttagattctttacttccagggccaccttttttgacatcaactttagctgctccatattcaaaagacttgaacagaatttttggtttcttttgatctttcccacgattaaagtaggtaaaatatcaatgtggaatcattttgttcagtggataaaagagagagaaacagcagcctcccctgatattgtagtgaggggctggctccaggaaccgttgtttgtgcatttaaatcacagaaatctcargagtgctcaactgagctctatttggtaaatctcgaacaagacttgcaaacacaacacacacacacaatttaggaaattgaagaccttgcattattttcccagttactaggagaat

SEQ ID NO: 447246 - DNA, 609 bp, Homo sapiens
tgattttaaccctctctcagggaaggctttggaaaaagaaaagtaaataacctgtaaaagttttagstagttcaataagataaacttgggatgttgaagcaatcaatgttatgtgaagtttccaagttgttttaggggttatactaaatgaagcagaggtcctatttcatggttctatttctgaacacacctaccctgatacatttcctgtatatagaaatgtgaagaatgtcaggatgaggtggggtaaatggtgagtacagaaacgaccttggtgagaaagtaaacttgctcaggtagaaagggtctgattgaagatgaaaacagagagaattaacatgtattgatcacatttcaccggaaggccccatgttgcagactgttgcctatattttcagtagctactcttcttttcccaacccctttgtaacttttgaatgccttccacttttgtttgcgggactggctctgtgtttggagggagggaactgtgtctggccaatgaagtggtgactttcccactaccccatccatcactggggtggagtaactgacaaaacacagtgacacagcccctaccccagcaggagctaggcgtatcatctgccc

SEQ ID NO: 447247 - DNA, 661 bp, Homo sapiens
cataaagacacgtccttcagaaagtgagagcagatggttttacatgttcaggtgcatgtgcatgtggaaagaaaaattgcttcaaatttcttggtgttagagaaaaatatattggtactaaaactattgagtttcgaagtaatgacaaaggaaattggaggacttcacatcagttgtacttgcttttcttctttaaaatgagagctaattggtaggaaaggatgcaggaagggtagtttgggcatgccaggatgattagaaaatactcagacagtgggccgagcgcagtagctcacacctgtaatcccagcactttgggaggccaaggcaggcgggtcacgaggtcgggagttagagaccagccagaccaacatggtgaaaccccatctctactaaaaatacaaaaattagccaagtgtggtggcatgcctgtaatcccagctactcaggaggctgaggcaggggaatcgcttgaacctgggaggcggaggttgcagtgagccaagatcacaccattgtactccagcctgtgcaacagagtgagaatctgtctctggctctttctctctctctctctctctctcwcacacacacacacacacacacaaataaataaataaaagaaaatagacagtggaatggccaagggaattaaccgggt

SEQ ID NO: 447248 - DNA, 529 bp, Homo sapiens
ctccaaagagaattcagagcacaagtgagtctgggtgatgcaatccatggatgctgtctccagcagggcggagatgggtggagtagatctggaggggacatcagagaggcaacaagtaccacatctgttttttaggattggaatttagcatccctgaagcagaaccaaaaaaaaaaataatagttggttgagaatcgatcttgtgtcttaaatcagaaaaaaarggcagatttttttaaaggataagacaataaaatctagagtactcagagataagcttgaataattcagatcatagctcaacattgttcaagagaaaagtgttcaaattcaataagaccagcaatttttttttcctccttgtcattaagagtagggagttgaaatagcttgctggacctaggggctcttttatggagaatttccagaattatttggaagcaaatgtaaagacaatctggtatggagtcattaaaatatcccagattaatggaagtaagaccatgagtattgttgtagatgtacttgt

SEQ ID NO: 447249 - DNA, 545 bp, Homo sapiens
gcagatttttttaaaggataagacaataaaatctagagtactcagagataagcttgaataattcagatcatagctcaacattgttcaagagaaaagtgttcaaattcaataagaccagsaatttttttttcctccttgtcattaagagtagggagttgaaatagcttgctggacctaggggctcttttatggagaatttccagaattatttggaagcaaatgtaaagacaatctggtatggagtcattaaaatatcccagattaatggaagtaagaccatgagtattgttgtagatgtacttgtgtttcagatttacacttttgtgaatcaacatgtgtcttacaataaaaataatgtttctttttttcttttccaaaattggtttttatatttgtgtttcctcttacaatcgaagacactttaccacataggaagtatggtagtggtgaagaagttataaaaaaagacaacccaaaaagtctgagattgacatgataattactaaaacaaactttcaatcaaaatgcatctgaatattcttttg

SEQ ID NO: 447250 - DNA, 556 bp, Homo sapiens
agtgattatcttaaagtatttttagaagattgggatgcttcaagatctcaggcgaatactcaaccaggagaagtacagcaacactctcaggatttgaagccaatccatgcctgtattattcttaaataacagctcctgacttgctattggcttttggtaaaaacttaatgcccaataacggggtaccagaagaagataacaccaaggctttccatcacaaaccaagagtcatctgatccatgcaacattaaattaggcactcctagcagctcaccatcatcacgtagaagtgaaatataaaagcctgggcccaaacaggtcacaatcaaattctagaagcactctcaatatgcctacttcccttttactatcccaccttgacccacacccatggcctcattgagagtttcctattaccagctcactgggacaagatcagtgagaatcaaccacctccacacaatatgttgtcatgtgccaaaactgaagttytttggcattaaagccccacttggggactcaaaacactgggaaagagatattcttccagtgatta

SEQ ID NO: 447251 - DNA, 596 bp, Homo sapiens
actaaaaatttctctgaagaaaaagagaatatgcagcagttaatacaactcataaacacaacttaaggtcctattaccattaaggaaataaggactttagctattcttattgctatgtcacatttttagtgctgtaagtaatgtctcttttattttttcttctttaccctattattgtacatagagtatattagttgttgttaactttacaatttaatctcttggtcatattatattgatataaggtcatacagaactagaggagaagtagacactggacttgatgccaaaagtagtaactgggaaatatttggtattgcctttctttgaggatggggtaaattttaatcaatgggccctaattgctttactttagctgggaatgtatttgggaaggggaatgaggttaaagattgataggtttcactaaatggatgaattttaataaatatttgtcatctgaagaggcgaggcagggaawccttgcatatgaacagccatatagagtttggcaagagatatggtccgcattcagcaatagtaccttgctgcttttacttaggacaagtgcgtggtgcctacatttgttcactcag

SEQ ID NO: 447252 - DNA, 548 bp, Homo sapiens
ccaacacccatttcactgtcctttctcctttgtctgcctctaccacagcagctggaaaatagtcactgccccacagtaccctgcagcaatagatggcygtgtgacagagtagcagacagtaagacttaagcaaagactgctggaggcatgtttgccttcctgataaaaaagtcatatgttacaggcaccagggctggcttcagggcttgcaaactgtgcagtgacagagggccctgctctcagaagggctctgcccatctcttctccatctggttaagtgctctgctgttgccctttcaaaattcttaatatttatccttaatttattttataagtgaggtccaagcatgatcatgagcagcagattcaccaggtgatagctcaggctctgcagccaaagcagacagtgcaggcactgcataattcactggtggccaggtacaagcgccttcggctgtctgggacagtgctctgggacatagccagaggccaccagcttgccctgctgtccctggaggccttttctgcagcctctgcacaaatactaa

SEQ ID NO: 447253 - DNA, 548 bp, Homo sapiens
ccaacacccatttcactgtcctttctcctttgtctgcctctaccacagcagctggaaaatagtcactgccccacagtaccctgcagcaatagatggccgtgtgacagagtagcagacagtaagacttaagcaaagactgctggaggcatgtttgccttcctgataaaaaagtcatatgttacaggcaccagggctggcttcagggcttgcaaactgtgcagtgacagagggccctgctctcagaagggctctgcccatctcttctccatctggttaagtgctctgctgttgccctttcaaaattcttaatatttatccttaatttattttataagtgaggtccaagcatgatcatgagcagcagattcaccaggtgatagctcaggctctgcagccaaagcagacagtgcaggcactgcataattcactggtggccaggtacaagcgccttcggctgtctggracagtgctctgggacatagccagaggccaccagcttgccctgctgtccctggaggccttttctgcagcctctgcacaaatactaa

SEQ ID NO: 447254 - DNA, 570 bp, Homo sapiens
ttaaaatggttcctttgccagggaggttgtgaagatcatagatgcaacttgtataaaggaagatagcatggtaccaggcacattttaagagtctaataatagcagtcaaaagtattattctgattcatttttgttgttgttattactgcattctaggctttgcttttattaaagcaattttattatctattttgcaactaaatgcaactaaccagagtctatagcaaagcctttagcaaaaaatcaagtgtgtaattaatcttaatgtgacctcactaccatgcaggagagagccagtggcactggaagcatttgaccaaacaaaggacataccagtcagatcttaaactaactttcgaacatgagttcattcaatgcattccctggaacccatgcaaagtgatttgcaatctaaatgagaacaggccactggagtatagaggctggagactcctttgtgggactaaagagatgccaactckctgagggttgtgcttctggttctccatgtgtactcagactcctgctaatgtgaccgcagtggctctttctgggagcattcaaatcctc

SEQ ID NO: 447255 - DNA, 539 bp, Homo sapiens
tgcaatgaaacgcctttctcactttgtaaactccctaggatataataaaattgaatttggttaccacagtgttctctgtattttttgcttaattttaattttttttataataaaactttctcccactctagtgtggggcagcatatgtggaaagacagaaaatagtaccaatcagacagtgtatttgcatggcttctcaagtactcagaattctagcgataacccctgctgtccccatcaattaatacacaatactcctatgtgatggattaggtccagcaaatgtgtgawcttaaagaagtgaaactagtaactctgtgacagagcaaaatgcagagttccagtcaaatacttcacccatttgcatgagctaatagctatgacaaatttgtctgcagttttattcaagaaaacaagaaaagccgaaactgcaatacaaatagcctaatacatcagtgccagtttttgaaaagtcaggaaacaagtaactgaataagatctggttgagagaagccttttttttcgctaagctttaatga

SEQ ID NO: 447256 - DNA, 539 bp, Homo sapiens
tgcaatgaaacgcctttctcactttgtaaactccctaggatataataaaattgaatttggttaccacagtgttctctgtattttttgcttaattttaattttttttataataaaactttctcccactctagtgtggggcagcatatgtggaaagacagaaaatagtaccaatcagacagtgtatttgcatggcttctcaagtactcagaattctagcgataacccctgctgtccccatcaattaatacacaatactcctatgtgatggattaggtccagcaaatgtgtgatcttaaagaagtgaaactagtaactctgtgacagarcaaaatgcagagttccagtcaaatacttcacccatttgcatgagctaatagctatgacaaatttgtctgcagttttattcaagaaaacaagaaaagccgaaactgcaatacaaatagcctaatacatcagtgccagtttttgaaaagtcaggaaacaagtaactgaataagatctggttgagagaagccttttttttcgctaagctttaatga

SEQ ID NO: 447257 - DNA, 574 bp, Homo sapiens
tggattaggtccagcaaatgtgtgatcttaaagaagtgaaactagtaactctgtgacagagcaaaatgcagagttccagtcaaatacttcacccatttgcatgagctaatagctatgacaaatttgtctgcagttttattcaagaaaacaagaaaagccgaaactgcaatacaaatagcctaatacatcagtgccagtttttgaaaagtcaggaaacaagtaactgaataagatctggttgagagaagccttttttttcgctaagctttaatgactttgtgacagttggaaatattgacctggagcccagaagtgttgttcgatgaagatgaagatacaaggatgagcaatwttaggcggccaatcactcactcatcaattcatttaacaagtactttctgaggtgtcattttgttctatgaagtgagagacacattagataaatctagattaattttctcaaggcaagtaaaaagagaggtgggctcatgacaaagccaatctcgttccatgttctagcaccagctacagttctcagctggcaatcttttcctcatcctgcacagctcagctc

SEQ ID NO: 447258 - DNA, 542 bp, Homo sapiens
tttccctcttacccactccccactgacagtaaacttcttataatccttcataaagaaaaatacaagttgtctgaagcaaatacccccttttctcctcaaactaacatactcgctacacttgtagtcactctatccttttctgctgttacaaaggaagaagtatcaaaaacccaaattctccatactactctatttctcttcaaaattctttttctcaggggactttctaccccaatcttctggatcttgctactcactctagtttattaaaaagcagacaaaacaaaacttttccctagctcatacctcattcttgctccagcggtaattgtgagggccagttgtaaactgcttccacttcctaacctcttattttctcttcagtagacaccaataaggcttttgcaaccackaattaattgaaaataatcttagtaaaggacaacaataatcctactgcagctaaatcaaatgaattatttacaattctcacattacagtacttttcagtagtacagttgatccttgaacaacatagattt

SEQ ID NO: 447259 - DNA, 572 bp, Homo sapiens
tgtttcactggcttctcaaacttaaaagtccaggactgcactgttaacttccacaccatcacacacacacacacacacacacacacacacacacgaaatctgtttctcttgtagaggttytcatcattgttcatagatcttttctggatctattagcccatgctagaaacctaggagtcaaacttgataacttctttctcaattcagtgctgtcaattccattgtcaggataggtcttgaatttactgagttctttgtttcaccacatcatttctgcaagctgctattatttctccactgtactattgtactagcaatcttctaaatgggtaccctatttctagcctctgttcaaatcatttttcatgaatctgccagagatcattttagatctagtctatgcttctcattatagagttctgcataatctgacccctattcacacctcctccttcatatcagaacacatttccacctgtccattatgtaccacccacactgaccataaaagacatcaagttatttcctgtcctagagattttcactcttcccctttttctctgcttgacttc

SEQ ID NO: 447260 - DNA, 574 bp, Homo sapiens
gttattttctattttgaagttaaaaataattctcctttatttttactgagatatactatctttagtaactcacctcctgttgacactttttctcctatcatgttggtttctgccgtcaccatttaaacaaaaatgctcttgtgaagagcaccaacaaacttcatgtggctccattgtattgacaktgctaacccacattttcactcaactcctcagaatcactcaacatacttcttactcctcaaaacacctgtgtttttttaaattgtataatgtctagttgcttgtataatacctggtataatgcctagcttgtataatacctagttttcctcaaatcaggtctggccatgatgttttaccttggcctggttcaaaatttccaggtcttgagaagccaggcattacagaacccattttttaggagctagtgtctagaccaagtactggctgggccaggaaggttttgatttttctagggttagaagaaagaacaccaagtaatcataaagccaatcattttattgcttcaattcatttgactcttggctcatactgagatgacacaattaat

SEQ ID NO: 447261 - DNA, 501 bp, Homo sapiens
gggctttggaactgaggtatcagaaacttaggaaggaaaataaataatttaaagagacaggttttactttatatrgaagacccatgaaaaagagaaaagaccttccaacccagcaaatatacatgctagccctatatacagcataggtgggaaaagttaatcttttccagtcaatctaggcagaaggctggaattgtgggctatacctgcttgaaagaagactcttaacagaggagaatgaaaagaggacccagagggagaaagcattgtcatgaatataactgatagggcattttggctgcactggagtaaaaaaattactcagagcttctagaacatgattgctgaggaaagccaaaagctggggaaataatcacacggcagagttcacaatagctgtcaccaaaaacctggttggaacatcagcaatttatgataagacatgaagacagaagatactttctatgcagtttaagaaagttttttctctgcagagatata

SEQ ID NO: 447262 - DNA, 571 bp, Homo sapiens
caggccctcactcacttcatttatgcctcagctcaatgtcacctgaccagacaggccttccctgacaaaccttgagaggtttgtcaaaagaggagctcctccctcccagtcattttttatccctctaccatgatttattttcctttatgacacatatcaatacatactatcatattgctcactaattgccttagtggctgtcttcatttgctgtatgaggatctatggtaggctgaataaagctcctgccccctaagatgcccatgccttaatcctcggcgcctgcaaatgtattacattgcatggcaaagggcttcacaggtgtgactaagttaagggtcttgtgctgtgagtgggaccacaagccaaggaatgcaggtgacctttagaatctggaggagacaaagaacagatttctctggaacctccmgaaggaaccagtgctgccaaatcttgatctgaccctgcacaactgatttcacacttctgcctcaaactgtgaaacaacaaaattgtattgtgtgatgattaagcatcaacttgattgaaggatgcaaagtattgtttctgg

SEQ ID NO: 447263 - DNA, 597 bp, Homo sapiens
aaatccaagaagctgagtgaagcacaatcacaagaaacatgaagaatgctatcccaaggcacatcataatcatattgctcaaaatcagtgataaagataaaatgttaaaagccaacagaggggaaaaaagacttgttatatacaataaaacaaagactttttttaaagcagcagacatctctgcattggaacaatgmaagtgagaaaacagtaaagtaacactcttaaagtactaaaagaaaaaataaaacctgtgtatttaaaattttatacccaataaacaatattcttcagaaatgaaggcagaataaaggcttttttagacatctagcctctgaaatctatcacttgcagatctacactaccaaaaaatgttaaaggaagccctttaggtggaaggaaaataataacagacagtaatatggctctacacaaaagaatgaagaaccccacaactaaataagtaaatatatgagtttttaaaattacttgcgctgttaaaggagcattgtttcaacaaaaataataatatagcatggagcttaaaacaactatagaaataaatgtataaaaacaacagcataaagaaaacaaggg

SEQ ID NO: 447264 - DNA, 525 bp, Homo sapiens
gtgccccctcccaaaatttgtatgttgaaattctaaccctctatgtgatggtattaggaagtgaggcctttgataagagattttgtcatgagagggagccctcataaataggatttttatttatttattagagcactttttcataagtgcccttataaaaaaagacctcaaagagctccctcctcccttccaccatttgagataatagcgagaagatgaccatctatgaaccagttggccctcactggacactgcatctgccagcaccttgatcttgatcttcccagcttccagagctatgataaataaatctctgttctttataagccacccactttatrgtattttgttatagtggtcctagctgactaagacaacatggctgtcacatggttcatatattacctcactgcacccttccacatccttccactctttgagtaaagtaggctcaaagaagctagtaaattgagtaaattcacacaatggaggaattgccatttgaactgaagtttaagtgacttc

SEQ ID NO: 447265 - DNA, 525 bp, Homo sapiens
gtgccccctcccaaaatttgtatgttgaaattctaaccctctatgtgatggtattaggaagtgaggcctttgataagagattttgtcatgagagggagccctcataaataggatttttatttatttattagagcactttttcataagtgcccttataaaaaaagacctcaaagagctccctcctcccttccaccatttgagataatagcgagaagatgaccatctatgaaccagttggccctcactggacactgcatctgccagcaccttgatcttgatcttcccagcttccagagctatgataaataaatctctgttctttataagccacccactttatagtattttgttatagtggtcckagctgactaagacaacatggctgtcacatggttcatatattacctcactgcacccttccacatccttccactctttgagtaaagtaggctcaaagaagctagtaaattgagtaaattcacacaatggaggaattgccatttgaactgaagtttaagtgacttc

SEQ ID NO: 447266 - DNA, 597 bp, Homo sapiens
attttaagcaaataaaccatcagaaaggaatgcatattgctcttcaagccacaacttcagtgtcattgaagagtccaaatggctgcaatccccgttaacaacattgtttatttcagagtctggcagttttttaaacagctgaaggagcacaaatgtaggtcactgttgggaaattatgctgaacaacgctccatacctcagaattgggccatgccttgaggtcagcacaaacataataacactactgtctcaytgttcacgtatagctattggccagacctgtccgactcatttaagcagccacatccaactttatatatgagctaaatacagacaaaatgaaatctacaaattattctaactctgacatgctcaccttgttaacagatgaggacagggagtcagagtgtaagttaaaataatcaaaataggagagtgttttggttatctagtagagagtaacaaaccactcccaaacttaatggcttaaagtaactgccacattcattttgctcactaatctgcagtttggaagagctggaaagaaggtggcagcccatctctggttcacttggcatttgctcagccactcaaaat

SEQ ID NO: 447267 - DNA, 332 bp, Homo sapiens
atctacaaattattctaactctgacatgctcaccttgttaacagatgaggacagggagtcagagtgtaagttaaaataatcaaaataggagagtgttttggttatctagtagagagtaacaaaccactcccaaacttaatggcttaaagtaactgccacattcattttgctcactaatctgcagtttggaagagctggaaagaaggtggcagcccatctctggttcacttggcatttgctcagccactcaaaatcatgatggcatcttatgaaaaatatctgtagaacctgtaacagagaatgrgttattaagtgccttttggacacccaac

SEQ ID NO: 447268 - DNA, 562 bp, Homo sapiens
actaggttctgtacactttacaaaaggaaataaaaaccatggtgattcaaataagaccactgtggacatcctaatttcatcacttgatgtttagttatccttatacaattataagtgactttatgattttgaatttcagttttgtcatctgtaatgtaagcaacttcacaaaaatcttttaaaaataaaataaataataaaagtaaaacacaaaataamagcacctgacatttaaaaatcttgctatgtatcatttcttaaatggcattcattcctctgaatcatgattcagacaagacccttcctttgtgtttccacaaggaatcagttaaaacatttgtgttacacactggccagaattggaacccagattcatttgtttaagcacacgattcttcacttctatttttcgcaagggtgtcagagaaaagctatgagcctattacagaagaatgagcagaagttaactatgcatttggtcagaattaagttatcatgtgacaacaagtcatcacttgaaattgcttctagggggtcatctgcagtatatagaattatttaa

SEQ ID NO: 447269 - DNA, 558 bp, Homo sapiens
ataaagaaagatgcattgaagatggtaggaagaatggttttacattattcatgtcactgttctcccaaccccaggcagcccagtatgaagagcaataacatctgctctggggaaagagaaaagtgagcacaggacttgtcttggacagaatgctggccttccacagtaaaatgtggcacttggcagaaacccacaatcctatattccagttcagtacccacagacagaattttcagactcaccgtggcacctactagtaccaaaaagctctaggtttcatgcttgcttgrcaaactcagtctctggcctgtaccatttctaggtcaacgtcagtggccctgggctctaaaatattcttttttaaaaaaaaaatcagaatctatattacaaatgtcctccaagaatacaggaagaaaagatagccccatgcaaagggctctctaagtagcccatcattggtctatgacaataccaattgtaacagcttgtgaagaaggttcaatagagaaataaggcataagcttttctgtaaacttatcagtgaaagtatacacatat

SEQ ID NO: 447270 - DNA, 558 bp, Homo sapiens
ataaagaaagatgcattgaagatggtaggaagaatggttttacattattcatgtcactgttctcccaaccccaggcagcccagtatgaagagcaataacatctgctctggggaaagagaaaagtgagcacaggacttgtcttggacagaatgctggccttccacagtaaaatgtggcacttggcagaaacccacaatcctatattccagttcagtacccacagacagaattttcagactcaccgtggcacctactagtaccaaaaagctctaggtttcatgcttgcttggcaaactcagtctctggcctgtaccatttctaggtcaacgtcagtggccctgggctctaaaatattcttttttwaaaaaaaaatcagaatctatattacaaatgtcctccaagaatacaggaagaaaagatagccccatgcaaagggctctctaagtagcccatcattggtctatgacaataccaattgtaacagcttgtgaagaaggttcaatagagaaataaggcataagcttttctgtaaacttatcagtgaaagtatacacatat

SEQ ID NO: 447271 - DNA, 585 bp, Homo sapiens
attttaaattgtcacattaaccattttatatatatattctgaatacttattgagtaaatatttctaccaatcagtatataaacttttctttgaaaaaagaatgatggaaagatactatgcttatgtgcaaggagcttccagtgtaatacaggagagtgggcaggtgctcacattgctagaaggagggaggaaggaaaaaatcagatggattaagtgctggaaaaaattagaaaaatagattactcctggctgcagagccaggtgagccttcatcaaaaagcagcagtttttgacagtcatgtaaggcatattttctgtcccttactcagttgctaaagggaagagaacataggaaataaagagaaataaatacaggatgaggtaatgagaggatagaaaatatgggggaaaatgattgggaaagagaagaaaaagaggtttcagraaacatgaagaaacatggtagttgctgaaatatatagacggaaaataaaaggggaaaaatagaagaggaattagaaaagggaggaaggaaaaaaatgtgaaaagattgaggtaagcagagttagagaacaaggcagtgag

SEQ ID NO: 447272 - DNA, 532 bp, Homo sapiens
aatctaataaggataacatatagacagatatcatgtctgtcttggtcactattgtatcccttatgcctagaatagtacctggcatatagaaaatattcagtagatatttcttaaaaagatggcataattcartggattcagttccatcactgaatctaatccagtgtccatggtaaaactggactctgccttcttcacccccttgggcctgttcatcataattctgtccccaccttgctcccttggtctgcatatttgtcgtcattcttttcttgttgatccagtcctctaagcatcatcctggacttgttctttctgtcttcctaccaggggatgaagtcctcccttttggtcctaactgagtgctcactgctatctagtgaacactcttctgttttctactgtccacttgcacttgggatagaaacaattctgaggtcatccgtgatgcatttgtctcgactccctgcgagttccttagaccacactcaggactcttgctttgactgctttttttccttttggacactct

SEQ ID NO: 447273 - DNA, 532 bp, Homo sapiens
aatctaataaggataacatatagacagatatcatgtctgtcttggtcactattgtatcccttatgcctagaatagtacctggcatatagaaaatattcagtagatatttcttaaaaagatggcataattcaatggattcagttccatcactgaatctaatccagtgtccatggtaaaactggactctgccttcttcacccccttgggcctgttcatcataattstgtccccaccttgctcccttggtctgcatatttgtcgtcattcttttcttgttgatccagtcctctaagcatcatcctggacttgttctttctgtcttcctaccaggggatgaagtcctcccttttggtcctaactgagtgctcactgctatctagtgaacactcttctgttttctactgtccacttgcacttgggatagaaacaattctgaggtcatccgtgatgcatttgtctcgactccctgcgagttccttagaccacactcaggactcttgctttgactgctttttttccttttggacactct

SEQ ID NO: 447274 - DNA, 532 bp, Homo sapiens
aatctaataaggataacatatagacagatatcatgtctgtcttggtcactattgtatcccttatgcctagaatagtacctggcatatagaaaatattcagtagatatttcttaaaaagatggcataattcaatggattcagttccatcactgaatctaatccagtgtccatggtaaaactggactctgccttcttcacccccttgggcctgttcatcataattctgtccccaccttgctcccttggtctgcatatttgtcgtcaytcttttcttgttgatccagtcctctaagcatcatcctggacttgttctttctgtcttcctaccaggggatgaagtcctcccttttggtcctaactgagtgctcactgctatctagtgaacactcttctgttttctactgtccacttgcacttgggatagaaacaattctgaggtcatccgtgatgcatttgtctcgactccctgcgagttccttagaccacactcaggactcttgctttgactgctttttttccttttggacactct

SEQ ID NO: 447275 - DNA, 532 bp, Homo sapiens
aatctaataaggataacatatagacagatatcatgtctgtcttggtcactattgtatcccttatgcctagaatagtacctggcatatagaaaatattcagtagatatttcttaaaaagatggcataattcaatggattcagttccatcactgaatctaatccagtgtccatggtaaaactggactctgccttcttcacccccttgggcctgttcatcataattctgtccccaccttgctcccttggtctgcatatttgtcgtcattcttttcttgttgatccagtcctctaagcatcatcctggacttgttctttctgtcttcctaccaggggatgaagtcctcccttttggtcctaactgagtgctcactgctatctagtgaacactcttctgttttctactgtccacttgcacttgggatagaaacaattctgaggtcatccrtgatgcatttgtctcgactccctgcgagttccttagaccacactcaggactcttgctttgactgctttttttccttttggacactct

SEQ ID NO: 447276 - DNA, 627 bp, Homo sapiens
aaggctgagtagtaaatggatatgtattgtgaatggaatgctttttgctaaaagaatccctgtagagaaaagcaaaaaaaggagaatgtcaaacttgattcagaccaactaagatcctgtgagccctctgttcaactttacaatatctgctaatgtcccttcttttccagagtagctgtcaactccaccttaagatcaccctgaggaatgctyggttcccctaagacaggcctggggagtgcctaggtcctttacaccttacctaggtccttcctaagacctcagctcctctgcttcctcaggtctacatagctgcctattccttgctaactccttgctgcctgtttttctctgtaacaccttcagactggccctttaaattaccatttctttctttctatggctggactttttagcattaattcatgacaagctcactgtaggcaggaggctggccctttacttcccatccctcagctctctcttttctatgctggtctccatggatttctcccccgctgcttgtgtttgggcataatctattgccaaactttggtaagaagcactgacttccctgaagcaacctcgctaaaaggacccctacggtgtgtccggtcataggaacaa

SEQ ID NO: 447277 - DNA, 592 bp, Homo sapiens
tcagatcctaaaaaacaactaacaaaggctgttgccactgaaaatgactctgcctcccccaacagcagagctgcaacacacttgcacatgaactgaagacaggctctccttgcctgctactgtcactgacatttcaatccaaacaagttgcatgggaatcaccccacattgtccaccatagcatgtgtccatgcatagaattggaaaacctaaggacaggcctgcttggcctgtaacaactgatctccccgcaacagcttgagcatacttcctgatatggtttggctgtgtccctgcccaaatttcttcttaaattgtagttttcataatccccacatgtggtgggagggatgcagcaggaggcaataaaatcataatggcagttattctcatgctattctcataatagtgagttctcacgatgrtttaataaggggcttccccttttgctcagttctcattctcctctctcctgctgctttgtgagcaaagatgtgtttgcttccccttctgccataatggtaggtttcctgaggcctttcagcactgcagaaatgtgagtcaaataaacctctttcctttataaattacc

SEQ ID NO: 447278 - DNA, 618 bp, Homo sapiens
acatcctcctgcagagaactcactcatttgtggtgtgatgatatcagaatttctggactgatattcagatgtatacagcttctttacatgtatgagcttctttattttcttgtgytgaagatctcattctagctgattgaaggtggagtttaaaatgtgactaaaattgtcttggttcctttaagttttgaacattctctttttgataaactcaaaatcacatgatctgaaagaccaaaacagataaccctttgtcaactaagatggaccctaaggttgagaaaacaaggttcctataggtcgagggttcagggcccagctggcaaggcaaatttctacattcttagggttttaaattccctaacaataggaattatcagacccgtcctaactctgacttacaacccaggtcactacaattctaactggacagaggaccagccttagaaacattcttttctgataagcaattgcagactttaaaccagtttcagcagcgtatagaggctgtgcacaaatgatctttgtgtcataaagaattccaccctattttaagcaaaaccctgctccaaagtaaacataggatatatgttacatgcatgtttactcactgtgcct

SEQ ID NO: 447279 - DNA, 636 bp, Homo sapiens
ttccccttgccttaatccctctggatatacttaatgatcctcaaagcccttacagcctagatttgcaaatcctctacacattcctgaataaactcagtaactttagggaatctctgtgttacttargttgacaatggatatattttaccacaataatacaatttttaaaaaggattcaggaaatatgaaaatggttcaattcttcccaaaatcacttttccaacttaattccaggtttgtgaaatttttgttttcatgatttatttccttgaggtaaaaaaaacacctaccttgctcttttttaattaaacacatttggagacaattacagattcacatgtagctgtgagaaataatatggagagacctcatgtacacattacccaatttccccataaaaacaacttggaaaaccattgtacaatactatcacccactacactaaaattgatagtcaaaatacagaacattttcatcacacgaggatacttcattcacctttttatttccatagccatttccctcttggtcctgccctctccttaaccccggcagccaccgatctcttctccatctctataattttgtcatttcaagaatactatataagtagaatcatatagtatggaaactttt

SEQ ID NO: 447280 - DNA, 618 bp, Homo sapiens
acatcctcctgcagagaactcactcatttgtggtgtgatgatatcagaatttctggactgatattcagatgtatacagcttctttacatgtatgagcttctttattttcttgtgctgaagatctcattctagctgattgaaggtggagtttaaaatgtgactaaaattgtcttggttcctttaagttttgaacattctctttttgataaactcaaaatcacatgatctgaaagaccaaaacagataaccctttgtcaactaagatggaccctaaggttgagaaaacaaggttcctataggtcragggttcagggcccagctggcaaggcaaatttctacattcttagggttttaaattccctaacaataggaattatcagacccgtcctaactctgacttacaacccaggtcactacaattctaactggacagaggaccagccttagaaacattcttttctgataagcaattgcagactttaaaccagtttcagcagcgtatagaggctgtgcacaaatgatctttgtgtcataaagaattccaccctattttaagcaaaaccctgctccaaagtaaacataggatatatgttacatgcatgtttactcactgtgcct

SEQ ID NO: 447281 - DNA, 581 bp, Homo sapiens
acatttaagttcataatccattttgaattaattttttataaggtgagatacatatcatttcgttttttgcatatggatatccagcttctctagcaccatttataaaaaaggctgtctttcctccattgaattgcttttgcatctttgtcaaaaatcagttgggcatatttgtgtgattatatttctgggttttctattctgttccattagctatttatctatccctccaccaatgacacacactttttttttttttttttttttgagtcaggttctcactctgtcacccagactggagtgcagtggtgcaatctcagctcactgcaacctctgcctcctgggctcaaggaatcctcccacctcggactcccaggtagctrggaccataagcatgtgccaccactccaagctaatttttgtaatttttttagagatggggtctcactgtgttggccaggctggtctcaatatcctggacttaagcaatccagccgccttggcctcccaaagtcctgggattacaggcatgagccactgcacccagccaacacacagtcttgattactacatataataactat

SEQ ID NO: 447282 - DNA, 553 bp, Homo sapiens
gcacatgaatgggaaaggcatctcagacacagacattacagatatccttatcaccttcccagtattggaaaaactagtctttcccaagtaaggtcattctaattcttctttctkaattgacaaaattttctatgagtgtaggattccaaatccaaaatccgggtaggttatctagccctgtttagacttagctctacaaaaactcaaaagcgaataaggcctgtccatcatctgatagcagatattaatgaaggagctaattatattacaatctgtgatcacatgaattaacgtgccaagtgaaggcaaaattttgggagactgaatagccatggccacagaccagtgtgaaaggcatttttaaaaaagacctcaaggactgtggtgtggagtggttattaccaacagcattagatttataaatggaaaggccaaaataaatatctcaattcaaggcacatgctgaaaacttgagaagacttgttaagagtgtacttcaaaagtaatatgtgtcctcacagggtggtggtgaagattaaaagagatagctgtg

SEQ ID NO: 447283 - DNA, 566 bp, Homo sapiens
tgtagtggcagtaaagtaccatagcattgggcattggagccaatttggggatgaatcagtcasttgaggaattctccagctagaagtaagcacagggatctgtattctgactgtaagaaaaagaatcaccaaacctggttctttgagcatggcacgtgggtcacagcatttcccaactccagtggcaggtgcatgatcacaaacatttctttggacagcccagtgcaacagtgtcaacagtctcttagatttgctggcaggaacagcagcatgttggcacacttccgcacccctttttatctagaagatgtggtcaaatttgccagtatccagagggcacttttgagggctaacttacacagcactatgagaacaatgaggactgaccacctggaatctggggcttattataggaataagaatctgaggatcaaaaaaagacattctcagcatagcattagagattaaaatatgccacccccaaacctgccactttggcataaggattattttgagctgaaaatatttaagattcaataaatgcagtaaaaagtcttcctatggct

SEQ ID NO: 447284 - DNA, 534 bp, Homo sapiens
tcctatgcagtgttgtgtatgatatcttgattcaggcaagcatatggttaaatcactgttctatcacttacagaaaataaaacaaatcaggtcgtaaataaggaaggattttattccaaaggattattgaattagggggagacatattattgcaactgcgggacagcaactactgcagtagggagaaggctcccaccgtgagatctgcaagtgcctgaaaggttagkcagaaaagggcttttcctgtatacggaggaataaacaaagatagaaagaaacaggatgaatggatagaggtggcagctgtcatgatctgacaggtaatcggagaggttttacccagagtagcacagtctcaggaggggccaggaagaggggctgtatgctggctcaggttaagggtaaatcaaagttcagggatgttgggaaagaaataaagattgaataaagtttgttcaagtcatagtaacaggtattttagtctacacttgtcagttggtacagtttagctagctagtcatttatggggcaaag

SEQ ID NO: 447285 - DNA, 534 bp, Homo sapiens
tcctatgcagtgttgtgtatgatatcttgattcaggcaagcatatggttaaatcactgttctatcacttacagaaaataaaacaaatcaggtcgtaaataaggaaggattttattccaaaggattattgaattagggggagacatattattgcaactgcgggacagcaactactgcagtagggagaaggctcccaccgtgagatctgcaagtgcctgaaaggttagtcagaaaagggcttttcctgyatacggaggaataaacaaagatagaaagaaacaggatgaatggatagaggtggcagctgtcatgatctgacaggtaatcggagaggttttacccagagtagcacagtctcaggaggggccaggaagaggggctgtatgctggctcaggttaagggtaaatcaaagttcagggatgttgggaaagaaataaagattgaataaagtttgttcaagtcatagtaacaggtattttagtctacacttgtcagttggtacagtttagctagctagtcatttatggggcaaag

SEQ ID NO: 447286 - DNA, 518 bp, Homo sapiens
gaattcaggttgattctgtctctgccatygcgaatagtgctgcaatgaacataagcatgcacgtatctttatagcggaacaatctacattcctttgggcatatacccagtagtgatattgctaggctgaatgatgattctgttttaatttttttagagaaatcaccaaactgttttccacaatcactcaactaattttcattcccatcaacagtatataagcattcccttttctctgcatccttgccagcatctgttgttttttttactttttaataatagccatttttactggtgcaagatggtatcacatcgtggttttgatttgcacttctctaatgatcagtgatgttgagcattttgtcatatgcttattggctgtgtgtatgtcttcttttgaaaagtgttcatgtactttgctcactttttaacggggtcgtttgttttttgcttatagattctggatcaaaccttagatagatgcatagtttgcaaatattttctctcattctttaggtt

SEQ ID NO: 447287 - DNA, 608 bp, Homo sapiens
ctgggaaagactttatctctatttcatatctgaaggataaatttgcttggtaaagtatgctcrgatggcagttttagttttctttgaggagtttgaaaatgtcattccactccctcctggcctgtatggttaccattgagaggcctattctcagagttcttggagttattttatatgttatttgcttcttttgctgcttttaaatttttctctttgtccttgacctttgagagtttgattactataagctttggggtcatcttacttggatcaaattgtttggtgttctttgaccttcttgtccctggatattttatcctcttcaaattttggaaagttttctcttattatttccttggataaaatttctatcccctgctcctgctcagcccctgccttagggttctttaaagggacagaactaataggatatatgtatatatgcaaaggagtttattaggataattgacacacatgaatcaaggtgaagtcccaagataggctgtctgcaagctgaggagcaaggaagccagtccagtcctaaagtctcaaaagttgggaagccaacaaagcagccttcagtctgtggccaaaggcctgagagcccc

SEQ ID NO: 447288 - DNA, 586 bp, Homo sapiens
ttattagcaaaaacaatcttacttgctactgcttttactttttacattgagctttggggtcggacaaatttggattttaatccttaagatccgtgtatctcagtttctccacctgttgaatggggataataatggctccctcagagttattggaaggatcagatgggtaaatgcatttgtcagcagcatagcacagacacagtaaacactcaataagtgacagttaygattgcgtggtccccactattatcctataaagtaattttacaataatcagcctacactataaaaaccattgaagcaggtagagcagacattgttaattagttaagtgggcaattattagatttaataaatattaatcaggacctactatttacaaggcaggagtagacactgcaatagttaaagacaatggatcttccaggggctggagaaaaagggagatggagaatgattgcttaatggatatgagttacctgtgggatgatgataaagttccggaaccagctagtggtgaagattgcacaacattgtgaatgtacttaacaccattgtacagtttagtactaaacgttatgttttg

SEQ ID NO: 447289 - DNA, 586 bp, Homo sapiens
ttattagcaaaaacaatcttacttgctactgcttttactttttacattgagctttggggtcggacaaatttggattttaatccttaagatccgtgtatctcagtttctccacctgttgaatggggataataatggctccctcagagttattggaaggatcagatgggtaaatgcatttgtcagcagcatagcacagacacagtaaacactcaataagtgacagttatgattgcgtggtccccactattatcctataaagtaattttacaataatcagcctacactataaaaaccattgaagcaggyagagcagacattgttaattagttaagtgggcaattattagatttaataaatattaatcaggacctactatttacaaggcaggagtagacactgcaatagttaaagacaatggatcttccaggggctggagaaaaagggagatggagaatgattgcttaatggatatgagttacctgtgggatgatgataaagttccggaaccagctagtggtgaagattgcacaacattgtgaatgtacttaacaccattgtacagtttagtactaaacgttatgttttg

SEQ ID NO: 447290 - DNA, 623 bp, Homo sapiens
aacacattataccaaaattctgtttatatgaacatgctgtaataagtgattagatgaaattacgttaaacttcttgggtaaattgtaaggtggtaatttattttcctatttttccattggtttctggtcgtgagtaccaacaggcagaaacaggttgccttaattttttacagtgctatatacatttggtatttaataatgttacttgttcaaggttactaataaagcttaagcttttttccaatttagagtgaaatttattattcacggagcactcagaatcaactgagtaacataaatttttacttacaggttgctagaataggtagtgagaatataaactgcactgtgtacattccaaggtgctgtcattaatagagatttttgtaatacaggttttgagtatcccttatgggaaatgcttgggaccagaagtgtttgggactttggattttctttttttttggattttggaatatttgtatatacataatgagatatcttgggratggcacctaaatataaacatgaaattcagttatatttcatgtacattttatgcacagagcctaaaggtaattttatacaatattttaaataattttgcgagtgaaacaaactgt

SEQ ID NO: 447291 - DNA, 600 bp, Homo sapiens
ctgatttacaccatagtgcccccacctccgattctcatgcaggtcaggattatatctaaaaagtgccataacaatggataactatatggtatcttcttacaggtaaatcttattaccttatagtgtcacacacatcaaacatttttagacaataatgtagacacagataattgcaaagtccataaatgcagggagacagacacacacacacacacacacacacacacacacacggtatttgttggagaatcaagggaaaaaccatatctctaaatggtagggagtgaagtctttctggggcatgtgatacaggatgagtagaagttagacaggtgaaggcaaggggaaagtcattctaggtagaggaaggcagcctaggcaaagcatgcaggtaagacacagcatgacagggaaaaacaggtaatgaggagctaatgaagttgaggagaaattttatttagacatatggaagaaattccaaatgaytggttgtccagttgtggcactttctagctttagaagcagtgatcatctcacacctggacataaccaagtagtcatccttcattaagcagaaggccttgttattgagccatgctg

SEQ ID NO: 447292 - DNA, 591 bp, Homo sapiens
tttattctcagaacagggttggacggcttaggagcagaaasgcagaatgtatctttgcggatttgggtcatagtgggctgtcaggatttaaattgtgcacattgattaataatgggctggtttgtacattccttgcaagtcatctttaaaagccaatgacgtcatttcaaattagattctcagagataaaatctctctgtatacactgaaaataattttggaactatccttaatgccacttaaagcctgaaattgaccagtaacttaatttgatagaatataaggcgaacacctcaactatattaaattgtcccatttgggtggacactcctcgggcaccctgttccgccctacacacagataatctgggggcgctcgcgcacagctgtcatcgtagcagcagaggccactgtcaatacaggttgcctgactgatcgtctgaccaaaccgggctaacccgagggcggtaaataagctctggccatgaagcaatgactccgcaggattgcgcagggcagtcacgggcgttcactccattttctgttcgttgtgctgaggcctttccaccattaacttaccccaactcccccg

SEQ ID NO: 447293 - DNA, 569 bp, Homo sapiens
gacttctttcatgcaagacttcctgttaattgtaatataatattaatctctatgagaagaagtacaatatgcagtatttccctgcattaatcacagagtcatttttttttgttaatcatgtgtatgtcattgcacacacggcttagcttcacttttgtcactagcatattgttatccattgttatattttgttgtgatatatgcctattaaattaacatagtaagaataaaagactcttttcattattatatttaaaccaagtctgaaactcaagattctaaatacacacagaggccaggtgtcatttatctgatttttcaatatttgctagactttgtttaggatatcrcaaatattataactgggaaataaaatcctgaaatgctattttcactaccccattctttattcaatttgtactaaatattatcactcaatatgagaacaatttaagcctacagtattttaaacatcctttaagtgctgataagaattttaagtattttgaaccccttaagatgtagatatttatctttagacttagacctaaataaacatattaaaaaca

SEQ ID NO: 447294 - DNA, 591 bp, Homo sapiens
tttattctcagaacagggttggacggcttaggagcagaaaggcagaatgtatctttgcggatttgggtcatagtgggctgtcaggatttaaattgtgcacattgattaataatgggctggtttgtacattccttgcaagtcatctttaaaagccaatgacgtcatttcaaattagattctcagagataaaatctctctgtatacactgaaaataattttggaactatccttaatgccacttaaagcctgaaattgaccagtaacttaatttgatagaatataaggcgaacacctcaactatattaaattgtcccatttgggtggacactcctcgggcaccctgttccgccctacacacagataatctgggggcgctcgcgcacagctgtcatcgtagcagcagaggccactgtcaatacaggtygcctgactgatcgtctgaccaaaccgggctaacccgagggcggtaaataagctctggccatgaagcaatgactccgcaggattgcgcagggcagtcacgggcgttcactccattttctgttcgttgtgctgaggcctttccaccattaacttaccccaactcccccg

SEQ ID NO: 447295 - DNA, 549 bp, Homo sapiens
  misc_feature (1)...(549): n = A,T,C or G
ttaaaaaagattttacatttaacacaaagagccaaagttatgaaggtaaaagaacatgctgaacaattcaggagagacacactcctatggtgtgccatttcattatttatgtgacattgtgtctcagtatgtcatgcatatagaatagccacaaaatcttgcgcatgttggtcatctcttgggggaggatgtgggtctcaacagtaacttacttggctgttggccacatctgagattggattaagaaattaggactccagctacagaggtttcttttagtgcaggctgagctaactggtgatagttgggaggttagggtggggaacacccctttccttcccatccctctacaaagggatgcaggttgagctctttacactctggkactcaggttcctgggcctttcactttatgttactagaagaacccctatttttgcattcatgggcagggcttctgattatgttcaactctggactttttatagctttgtagcgcccaattaaaaattctatctataatgattgtcattaaannnnnnnnnnnnnn

SEQ ID NO: 447296 - DNA, 579 bp, Homo sapiens
gcacctggcacataaaaagcactatataattattagcacagatcatactgttttttggttgttgttgttttttgtttctttgtttgtttttgtttttgagatggggactttctctgccacccaggctggaatgtagtggcrtgatctcggctcactgccacctctgcctcttgggctcaagagattctcctgccttagcctcccaagtagctgggaccacaggcgtgcaccaccacgcccagctaatttttgtatttttagtaaaggcaagattttgtcatgttggcccggctggtcacaaactcctgacctcaggtgatccatctgccttggcctcccaaagtgctgggattataggcatgagccaccataccccagccatacccttggtattttcttaggttcatgtgaagcaccagagcactggcctaggagtcaggatacctggttctagacctggctctcctgccaacttgaactgtgaccatgagctagtcactttccttctctgagctagacaatcaagtcagaactagctagccactaagattgtagttggagaggagaagcagttggctg

SEQ ID NO: 447297 - DNA, 579 bp, Homo sapiens
gcacctggcacataaaaagcactatataattattagcacagatcatactgttttttggttgttgttgttttttgtttctttgtttgtttttgtttttgagatggggactttctctgccacccaggctggaatgtagtggcatgatctcggctcactgccacctctgcctcttgggctcaagagattctcctgccttagcctcccaagtagctgggaccacaggcgtgcaccaccacgcccagctaatttttgtatttttagtaaaggcaagattttgtcatgttggcccggctggtcacaaactcctgacctcaggtgatccatctgccttggcctcccaaagtgctgggattataggcatgagccaccrtaccccagccatacccttggtattttcttaggttcatgtgaagcaccagagcactggcctaggagtcaggatacctggttctagacctggctctcctgccaacttgaactgtgaccatgagctagtcactttccttctctgagctagacaatcaagtcagaactagctagccactaagattgtagttggagaggagaagcagttggctg

SEQ ID NO: 447298 - DNA, 555 bp, Homo sapiens
aattgcttgaagccaggagttttagaccagcctgggcaacacagcaaaactctatgcctacaaaaaatttttaaattagctgggtatgagggtatgtaatccagctactcaggaggctgaggaaggaggatcccttgagcccaggactttgaggcttcaatgagctaagattgtaccactgcactacagcctgggcaacagagaagaccctgtcccaaaaaataataataraataaaaatggcactagcctatgcaaaagcacaggtgtgggacgttgcatgtcccattcagaagcctgccagtgatttgatgtgagctgaagtccatagggacttagtgttagtggaggaaggcagggtcctctggggccaggagcatgactccatctcaggtacagtgagaacccagtgagggcaattatactaggaagcatcatgattaaataagaaaaatccatctaaatacatagtaagaactgtccaaccagttctgttctttgatgggtgagttctttggggggaaatattgccaaaggaaataatccaaaagaaaaa

SEQ ID NO: 447299 - DNA, 614 bp, Homo sapiens
tttatctattcaccagctaatggtgaatttaactttatttccagttttggtcattataaataatgctgctatgaacatacatatgagtttttgggtggmcatatgctttcctttcccttaagtagatacttaggagtggaagttctagattgtagggtaagtatatatttaacattttaagaaactgccaaatcgttgggaacatgtatttccgctcataacagcccacttacaaacatgctttcagaagccaccccacttaagcatacagcatagtggttacaagtacagattctggagtcagaccctctgggctcaaattgtgcttatattactgaaggctacatgcccttgggcaaaagactgtgcctcagtttcctcatctgtaaaaggggataagacatggggttgttgtgatgattgactgagctcattcatggcagggcacttaaaacactgctggttcatagtgctatgaagtcttggcaattgttttttatagccagttgggcagtggtcctatggaaggaacagcaccagcccagaagttcacagacgtgagagggctattatggatctacccagttacagtcatgcggccttgaggaagtcac

SEQ ID NO: 447300 - DNA, 614 bp, Homo sapiens
tttatctattcaccagctaatggtgaatttaactttatttccagttttggtcattataaataatgctgctatgaacatacatatgagtttttgggtggccatatgctttcctttcccttaagtagatacttaggagtggaagtkctagattgtagggtaagtatatatttaacattttaagaaactgccaaatcgttgggaacatgtatttccgctcataacagcccacttacaaacatgctttcagaagccaccccacttaagcatacagcatagtggttacaagtacagattctggagtcagaccctctgggctcaaattgtgcttatattactgaaggctacatgcccttgggcaaaagactgtgcctcagtttcctcatctgtaaaaggggataagacatggggttgttgtgatgattgactgagctcattcatggcagggcacttaaaacactgctggttcatagtgctatgaagtcttggcaattgttttttatagccagttgggcagtggtcctatggaaggaacagcaccagcccagaagttcacagacgtgagagggctattatggatctacccagttacagtcatgcggccttgaggaagtcac

SEQ ID NO: 447301 - DNA, 558 bp, Homo sapiens
ctgctatttctatggaataatcgagggatcctacaaggccctgtcttacccacaaatggggcagagaaatatctgcttaaatgggcacagaacaccaaaacagggttcaggacaaagtgccctagtttgcagtgattttaagcaaactggtttcttcttctgagcctcagttttctcatctgacaaactaaaaaatgaataactctcatgtttattagaagtccctattaagataatgaggtactttgtaaacaaacaagaaaaccctgtatcaatgaaagaagttatcactatctctcctcctgcatgctycaagggtcacacaagcataaagaaaactgaggttcagggaaggcaaagaacccacccaaagtgacatagccagtaagggagagagcaggcttaagtcaacagtcttctgttgatgtcaggaatgaaaactgcctccaggccctgtagcgaccaatgcatgcagaaggcaatgggaaccatatttatttttaccttgaggttcactatgggaaggctgtatctctctgctttcctcacaatggtgga

SEQ ID NO: 447302 - DNA, 554 bp, Homo sapiens
taaggcctcattactgcagatgcagagagaagaatatgacctacctggcttatccctccaggagagatcttgtatgactgcaacttttgcttcagcagctctggatcactgtgacggaatgggcaccctgacaacaaaaaaataagccagcacacaaacaaggttatttacccacaacttagtacaataccacactcgagagaccatctaagctccccttaattgtctaacagcttattaataaaaaaaggtaattgcccatgggtgcaactgctttcctcttttcatctaaatgattacttagctgtatggttatcagggcactccaggctcaagagttacataaaacattgcagcattctcaggctaagatgtccatycaacaggaagagggaaaacagctttaattatgctccttgctaacaagcacaaataatcacaaaatagctatgtaatagtttattttaaaactttaacaatcttcttatattctagtctaaaaattatataaaaggcatatgagagaaggaagatagataaacaaaatgaaaaac

SEQ ID NO: 447303 - DNA, 389 bp, Homo sapiens
tcaactggagtctgatgtgcaaagtgcagaaggaagtccagggtgcctttcagttttctagcctgttggaatgagtggataatgattgtgctcactggaatggggagtaaggggaaggaagtgcagatttgggcatggcagggaagataaagaattratgcatgttgaattccagtctcgatttagacattcctgaggaggatatccatgaggcatgtggatgagtagatctgcagctttaggtgaaaattcatgaagataaatatttggtgttcatccatgtatagctggcagttaaaaccatgaaaatgaaggagatgtcctgggatagtatagagactggagattaaggagagaagagaaccaaggacagaatctggaatcaccac

SEQ ID NO: 447304 - DNA, 389 bp, Homo sapiens
tcaactggagtctgatgtgcaaagtgcagaaggaagtccagggtgcctttcagttttctagcctgttggaatgagtggataatgattgtgctcactggaatggggagtaaggggaaggaagtgcagatttgggcatggcagggaagataaagaattgatgcatgttgaattccagtctcgattkagacattcctgaggaggatatccatgaggcatgtggatgagtagatctgcagctttaggtgaaaattcatgaagataaatatttggtgttcatccatgtatagctggcagttaaaaccatgaaaatgaaggagatgtcctgggatagtatagagactggagattaaggagagaagagaaccaaggacagaatctggaatcaccac

SEQ ID NO: 447305 - DNA, 389 bp, Homo sapiens
tcaactggagtctgatgtgcaaagtgcagaaggaagtccagggtgcctttcagttttctagcctgttggaatgagtggataatgattgtgctcactggaatggggagtaaggggaaggaagtgcagatttgggcatggcagggaagataaagaattgatgcatgttgaattccagtctcgatttagacattcctgaggaggatatccatgaggcatgtggatgagtagatctgcagctttaggwgaaaattcatgaagataaatatttggtgttcatccatgtatagctggcagttaaaaccatgaaaatgaaggagatgtcctgggatagtatagagactggagattaaggagagaagagaaccaaggacagaatctggaatcaccac

SEQ ID NO: 447306 - DNA, 389 bp, Homo sapiens
tcaactggagtctgatgtgcaaagtgcagaaggaagtccagggtgcctttcagttttctagcctgttggaatgagtggataatgattgtgctcactggaatggggagtaaggggaaggaagtgcagatttgggcatggcagggaagataaagaattgatgcatgttgaattccagtctcgatttagacattcctgaggaggatatccatgaggcatgtggatgagtagatctgcagctttaggtgaaaattcatraagataaatatttggtgttcatccatgtatagctggcagttaaaaccatgaaaatgaaggagatgtcctgggatagtatagagactggagattaaggagagaagagaaccaaggacagaatctggaatcaccac

SEQ ID NO: 447307 - DNA, 545 bp, Homo sapiens
atttccttggctgtgtagacgttttttagtttgatgtaatgccatttgtctaactgtgcttttgttacctgtgcctttggagtctgtaaaaaaaaatcatcaccaagaccaatgtcatgaagattttgyctatgatttcttgtagttttataatttctgggtttacattcaattccttaatctattttgagttgatttttccctgagctatatattttttaaataattttatattttattttagattcgggggtatatgtgcaggtttgttacctgggtatattgtgtgatgctgaggtttggggtatgaatgatcttttcacccagatactgagaatagtacccaatagatagtttttcagcccttgacaactccttccatctctccactagaaatcccccatgtctattgttgccatctttatatccataattaccaagtgtttagctcccatttataagtgacaatatgtggtatttggttttctgttcctgtgttaattcacttaggataatggcctccagctgcatccacattgctgcac

SEQ ID NO: 447308 - DNA, 579 bp, Homo sapiens
gtttacattcaattccttaatctattttgagttgatttttccctgagctatatattttttaaataattttatattttattttagattcgggggtatatgtgcaggtttgttacctgggtatattgtgtgatgctgaggtttggggtatgaatgatcttttcacccagatactgagaatagtacccaatagatagtttttcagcccttgacaactccttccatctctccactagaaatcccccatgtctattgttgccatctttatatccataattaccaagtgtttagctcccatttataagtgacaatatgtggtatttggttttctgttcctgtgttaattcacttaggataatggcctccagctgcatccacattgctgcamagaacatgatttcattttttatggctgcatggtattccatggtatatatgtatgacatttttttttttgtccaatccactgtggatgggcatctaggttgattccatgaacataagagtatgtgtgtctttttggtagaatgatttattttcttttggatataaacctgggtggaatggtagttgtttttagtt

SEQ ID NO: 447309 - DNA, 567 bp, Homo sapiens
tggacctgtgggaagagggctagatacactgacagcttgtaccctrcacctggaaaagacacaggcactaaatgccacccctgaaagcagcctcagggactgtaccctgtagagcctcaggtggagctgcccaaggccttgggagcctacccttcacaccagtgtgccctgagtgtgagacatagagtcgaaagagattattttggagctttaagatttaataactgccctgctgggtttcagatttgcatagtgcctgtagccctttcttctccccagtttctcccatctggaaagggagtatttacccaatgcctgtacccccattgtatccatgaagtaactaatttgtttttgattttacaggctcataggtggaagggactagccttgtattagatgaggctttggactttggacttttgagttaatgctggaatgagttaaggctttggggtagcttttggaaggcattattgtattttgaaatgtgagaaggacatgggatattggaggggctagggatggaataatatggtttgggtctgtgtctccacccaaatcaca

SEQ ID NO: 447310 - DNA, 466 bp, Homo sapiens
gatgctttccacatttctggctgtggaggcacctacctggctccagaacaaacacctcattctttggcctgagactataatgcctgtatggccatgctgccaggttgccaaagaatggttaactttgtgtgtactcagattaaaaatggcatcttgggccaggtgtggtggattatgcctgtaaccccagcactttgggaggccgagtgggggcagatcagttgtgaactaaagtttgagacaagactggctaacatggtgaaaccctgtctctacgaaaaaatacaagaattagccaggcgtggtggtgggcacctgtagtcccagttactcaggaggctgaggcaggagaatcacttgaacctgggaggtagaggttgcagtgagccaagatcacaccattgtactccagcccrggcatcagagcaagactaaatcttattaaaaaaaaaaaaaaaaacaaatg

SEQ ID NO: 447311 - DNA, 562 bp, Homo sapiens
cccaccccaggactgtgaccagcgagaaccgaaggccagcaccttctgctgagatgctttccacatttctggctgtggaggcacctacctggctccagaacaaacacctcattctttggcctgagactataatgcctgtatggccatgctgccaggttgccaaagaatggttaactttgtgtgtactcagattaaaaatggcatcttgggccaggtgtggtggattatgcctgtaaccccagcactttgggaggccgagtgggggcagatcagttgtgaactaaagtttgagacaagactggctaacatggtgaaaccctgtctctacgaaaaaatacaagaattagccaggcgtggtggtgggcacctgtagtcccagttactcaggaggctgaggcaggagaatcacttgaacctgggaggtagaggttgcagtgagccaagatcacaccattgtactccagcccaggcatcagagcaagactaaatcttattaaaaaaaaaaaaaaaamcaaatgacattttgctcttagtcacagatacaggaaaatgcctgcagctt

SEQ ID NO: 447312 - DNA, 513 bp, Homo sapiens
ttgctaccagcactcatttaattttacataagtaccctctttgaggctgaagtaaatstgactaattttcaatgtgaaaatgaaatacaaaaacttttcttggagttatttctaaacagaactaacatcagaatcttctgaatcatcagaatcatctattttagaaaaatctgattcatcaaataaaaactgaaaatgacactaacatcatgtgtagtaatgctatcttttctaggattaggtattttcagcaattgagaattaccatattttgtaaatggaaaatcactgctaaaataggatgatgtcttttgtttccaaagttgatatagtagagtaatgcaaaaataacaataaaagcaagatatgtcatggcagttatttctggataaactctgcagctgcaagtgccactggcaaattttcttgaggcagatggggaaaggattaaaaaattagcttttatcttccttgatcttttctattgtttttctagtctctattttatttatt

SEQ ID NO: 447313 - DNA, 513 bp, Homo sapiens
ttgctaccagcactcatttaattttacataagtaccctctttgaggctgaagtaaatgtgactaattttcaatgtgaaaatgaaatacaaaaacttttcttggagttatttctaaacagaactaacatcagaatcttctgaatcatcagaatcatctattttagaaaaatctgattcatcaaataaaaactgaaaatgacactaacatcatgtgtagtaatgctatsttttctaggattaggtattttcagcaattgagaattaccatattttgtaaatggaaaatcactgctaaaataggatgatgtcttttgtttccaaagttgatatagtagagtaatgcaaaaataacaataaaagcaagatatgtcatggcagttatttctggataaactctgcagctgcaagtgccactggcaaattttcttgaggcagatggggaaaggattaaaaaattagcttttatcttccttgatcttttctattgtttttctagtctctattttatttatt

SEQ ID NO: 447314 - DNA, 513 bp, Homo sapiens
ttgctaccagcactcatttaattttacataagtaccctctttgaggctgaagtaaatgtgactaattttcaatgtgaaaatgaaatacaaaaacttttcttggagttatttctaaacagaactaacatcagaatcttctgaatcatcagaatcatctattttagaaaaatctgattcatcaaataaaaactgaaaatgacactaacatcatgtgtagtaatgctatcttttctaggattaggtattttcagcaattgagaattaccatattttgtaaatggaaaatcactgctaaaataggatgatgtcttttgtttccaaagttgatatagtasagtaatgcaaaaataacaataaaagcaagatatgtcatggcagttatttctggataaactctgcagctgcaagtgccactggcaaattttcttgaggcagatggggaaaggattaaaaaattagcttttatcttccttgatcttttctattgtttttctagtctctattttatttatt

SEQ ID NO: 447315 - DNA, 513 bp, Homo sapiens
ttgctaccagcactcatttaattttacataagtaccctctttgaggctgaagtaaatgtgactaattttcaatgtgaaaatgaaatacaaaaacttttcttggagttatttctaaacagaactaacatcagaatcttctgaatcatcagaatcatctattttagaaaaatctgattcatcaaataaaaactgaaaatgacactaacatcatgtgtagtaatgctatcttttctaggattaggtattttcagcaattgagaattaccatattttgtaaatggaaaatcactgctaaaataggatgatgtcttttgtttccaaagttgatatagtagagtaatgcaaaaataacaataaaagcaagatatgtcatggcagttatttctggataaactctgcagctgcaagtgccactggcaaattttcttgaggcagatggggaaaggattaaaaaattagcttttatcttcmttgatcttttctattgtttttctagtctctattttatttatt

SEQ ID NO: 447316 - DNA, 549 bp, Homo sapiens
acagcctaatgcatcttctgtattccatacrtacttctccttaccttcattatgaagtagtagactgatttcatcttgatagtctgggtcagtcacctcagcaaacactgtaactctcctcttagcctgttgacttaaaggtaggaggagcccaaggtggctatcttaacttccggtttaattgaattgttgttgtgcctcctggtggcagtgttccttcctctggaactaagacctctaggccagcagaacgtaatgtcgtggaacaggaagcaaaaattttgctagtggatcactaggggtgatggtaagtggtgccacttccactttcaccccgtgattcccagacccataaatcctggctatgggagaaacagtatcatatattggactctgattcagagcatacacagcctttgggagaactttgtcccagccctgcaaagtattgtcacctagttggcattgtaattgtgacttcaaaaggccattccaccattctattaatccagctgcttcagagtgatagggaacatggaaggaccagtg

SEQ ID NO: 447317 - DNA, 549 bp, Homo sapiens
acagcctaatgcatcttctgtattccatacatacttctccttaccttcattatgaagtagtagactgatttcatcttgatagtctgggtcagtcacctcagcaaacactgtaactctcctcttagcctgttgacttaaaggtaggaggagcccaaggtggctatcttaacttccggtttaatkgaattgttgttgtgcctcctggtggcagtgttccttcctctggaactaagacctctaggccagcagaacgtaatgtcgtggaacaggaagcaaaaattttgctagtggatcactaggggtgatggtaagtggtgccacttccactttcaccccgtgattcccagacccataaatcctggctatgggagaaacagtatcatatattggactctgattcagagcatacacagcctttgggagaactttgtcccagccctgcaaagtattgtcacctagttggcattgtaattgtgacttcaaaaggccattccaccattctattaatccagctgcttcagagtgatagggaacatggaaggaccagtg

SEQ ID NO: 447318 - DNA, 603 bp, Homo sapiens
aggttatgtaactaatcagtaaatatatagtcctttttattagtttgttttttacttggaatttgtgaggaaatttatgctcctatttcttcccactacgtaggaaagtttaatataatgcttttactttagagccgtctttcttttagatagatattacaaaatgttcactctatgtggaaatcctactgataaattcttggttttaaaagattttccacaaaatccaatttgtaatattttattattataaatcatatatgatagatgstataaaaatagttgaacttctatttaagttagtatagatatcttaaccgattttttctatgtcttctacctcaacacagttcatcttatggagtatacactatttttaatttgccctcttttgaataaaggcagtgttaagatccttcctcattttaagttgtttttaagaatcatattttataatctcaaaaactatcaaacaacaaatatgtaaggactgaactgattgcatattaagccagtaagtcataaaaacgttcattaatgcttacatttgaagaaaatatggttttagtcaataaggaacaacgtaatgtggttttcatttgt

SEQ ID NO: 447319 - DNA, 527 bp, Homo sapiens
acacacctgtagtctcagctatttgggaggctgagatgggattgagcccaggagttcaaggttacagtgagccatgagcatgccacttcactctagctgggagatagagtgacaccctgtgtcttaaagaaaaaaaaaaaagttttgggctttgaggtgatacaaagatataagatcagtgcctctcaaactttttatgtttgtcatacattttttgaatatttgaatttttgatagcatgcttaaagtatctaagttgaatccatggaagttattattgcagaaatcacytgggtcacccttcagaactgtgtcatcatccaagcagaactgttgactgccctgacttcagtgtttacctattctagtgaattcttgcagtctttttttggctttaccttgtacttcttatctgcagctagttatgcctttctcaaaattgtatctaagggcctactcaggtcaagttccatctgattgatttcacaataaccatctttcctcattttcagcaaagataaatttac

SEQ ID NO: 447320 - DNA, 392 bp, Homo sapiens
ggctttaccttgtacttcttatctgcagctagttatgcctttctcaaaattgtatctaagggcctactcaggtcaagttccatctgattgatttcacaataaccatctttcctcattttcagcaaagataaatttacttgctgatttaaaataattgaagaattggtttagaatagtacataggatacttgacgggatagatcctagacaacatagatrtaggtatttaacatcgctaaggtggtactggcatacctagaagatattgcaggttttgttccagaccaccgcaataaaatttaaataaaggaagtcacacaatttgctttcccagtgcatataaaactcatatgtatactacactgcagtctattaagtgtgcaatagcatta

SEQ ID NO: 447321 - DNA, 392 bp, Homo sapiens
ggctttaccttgtacttcttatctgcagctagttatgcctttctcaaaattgtatctaagggcctactcaggtcaagttccatctgattgatttcacaataaccatctttcctcattttcagcaaagataaatttacttgctgatttaaaataattgaagaattggtttagaatagtacataggatacttgacgggatagatcctagacaacatagatataggtatttaacatcgctaaggtggtactggcatacctagaagatattgcaggttttgttccagaccaccrcaataaaatttaaataaaggaagtcacacaatttgctttcccagtgcatataaaactcatatgtatactacactgcagtctattaagtgtgcaatagcatta

SEQ ID NO: 447322 - DNA, 392 bp, Homo sapiens
agtctattaagtgtgcaatagcattatatctacaaaaacaatgtagacacctttatttaaaaatacattttttgttactaaaaatggtaatgatcatttgagcctttggtgagttgtaatctttttgctggtggaggttcttgccttgatgttgatggctgctgactgatcaaggtggtagttgctgaagattggagtggctcttacaatttcttaaaataagacagccatgaagtttgctgcattgattgacttttcctttcatraaagatttctttgtggcatgcagtgctgtttgatagcattttacctgtaacagaacttctttcagtatcgcagtctatcctctcaaccctgatgctgtttataagttaagcgtatgtaataatcta

SEQ ID NO: 447323 - DNA, 392 bp, Homo sapiens
agtctattaagtgtgcaatagcattatatctacaaaaacaatgtagacacctttatttaaaaatacattttttgttactaaaaatggtaatgatcatttgagcctttggtgagttgtaatctttttgctggtggaggttcttgccttgatgttgatggctgctgactgatcaaggtggtagttgctgaagattggagtggctcttacaatttcttaaaataagacagccatgaagtttgctgcattgattgacttttcctttcatgaaagatttctttgtggcatgcagtgctgtttgatagcattttacctgtaacagaacttctttcagtatygcagtctatcctctcaaccctgatgctgtttataagttaagcgtatgtaataatcta

SEQ ID NO: 447324 - DNA, 619 bp, Homo sapiens
tgggtattatattcttcttagatagtttagcactccaggaaacaccttagttctttattttacactcaggtgatctcatcctttcttatggcttcacatagatctatatgccaataactcctaagggcatattttcagcctaaccacctccctgagctctagacccagatatccaagtgcctacttatgatctacagatgatctatgttctagattatacaaacatcgtaatacttaggtggtatctcagacttaaagtgcttaaaactaagctgttggtataccattctgccccaaaccaactcctcctatcgtctttccaatctcagataatggcaatctcattgttttagttgctcargttaaaaaccttgatgtatatagtcttttactcctttctctcataccgatgctctcagcaaattcttctggctcaaccttgaaagtatatcattatccagtttgtactgccacaatattggtccacaccatcaccatctcttatctaattattgcaatagcttcctaattcctcttccagcttctgtctcagaagatttgatcagtgtaattataagcagagagtacaagggccactgtttgggccaatttttttcaa

SEQ ID NO: 447325 - DNA, 528 bp, Homo sapiens
agtgaaatctgcctgtaactataattctgcattatgttttcatagttgacatcttaaaatgtgaacgaaggtatgtatatgcatttggtttgattttagactgtttgtttgttcacaggcatttcttctctgatttgttatacaatattatgaaaagctttttgctatatatttcytgagctgtcaaaaagtatctgactttttgagtatgactgaaaaaaatacttcaaaaggacaattgtgttcaataaatatatagtccatattatttaaaaatttgcccagtatttgaaaatgctttgtatttgaccacataaatcagagtgggtatgcccagtccaattttctaggtggataggtaggaaaatatgtttttccatgaccagtaatgtcatttattatgtcacccaaatccaatgaataacttggttttgttttactgtaaagatcctaaaccttcttttattggtcttttcccctcattgtttatgtgagattacatcacctaatctgaggtaggaagagctg

SEQ ID NO: 447326 - DNA, 234 bp, Homo sapiens
ccaccacaccctgccactttgcttaactttattagttattcttgcccattattttcttgtggatgtgaamatgaattgtatgtgcatcagaaaccatatttttagttcgttaactcatggcagctgctgagccatggtgagatctttaagaaaggtaatagaaacacttgtctaagaaaatggtaggaatctaagttaactgatgtgaaagagctgtgtatacatctctttatt

SEQ ID NO: 447327 - DNA, 234 bp, Homo sapiens
ccaccacaccctgccactttgcttaactttattagttattcttgcccattattttcttgtggatgtgaaaatgaattgtatgtgcatcagaarccatatttttagttcgttaactcatggcagctgctgagccatggtgagatctttaagaaaggtaatagaaacacttgtctaagaaaatggtaggaatctaagttaactgatgtgaaagagctgtgtatacatctctttatt

SEQ ID NO: 447328 - DNA, 410 bp, Homo sapiens
tctcttccgtcatggacattttctcagatatttctatagggtttgatatgctgcttctttgtattaaataatatttatgtggtgtttatgtaggtaaatggtttaatgttgcaaattgcaagaaaaaaaaacactaagacatctkaaaattcccctcttatctgttttaggtatctttgaactatataataaaacatctatgcctattgaagttaaatgacctgttacaaaatcatcttttttatacttcatattgggtagcatagcagtatattgtaatttgtataattttataagacttgctggatgtcataataaacacaaataactttatttaaatatatagtaatttgcctttttgacagaaaaccatgtttaccccaaaactgcatattttaagcaaattaaaa

SEQ ID NO: 447329 - DNA, 410 bp, Homo sapiens
tctcttccgtcatggacattttctcagatatttctatagggtttgatatgctgcttctttgtattaaataatatttatgtggtgtttatgtaggtaaatggtttaatgttgcaaattgcaagaaaaaaaaacactaagacatctgaaaattcccctcttatctgttttaggtatctttgaactatataataaaacatctatgcctattgaagttaaatgacctgttacaaaatcatcttttttatacttcatattgggtagcatagcagtataytgtaatttgtataattttataagacttgctggatgtcataataaacacaaataactttatttaaatatatagtaatttgcctttttgacagaaaaccatgtttaccccaaaactgcatattttaagcaaattaaaa

SEQ ID NO: 447330 - DNA, 410 bp, Homo sapiens
tctcttccgtcatggacattttctcagatatttctatagggtttgatatgctgcttctttgtattaaataatatttatgtggtgtttatgtaggtaaatggtttaatgttgcaaattgcaagaaaaaaaaacactaagacatctgaaaattcccctcttatctgttttaggtatctttgaactatataataaaacatctatgcctattgaagttaaatgacctgttacaaaatcatcttttttatacttcatattgggtagcatagcagtatattgtaatttgtatarttttataagacttgctggatgtcataataaacacaaataactttatttaaatatatagtaatttgcctttttgacagaaaaccatgtttaccccaaaactgcatattttaagcaaattaaaa

SEQ ID NO: 447331 - DNA, 560 bp, Homo sapiens
  misc_feature (1)...(560): n = A,T,C or G
nnnncctggtatataaatttttttttttttttgagacggagtgtcactctgtcgcccaagctggagtgcagaggcacgattcttggctcactgcaacctacacctctgggttcaagcgattctcctgcctcagcctcccgagtagctgggattacaggcgcccaccaccacgtctagcaaatatttgtgtttctagaagagatggggtttcaccatattggccagactggtctcaaactcctgacctgaggtgatccacccgcctcagcctcccaaagtgctggatttacagrcatgagccactgcgcccggccacaaactttttatttgtgagaaaagtttagattaatggaaaggttactaaaacagtccaaagagttccatatactcttcaccgagcttctcctaatattagcaactttgcacaaatattattcaactatcagaatcgaccaattaacattggtacaatactgcaactagagactttattcacattttaccagtnttctcactaatgtccttctgctattccaagatccagttcaagactccacatt

SEQ ID NO: 447332 - DNA, 560 bp, Homo sapiens
  misc_feature (1)...(560): n = A,T,C or G
nnnncctggtatataaatttttttttttttttgagacggagtgtcactctgtcgcccaagctggagtgcagaggcacgattcttggctcactgcaacctacacctctgggttcaagcgattctcctgcctcagcctcccgagtagctgggattacaggcgcccaccaccacgtctagcaaatatttgtgtttctagaagagatggggtttcaccatattggccagactggtctcaaactcctgacctgaggtgatccacccgcctcagcctcccaaagtgctggatttacaggcatgagccactgcrcccggccacaaactttttatttgtgagaaaagtttagattaatggaaaggttactaaaacagtccaaagagttccatatactcttcaccgagcttctcctaatattagcaactttgcacaaatattattcaactatcagaatcgaccaattaacattggtacaatactgcaactagagactttattcacattttaccagtnttctcactaatgtccttctgctattccaagatccagttcaagactccacatt

SEQ ID NO: 447333 - DNA, 560 bp, Homo sapiens
  misc_feature (1)...(560): n = A,T,C or G
nnnncctggtatataaatttttttttttttttgagacggagtgtcactctgtcgcccaagctggagtgcagaggcacgattcttggctcactgcaacctacacctctgggttcaagcgattctcctgcctcagcctcccgagtagctgggattacaggcgcccaccaccacgtctagcaaatatttgtgtttctagaagagatggggtttcaccatattggccagactggtctcaaactcctgacctgaggtgatccacccgcctcagcctcccaaagtgctggatttacaggcatgagccactgcgcccggccayaaactttttatttgtgagaaaagtttagattaatggaaaggttactaaaacagtccaaagagttccatatactcttcaccgagcttctcctaatattagcaactttgcacaaatattattcaactatcagaatcgaccaattaacattggtacaatactgcaactagagactttattcacattttaccagtnttctcactaatgtccttctgctattccaagatccagttcaagactccacatt

SEQ ID NO: 447334 - DNA, 419 bp, Homo sapiens
atcaagttagattttaaaaattctatcaaaatagtcaatacttgaaaatattcactgttgagtaaagtgrccagataatgagttctaaaaaaacaactatgaaagcaaaaaaaaaaaaaaagggaggtggggacggaaaataaatctgggaaaataagtaaatagggtgaaactaatctagtaaaagtgaaataaatttgcatttaattcctcaaaacatttttaaaaatcataattcttgtttctgtgaagaaaaggcagcttctctctagattagctctgatcagctaattgtgcagtctctgaatgcagtattggatgatgttttcagttttcttgtttctgtggagtgaaaagaccatttattcaagctgagccaactatctgggactagcaaattctacatcactcggcgtact

SEQ ID NO: 447335 - DNA, 419 bp, Homo sapiens
atcaagttagattttaaaaattctatcaaaatagtcaatacttgaaaatattcactgttgagtaaagtggccagataatgarttctaaaaaaacaactatgaaagcaaaaaaaaaaaaaaagggaggtggggacggaaaataaatctgggaaaataagtaaatagggtgaaactaatctagtaaaagtgaaataaatttgcatttaattcctcaaaacatttttaaaaatcataattcttgtttctgtgaagaaaaggcagcttctctctagattagctctgatcagctaattgtgcagtctctgaatgcagtattggatgatgttttcagttttcttgtttctgtggagtgaaaagaccatttattcaagctgagccaactatctgggactagcaaattctacatcactcggcgtact

SEQ ID NO: 447336 - DNA, 419 bp, Homo sapiens
atcaagttagattttaaaaattctatcaaaatagtcaatacttgaaaatattcactgttgagtaaagtggccagataatgagttctaraaaaacaactatgaaagcaaaaaaaaaaaaaaagggaggtggggacggaaaataaatctgggaaaataagtaaatagggtgaaactaatctagtaaaagtgaaataaatttgcatttaattcctcaaaacatttttaaaaatcataattcttgtttctgtgaagaaaaggcagcttctctctagattagctctgatcagctaattgtgcagtctctgaatgcagtattggatgatgttttcagttttcttgtttctgtggagtgaaaagaccatttattcaagctgagccaactatctgggactagcaaattctacatcactcggcgtact

SEQ ID NO: 447337 - DNA, 419 bp, Homo sapiens
atcaagttagattttaaaaattctatcaaaatagtcaatacttgaaaatattcactgttgagtaaagtggccagataatgagttctaaaaaaacaactatgaaagcaaaaaaaaaaaaaaagggaggtggggacrgaaaataaatctgggaaaataagtaaatagggtgaaactaatctagtaaaagtgaaataaatttgcatttaattcctcaaaacatttttaaaaatcataattcttgtttctgtgaagaaaaggcagcttctctctagattagctctgatcagctaattgtgcagtctctgaatgcagtattggatgatgttttcagttttcttgtttctgtggagtgaaaagaccatttattcaagctgagccaactatctgggactagcaaattctacatcactcggcgtact

SEQ ID NO: 447338 - DNA, 274 bp, Homo sapiens
gttaatagtaggcatacctgtctgaacagatagctgatgaaaattatctcccgtagaactccccctgaccatttcctccaggttgaactgttgaaggcctctatttaaatagtatgytaagttatagtatttaggggcaggaacttacttgctaaatctttttttggcactgaaagttaacagagaaatatgtcataagattagctttcagtcctctggtggggatgaccctatgaacatacagtccaaaaaagattcctaacagttcagccaa

SEQ ID NO: 447339 - DNA, 494 bp, Homo sapiens
ggattacatacgtgagccaccatgcctggcccctccaagaccttatttatgagagtcttccaagcaatttatttggaaaaaccagataaatacaaatgtacagacagagaaagaagggaatttcatgttaaagggacaactctttaaagggccttaaagtgtagtccatcctgtaggtggtaggaacctgaactgtaccagtgtaattgtggcaagaggggagtctggagacatagattttttagcctaattactaaagatagattgaattagtaggccagtaggaactggtcttgttgggtaggtaggtgccaaccaggatcctgtcagccaggatagggtcaattgrtaactggaatttagtcaaatatgtgtagtttcacaactttgaatatttactaaaataatataatgaatgttggatgctatgcaggtttactgaaaagcagaaaatagtatgagtaaagtttccacttggttcaaattaatttcac

SEQ ID NO: 447340 - DNA, 610 bp, Homo sapiens
tacttatgataactaatcttcataggacctgcttctaatgattttggtatcctaaattctgggcactggtgagtaataatgaggtcactttgtagtttagcagactctcactttgtttcttttaatatggaaattagagttccaagttcttgaaggtaagaaacacctggcactaaaaagaaggttaaaatgtcctcctgaagaaatgttgtatctggctgttattaaaaagccaaaaattaatggatgatggcgagattgtggagaaaagggaatccttacacactgctggygagaatgcaaatcagttcagcccctgaggaaatccccagtttggagatttctcaaactaaaatagaattaccattccacccaggaatcccattactaggtatatactcaaaggaaaataaattgttctaccaaaaagacacctgcacttttatgtttatcacagcactattcacaatagcaaagatatgaaatcaacccaggtacccatcaaaggtgaattagataaagaaaatatggtacatatacacgaaggaatactacacagccataaaaagaacaaaatcatgtcctttgcagcagcatggatgcagctgga

SEQ ID NO: 447341 - DNA, 600 bp, Homo sapiens
ttttatgctgtatctgtataaaccattaatgtggaaaatacatatctaaatagtacacttgattgcttcatgcaccaaccattagattactagatttctatctacagttttcggagagatgttgcaatatgatgttctgacaataactgtcaaagtcatcataccaggatccattttcatcttgttgttgaggtaaagttattaaaatgtacagttggtaggycagaaagatcactatctcttgtcatctgtggtttaatgctgacctaaaccactactgtataatgtcagaattatcacagtgtccaggctgcagaagtacaacatgctacatgatttattgcatttcctgtctggaatgaagattatgaaaaggccaacaactgtgagctacagtggtttagaagaaaacttaatttctaatttttatttctctttttcctcattcattttagattttggatttagtaaaggggacacattaccaggtagcctgtcaaaaatactttgagatgatacacaatgtaagtatttttttaactttatatcctaattatttgtcttttgttactgtgtcacattcagggtttttagttgcag

SEQ ID NO: 447342 - DNA, 600 bp, Homo sapiens
ttttatgctgtatctgtataaaccattaatgtggaaaatacatatctaaatagtacacttgattgcttcatgcaccaaccattagattactagatttctatctacagttttcggagagatgttgcaatatgatgttctgacaataactgtcaaagtcatcataccaggatccattttcatcttgttgttgaggtaaagttattaaaatgtacagttggtaggccagaaagatcactrtctcttgtcatctgtggtttaatgctgacctaaaccactactgtataatgtcagaattatcacagtgtccaggctgcagaagtacaacatgctacatgatttattgcatttcctgtctggaatgaagattatgaaaaggccaacaactgtgagctacagtggtttagaagaaaacttaatttctaatttttatttctctttttcctcattcattttagattttggatttagtaaaggggacacattaccaggtagcctgtcaaaaatactttgagatgatacacaatgtaagtatttttttaactttatatcctaattatttgtcttttgttactgtgtcacattcagggtttttagttgcag

SEQ ID NO: 447343 - DNA, 600 bp, Homo sapiens
ttttatgctgtatctgtataaaccattaatgtggaaaatacatatctaaatagtacacttgattgcttcatgcaccaaccattagattactagatttctatctacagttttcggagagatgttgcaatatgatgttctgacaataactgtcaaagtcatcataccaggatccattttcatcttgttgttgaggtaaagttattaaaatgtacagttggtaggccagaaagatcactatctcttgtcatctgtggtttaatgctgacctaaaccactactgtataatgtcagaattatcacagtgtccaggctgcagaagtacaacatgctacatgatttattgcatttcctgtctggaatgaagattatgaaaaggccaacaaytgtgagctacagtggtttagaagaaaacttaatttctaatttttatttctctttttcctcattcattttagattttggatttagtaaaggggacacattaccaggtagcctgtcaaaaatactttgagatgatacacaatgtaagtatttttttaactttatatcctaattatttgtcttttgttactgtgtcacattcagggtttttagttgcag

SEQ ID NO: 447344 - DNA, 558 bp, Homo sapiens
tgcaaatgacaggtatgactgttgatccaatagaactctattgataaaattaggtagtagacccagtttgacccacgggccttgatttgccaacctctagactagatctagaatctttgccacagctgcctagaagaaccaaggcttttgccatcttccatgcagaaaatctgatccttgtacttgtggctgccacctgatctaactgtaatccacttcccaagtctcatacttatctgcatggcaaaacctagattgcwtgtggacccctaactgtacacgagtcagggaaatgtgtttggtttttatcttgccagcttccttagtacaaaaaagcctgcttgattattagagtaagagtggaaagacccagtctggcacagaatggattttgaagtgtgtaaagccaatgtcacaaactcagaggcctacagagattgggcatatagcccaaaaaagtgaagctgcctgagattagtaccacagagtatggcagaattatggtgcactaaacatgtttgccctattagaggcattcacattgacaaattgtgaggc

SEQ ID NO: 447345 - DNA, 567 bp, Homo sapiens
aaactctatttaaagtatgaataccatgaaaatattcttttacttggcacttggatattaaatctcttcggcgactagctttgttaagtattacattgaactggataattcttctaataaattcaaagcatgtgtcctgtcagattgctcatagtgttgttattctgaattgctttaagctggttttattggatattaagtacaacattgataatgcacattttctgtagctgtggtttctgtccttgatgacagcatgcttaaggtctattatatgttgttataattgggtcaaggaacatttagcactgtttaaaaagcgtatcttttcttccagaatctagctttcgtcaagacttagaacaaacttgtgttgttaaaaattgactactgaaggattaaatatttggctgrtgggatgtgagtatatgaaacatttattgttaggattttttatttcagggaccactagatctcagcatcagcatcatttgggaatttgttagaaacgtggagtctcagaatcaagttctggggtcagggcccacaatttgtggtttaacaaat

SEQ ID NO: 447346 - DNA, 450 bp, Homo sapiens
cactgctaataaatatataatgggtttttcaatttaaccttgcatttctaggtattcattcaccacactgaaactatgargctttttaaggttttgtttagttttgtactgaaagcacagggaaaaataaattcaacaaatactgcatttaatttaagactgaccatcttgtgaacatttccccgattactcccacacatttttttaggagatcttaccttctatttgagtcatgggataccaaggtcttcattgctgattaaaaatgacatagtgatacctacttctcttttccctttcattatcaagaattaaactgtgatttaaacaatgctctatcacccttaactcttggttgtccatagagttcctgcctggttctcttcttacttcatgagtctgcctgagtgaactcattcacccctatggtatttttttccatccatatgc

SEQ ID NO: 447347 - DNA, 450 bp, Homo sapiens
cactgctaataaatatataatgggtttttcaatttaaccttgcatttctaggtattcattcaccacactgaaactatgaggctttttaargttttgtttagttttgtactgaaagcacagggaaaaataaattcaacaaatactgcatttaatttaagactgaccatcttgtgaacatttccccgattactcccacacatttttttaggagatcttaccttctatttgagtcatgggataccaaggtcttcattgctgattaaaaatgacatagtgatacctacttctcttttccctttcattatcaagaattaaactgtgatttaaacaatgctctatcacccttaactcttggttgtccatagagttcctgcctggttctcttcttacttcatgagtctgcctgagtgaactcattcacccctatggtatttttttccatccatatgc

SEQ ID NO: 447348 - DNA, 632 bp, Homo sapiens
tgcttgctcttaaaaaggaagaactgaggcaacttgagctttggaatatagaaatgtcagtgggtttacatatgactcccagtgaaagtgatacctgtggggtacctagtctccaagcacttaaaaaagtagttttaggtagatcaaatcaggtgccaccatggcacttctggaagtggataagaacggtaatcatctgcattttccctaaaaatgactctgagaggcctggcatggtggctcacacctgtcaccatcacttcaggaggtcaaggtgggaagatcacgtgaggccaagagcctgagactagcctgggcaacacagtaagactgtctctacaaaaaataaactagccaggtatggtggcactcacttatagacccagctactcaggaggctgaggcaggaggatcgcttgtacctaggagttcgaggctgcagtgagctatatctagccactgtgctccaggctaggtgacagagtgagacyctgtctctaggggggaaaaaatagattaaattctctgagctggctcacaggttctctgatcaaatcaggcacggtgacttcttggtctgtgcacttccttcttcatcatggttttctcaccaagggccttaggaccagctc

SEQ ID NO: 447349 - DNA, 632 bp, Homo sapiens
tgcttgctcttaaaaaggaagaactgaggcaacttgagctttggaatatagaaatgtcagtgggtttacatatgactcccagtgaaagtgatacctgtggggtacctagtctccaagcacttaaaaaagtagttttaggtagatcaaatcaggtgccaccatggcacttctggaagtggataagaacggtaatcatctgcattttccctaaaaatgactctgagaggcctggcatggtggctcacacctgtcaccatcacttcaggaggtcaaggtgggaagatcacgtgaggccaagagcctgagactagcctgggcaacacagtaagactgtctctacaaaaaataaactagccaggtatggtggcactcacttatagacccagctactcaggaggctgaggcaggaggatcgcttgtacctaggagttcgaggctgcagtgagctatatctagccactgtgctccaggctaggtgacagagtgagactctgtctctaggggggaaaaaatagattaaattctctgagctggctcacaggttctctgatcaaatcaggcacggtgacttcttggyctgtgcacttccttcttcatcatggttttctcaccaagggccttaggaccagctc

SEQ ID NO: 447350 - DNA, 639 bp, Homo sapiens
gacctcttatcagccaataaggctcaaaaggaaaaataaagaaaaccagaactggggctgacattgggaaaataattatgctgctattgtgatattgcttatgaagtacaccctcaaaaataaatgacaaaatgcctaaaatacaattttcttggtatacattactcagtaagatgaagagtattttatacatgaagcagtgatatgaggatctgatgatgggcaaaacatttttattgcatgcttacagaagccaggttaagaaagtaagatgtataaatataattaaacatcatactcatagctacaatttgttgggagaaccagcatccttggcaccatcttcaacaccattcttcctytcctgcaaaccttgttgcttctaaaatcaaacatattcacaacatgaccatatcccactacctcattgttgtatcctgttcaaaaatgttatcacttcttgcccaaattattgtagtaacttttagctgatttaatccgtttctaaattgcttgaacacctaatgatggctcagcaaaaactaacattttaaaaggtattcatgaatagtaaggtacaccaaactgaaacagctgtttttctaagcctttgcaaagaagggggaaagctattgggtg

SEQ ID NO: 447351 - DNA, 594 bp, Homo sapiens
caactatgatgattaagggagctaatgtttgtataaatgcttaagtacaatagaaccataatttattgtaaaattacataataaagataatgaggtccctgaatgtgaaaagaaaaaaaagaaagaaagaaaaagtgagtagtagtgacatcaaacgaccagattttggaattcgtatttttaaactctatatatttttaaacgatttttggatattagccttttgctggagacagagtctcactctgtcacccaggctagagggcagtggtgcaatctcggctcactacaacctccacctcccgggttcaagtgattctcctgcctcagctctcaagtagccaggattagagatgcacaccataacacccagctaatttttgaatttttaatagagatggggttttgccatgttggccagactgttcttaaactcctggcctcaagcaacctaccagcctcggtctccaaaagtgctaggattagagktgtgagccaccatgcctggcctctctttatttttaactattctctatcagttgaataaagtccaccagtaagaatattacggattttaaaaataggctgagtgtg

SEQ ID NO: 447352 - DNA, 451 bp, Homo sapiens
tttacttaaccttctgggtaccttaagcttacttcttcaaaagaagctgggatgcctctgggagtatgctctataaaactgatcaagaaatagaactaagttagaayagttttatgactataggtagttaggtttgactttacaaaaatatcctaagtgacagtatcatatgtgactgaataaaattcttccataggtatcagtagtttttcatgtaatgaatacataataaatatagaaagatgtgtaactatatgaacagagtattaaattttaagaaaggatgttttccatttgaatgcaattttaatgaatataagttttaattaataggcttagctaacaatgacatatgttacttgactttcaaagtgatttttctttgaaccaccttgaacattaaatcttcaagcaaccatttatcttcagcctataagaaaggaaggatata

SEQ ID NO: 447353 - DNA, 451 bp, Homo sapiens
tttacttaaccttctgggtaccttaagcttacttcttcaaaagaagctgggatgcctctgggagtatgctctataaaactgatcaagaaatagaactaagttagaatagttttatgactataggtagttagrtttgactttacaaaaatatcctaagtgacagtatcatatgtgactgaataaaattcttccataggtatcagtagtttttcatgtaatgaatacataataaatatagaaagatgtgtaactatatgaacagagtattaaattttaagaaaggatgttttccatttgaatgcaattttaatgaatataagttttaattaataggcttagctaacaatgacatatgttacttgactttcaaagtgatttttctttgaaccaccttgaacattaaatcttcaagcaaccatttatcttcagcctataagaaaggaaggatata

SEQ ID NO: 447354 - DNA, 451 bp, Homo sapiens
tttacttaaccttctgggtaccttaagcttacttcttcaaaagaagctgggatgcctctgggagtatgctctataaaactgatcaagaaatagaactaagttagaatagttttatgactataggtagttaggtttgactttacaaaaatatcctaagtgacagtatcatatgtgactgaataaaattcttccataggtatcagtartttttcatgtaatgaatacataataaatatagaaagatgtgtaactatatgaacagagtattaaattttaagaaaggatgttttccatttgaatgcaattttaatgaatataagttttaattaataggcttagctaacaatgacatatgttacttgactttcaaagtgatttttctttgaaccaccttgaacattaaatcttcaagcaaccatttatcttcagcctataagaaaggaaggatata

SEQ ID NO: 447355 - DNA, 451 bp, Homo sapiens
tttacttaaccttctgggtaccttaagcttacttcttcaaaagaagctgggatgcctctgggagtatgctctataaaactgatcaagaaatagaactaagttagaatagttttatgactataggtagttaggtttgactttacaaaaatatcctaagtgacagtatcatatgtgactgaataaaattcttccataggtatcagtagtttttcatgtaatgaatacataataaatatagaaagatgtgtaactatatgaacagagtattaaattttaagaaaggatgttttccatttgaatgcaattttaatgaatataagttttaattaataggcttagctaacaatgacatatgttacttgaytttcaaagtgatttttctttgaaccaccttgaacattaaatcttcaagcaaccatttatcttcagcctataagaaaggaaggatata

SEQ ID NO: 447356 - DNA, 563 bp, Homo sapiens
tgtcatttcaaaatgtaatcaatataaaayattactgagatattttgtaatgcttttttttgatactattattactctgtgaaacttggtgtacattttactatagccagtggtatactggagctaacacaaactggctgtaatcccagctacttgggaggcttaggcaggaaaattgcttgaacccaggaggcagaggttgcagtgagctgagaccgtgccactgcactccagcctgggtgacagagtgagactccatctcaaaaaagaaagaaagaaaacaaaaatgtcaaccaagattcataaggaaaaagtaagacattcccagataaacaaatgctgagggagtctgttgttagtagacctgcccaacaagaaatgctagagtaaatccttcaggcagaaagaaaagatcactacaaagtaactcaaagccattcaaaaagaatgaacacgagctaaggtaactatataggtattaaaaatccagtattattgtgtttttgatttgtaactcttacttttttctcaaatgatttaaaagacgatgcataaaacagtaa

SEQ ID NO: 447357 - DNA, 545 bp, Homo sapiens
aaagtaactcaaagccattcaaaaagaatgaacacgagctaaggtaactatataggtattaaaaatccagtattattgtgtttttgatttgtaactcttacttttttctcaaatgatttaaaagacgatgcataaaacagtaattataagttaatgggcacacaatgtatgaagatgtaayttgtgacaacaatataagggggagggacagagctatacagaagtggagttttggtatataatagatgctaagttgatattaaaaattgttatacatataaaaggttacagtctccaggataacgactaagcaaataatgagaaaaaaatacatcaaaaaaaaaaagtgatgggaataaaaatggtactatggtactgtggtctgaatgtgtcccctccaaagttcaggtgctgcaaatctgctagtattaagaggtggaacctttaagacatgatgaggccatgagggctcattcctcattaatagaactaaggcccttataaagaaaaaaagcagcagcagcttcagatggcatttggctagc

SEQ ID NO: 447358 - DNA, 545 bp, Homo sapiens
aaagtaactcaaagccattcaaaaagaatgaacacgagctaaggtaactatataggtattaaaaatccagtattattgtgtttttgatttgtaactcttacttttttctcaaatgatttaaaagacgatgcataaaacagtaattataagttaatgggcacacaatgtatgaagatgtaacttgtgacaacaatataagggggagggacagagctatacagaagtggagttttkgtatataatagatgctaagttgatattaaaaattgttatacatataaaaggttacagtctccaggataacgactaagcaaataatgagaaaaaaatacatcaaaaaaaaaaagtgatgggaataaaaatggtactatggtactgtggtctgaatgtgtcccctccaaagttcaggtgctgcaaatctgctagtattaagaggtggaacctttaagacatgatgaggccatgagggctcattcctcattaatagaactaaggcccttataaagaaaaaaagcagcagcagcttcagatggcatttggctagc

SEQ ID NO: 447359 - DNA, 545 bp, Homo sapiens
aaagtaactcaaagccattcaaaaagaatgaacacgagctaaggtaactatataggtattaaaaatccagtattattgtgtttttgatttgtaactcttacttttttctcaaatgatttaaaagacgatgcataaaacagtaattataagttaatgggcacacaatgtatgaagatgtaacttgtgacaacaatataagggggagggacagagctatacagaagtggagttttggtatataatagatgctaagttgatattaaaaattgttatacatataaaaggttacagtcyccaggataacgactaagcaaataatgagaaaaaaatacatcaaaaaaaaaaagtgatgggaataaaaatggtactatggtactgtggtctgaatgtgtcccctccaaagttcaggtgctgcaaatctgctagtattaagaggtggaacctttaagacatgatgaggccatgagggctcattcctcattaatagaactaaggcccttataaagaaaaaaagcagcagcagcttcagatggcatttggctagc

SEQ ID NO: 447360 - DNA, 545 bp, Homo sapiens
aaagtaactcaaagccattcaaaaagaatgaacacgagctaaggtaactatataggtattaaaaatccagtattattgtgtttttgatttgtaactcttacttttttctcaaatgatttaaaagacgatgcataaaacagtaattataagttaatgggcacacaatgtatgaagatgtaacttgtgacaacaatataagggggagggacagagctatacagaagtggagttttggtatataatagatgctaagttgatattaaaaattgttatacatataaaaggttacagtctccaggataacsactaagcaaataatgagaaaaaaatacatcaaaaaaaaaaagtgatgggaataaaaatggtactatggtactgtggtctgaatgtgtcccctccaaagttcaggtgctgcaaatctgctagtattaagaggtggaacctttaagacatgatgaggccatgagggctcattcctcattaatagaactaaggcccttataaagaaaaaaagcagcagcagcttcagatggcatttggctagc

SEQ ID NO: 447361 - DNA, 601 bp, Homo sapiens
tttatcttgccagtataaacagtgatttaatattcttttaaacttggtgattttatttctttacagactaaattctgctatgttaaattcttgagctggtacataatttaactttaaatattttcatagatttctccagtattattcaattttcaatgatatatatagtacagtttgaaagtactattgactccctgggatcatatatttgtaataaagggttccatagtggtgagacttgggtaaatattttaaaattctaataatcctggatgaaaatatctaagaatttttaataaccgtggatgaaaaatatgttttaaatgaatgtgccagttagtagccaaaaaaaaaaaaatcaaaatttggtttcacactttcacattattcaggttattgggtattttaataacccattctctctttcttctaggcatttttttcttcatgcaatgagtatttattgtatacctactatgggtaagtcattgtaccaggttctgggggtagaaccccagggaatttgaatcccagcagggaagcagaaattaaggacaccattcacaatgaattaattscaactgagataaatgcatagcac

SEQ ID NO: 447362 - DNA, 586 bp, Homo sapiens
gatcaatattttgaattctttatctggtatttccaagatttcattttggtttagatttattgctaaagagttaatgtgatcttttgagggcattgcaaaactctgcttttcatattgccagaattatttttctgcttccttctcatctggatagaattgtttcttcttattatttttgaattgagttttgactgaactgggttttttttttctccttgaggatgtaactataatgtgtatagtttatgattccctagctttgggtctgggtaatttcagttgcaaagactctgtgtaagttccttggttatacagaattttgtctgatggctttcttaggtcgtgcttttagtagcaatgtagygggtgtgtgaatagggccactgtctcctgtggtgctggaatggcagaggtctcctgaagcttattttattcctcttgatgtgtacttttttccccagtattttttcagtgggttgaacaatttagtcttcagtttaattagaggtgttcatgggtaagaattggctgtggctaaggtaggtgggtatatgcaataccacaatggtgagcacacatcccagcc

SEQ ID NO: 447363 - DNA, 633 bp, Homo sapiens
ctctgttggtaagggttgtgaaatgtttgccttataggcagctatgggcttcctgcatagggaacatgaaggcctttaaaaggtttggtctgttgaaagaggttggcatttcagtcttgtggacttttgggaaaaaaatgttaaacataactgaagagcccttgtcaaattggaggtttttccattttaaaaactagagaaatagtatgtcttttgatttcactttggtccaagcagcgcctcatatttccactttccagtggtaactagcagaggtaagagaaaaacagccatgcgggtgagtcatcattcctcactccaggaaatggctcattttacaagcttttggaaggacctttgggaagttgtgagctgccaccatttttgaattgaaaatatacataygttgcaactctgatgtaaaaggcatatagttcctttttcctccacctcttggtttctccttctccttctcttcttgctcatataacctgtgtagttttccgcaggagctcccacttgatgggtaacaggagaaaacattttagtctgatctagttgaaaatgtagtctgatcagttttgcctttctagctgacagtcaatcaagtgggatacttgctgtggtgcagtg

SEQ ID NO: 447364 - DNA, 442 bp, Homo sapiens
caaactctttcctggaattttcatcactctgcttacattactcatctgttcttgcatattgtctactttgtacattagatcctttagcacagttgttttaaatctgtggtctgataattccaacattcctgcatacctgggtttggttttgaygctttctctgtctcttaaatcgtcttttttgcttttcagtatgccttgtaatttttgctaaaaggcaaacatgatagaagaagagatagggaagaattctgtagtcctagaggattaggtctcaagcttttaatgagcctgtgtccctgggctgtgagcttcacaagtgcttttcagtttgtttgtatatttcaccctgttagatgacacaggatggctagagctggctggagatcggtacttctcttcccctaggtcagttaggctctggtaaaatcccaccaagtta

SEQ ID NO: 447365 - DNA, 604 bp, Homo sapiens
aacataaatgtaactctaggtcattatcttaagtaaaacaagccaggcacagaaagataaatactgtatgttcttactgataagtgagagctaaataatgtgtacacagagacatacagtgtggaataatagacattaaaaatttggaagtgtggggtagtgccaggggkttgagagatgagaaactgcttgatggttacaatgtacattatttgagtgatagttacattaaaagccaagatttcaccactaccatccactgaaaaaaaaaactgcattttgtatgacttaaatttaagcaaataaaaacataaaataaaaattacttcgcttagttgtccttagataaaactttatcattatgagttgaactcagtgttatttttaacaataattaatttttacaataatttttatttttaataataataaatgagccttaaatatcaacagaaaaattcaaatgaattaaggaaacaaaggtagagagcaaatttgcaattcccattatcatagttttcaaaattttttaaatatgggtaattaaaattaattaattaaagtcagactttaagagtgtgaaatttggtattgcatttagcaa

SEQ ID NO: 447366 - DNA, 399 bp, Homo sapiens
acagcaggacattttctgcctgtcttcttgcagtgaccaggacacaagatgcttgaccaatgagagaggcccattcaaagccattgcacctctaaggaggggtgagctgccatcagccttttctcccaatctgcagaattttatgaccttttctctgctaagaacaaagttcattgcctcaattccaccacttgctgttggagctggtgggatgtagagtggggagtttcacattctgaccccactgctgacaccccctgtggcatctttgcagccscattccctcctctgggtgctatggtctgaatgtttgtaccctcccacacaaattcatatgttgaaatcctatcccccaaggtgatggtattaggtggggctttgagggaggccattagatca

SEQ ID NO: 447367 - DNA, 633 bp, Homo sapiens
tttgaattcttccccaacacagtacttcaagatatcaatcagagttgacgtatggttctaattctacttgccattcctggaatagatgatctcaaaaacctcttccacttctgatattcttagattctataaaatatcattcctgggagtagagaaaggaaattctagaaagatatgttgttgccagatattttaggaaggccttgaatgccagtctgagtgtcaacagttttggtatttcaagcagggccactattccatatgctcaaagcaacataacaaatgacagcctagtggcctcattttaatcggccagggcataagaggccgtgtttctattacaaggagatctataaggaatcacacccattaatggttcccattaaattcagggcatgtggggaaaaytgtagtttgatttagtttagcaacacgaagatattggcaagataatcacataaaagcagcatcttttatggctgggctatttgattttatgtcagcaggtttcaatttcccacatttttatgatggcatataggttaccccacctaatgtatgcattagcctgagtaaaggttaaatagattgtttcaacattcgggattaaaacctgataataataatacaaaa

SEQ ID NO: 447368 - DNA, 594 bp, Homo sapiens
gggcattgtggtaaatggaaaaatgtctaaaaacgcttcccattgttcacattcccaagtgaatgtacttattgccacagaacatacagttaaaaatggttgaaatggcaaattctatgttgtgtgtattttacagcagcaaaaayaagtgtctaccacataatattcatgcagtaagtgctcaatgaatggaagcagtggagatgataatgctggctctgcacgcactcacattcgtggtaggatactggtctgaaaaagcaagtggccaattctccttgcaactttctcatactcatcacatgcctcttacctctcccatcgtttagactatttggaaaagtagatactgtacttctctggatacaatgacctccaaagaaaagcagatacagccaagaatacagagtcattagcctctctcaatggatttgtttttaccacaaaactgagactgtagattcaaaagccaacgtgcacaaaaactaggcttcttgagagagggaaaatgactttttgacttccataaacatcactttactcctcaaaacctacaacatgaaggacccagaacatcaaattgaaagcataaat

SEQ ID NO: 447369 - DNA, 594 bp, Homo sapiens
gggcattgtggtaaatggaaaaatgtctaaaaacgcttcccattgttcacattcccaagtgaatgtacttattgccacagaacatacagttaaaaatggttgaaatggcaaattctatgttgtgtgtattttacagcagcaaaaataagtgtctaccacataatattcatgcagtaagtgctcaatgaatggaagcagtggagatgataatgctggctctgcacgcactcacattcgtggtaggatactggtctgaaaaagcaagtggccaattctccttgcaactttctcatactcatcacatgcctcttacctctcccatcgtttagactatttggaaaagtagatactgtacttctctggatacaatgacctccaaagaaaagcagatacagccaagaatacagagtcattagcctctctcaatggatttgtttttaccacaaaactgagactgtagattcaaaagccaacgtgcacaaaaactaggcttcttgagagagggaaaatgactttttgacttccataaacatcactttactcctcaaaacctamaacatgaaggacccagaacatcaaattgaaagcataaat

SEQ ID NO: 447370 - DNA, 466 bp, Homo sapiens
attaaacctgctacttaatatgtgtctacttttgtacattgtaatcacatatttattttgctggatttcttattgcttcacatcagaagatcaattacattgctaatggaagctttttaaaggcttgtatcagagccccacatgaaagacagagaagacacccttatggaatttccagctaggcattgaccctgctggctctctcagccccctcctcttgcttggacattgacaaatactgatggatgcttttttgcatcagctaatgtcaagggagtctcgttgtctagcgttctccagaggaagttttaacttgtggcttagtgcatttattatgycattttttttcttttcattctgtgtttctctctgagtttatgagagggggtagggagtgggggaggagaccagattggagccaggctgtccttatttgacttaccagtatttggaaggcatttaagtt

SEQ ID NO: 447371 - DNA, 592 bp, Homo sapiens
tgatttatttcccctgggccctgcttcactatttcctcttcctggaatgacctcctccttccttttatcctgcttggcccctactcattctctgtgagcaagcccagacatcgccttcttctggataccaaacaaggttaaggattcccctgtgtgcccacagtccccacctcagccatttgtcttacctgtgcacctttaagggtagtgagtgycagtgctcaggcaggtttgatgaatgaagaaatgaagggtaacagccaagagggctggattcagaatagatgtctctatcaaggagtgggttatggctagtggcttggaacgaaaaccacgatggcaatttgggctgcagctttgtttttatgggttgccagcacatatcacaggggctagcatgcagggtgagagatccaacttaatcctctagccactctgtgcaggaagggggctagaatttgtatccccatttgaaaataaagttttacgtgcctctctctacctatggctatccacttctttccacccctcctgaatctctgggctgctcctccctgaggagacgcacattttctatttctggacctcgctg

SEQ ID NO: 447372 - DNA, 592 bp, Homo sapiens
tgatttatttcccctgggccctgcttcactatttcctcttcctggaatgacctcctccttccttttatcctgcttggcccctactcattctctgtgagcaagcccagacatcgccttcttctggataccaaacaaggttaaggattcccctgtgtgcccacagtccccacctcagccatttgtcttacctgtgcacctttaagggtagtgagtgccagtgctcaggcaggtttgatgaatgaagaaatgaagggtaacagccaagagggctggattcagaatagatgtctctatcaaggagtgggttatggctagtggcttggaacgaaaaccacgatggcaatttgggctgcagctttgtttttatgggttgccagcacatatcacagggrctagcatgcagggtgagagatccaacttaatcctctagccactctgtgcaggaagggggctagaatttgtatccccatttgaaaataaagttttacgtgcctctctctacctatggctatccacttctttccacccctcctgaatctctgggctgctcctccctgaggagacgcacattttctatttctggacctcgctg

SEQ ID NO: 447373 - DNA, 503 bp, Homo sapiens
ctcatctgtatgagataaatagtcatgaataaacaataaatattagatttgaaagagctctttgagatcatcttgtctaacagctgccaaagtgtatgtcacaatgtatctaaagggtgtcaatggacatttctcagaaacagattgaagtcacatacatcttggtaggaataacttgaagttccacaggttttcttacctgaagggtgctgcacatctcttaggaatgggtatggatcacattctcatstgagcatacttagccatggtaaggatggctacttttatcaagaaatatctcatgggaccagtgctgagtgaaacatattgaatctagtctaatctgctcttccggataaggaaactggggaccagtgcaaaaaaagagatttgcccaaggtcacccaggtaagtgcatgctaagtcagaactagatgtctaatgttctggctctgctgccaggtatgttttccattaatgatgaagaacattccctcccaagt

SEQ ID NO: 447374 - DNA, 583 bp, Homo sapiens
tttaatatttaaagactcttaaatttgatgtactgtactgatagctgaagggtttagtcctgcagtgtgggagggtgagatggtgaatttctccctccatttccttgaggaggtttttattttactggccaggccccccatacactgatctattaaaatctatgctcacagaagtgtcaagratgttaatgtatactctatcaaattaattttaatgtaggcttgctgaatagctaattcccaagctatgttctaaattgttgcaaacagctccactccaaattagccagggtgctgcctcgatttcagcagataacatgtcagcaaagtatcatctgatacagattttaaatgaggggttttattttttctccatagagaatctaataaagaaaaagaaaaagtcagtcttaacccacttcctgatctcaacttatagggcactggctgaaataaaattactttgttcaaatccacattctgataattacttcagacagcaatgagggcttccatttcaaaaattagacttgacatttgacttaaatacagtcttctcttttaagcccaagtttctgtgcac

SEQ ID NO: 447375 - DNA, 588 bp, Homo sapiens
tataacatctcattcataaatgggactttttatgtgtgcggaatcatttggagtctatatcacagaaagaacatgagcttccacccatgtggttttcgcacatagtagtcacccaagaaatgttgactgaacctgttacttttaattcttaactaatattcaaggttttctgagtctaaacctacctctcgggtttaggtgagaattaagcagtgttagtaatgactgcagtggctgtcagctagtaggtgtgcaacaaatgccactggaatgaactgattggaaagggcggtggaggtggagccccagggaggccattgcatccgttattgggaagtttggggtggaacagactttgtgggaaaacataaatgcaaactgttcctggattttattagcctgttacccacgtctttgctcttgaaacactttgcaatcaaaagaatttggagtggactattttcagccctcarccttcatcccgtgctgcactaagaggaaaagctgattagggaagctctgcggtgtgcacataagtcagaatcaccaatatccatcctctgcagagttagaccgttaatttttccc

SEQ ID NO: 447376 - DNA, 607 bp, Homo sapiens
aaaaaatggatgtcctagatcaaatggagcaaattctcccatcctttgcctttttgtccaatttgggaccccaacagattagatgatatccacacacactggtgagaatgatcttctttactcagtctacaattcaaatgccaaccttttcagaaacaccctaacagacacagccagaaataatgttttaccaactatttgggcatctcttagcccagtcaatttggtacattaaaattaaccgtcacagtaaaattccccaaacttattcaaccaggtgttgtcttatagtatagtaagatgttgagctataygggctctgatgccctttattgtatctaacagtgggtgatccatgagtgtgatttgcccctgagcagccagatgacttacaagacatatcagagcttgcgattcacaggtgtgcagagtcagaggcccagaggaaaatgtgtaaagactactgttgttacccaacttgttccatgagaatttggaattagaggtctctaaggtcccattaaagcttacatttctataaatttatgaatctaagccctttggttttggaaagacactgcattttcaaatctgcacttgcaaactt

SEQ ID NO: 447377 - DNA, 593 bp, Homo sapiens
tggctacccattgagctcacgaaaaagctcccaggttaaaaggatgaattatgagagctttactatttggttcttgcttccttctcctgtatcrcctttcacaccttccatctctctgtctccattccagcaaacctgaacttcctttcattccgtccactcaacacagttgctcttcagtctggaactttgcatggactttggcctctgccttgccctctttttctaattgatccgcctaattcctgctcatcccgatgatgccaatttaccagtctactttgtgaagccctccctgcctctgccctcacactccatgtctcctgtaggtgtctgttttaagtacttccctctgcatagtagcagtaacaagcaccatgagggcaggggccttgtctgtttgttcattcctgtatcctaaatgtctagcatggggcctggtacgtttatggttaaggctttataaactgatttttttaatggaatgaatttggaatttgggaataataggctggaaggtttttctttgtaacattccttctggggccagatgaaagtgtgttaagtatgaggactattaatttgtgttactg

SEQ ID NO: 447378 - DNA, 604 bp, Homo sapiens
gactgcagtggctgtcagctagtaggtgtgcaacaaatgccactggaatgaactgattggaaagggcggtggaggtggagccccagggaggccattgcatccgttattgggaagtttggggtggaacagactttgtgggaaaacataaatgcaaactgttcctggattttattagcctgttacccacgtctttgctcttgaaacactttgcaatcaaaagaatttggagtggactattttcagccctcaaccttcatcccgtgctgcactaagaggaaaagctgattagggaagctctgcggtgtgcacataagtcagaatcaccaatatccatcctctgcagagttagaccgttaatttttccccagaaacattacaatcatgttttcaataccctagtgtcactctttttaggattcattatggcaaagaccctgaaatctatgcctccttttagctaacttaaaacttcctgaaaacttctttcaagacctggttcaaaacttctccttaamtaatacgccttctctaggtaacccttccttccctagaaagctccagtcaccttcctgctgcacagaacctccaatgtacacttgcagca

SEQ ID NO: 447379 - DNA, 566 bp, Homo sapiens
gtttaactcagtgactcacaacagggtggtcctgctctccccctctctgggggaatttgaacatgtggagatgctctgcaggaaaaatggctggagacactcggggcatcagcatctggtgggtggggtggaacagcctacaatgtgcagaatcgtcctgttggacaacgtatcttccctacacccctctcccagcaaatgacagccacattccatgcaagaaacaatggttgagcctaatcattgtatattacagtagttggaagctggggatgccaggtatttctaggctcccacccccttgtgtttcacccctggcctgtgcaatatttatagcttcactgaagaaaattcaaactggctcagaaatagttaatccaagctgagacagcagctatttygctcgtgagtctttattttcagtgacaaataggtaaaagtgacacgagttctcctggtctgtggaggctgcggcataaacgatgtctctgaagcccattcctgtgattactgagctggatatgagcgataggatattttgaggagataaaaatgtctgaccagct

SEQ ID NO: 447380 - DNA, 521 bp, Homo sapiens
ttgctctcccaccccaggcagaatgaacaccctctttgtataactctgttgtaccaatatcatagaacagcaaagaggttaggctgggtttgggtgtggctccgtccccttgggcaagtcacttaacttctctatgcctcagtgttctcatccatacaaagggggcactttaatttacaattttaattttaccttccttctatagttgttatgaggatgaarggaaatacttggtgtaaactgcctggaacatagtgaatgcacagtaagcaggagaggctgtttttattttccgtgttcatctcttctgccaggcagtgaacactttcaaggtagggaatgtgtcttttcccctttgtcctcaatgtttagtattatgccaacctagtacatggtagctgtctataaggattaaatgtaaatttggtttccacccagaagtgtatacctttcaactgctggtggagaggggagaaaagtcctgggctggtgtagaaagtctttcccaggggtaatcaaat

SEQ ID NO: 447381 - DNA, 521 bp, Homo sapiens
ttgctctcccaccccaggcagaatgaacaccctctttgtataactctgttgtaccaatatcatagaacagcaaagaggttaggctgggtttgggtgtggctccgtccccttgggcaagtcacttaacttctctatgcctcagtgttctcatccatacaaagggggcactttaatttacaattttaattttaccttccttctatagttgttatgaggatgaagggaaatacttggtgtaaactgcctggaacatagtgaatgcacagtaagcaggagaggctgtttttattttccgtgttcatctcttctgccaggcagtgaacactttcaaggtagggaatgtgtcttttcccctttgtcctcaatgtttagtattatgccaacctagtacatggtagctgtctataargattaaatgtaaatttggtttccacccagaagtgtatacctttcaactgctggtggagaggggagaaaagtcctgggctggtgtagaaagtctttcccaggggtaatcaaat

SEQ ID NO: 447382 - DNA, 585 bp, Homo sapiens
aagagctcttgtatttcaagaaggcttcatttctccttgcaagaaaagcctcgtttacagagctgtcttgttttctcttcagatttcatggctcacgttgagtggccaaattatttttcttatgtgtttccccccacactcctaatcctggaaagaattaattattaattttaaattaatttattattaattagtatagaaatacttttgagcacctatatgtaccaggtgctgtcctaggactgagatcatagcagtagatgagatggtcaagtctccttctctacttccaatatgcatattctaataggacacataagccccctactccccaccatgtgatgtccaatggtgaattagggactcagaaacaaagcargagggggattgtgttccattttcaacagggtagtaagggaaggactttatgaggaggtgctggttgagaaacttgtttgaagcaagagaatatgcatgtgggtatcagggagaaagtgttctaggatgaggctgcagcaaatgtgaagtctccaaagggtgacatgctggctcattagagagtctcaagaaggccagcaaagctgg

SEQ ID NO: 447383 - DNA, 580 bp, Homo sapiens
agtagagttaaaaacggttcaaagtcttctacctggaatactccaatatttaatagtaagggaaattagtaggaaccaggaaaggagactgacgatgggcaaccaggaatgaaggaaaaatatctggtcatcaaatatacttgtttcctagggctgcctgctgaaaataatggaagtttattctttcagagttctggtggctggaagtctgaaatcaagttgttggcagtgccagctccttctgaagcctctagggtaagatcctttcttccttcttccagctgctggtggttgctggtaatctttggtgttcctttgtttacggaagcataactccgatctctgcctctgtcttaacagatccttcttccmtatgtctgctctatgtgtctttaaatctgtctgtaaaagtacaccagtcattggatttagggtccatcctaatccagtgcaatctcaccttaactagactccatctgcaaagatactgtttccatatgagatcacattcacagatactggtgattaggacttaaaccgaacttttgtgggacacgatgaaacccacaataggaggtag

SEQ ID NO: 447384 - DNA, 574 bp, Homo sapiens
gatccccacaacaggcttgcaagktaagtatgtaagaatatagtttattatcccactttaaaggtaaggaggctgagcctcaaggaggcacagtgactccctcaggccctcacatagtctctaagtaatattcacaggtttaaacacaggtcttcagccttcaaatccagtggcctttctactacataaatacttatcttatcctagtctagtcatcgccatagatatgctcagagagttgggataagaccaagatagaggtgaagttagtcctgaagacatattaggttggtgcgaagttaattgtggttttgaccattacttttgaatggcaaaaattgcaattacttttgtactaacctacttttgcaccagccgaacaatttgggtgagatgtaatgggcatggttgggaagggggaaagcttagagatgaaaacatttcagtacctctccttctcttcacagccaacaattctttcctatataataataatatgacaataactaacatttttaggtgcttactataagccaggcagtgtgctaaatggcttccctggctgatataactt

SEQ ID NO: 447385 - DNA, 574 bp, Homo sapiens
gatccccacaacaggcttgcaagttaagtatgtaagaatatagtttattatcccactttaaaggtaaggaggctgagcctcaaggaggcacagtgactccctcaggccctcacatagtctctaagtaatattcacaggtttaaacacaggtcttcagccttcaaatccagtggcctttctactacataaatacttatcttatcctagtctagtcatcgccatagatatgctcagagagttgggataagaccaagatagaggtgaagttagtcctgaagacatattaggttggtgcgaagttaattgtggttttgaccatkacttttgaatggcaaaaattgcaattacttttgtactaacctacttttgcaccagccgaacaatttgggtgagatgtaatgggcatggttgggaagggggaaagcttagagatgaaaacatttcagtacctctccttctcttcacagccaacaattctttcctatataataataatatgacaataactaacatttttaggtgcttactataagccaggcagtgtgctaaatggcttccctggctgatataactt

SEQ ID NO: 447386 - DNA, 497 bp, Homo sapiens
aacaattcttttaaccttatgaagaacaaatggaaggtttctatggactgaatagggtctatgaccacgtgcttaagatgctggtcctccaaactctgagagccatgtcctctctgacatactggggttctatggtcaggtctggcttcagtctacattcatgtctttcttctttttggatcgtggttggcaaatgggagcccagcagagcagccaagggttgagtgccagggatctcagagcacagcacccaaagaccacaaccctgggtcagctcatgtctaaggactgtgtcatgcccatgttgggtgctgagaggacaatgactgtaacagccatgctctttcctcaatttagttaaacttttaaaatacctgatgggcctgttaatgctctaggatcgatatagtagagtcttcagttactgagctgaaaaatacaggatccctgcctgcartaagttcatgatgggggagtcgggtcattgtgagacacat

SEQ ID NO: 447387 - DNA, 521 bp, Homo sapiens
gaaggcttacaggaattagcatgaattataaccatcatgatccatcacttttatttgagcctttactactttcatcacattttacrttaacaatttaaaatgatcctcacaaccaattctgtgaaatccctttcttcagataaggaaactgaaacacaaaggagtttagtggcctctccatgtgacggtgaaaagacgcaaaaatagatttttggctgtctggtttactattcatttcattacactgtgagttccaaaataaattaagtctaagccctacactaaattgatttaatttactcacctttttaaattttaaaaatgagacagtgaatgttttgattgctaggaccatgttatattttatctgtattctctgaatttcatgcaatacctaggaaaaggcctatactcaaatatttttgaaaggaaaaaattaaaaagaaagaaagaaagaaatgaaaatattttagggtatgcaaaaatcccccccatttttcacacacctataatataagtta

SEQ ID NO: 447388 - DNA, 521 bp, Homo sapiens
gaaggcttacaggaattagcatgaattataaccatcatgatccatcacttttatttgagcctttactactttcatcacattttacgttaacaatttaaaatgatcctcacaaccaattctgtgaaatccctttcttcagataaggaaactgaaacacaaaggagtttagtggcctctccatgtgacggtgaaaagacgcaaaaatagatttttggctgtctggtttactattcatttcattacactgtgagttccaaaataaattaagtctaagccctacactaaattgatttaatttactcacmtttttaaattttaaaaatgagacagtgaatgttttgattgctaggaccatgttatattttatctgtattctctgaatttcatgcaatacctaggaaaaggcctatactcaaatatttttgaaaggaaaaaattaaaaagaaagaaagaaagaaatgaaaatattttagggtatgcaaaaatcccccccatttttcacacacctataatataagtta

SEQ ID NO: 447389 - DNA, 570 bp, Homo sapiens
tttggctgtctggtttactattcatttcattacactgtgagttccaaaataaattaagtctaagccctacactaaattgatttaatttactcacctttttaaattttaaaaatgagacagtgaatgttttgattgctaggaccatgttatattttatctgtattctctgaatttcatgcaatacctagraaaaggcctatactcaaatatttttgaaaggaaaaaattaaaaagaaagaaagaaagaaatgaaaatattttagggtatgcaaaaatcccccccatttttcacacacctataatataagttatgttaactattctttatcagaagtgagtgtccttttctttttagtttagtggacaaataagtactagcaatcatctcttacccaattcctctttagaaaatgcagaatgcggagtaagtagagtaatattcccctgtaagaatcctcctacaatttctctgacatcatgaaaacattcatagtaccgctcaatctgagagaaacattaattatattcagaactcttgaatttatgtcttaggagttgcttgagatgaaa

SEQ ID NO: 447390 - DNA, 590 bp, Homo sapiens
gtaccgctcaatctgagagaaacattaattatattcagaactcttgaatttatgtcttaggagttgcttgagatgaaattagaaaactcctttaaattaatgaaaatcctaaactcatagaagagactcattcagctgccttgttctatcttgcaaaatcatcttagccaaaatcttggaaatcataacatccaaaagaggcttcattagaataaatgctccacaagagcagaccttgcctatttgtgctctgatgtgctcccaagtgcctagaatagtgcctggcatgtagtcagagcacagtgattatttggtgaatgaattaaatggatccaataagaacctttgaatgagagtgcctgtgatttatttattcagttcaagtcagaggcacttgcatttgcatgwttataagtctcctttaaaaataagttgatcccaattctcctaatgattctgtgaaatcaggcagaccttgctggatatttatgattgaacttactaattagtaaatggataagcttccaaacacaaaccacaatacctgacttttgtatacagcagcaaatccaaatatattcaaattgttc

SEQ ID NO: 447391 - DNA, 590 bp, Homo sapiens
gtaccgctcaatctgagagaaacattaattatattcagaactcttgaatttatgtcttaggagttgcttgagatgaaattagaaaactcctttaaattaatgaaaatcctaaactcatagaagagactcattcagctgccttgttctatcttgcaaaatcatcttagccaaaatcttggaaatcataacatccaaaagaggcttcattagaataaatgctccacaagagcagaccttgcctatttgtgctctgatgtgctcccaagtgcctagaatagtgcctggcatgtagtcagagcacagtgattatttggtgaatgaattaaatggatccaataagaacctttgaatgagagtgcctgtgatttatttattcagttcaagtcagaggcacttgcatttgcatgtttataagtctcctttaaaaataagttgatcccaattctcctaatgattctgtgaaatcaggcagaccttgctggatatttatgattgamcttactaattagtaaatggataagcttccaaacacaaaccacaatacctgacttttgtatacagcagcaaatccaaatatattcaaattgttc

SEQ ID NO: 447392 - DNA, 580 bp, Homo sapiens
ttgtaacccaaagaagttatttttcactcatgcaaaactctgtaattgagtactactacttacctgtgagaaatatttttctcaatatgtgtgactcaaaatactaaagcatattagcttctcaagctattttaagaccataagtcttatccaaaatccttgcattattgttttattgaataaaacatcgttttagtgagaggtgtttaaataagtgttgtaaaaaggaacttagtaaataaatgcatattatgaagatgtgctttcatctgttttccatattaaaacaytacattttctatgtaaaattgcatttttataaaaagagttctattaaagcaagttgaaaatcattgagctaaagaaattgggacatccacaagttcgattcctttgatctaaaagatttcaggtggctcatgcctgtaattccagcactttgggaggctgaggcgggtggatcacctgaggtcagaagttccacaccatcctggccaacatggtgaaagcccatctctactaaaaatacaaaaaattagccgggcatggtggcacgcacctgtagtcccagctactgagg

SEQ ID NO: 447393 - DNA, 459 bp, Homo sapiens
taaaagaaaatttaaaattgaaaccaagagcccaaataaggtgttttttctctctcagactcactttgtaacatgggagccatatagatagattcatgaactctgtcactagttaccagacatgagctctatgaaggcagaaatatctrtcttctgttttgggtaatgtaatcccaaggcctagaatagtgttctagtcatataataggtgcttaataaataaatatatatatggcatgaataaatgaatgtattttgaaattaggtaaagttgaatgagttctaaactcagttccacatctcacttagccatgtggcttggacaagtcactccccttttctgaatcctcattcttccattaatagatgggataatcagatctagctgattaaggtgttaggaagggtaaatgaggtgggctgtggaaaggatttaatagaatactcagtacaaagttg

SEQ ID NO: 447394 - DNA, 473 bp, Homo sapiens
cttccttcccttcctttctctttatctcccttcatccttccttccctccttccttgctgtgtgtagaacataacgcttttacttccaaatcaatatttgttggatgaatgaatgagtgaaaggatattttatktgaaatttcaatatattaaaagagaaaaaaatggagattctgagtcaggcagaggtggggtccctgagatctccaaaagaggccctggaccgcttacagggagtcctggggactgcagtttgaaaacaactggataagaaaaattaagacatttgtttgggtttaaatttttgtgattattcactgctgtgaccattagagaatacttcaaccatctaccatctttaaggtgaagaaggaaagacaaggatagcacaagtcaatcaagaaagtatcagaatcatagtttattagatctgaaagaattcttagttgtcatacagttcaggccaatgcctac

SEQ ID NO: 447395 - DNA, 593 bp, Homo sapiens
ctcttttacgctgccactgaattctaagtacacaattatgcagggaatgtctttagattcaccagcttgagaacttttaaacattaagctctgaatcagataacagctttcatctcaagaacagctttgcactgtacctaagtaaaagcttaacttatatataaaaaaaattgttactaggggtataaaaatgtcaaggtaataaaataagtgaatgcaaaaccctcccaaataaaacatggcacaaaaaaatttaaaagaatgtttccaaggcagctgatggcttatttggcttattagtttctgctgcccacctttgcatgtgctgcttcaaaataaaatttcaaatggcccaagtatacttctgtcctmttcctcgtctacctattaataagacttcaccgtgtaaaacaagctagacaattactatgccctagttggctgtggttaagacttaattggacggctgtgttcaattctaagcatcatgtttccagaaagaaaagaaaaaagtgataaattggatgtagttcaaaggaaaacaagacagcggatgaaagtggcttggaaaataagacccagttgggaatgtt

SEQ ID NO: 447396 - DNA, 521 bp, Homo sapiens
ctggtggtatactagcatccacattctagcccaaacatgcctttctaatagatttacctcttccctttccaagtccaccagccagacttgtctatacactgtgctctctaccttttttccagcagtcaatatctcagacaaatccccatttaaatctcaggaccaccacctactatctatgtgaccttgaactaattgcttacctactctgaaccttgtcctatcatgtgcaaagtaaggatagcaatagttcctatgagttttaaataagaccgtgcatgtaaagtcctcagcgccttgcctgacacatgataatccttcccatcttcctgtctttgatgatgctatgttccttttctagaatgtcctgcatgtttttcaccagttcatcaaattctgcccattgaagtgagtkccaactcaattctaattgtatttgcaaagttctccttgaatgtagtagtctacaattattctacccaagttctgagtatgtaacatcttctgggctgcctcattgg

SEQ ID NO: 447397 - DNA, 587 bp, Homo sapiens
tgttctgcttgcatggagcactacccactctcatatattatcaaatcctggtttgtttgggttgctatctatttgacagtctgccagtagaaccttatgctcctctgctggactagacaggcaatagtaggttttctatacctgcataatgctaggggttgaatcctggtttctttttagggttggccacacctcactcccaggaactgggtcatattcagcctagtcctaagccatagaacaaaatgagatattcagtgcagaacagtttaaaaatggacacataaatgcaaaggatccttgtcatctcctctaaatgtgtttgtgtctcactcctacttcccacctcagccactgttaagtccacagtgacttcttaccatggcattcaaggtcccttgaaactgcccccmtctctagcttcaatccctgccacacagaccttcaaaactaatgctctaataatgcaattatggcttattgccccctaaaagactatgctcttttattattgcatttaggtgggcagggaattcaaagataactaagatcaaatcctagaccttaagaaaattgcaattcagtgt

SEQ ID NO: 447398 - DNA, 587 bp, Homo sapiens
tgtgatcctggacaggcagtcagggttctgatcctgtttggtctcccaggctattgtaaagatttggattgttacactaaaagcaatgggcagctgttgaaattttgtgaacatagagttcttaacgaggaaactatcagtattctgattttacagatgttgatattgatagtaaccaagaattgagtacctactctgtaccaggcaattatttccccacttatatcaccccagtaattctgaaatatttagcatttttatccctatttaatgaggaggagacgagacttagagcaggcaaacaacttaaagtcacaggtactatgttcttcccaatttatcattctagtcttagagaaagttrgacctcagtaaggctacaagggctgaaggtcattagagaaaaaacacaggcaaaggggaatgaaggacatttcacatacggcagccatgagccttgcctgcgttggtaactgccacatcctcagccctggcacagcgaatggtacctggaatacacttcacgcatgggaagggtggatggatggatggctggataaatgaatgggtggatagatggatggatg

SEQ ID NO: 447399 - DNA, 587 bp, Homo sapiens
tgtgatcctggacaggcagtcagggttctgatcctgtttggtctcccaggctattgtaaagatttggattgttacactaaaagcaatgggcagctgttgaaattttgtgaacatagagttcttaacgaggaaactatcagtattctgattttacagatgttgatattgatagtaaccaagaattgagtacctactctgtaccaggcaattatttccccacttatatcaccccagtaattctgaaatatttagcatttttatccctatttaatgaggaggagacgagacttagagcaggcaaacaacttaaagtcacaggtactatgttcttcccaatttatcattctagtcttagagaaagttagacctcagtaaggctacaagggctgaaggtcattagagaaaaaacacaggcaaaggggaatgaaggacatttcacatayggcagccatgagccttgcctgcgttggtaactgccacatcctcagccctggcacagcgaatggtacctggaatacacttcacgcatgggaagggtggatggatggatggctggataaatgaatgggtggatagatggatggatg

SEQ ID NO: 447400 - DNA, 587 bp, Homo sapiens
tgtgatcctggacaggcagtcagggttctgatcctgtttggtctcccaggctattgtaaagatttggattgttacactaaaagcaatgggcagctgttgaaattttgtgaacatagagttcttaacgaggaaactatcagtattctgattttacagatgttgatattgatagtaaccaagaattgagtacctactctgtaccaggcaattatttccccacttatatcaccccagtaattctgaaatatttagcatttttatccctatttaatgaggaggagacgagacttagagcaggcaaacaacttaaagtcacaggtactatgttcttcccaatttatcattctagtcttagagaaagttagacctcagtaaggctacaagggctgaaggtcattagagaaaaaacacaggcaaaggggaatgaaggacatttcacatacggcagccatgagccttgcctgcgttggtaactgccacatcctcagccctggcacagcgaatggtacctggaatacacttcacgcatgggaagggtggatggatggatgkctggataaatgaatgggtggatagatggatggatg

SEQ ID NO: 447401 - DNA, 358 bp, Homo sapiens
atcagggaagttggttaccatatggcagctacccaatatcaaacttggttttatgggcggcattctcagttctgcagataaaaggtgggacctgagaagaacaaaagcaggtctgcatgttagagcaagataaattaatctgaagagacctataatttcaagtgtctcatatgtattaggtacttttatatattgtttaatctgtgagttagaagcccatggggctaaaaacagatctacatttactaggaaaacaagtgtatcagattttgcatacctaagagttgctgaattaycaatttttgtactattaaaaagccgaatacaggaggagaggaagcttcagctccactccata

SEQ ID NO: 447402 - DNA, 615 bp, Homo sapiens
gacttccctaaaaccccaccatatcatcttattagcaaaaacaatcttacttgctactgcttttactttttacattgagctttggggtcggacaaatttggattttaatccttaagatccgtgtatctcagtttctccacctgttgaatggggataataatggctccctcagagttattggaaggatcagatgggtaaatgcatttgtcagcagcatagcacagacacagtaaacactcaataagtgacagttatgattgcgtggtccccactattatcctataaagtaattttacaataatcagcctacactataaaaaccattgaagcaggtagagcagacattgttaattagttaagtgggcaattattagatttaataaatattaatcaggacctactatttacaaggcaggagtagacactgyaatagttaaagacaatggatcttccaggggctggagaaaaaggaggaatggagaatgattgcttaatggatatgagttacctgtgggatgatgataaagttccggaaccagctagtggtgaagattgcacaacattgtgaatgtacttaacaccattgtacagtttagtactaaacgttatgttttg

SEQ ID NO: 447403 - DNA, 605 bp, Homo sapiens
acataaaacagtcctactggcttctgcttcattagaaactcaaggggaaggtgggggaaaaaatctatcaatgtttgccactcagagataacatcaagagaggaaggaattttaattttttgagttactgagaggttattaaagaagtgcaaggtaaacacaaggttggatgtcactgagatattgtgtctcttctgactcagactgacagccactgaacacttcactcaagtacttctgaactaggataagccastagcagcagagaacagaggaaaatgactctcctttctgactttggaaggcttcaaacagatttattcattcatttagtcattcattaaatattcatcagcacctatgtaaccaacattgcattaggtgggcagggaattcaaagatgactaagaccaaatcccagaccttaagaaaattgcaattcagtgtagaagacaggtagatacaccattattaagttacaaaacttcaagctctagataataacaaacacttcctgagcgctcaatctgtgccatgtaatacattatatactttgagcacattaattctttttgtattcacaatcttattaggttagtgctagg

SEQ ID NO: 447404 - DNA, 588 bp, Homo sapiens
tataacatctcattcataaatgggactttttatgtgkgcggaatcatttggagtctatatcacagaaagaacatgagcttccacccatgtggttttcgcacatagtagtcacccaagaaatgttgactgaacctgttacttttaattcttaactaatattcaaggttttctgagtctaaacctacctctcgggtttaggtgagaattaagcagtgttagtaatgactgcagtggctgtcagctagtaggtgtgcaacaaatgccactggaatgaactgattggaaagggcggtggaggtggagccccagggaggccattgcatccgttattgggaagtttggggtggaacagactttgtgggaaaacataaatgcaaactgttcctggattttattagcctgttacccacgtctttgctcttgaaacactttgcaatcaaaagaatttggagtggactattttcagccctcaaccttcatcccgtgctgcactaagaggaaaagctgattagggaagctctgcggtgtgcacataagtcagaatcaccaatatccatcctctgcagagttagaccgttaatttttccc

SEQ ID NO: 447405 - DNA, 588 bp, Homo sapiens
tataacatctcattcataaatgggactttttatgtgtgcgraatcatttggagtctatatcacagaaagaacatgagcttccacccatgtggttttcgcacatagtagtcacccaagaaatgttgactgaacctgttacttttaattcttaactaatattcaaggttttctgagtctaaacctacctctcgggtttaggtgagaattaagcagtgttagtaatgactgcagtggctgtcagctagtaggtgtgcaacaaatgccactggaatgaactgattggaaagggcggtggaggtggagccccagggaggccattgcatccgttattgggaagtttggggtggaacagactttgtgggaaaacataaatgcaaactgttcctggattttattagcctgttacccacgtctttgctcttgaaacactttgcaatcaaaagaatttggagtggactattttcagccctcaaccttcatcccgtgctgcactaagaggaaaagctgattagggaagctctgcggtgtgcacataagtcagaatcaccaatatccatcctctgcagagttagaccgttaatttttccc

SEQ ID NO: 447406 - DNA, 623 bp, Homo sapiens
gcaaagtcccaagataggccatctgcaagctgtggaggaaagaagccagtagtgcctcagaccaagtccaaaggcctcaaaagcaaggaaactgacagtgcacccttcagtctgtgcccaaaagcctgagagcccccggcaagccactggtgtaagtcccagagtccaaagctgaagaacctgcagtctgatgtccaagcacaggaagaacagtagcaagcatccagaacatgagaaagatgaaagccaaaagactcagcaagccagcttattccaacttcttctgcctactttgttctacctgctctggcagctgattgtatgatgcccacccatattgagggtgggtgtttmtctcccagtcctttgactcaaatgtcaatttcctctggcaatactgtcacagacacacccagaaacaatatattaccagctatgtaggcatccttcaatccaaccaagttgacacctaatattaaccatcacgggaactaagtataattaaaggcatggagatgggcatgagccaaatgtgttccaagtagctgataatattgtggctaaagcaggaagggtaagcaaagcagcccagatcccatgagttacactgtcatatctgaggt

SEQ ID NO: 447407 - DNA, 566 bp, Homo sapiens
ataatgtgataatgtatatagatgtgccatagatatataaaatactattaatcttaccaaggaggtttggagaactttttttaatgagtaagtatgagttttttccattgcctaacaataaaactcaacctatttaactcagcttttaagaagcttcaagaattgttaccaacctgcctgtccaatgttattcttgttgttcattcactcaatggataataattgagtacctactatgttccagcatccatgctgggcactgtagaaacagtggtgaacacaagagatatcctctctgatgagaagagaaggttctaggcataagaatcagcataagagagatgcaaaagtggagattagcctgggacatctaggaactgaaaagycaatgggactaaaggtaagcagcagggatgagagggctgagtgagctggagagataggcagggtccccttagctccagacaaagtggcaaaatgaacaagcttaccattcattaagtactgggcataatctcctgccttcttgcttttctgcaggcagatgccctgattggttttaatat

SEQ ID NO: 447408 - DNA, 575 bp, Homo sapiens
ggaatgccatcaactgcatgacatgctataattttatgcatcaccaacaaagaaaaaaatgttgccaattaaactatgacatgtcattgattgtgagatgcaaatcaatttcataaatgctaaaatgtgaggggaaaaaaagccaacctgtgaaatatggtgtgctgaggatttagcaaagcacagttaggatttaaagttcatcagatcaatgcatcctcccatccctatyttaaagaacaggacaccaacaccaaggtccagcaaggggcagtaatttgtcctataaaattcagggatagagacaagatgagaatcttgacagcaaattgagagctctttaataggtcccaatagataccaaatatttgtttgtgttaccttgaccactagcaacacgtttatttaatcatccacctgttcctgtttttccctttaaaatatgcagtgctgaatagcagaggcaaaggccctcacccctcccacacacaaatggactcagcagtcacaggagatgatgcagacagatttcccagtaaattcatgctcacacagggcatacacctgagtcagtg

SEQ ID NO: 447409 - DNA, 564 bp, Homo sapiens
agaacagtcttacttgtgtctcttgtttttttatatcctaagagaaatactcatttttttttctcatgtaacttaggctatagtgttaagtcagattacagtgaaacaaatttctcacagggagaatttttttwtatatatatatagtttataaaggttcgcaaaggtattctactaaggtggcatgttgttgaggtcaagcccttggagaaagaaatgtttgtgtctcagcatgtaggttggcagtatcttattttccaaatgaatattggtgttaaccatcccatgaaaatactctttctaaaaacataacttgtagagttatattatattctgtcaaaatgtgtcttaagtattatatggaatgcccacgagttcccttggttggggccattgtatgattctctctcgtatgcacaacgtgggggagatgaagttggggaggtgtaccatgaaactacatgtattttaagttgggcctaaaggtttctttttacatcatgaactataacctaaatggagttgtatacagactgtagttgacaatatccccgtgttgtctgt

SEQ ID NO: 447410 - DNA, 307 bp, Homo sapiens
aaactgccatgtcacattttcccctttctgtatctctgccaatgtttccccaacayccgatgcacagcagacagcaatagagagtgcttgttgaagtaaatttattttaattaattgggggaaattcgatacaaattttggattcactattttaaaagaaaagtggtttgttatttccaagtatattgatggaaacaggagaaatatttgcatgagaaaggaatgatttgtgaggaagaaatgacctaaagatgagttggaaactactggaacttacaaggctcatcagcttctagggggttcctcc

SEQ ID NO: 447411 - DNA, 607 bp, Homo sapiens
aaaatctccatttttctggccttgttctaaaatactagggactatgtttctatttttatttatttctatgcttacattttcaggccagcagttaaattcctttatttgttcatttttacgtcatttcaaatagagtgttttaggcaaaactcctctctaattttattccataaagttgctctcttcttgagagtccrtaattatagtttcagggcagataatgtttttcaataaagattaaaatgagtatttttttcaggtttccaccctgggctgctgtgtgtcctacaactccaggggtaggcttgccttgctcttttcagatgaccctgcacacaccacttactcccagtacacacaaatggtactccctgggcctggggatgcagtagctttgtcatacctaatgttatttgttgtgctatatgcttcaatctttaaagcctgagatccaaaggggagcttgcatagccataattataatttttatatggttctaaatactttgtccacgatacttcgaaagtgatgttcatgcctaatgagattattgtaaataaattatattttatttttacagaagagtatgctatttataaaatatgaa

SEQ ID NO: 447412 - DNA, 607 bp, Homo sapiens
aaaatctccatttttctggccttgttctaaaatactagggactatgtttctatttttatttatttctatgcttacattttcaggccagcagttaaattcctttatttgttcatttttacgtcatttcaaatagagtgttttaggcaaaactcctctctaattttattccataaagttgctctcttcttgagagtccgtaattatagtttcagggcagataatgtttttcaataaagattaaaatgagtatttttttcaggtttccaccctgggctgctgtgtgtcctacaactccaggggtaggcttgccttgctcttttcagatgaccctgcacacaccacttactcccagtacacacaaatggtactccctgggcctggggatgcagtagctttgtcatacctaatgttatttgttgtgctatatgyttcaatctttaaagcctgagatccaaaggggagcttgcatagccataattataatttttatatggttctaaatactttgtccacgatacttcgaaagtgatgttcatgcctaatgagattattgtaaataaattatattttatttttacagaagagtatgctatttataaaatatgaa

SEQ ID NO: 447413 - DNA, 611 bp, Homo sapiens
agaaatagtgttcagaaatctccattctgattttcaatagtccccagcttctcttgcagttcagttggcctagatgaatgctccaccaatgaccacaagcagaggaacaaagcgagcttcagaccaaggctgctaacggtctcaataggttccctccatgtctcttccctgctgtagtagcccaggagactctatgctccagactttgttgctccaagatgaggaaaggcttcctgacagaatcagaccgtgatgtgagctgatctagaataaaacctttgttggattactctactgagatttgagggtcaatttgagaccattaaggcccagcccatcctaagataacaaaatatatggtatttgtagatagggtatttgatcaaattattacaaaacaatatgatctgggaaaacatgatccatgtcccctttaattctctgcctttagagattgttgtgtagtgtgtttcacttcagggatttattaaataatctgtggaatgggtacgtaactacaaaatatactatatattgcaccactttcaaagaawcatggtataataaaatatccagcattttaaattatatggaagagaattcactttacc

SEQ ID NO: 447414 - DNA, 603 bp, Homo sapiens
aatgagctgaacaatgtgtgtgtgtgtgtgtgtktgtgtgtctgtgtgtggatgtgtgcgtgctacaaagaaggtaagaactttctgtcttgtattctaaaaagaagttttgataatgttgagagtagaaccatttttctattcagagtagtaaaggctggtatagaagtgaggccagactcatttctattacagagactcaagctgtggtcagaacagatgcaattagacacaagagaggaatggcatggccatttggaaacacatcgttcctgaattaaatgggagaatacctattttgccactacatttttaatgtgtatatttactacatatggtctagggaaacatgagttatataactacataaagatacacatagcagaagacgctgactaggactattcttaaagtcctggaacatgtgagagtactttgaagttgtagactgtatacattagttgttaaaaacttgggctttagaacaagactacctgggtttgagtcctggttgcaccacttcctgatgtaaccttcagcagattctgtaaacttctttgtgcttcagtttcttcatctttaaaatgtggttgtgtgagaatt

SEQ ID NO: 447415 - DNA, 603 bp, Homo sapiens
aatgagctgaacaatgtgtgtgtgtgtgtgtgtttgtgtgtctgtgtgtggatgtgtgcgtgctacaaagaaggtaagaactttctgtcttgtattctaaaaagaagttttgataatgttgagagtagaaccatttttctattcagagtagtaaaggctggtatagaagtgaggccagactcatttctattacagagactcaagctgtggtcagaacagatgcaattagayacaagagaggaatggcatggccatttggaaacacatcgttcctgaattaaatgggagaatacctattttgccactacatttttaatgtgtatatttactacatatggtctagggaaacatgagttatataactacataaagatacacatagcagaagacgctgactaggactattcttaaagtcctggaacatgtgagagtactttgaagttgtagactgtatacattagttgttaaaaacttgggctttagaacaagactacctgggtttgagtcctggttgcaccacttcctgatgtaaccttcagcagattctgtaaacttctttgtgcttcagtttcttcatctttaaaatgtggttgtgtgagaatt

SEQ ID NO: 447416 - DNA, 603 bp, Homo sapiens
aatgagctgaacaatgtgtgtgtgtgtgtgtgtttgtgtgtctgtgtgtggatgtgtgcgtgctacaaagaaggtaagaactttctgtcttgtattctaaaaagaagttttgataatgttgagagtagaaccatttttctattcagagtagtaaaggctggtatagaagtgaggccagactcatttctattacagagactcaagctgtggtcagaacagatgcaattagacacaagagaggaatggcatggccatttggaaacacatcgttcctgaattaaatgggagaatacctattttgccactacatttttaatgtgtatatttactacatatkgtctagggaaacatgagttatataactacataaagatacacatagcagaagacgctgactaggactattcttaaagtcctggaacatgtgagagtactttgaagttgtagactgtatacattagttgttaaaaacttgggctttagaacaagactacctgggtttgagtcctggttgcaccacttcctgatgtaaccttcagcagattctgtaaacttctttgtgcttcagtttcttcatctttaaaatgtggttgtgtgagaatt

SEQ ID NO: 447417 - DNA, 552 bp, Homo sapiens
ctactgtggactatgagctgttcttcaaatattccaagctcattcatgtggtagggtactctgtacaagttgtttcccctccctagattttctttctccctgtcttcacatggctggtcccttgttgttcagattttacttttactgttagctcttcagagaagactccttcagcctccccactaatgtggctgagtcaytcacatcattgtctgttcctcctgctagaaggggctttatgagagtgggggctacatctgtctcgttcactgtagtatacttgaggctgagaaatgtgctgccacattggaagatttatctgagtaccggtgaaaggagaaacacacacttattattagccattatgattcagatcaattcacattatacccaagaaggaataggacagggaagttttttactgggcatgaggagggtggagatgataatcaaattccatttgtttcacaattaacatagctagccctaaagaatggcaataaagatattgatattcaggattctaaagttactgtttccaccccagcaatg

SEQ ID NO: 447418 - DNA, 557 bp, Homo sapiens
ctcattaacaattcattttcaaaaattaattattgattttgtaaagatgacaaatggttattatagaaggaaatataagcaatattgaaaacttagaaaaataatcttacctctaattttctacctcctcaaaatcayaatcataaacatttaagaagtgttacttaggaaatctctctatgcataaatcaatagggagataaattttaaaatattagaaaaataggattatattatttatgttcttttcaaattcaagatattcaatatttatttttcttatcaactcaataagtgaaatatttcatatacaataaactccatccatgtaggtgcacagctcgataagttttgacagttatacacacccatgaaactaccctcacaataaagacacagcaaacttgcatcaatcccaaaagattcctcactccccattccatgtctctctgctctctgtcctaggcaacaactgatgtgatttttttgtcactatagattcatttacattttatgtaaatggaattatagagactgtactgttctttgtctttcat

SEQ ID NO: 447419 - DNA, 589 bp, Homo sapiens
gaatgctaaaagaagattgtgaagcaaacatggcatgactttgttgtatcggtttttcttaggcagtttcttttggatgttttttttcttcttccagtgaccgattaaatgttcatgtctatagcaatgaggacccttaaaattaactgaatatcttaaagtacagagtttttcataaccatgcaatatgtcttgaattaatcttttatttttctcataataggtatcagtacaaaaataatgtcttacatttgcacagtgctcagagatttacaaaatgcyttcatacactttatctcattttatccttctaataaaataataatggaggcagagtttgcctgcatctgtctctccattttaaagttgtaaaatttgaggtttaatgtgtgtaaatatttggccaaaggtcacaaagtgtgtaagtgacatatttggtatcgatttctgggcctaagtgcagcaccattttttgctatagcatatttcaagggtttttttttgtttgtttgtttttctcgtttacttattttatctattttaacacactaaactgaataccttctttgtgctagtaaagtcttgtttt

SEQ ID NO: 447420 - DNA, 616 bp, Homo sapiens
ggttttataaggggcttcccccttctctcggccctcattctcctgctcccctgtgaagaggtgacttccaccakgattgtaagtttcctgaggcctccccagccatgaagaagtgtgagtcaattaaatctgtgttctttataaattatccattcccaggtattacttcagagaagcatgagaatggactaatacaggaagttctattttggtatatttcaaggttttgttccaagatttagaacttcttttagcattttttttgtaattctgggttagtagtggtgaattctctcagcctttgtctgaaaaagactttatcgctgcttcatttatgaagttttgttcatttatcaaaatcttttttatttgtctttgtctgattgggttaattctaaagcctgccttcaagctctgaagtttattcttctacttgttctagtttagtgttgaaactttccagtgcagtttgtatttctctaaatttgtctttcatttccagaagtcgtgattgttttttcttataagatctatttttctggagaatttttcatccatatcttgtattgttttttaaatttctttaagttgtttttcacccttctctggtatcccc

SEQ ID NO: 447421 - DNA, 460 bp, Homo sapiens
tataaaccttgtgattttatttattaatatataacattctagacaatgcgaatgaatctacagtgaccamattcagatcattgttgcctgataatgggagatgggtgagtggtatgaggaagaatgggaaggagggacatgaggaacgttttgcgggtgatagatatgatctttattttgattgtggtgtgatttcataatacacccatatatatataattgggcactttatttatgtcaattttaccttaagaaagctgttttttaaaaaaaaaatacaggagaaagccaggaaaaaaatggagacatacaaccttaaaatattttttcctgattgttgaatttataaggttaaataccttagaacatacatttaataattcattcaacaatcattttaaaaactatctgaaactatataattcaaggatataaaaaatgtatagtcacgatgtgcata

SEQ ID NO: 447422 - DNA, 460 bp, Homo sapiens
tataaaccttgtgattttatttattaatatataacattctagacaatgcgaatgaatctacagtgaccaaattcagatcattgttgcctgataatgggagatgggtgagtggtatgaggaagaatgggaaggagggacatgaggaacgttttgcgggtgatagatatgatctttattttgattgtggtgtgatttcataatacacccatatatatataattgggcactttatttatgtcaattttaccttaagaaagctgttttttwaaaaaaaaatacaggagaaagccaggaaaaaaatggagacatacaaccttaaaatattttttcctgattgttgaatttataaggttaaataccttagaacatacatttaataattcattcaacaatcattttaaaaactatctgaaactatataattcaaggatataaaaaatgtatagtcacgatgtgcata

SEQ ID NO: 447423 - DNA, 594 bp, Homo sapiens
gctcctcactctcacattgcagcctgacctccttgttgttctggtcccttttccaaaatgtttggggaaggaccctatggatctctcttcaggctctatccagccctgaccccasactcaagcacttactcattttaagagctcagcaaacattggtgaatggatgaatgggtaaacggatgacttatcagagactcctgttttccaagtccttgttatcaagtgcctggacaattctgttacacatatattcattcaacaaatatgaataaatatggagtacctactagataagaggcagggtgtcaggctctggagttcagtgggggacaaaacacagtagcttttcaaaaggtcttttgacttttagttccctctccattttaaccattttgcacttattttcaaatttacccttctatagctgggtttggatctcactcctcctgactcaacaactttcaatgcctcccactgcttattggaaaatggccagattccttacactgacatttaagaccttctaagatctagctgaaatctatgttcccattttcatctcccatccctcattccctctttccctccatgaca

SEQ ID NO: 447424 - DNA, 533 bp, Homo sapiens
aggccaggccagagaggcggcgcggctcgggccaaacgcgtcatgcacagagcgctcgcctctgcgccagggcgtgaaatgggcacagtcatgcaagcctcccgggggagcgccaaggtgaactggaggtggagggacaccagcaggcggctttatgcagcatggtctctctctagtagcagtccatgcagagagcggccaagctgaactgctctcggccctcaaatgcacaactcgcgccccgtcctctagcgtaggtgcctccaatctcctgagcctagtactccctagsctttacctggcttttttactccctccgatctcaggttcacctgggcttcttccaggaagccttcctggatctcctcagggccaaggaagctgtgcctcttctgtactcccacaacacaccacaagacaagccacagcctccctcctcccaacacctgcacggatgctgtgtcccctaccaagaaaggaagcacctgggcaacagcaacgttcttctcgctcactacgtccagcacttatcc

SEQ ID NO: 447425 - DNA, 660 bp, Homo sapiens
agccctcgcttaatcttattattgaactatcatcacaattttccctaggaaaaaattcagaattttaaaattttactatatgaacctgagttctgtagggaccattttacccaatagttcaatctagttctgtgttaccaatgggaagtgggtaaaatgttatgagrgatcctaagtatattggtgatgggaggaatcactgatgagtgatgtctcttgctctttttatttttcctcctcttactctagcagcgtaagctagccagggcactggccacctcatttagtccaattgtccaaaaaaaaaaataaatccccaaaaaatccatgatggcaaaggctggactctaagtaaagtctgcatgtcaggaatagctagatgatgaataccctgccaagttattttgtgtgagagttttacagcattttgcaaagccttttgtctcctactaacactgctcctattgctgaagttttctgggattctatctattatacctctctatttggtatcccagatgagttcttctctatcctgatctcatttgtgggctgatggcccttgtttttcctccttccccatctaattctatttgttcataaattctagaaagccctcaaagtaaaggtaccttctccctcttcctttcttttttaagc

SEQ ID NO: 447426 - DNA, 591 bp, Homo sapiens
atgaataccctgccaagttattttgtgtgagagttttacagcattttgcaaagccttttgtctcctactaacactgctcctattgytgaagttttctgggattctatctattatacctctctatttggtatcccagatgagttcttctctatcctgatctcatttgtgggctgatggcccttgtttttcctccttccccatctaattctatttgttcataaattctagaaagccctcaaagtaaaggtaccttctccctcttcctttcttttttaagcaacattgttaaatattaatattttgaaatttcttacagtgggaaattgaaaggtcaaataattgtgaaccccattaatctatgactcacacaataccttgctcctaagcctaaatgtgtgatattcattcggttttcttatgatatcttctatgtttctaaacttataatgacttagctaattcctgagttatgtgacaataagaaagtagtcaaattagcattatagaaattcagcttagacctaagaacaaaaaccaattactagaaaagctcgtaaccaacaaatttcactgtgctttgtgttttaaaaa

SEQ ID NO: 447427 - DNA, 523 bp, Homo sapiens
ttaaattagcatccccccaaaaatgaaatacataggtataattctagcaacatatatgcaaggtctatatgatgaaaaccggagaacttagatgaaagaaattagatgaaagaaattctaaaaaaattaaataaatggagaactattccacgttcatgggtaagaagacagtattttcaagatgtcagtgcttttcagcttgatctacagattcaatgcgacctcaaccaaaatcccagcaagttattttgtagatattgacaaactaaytataaagcttatacaaagaggcaaaagaccaagaacagaaaacacaatattaaaagagaagaaaaaaataggaggacggatactactcaacttgaagaattactataaagctacagtaatcaagatagcgtaatattggcaaagaatagacaaatagagcaatggagcagaatacagagcccaaaaatagacacacaataatatagtcaactatctttctcaaaggagagaggcaatacaacaagaaaaagat

SEQ ID NO: 447428 - DNA, 584 bp, Homo sapiens
agacattgtcaaaaaataagaatacaaactacaaactgggagaaaatattggcaaaagacctatctgataaatgactattatccaaaacatataagcaactcaaaaactcaacaatgacgaaaagcagcacaattaaaaagtgagcaaaagacctgaacagaaacctcactcaagaagatatacagatgacaaataagcacatcagaagatatttcacaccatatgttattcaaaaataagcatatcagaagatatttcacaccatttcttgaataamcatatgttattcaagaaatgcaaattaaagcaacaatgaggtatcattaccatgacggttagaatggccaatcttcagaatactgacaacgctaactgttgacaaagacatgaagcaacaggtggtgagaataccaaatggtataaccactttggaagacagtttggcagtttataataaaactaatcatactcttaccatacattccagtgatcacactccttggtgtttacacaaatgtgttgaaaagttattttacacaaaagccttcacaaggatgtttatagcagctttattcatagttgc

SEQ ID NO: 447429 - DNA, 584 bp, Homo sapiens
agacattgtcaaaaaataagaatacaaactacaaactgggagaaaatattggcaaaagacctatctgataaatgactattatccaaaacatataagcaactcaaaaactcaacaatgacgaaaagcagcacaattaaaaagtgagcaaaagacctgaacagaaacctcactcaagaagatatacagatgacaaataagcacatcagaagatatttcacaccatatgttattcaaaaataagcatatcagaagatatttcacaccatttcttgaataaccatatgttattcaagaaatgcaaattaaagcaacaatgaggtatcattaccatgacggttagaatggccaatcttcagaatactgacaacgctaactgttgacaaagacatgaagcaacaggtggtgagaataccaaatggtataaccactttggaagacagtttggcagtttataataaaactaatcatactcttaccatacattccagtgatcacactccttggtrtttacacaaatgtgttgaaaagttattttacacaaaagccttcacaaggatgtttatagcagctttattcatagttgc

SEQ ID NO: 447430 - DNA, 567 bp, Homo sapiens
aaactcaacaatgacgaaaagcagcacaattaaaaagtgagcaaaagacctgaacagaaacctcactcaagaagatatacagatgacaaataagcacatcagaagatatttcacaccatatgttattcaaaaataagcatatcagaagatatttcacaccatttcttgaataaccatatgttattcaagaaatgcaaattaaagcaacaatgaggtatcattaccatgacggttagaatggccaatcttcagaatactgacaacgctaactgttgacaaagacatgaagcaacaggtggtgagaataccaaatggtataaccactttggaagacagtttggcagtttataataaaactaatcatactcttaccatacattccagtgatcacactccttggtgtttacacaaatgtgttgaaaagttattttacacaaaagccttcacaaggwtgtttatagcagctttattcatagttgccagaacttggaagcaaccaagatatccttcagtaggtaaatagataaataaacagtggtaatttagacaatagattattaaacagtg

SEQ ID NO: 447431 - DNA, 468 bp, Homo sapiens
ctgtcctttgcccttaggaattatcaccaaaaattccaagaaaaagacgttgttttaattgtgtactatgtgaattcccggcccctgggttttagcaatttcatggattttctatagatgacatcatgtgtaatgaggaaaataagcatcatttgatctttttggtaacactgaaccacaaaacctaaggctactaaattgaaacttgatgaacaccgtaattgttctgccatttaaatttttcccaaattattatcactggatacttggagactcaaaatactgtcctacagttttttagatttgtagagcagggtgtatggttaattaaaaccttttggaccaatgtccctattttaaaaattaaaaaacaaaactgagatgaaaaggaattggagctagttagttgcccarttctcttgattcctgagcctctttctcttatatgccagtggatttacactactg

SEQ ID NO: 447432 - DNA, 605 bp, Homo sapiens
gatgacatcatgtgtaatgaggaaaataagcatcatttgatctttttggtaacactgaaccacaaaacctaaggctactaaattgaaacttgatgaacaccgtaattgttctgccatttaaatttttcccaaattattatcactggatacttggagactcaaaatactgtcctacagttttttagatttgtagagcagggtgtatggttaattaaaaccttttggaccaatgtccctattttaaaaattaaaaaacaaaactgagatgaaaaggaattggagctagttagttgcccaattctcttgattcctgagcctctttctcttatatgccagtggatttacactactgttcaatcaggaaactttctgtaggakattgaccttggtctgtaaaggaaagatggtgttagcacatggcagagacaaatggctatcttgtaagaacttgaaaaggaaagaaattaaacccacttttaagagttaaatgatgagatcaacacattttttttttaaattcagcatggaaagacaaagtcacctgaatgagacagaagaactctcagggttatacattttgactataatctgattatttaattaaa

SEQ ID NO: 447433 - DNA, 595 bp, Homo sapiens
ttaatttttttaagtgtaagactattctgtgattatgtgttttaataaatgctatcagagtagacyacatatctgtgaaatggatatttctactattaaccatcctgatgagaaattaaccctaggatagggaatttagacttgaggaattaggccttaggctaagatggggacactatttgtttgttctcgctagaactaggaggaaatctggcttgaacttcaaaactttggaagttctacagcagatctggtagtgaggggtacctgtcccaggacaaatgatgacaagcagagagccaggccattaactgacccggtaagagaccccagggtggtatgatatcatgtgatagtttgaaatctcttccattgtccctggtcttcagtaaagccacattaacattttctagttgggtgtcagctgcattgagaggaacaaaaaaagcctccttgcttagagccaagcaaggcaggggataagagcatcccttccctcgtggccaggatctgaggttatagtggctatggctggtgagagatagcctaccccaatagggtgatctcacagcaccaagggtgatggtggcagtgc

SEQ ID NO: 447434 - DNA, 595 bp, Homo sapiens
ttaatttttttaagtgtaagactattctgtgattatgtgttttaataaatgctatcagagtagactacatatctgtgaaatggatatttctactattaaccatcctgatgagarattaaccctaggatagggaatttagacttgaggaattaggccttaggctaagatggggacactatttgtttgttctcgctagaactaggaggaaatctggcttgaacttcaaaactttggaagttctacagcagatctggtagtgaggggtacctgtcccaggacaaatgatgacaagcagagagccaggccattaactgacccggtaagagaccccagggtggtatgatatcatgtgatagtttgaaatctcttccattgtccctggtcttcagtaaagccacattaacattttctagttgggtgtcagctgcattgagaggaacaaaaaaagcctccttgcttagagccaagcaaggcaggggataagagcatcccttccctcgtggccaggatctgaggttatagtggctatggctggtgagagatagcctaccccaatagggtgatctcacagcaccaagggtgatggtggcagtgc

SEQ ID NO: 447435 - DNA, 547 bp, Homo sapiens
gcacaatttctgtatccattcatccatcaagggcacttaggttgtttccatatcttgcctattgtgaataatactgcaatgaacacattgcagtacacattggagtacaaatatctctatgaagtgctgatttcaactcctttgtttccataccaagtagagagattgctatttttaataagatagtgctatttgtaattttttgaagaacttccatactgttttcaataatggctgtactactatacattccctccaacagtatacaagggttcctttttctcttcttcctagccaacacttgttatctcttgtcttcttgacartagccatcctattgggtgtgagatggtatctcactgtagttctgatttgcattttcctgttgatttgcaatgttgagcacctattcctattggttattttatgttatctttgggaaaatctctatttaggtctttacccattttttaatcaggttgatattctatttttgttttccactatcaatttgtatcagttcctaatatactttgcatattaatcc

SEQ ID NO: 447436 - DNA, 480 bp, Homo sapiens
ttagcaaagactatttaccccaagtgtgcactctctgatgctgttttatcagagaatggagccttgggcgtacacacattcattctgacttccccttccccactgggatgaaagatttttttccaggctctctttgactgaactcygtgtcaagctactggctgatctgactgtattgatatcagactgacaatttagcatccactaatttatagctgattgctttagtattctttacaacgctctggtaaataaattagtctgcaatttgatgcaattcaagttgaacttgtttgaagggatagtctttgaggccagaatgaggcttctttcaaccccaggatgtctcttcttagttgttttttccttgtttatttctgctaaacttctagctattttgtttttgctcttattgattatacagagttgcaagccttaattgctcaccaccaaatagccattgtttttgacaatgctatc

SEQ ID NO: 447437 - DNA, 545 bp, Homo sapiens
  misc_feature (1)...(545): n = A,T,C or G
acttactataagccttaggtgagacttaaagccgtgcttgcttcaaatgtcttcaaacacattctcagtagtggtggctatggtggggagggggtggggagaractcactcttcttgaacaaagcacgaagggaagtataagggggtcttaaacacgcagttttggtatcagcttgactacagtggggtagagcaccaagtgggttcctggggttcctgattctaggcattgcttcctggatgacanttctggacgtttcataatccagagggaagttctctgccttgaagggtgacattcaggcttggtagcattcattacaagctgactgaagagactgtgggccttgagttaacagtggtagtagccaggcagtactcnctgtgggccacggatagtgggtggccatgggtagagactcctatgcttgaggaacggggaagaaagagtaggaagaactttgtcttgcagcttggatgccagttccgttgcagtagaaattaagtttcctgactctaggccctggcccccagatggtatctct

SEQ ID NO: 447438 - DNA, 590 bp, Homo sapiens
tgttaatattggccttctacccttttggatttacattgttctattttttttattttttattaagatggagcctcactctgtcacccatgccagagtacagttgcgcaatctcggctcactacaacctccacctccagggttcaagcgattctcctgcctcagcctcccaagtagctgggactataggtgggcacccccacacctgggtaatttttgtattttttgtagagacagggtttcaccatgttggccaggctggtcttgaactcctgacctcaagtgatgcacctgcctcagcctcccaaagtgctggtattacaggcatgagccactgtgcccagcctgcattgttctttttctgtgtccactgttcaatttctatagctttgaggaccattttcaacaactcaactaattcttccagctctatcatgccaacrtcatcatatgtcattaaaatttaattacaaacactgaatgaagactccccagtcttattctgcttccaaaattgtcctatggccatagagtctcctgaattagctctgtcatcagggaaaacactagtaagccttcattctacttgtaag

SEQ ID NO: 447439 - DNA, 495 bp, Homo sapiens
cttccataggggaatatctcaaatacactgtggttccaactgggcttatcagcctcctcatgtcctccaacacacatacaaacacacaggtttggggcctccagcttctaaagggagagagcagcttaaatttaacttaaagagactgacccccttcctcaaggggcaaagttcaaataagagcaggtcttatttgtctcttatttgtcctgcattgcaccatctgtgtgtaccaggtggacctcakgtgctcttggtgaatggggaccataagtgtggccactcacagcatttgtggtgctgaaccccatcacaccatttgttcattgtgcaggtggccttgggtgtttggctgccatgccggcacatgaaggcctctcattatagctatggtggcattcattgtagatgcaccacctgtgtccagatgggccaaccatggactgatggaaaaaggaagcacaagggcctccgacaatggaaatgagtgtgcct

SEQ ID NO: 447440 - DNA, 495 bp, Homo sapiens
cttccataggggaatatctcaaatacactgtggttccaactgggcttatcagcctcctcatgtcctccaacacacatacaaacacacaggtttggggcctccagcttctaaagggagagagcagcttaaatttaacttaaagagactgacccccttcctcaaggggcaaagttcaaataagagcaggtcttatttgtctcttatttgtcctgcattgcaccatctgtgtgtaccaggtggacctcatgtgctcttggtgaatggggaccataagtgtggccactcacagcatttgtggtgctgaaccccatcrcaccatttgttcattgtgcaggtggccttgggtgtttggctgccatgccggcacatgaaggcctctcattatagctatggtggcattcattgtagatgcaccacctgtgtccagatgggccaaccatggactgatggaaaaaggaagcacaagggcctccgacaatggaaatgagtgtgcct

SEQ ID NO: 447441 - DNA, 618 bp, Homo sapiens
cccaggcataatcaacatggattatggatttgagggccaaaacattcctcagtatttattgctttgacttaaaatgaactactgaaaataaaatagcttcagacacaataaggcatttcctaattcagcaggaaaactgagaaatatgggggttatttgaaacctatagcgataaagttcccactgctattgaagttattgtctttaaacmaaagattctgtatcagtaacattattttttgcatgatattcaagttaatttcctgttatctgtaaagaagcaatgaggtagttagtatgactcccaaaggtaaagaatcctgttttgttatgatttcctgctacctaaaggtgggaaagactcaggacattacaatcagtgtgttatgtgtggcaggttacagtgtggtttatttatgaattttatggatatattttctgaatatgtagctctttttgaatttgggtagataaatgttttgtgcctttggaagacttgtagttgtacactgtggttttatagtccattgtcttaggatagagataagctagagtagttcttgtcactataaagtactttcatgttgatagtctgtgcttatttagtagtatatgacg

SEQ ID NO: 447442 - DNA, 635 bp, Homo sapiens
ctcaaaatcctgtcattataagcagatgttactattcttttgccctccagaaggtgaacaagcaaaatgccttgagcatccccaaaaatctgttgccatgatcttttgaccagttgcttttgctttgactggaccacttccatcaccccttggtagcaattgctttaactgtgctttgttctaatgccacgtttcaactccccgtaaaattctttgaagaaatccttcatggtcttgatcccccttgtttaaaatttcccttgaaaggagctggaggccattattctaagtgaagtaactcaggaatggaaaaatcaaatatcatatattttcacttataaatgagagctaaactatgggtatgcaagggcatacagagtgatataatgaattatgaatactcagaaaggggaggatttggaggatagagggagaaaaaactacatattggatataatgtaaactacctggatgacaggtacactaaaatctcaaacctcatctatacgattcatccatgtaaccaaaaaccatttgtaccctaaaagctattgaaataaaaaatatatacttttttttttttaaagaaagctctgctgtcatctgcakctcacctggggacaatgattttggaa

SEQ ID NO: 447443 - DNA, 496 bp, Homo sapiens
atctataaccttacccccaaccccgtgctctctgaaacatgtgctgtgtcaactcagggttgaatggattaagggcggtgcaagatgtgctttgttaaacagatgcttgaaggcagcatgctctttaagagtcatcaccactccctaatctcaagtacccagggacacaaacactgyggaaggccgcagggacctctgcctaggaaaaccagagacatttgttcaggtgtttatctgctgaccttctctccactattatcctatgaccctgccacatccccctctctgagaaacacccaagaatgatcaataaatactaaaaaaaaaaaaaaaaaaaaaaaaaaaaagaggatgtgatctctgggaagagtcttgaaggaccagcagaatatagacaggtaaagaaagggagaaagacattctaggtttaagtaacacaccacgaatgaaggcatgcggttataaaacagtgctggtctcttctaggatttctaat

SEQ ID NO: 447444 - DNA, 496 bp, Homo sapiens
atctataaccttacccccaaccccgtgctctctgaaacatgtgctgtgtcaactcagggttgaatggattaagggcggtgcaagatgtgctttgttaaacagatgcttgaaggcagcatgctctttaagagtcatcaccactccctaatctcaagtacccagggacacaaacactgtggaaggccgcagggacctctgcctaggaaaaccagagacrtttgttcaggtgtttatctgctgaccttctctccactattatcctatgaccctgccacatccccctctctgagaaacacccaagaatgatcaataaatactaaaaaaaaaaaaaaaaaaaaaaaaaaaaagaggatgtgatctctgggaagagtcttgaaggaccagcagaatatagacaggtaaagaaagggagaaagacattctaggtttaagtaacacaccacgaatgaaggcatgcggttataaaacagtgctggtctcttctaggatttctaat

SEQ ID NO: 447445 - DNA, 496 bp, Homo sapiens
atctataaccttacccccaaccccgtgctctctgaaacatgtgctgtgtcaactcagggttgaatggattaagggcggtgcaagatgtgctttgttaaacagatgcttgaaggcagcatgctctttaagagtcatcaccactccctaatctcaagtacccagggacacaaacactgtggaaggccgcagggacctctgcctaggaaaaccagagacatttgttcaggtgtttatctgctgaccttctctccactattatcctatgaccctgccacatccccctctctgagaaacacccaagaatgatcaataaatactaaaaaaaaaaaaaaaaaaaaaaaaaaaaagaggatgtgatctctgggaagagtcttgaaggaccagcagaatatagacaggtaaagaaagggagaaagacattctaggtttaagtaacacaccacgaatgaaggcatgcgsttataaaacagtgctggtctcttctaggatttctaat

SEQ ID NO: 447446 - DNA, 493 bp, Homo sapiens
aggatactagaaaattattgtattcattatttttagttgattttagcaggagagttgaccaaagtggcctagctctttattattagaaatggaagaaaataaaatttggaatttgtatggtctttcatcatttctaagtataaaagtaatcccccaagttgrtaagtttcagtatgtaaatttttttaaaaaaatctgcatggcaaaaaagaaaataaagaaaaaaaagaaagaaaataaatcacaaagaggactaatagacattcaacaagcaagaaaaagcatttaaaattctaatcaagaaactcaagctcaggagaaagagaccgattttctttctttttaaaaagtttaccattttatttatttaattcattcattcttagagatgaagtctcactctgttgcccaggctgcacttgacctcctgggctcaagtgatcctcctgcctcagcctcccaagtagataggactacaggcactcatcattgc

SEQ ID NO: 447447 - DNA, 573 bp, Homo sapiens
taggcctcattttccacacagctctcctaggcccccctcagctgaccttggaaattcttcctggggacctcggtcaaagggagagttgccagaagcttggaggtctaccacccccasaaagaatgaaaatagggtgttgtgtggaaagagaggaggaagaggaaagtaattaaagttaattatggaaataacaagttagaaagataccctaagaggagaaaaatccagcccccattgcttggtgggtgaggaagtcattctggtttggaagtccaagtcccctagagaggtttgggggtgactagggagggtcagagagcagccttgaggtttttattttaagccacagtggtatcaccaattgtttgaaggattgcagaccagggtagaataatatttacaaagccagctgggtaaaccccatgttggcagcctcattcctctgaaaccgaggccacttctagaattcccttttctcaagtacaaggaaagaggaaagtttttatttcagtcataagtggattaaaaatacattaaacacaaattgctagagcatattaatcaccgataatc

SEQ ID NO: 447448 - DNA, 573 bp, Homo sapiens
taggcctcattttccacacagctctcctaggcccccctcagctgaccttggaaattcttcctggggacctcggtcaaagggagagttgccagaagcttggaggtctaccacccccagaaagaatgaaaatagggtgttgtgtggaaagagaggaggargaggaaagtaattaaagttaattatggaaataacaagttagaaagataccctaagaggagaaaaatccagcccccattgcttggtgggtgaggaagtcattctggtttggaagtccaagtcccctagagaggtttgggggtgactagggagggtcagagagcagccttgaggtttttattttaagccacagtggtatcaccaattgtttgaaggattgcagaccagggtagaataatatttacaaagccagctgggtaaaccccatgttggcagcctcattcctctgaaaccgaggccacttctagaattcccttttctcaagtacaaggaaagaggaaagtttttatttcagtcataagtggattaaaaatacattaaacacaaattgctagagcatattaatcaccgataatc

SEQ ID NO: 447449 - DNA, 543 bp, Homo sapiens
ggacatctgtctatcattgggaatttgggaggcaaatattttcacagaacctaagtgttcaaacaaacacgagtagcaaatatggtctcaactccagctgagccattaaaacttggacaaaagaagcaagggaaaatggaaatagagggtggataggaaatccagggctccaggattcttgtaygaattacatgaaaaatgaagtttgagtcattcaaaaatacatgaagtcctgcaccatgatcccataattgttggtttcaaggaaagaatatgaattcataagtctccctttggaacataggttcatggtgaggaattggcagagctggcctatacttacaggattgggcaacctgagccaggaagagtgctgcttttcccctgaagggcaggggtgggctcagaattgtcagggggcatgagctggacctgcagttctaaaatagcttttagctggacttgactggaaggggggacctcgtcagggaaaggtatcaatgggaaaaatgccggcttggagcaagtattgcaaaggccagc

SEQ ID NO: 447450 - DNA, 543 bp, Homo sapiens
ggacatctgtctatcattgggaatttgggaggcaaatattttcacagaacctaagtgttcaaacaaacacgagtagcaaatatggtctcaactccagctgagccattaaaacttggacaaaagaagcaagggaaaatggaaatagagggtggataggaaatccagggctccaggattcttgtacgaattacatgaaaaatgaagtttgagtcattcaaaaatacatgaagtcctgcaccatgatcccrtaattgttggtttcaaggaaagaatatgaattcataagtctccctttggaacataggttcatggtgaggaattggcagagctggcctatacttacaggattgggcaacctgagccaggaagagtgctgcttttcccctgaagggcaggggtgggctcagaattgtcagggggcatgagctggacctgcagttctaaaatagcttttagctggacttgactggaaggggggacctcgtcagggaaaggtatcaatgggaaaaatgccggcttggagcaagtattgcaaaggccagc

SEQ ID NO: 447451 - DNA, 543 bp, Homo sapiens
ggacatctgtctatcattgggaatttgggaggcaaatattttcacagaacctaagtgttcaaacaaacacgagtagcaaatatggtctcaactccagctgagccattaaaacttggacaaaagaagcaagggaaaatggaaatagagggtggataggaaatccagggctccaggattcttgtacgaattacatgaaaaatgaagtttgagtcattcaaaaatacatgaagtcctgcaccatgatcccataattgttggtttcaaggaaagaatatgaattcataagtctccctttggaacataggttcatggtgaggaattggcagagctggcctatacttacaggattgggcaacctgagccaggaagagtgctgcttttcccctgaagggcaggggtgggctcagaattgtcagggggcatgagctggacctgcagttctaaartagcttttagctggacttgactggaaggggggacctcgtcagggaaaggtatcaatgggaaaaatgccggcttggagcaagtattgcaaaggccagc

SEQ ID NO: 447452 - DNA, 557 bp, Homo sapiens
gggacaactggtactacctcttccaaaaagtaaaatttactcagaagtgcttgtagggaggcatcagatatggtcttgagttgtaaaagttcrccaaaccttgtacaaattatgaatcagagcagcttttaaagtagaagaggctcagtataattgggtgttcttaagtgaaaaatgtgagataagaaagctgtcctttttgatgtccctttgaattcagaattttaagcggatgcacatacaaatgtttggaattgagacttagaatttctaattctccagctaggtgctccccatggcatggtggaaagatcacactaggaagatgtcagcattgccactggccagtggtgggatctcaagcaagtccttcatgtctcttacctgtatgagaagagtgtggaattaagtaattttagggttttcctacctctaccattttatatatcaagggatataggaagaaagaatgtaagaaagaaaggaagggaggatggaatgaaagatttcttttgggtttcccatgtatcatggccttttaattcctctaacaatac

SEQ ID NO: 447453 - DNA, 516 bp, Homo sapiens
ttcaattaatttgctattatcccaagtagacagacaacttcagtagtagccatctccctacatttttagatcactgaaaaaaatggatgagcaacccatgaaaataactagcttactgaaatgcttgtcttttaaagaaagttgggattatttaaaaaaaaaaaaatggcccaggaccagtagctaggagatctgggagagagaagtcattgccttggttctgacactaartaacccttttgccttttgcaggtaacttctcatctaggtcctcagcatccttctctgtaaactgaagagtttaaatgactctaagttcctctctctctctctagatgttctctaacaccaagtttatgtgagtttctttggccagattttaaccagagaccatcctccacgaaggtcaaagataattaattctgagatagcaggagttgtttttggcatgtgcagtcaacctttcaaaaaaccaagagttctcaagttaagctaccttcacgaacctcttattaa

SEQ ID NO: 447454 - DNA, 377 bp, Homo sapiens
atagcatgagagtggccaaatatttaggctgaatttattgttgtgttagaaaaaagaccaggaaccacccaagtgtccaggaactggtgggtggctatacataactgtgatgcatctatacratgaaatacaactaagcattaagaaggaacagacttcttacatatgcaaaaacatggatgatctcaaatgcatgttaagtgaaaaaaagtcagatataataagctactctatgattccatttatgtgacattctggaaaaggcagaaaatagatcaatggttgtcaggtgctgggggtgaagggaatctggagaaactttctgaagtgatggaaatattccattatcttgagaatggtactgatgacccagtggt

SEQ ID NO: 447455 - DNA, 608 bp, Homo sapiens
agtcactacatatgtggtaatttttcacatacaataaataatacagcagatgtattagttcattcttgcattactataaagaaatacccgagactgggtaatttataaagaaaagagttttaattggctcacagttctgcatgctatacaggaagtttagtggcttctgcttcttgggaggcctcaggaaacttacattcatggtggaaggcgaaggggaagcaggcatgtcttacatggctggagcaggagagagacatggggaaggtgcaayatacttttaaatgaccagatcccacaataactcactattatgaaaatagcactgaggggatggtgctaacccattcatgagaactcagcccctatgatccaatcacctcccaccaatttggggattacaatttgacatgaaatttgggtggagacacagacccaaaccatatcagcagaatagcaaaaaacaaacaaaacccacaaacaaacagaaaccaaaaactacccaaacctcatttggaaaccaaaaaacatcttactagacaacatccttgagtcataaaggaaattaagaaatatttaaaattgaatgttaataaaaattctacatg

SEQ ID NO: 447456 - DNA, 608 bp, Homo sapiens
agtcactacatatgtggtaatttttcacatacaataaataatacagcagatgtattagttcattcttgcattactataaagaaatacccgagactgggtaatttataaagaaaagagttttaattggctcacagttctgcatgctatacaggaagtttagtggcttctgcttcttgggaggcctcaggaaacttacattcatggtggaaggcgaaggggaagcaggcatgtcttacatggctggagcaggagagagacatggggaaggtgcaatatacttttaaatgaccagatcccacaataactcactattatgaaaatagcactraggggatggtgctaacccattcatgagaactcagcccctatgatccaatcacctcccaccaatttggggattacaatttgacatgaaatttgggtggagacacagacccaaaccatatcagcagaatagcaaaaaacaaacaaaacccacaaacaaacagaaaccaaaaactacccaaacctcatttggaaaccaaaaaacatcttactagacaacatccttgagtcataaaggaaattaagaaatatttaaaattgaatgttaataaaaattctacatg

SEQ ID NO: 447457 - DNA, 505 bp, Homo sapiens
ataaaccactaaatgtttggtaaattgaaatggcagccaaatatctctcctaaactccccccaccccaactcagatctagaggcttttaagggacttttaagaaacagttaatttctataacatacaagttgctccagaaatagaaatagagcaaaatttgctctggtcattttatgaggccagcatcaacctgataccaaaaccaagtaaagattgtactggagaaaaagaaaaggaagaaagaactattattacacttgtgaactaagatgtcatttcagataaatttattatttgttttwaaaaaatccagttttaggaatttcctaaaaacctattagagcaataggctctaatggttaatagctgtcatcaggataatacgtagatcactcaactgggttaccacatgactgtgcccttcaaaactcgcttcaacttcctacccttcattgttctcgccagttctcaacttattatataacaaactggccaattaaatca

SEQ ID NO: 447458 - DNA, 575 bp, Homo sapiens
gtttattttctataactatctttataatttttcctctacaatttttcccaccaccctgactgtactcccacagatgatgacaatgcatgccacctcctgagcttccacttgggaagtagacatgcttaacacttctgtatggatgcacctgctcttgaacatacctaccttgtttcttttgtttctgccttttttttttttactcccctctaccycccacagcttgggcactcatgcctgaccctctctattcctcactgaggcaacatcattacttagccttaggatcattgtatctccagatctattggctcagctaaggtgccaagctctcacagtttcccaccctcaatctcttcactccaaccccatgcaggcccctggagcttctgtagcactttggccttaacagtttttcctcttctctgtgtgtttcttcatcctatacctcacattcccctcctgcccatctgttcctaactttctcatgattttcatgtttgtcttatattctaatctgcatctcttccaaaggcctttggcacctttttctaaaacttctaggtgctctctga

SEQ ID NO: 447459 - DNA, 529 bp, Homo sapiens
catgccacctcctgagcttccacttgggaagtagacatgcttaacacttctgtatggatgcacctgctcttgaacatacctaccttgtttcttttgtttctgccttttttttttttactcccctctaccccccacagcttgggcactcatgcctgaccctctctattcctcactgaggcaacatcattacttagccttaggatcattgtatctccagatctattggctcagctaaggtgccaagctctcacagtttcccaccctcaatctcttcactccaaccccatgcaggcccctggagcttctgtagcactttggccttaacagtttttcctcttctctgtgtgtttcttcatcctatacctcacattcccctcctgcccatctgttcctaactttctcatgaytttcatgtttgtcttatattctaatctgcatctcttccaaaggcctttggcacctttttctaaaacttctaggtgctctctgaagatgttgagatcttgcttctgtcccaatctggtcacac

SEQ ID NO: 447460 - DNA, 575 bp, Homo sapiens
tggataaaataccatgatgttagactctgatggagcaatttctcgtcccagactaagaaggggctcaccttacaagagtcagttatcagaggctccagtgcgggcaggatcactgactcagaaggaccagatccttccccatcttgcctttcctgtcagccatgggggcttrtacctcagactggaagccagagatgagatgaaggatgcaagaggtcttgggtctttgtacttggtccagaaatggcccaagatatactggatagataaggaggcactggggagcacttggctgagacagggagggaggtggggggaaggaaaccaagcaaggtgtgtgtgcaaaggactcccagctctttaaatctggatcctggtcatttcaggatgaggaagtttcagcctcagaagaccttcttttctccttgaaatctttggattagaaatctggtctctgggggaaccttgattaattttagcctatctttattcaacagggattgactcagcacttgctttgtgccaggacttgggccaactcaaggggcacgaacaccaagaaggaatatttgccc

SEQ ID NO: 447461 - DNA, 553 bp, Homo sapiens
gcccagtcccagggttccaagaagccttcctgggagagggggcctgagttgaatggtgcaagatgaacaagaaatggcaagatagagaaaggtggggagggcttcccaggcagaagagagagcatggctaaagggctaggggcatggagcagcaggggacccccagccatgtagtatcactggaggatgaaaataagggggagaaggagggagggagagaaggtatacttctgagggcagaactaactcagccrttagggcccagcatgccacaccaagaagccgtttgcctttctgtgattgtatctttctcatttgctcccactttgtagaacagcttttagaaaatgctaccctgtcttggttgtgctcaaaggactggaaggagaggggcttgtgttccccttgtacctctgaagagcagggagcaagggtaggcttggtgggggcagcaagattccagcaggaaaatactttttttttttttttttgagatgaagtttcgttccgttgcccaggctggagtgcaatggcacgatctcagcttactgca

SEQ ID NO: 447462 - DNA, 520 bp, Homo sapiens
tcagctcaggatgggacaggagagggctccatggctgacagcactgacagatgtgagttcatgttcactgccaaaaagcacagctgttgtcacagggcttacagcagcactcagagcatgaagaatgtaaaccattgtgtcttttatgggttgatatatctatttgcttttataacaartgatttaagagacaaataacattataatgaaatagatcaatattgctgctttaagtgggggaactgtgtgcctcaactttctcaaaggcatacagtcattattagtaacaaaaatgattgtactaagtgctaattttgaggattattgtgagcaatttgtgtggggtggtggtggggaggcccatttgccccacactgaatgccccagccctgtctgctgcctcgaatctgtcccggggtcttactgtgtgtgggcctcttcctgctcctgccacatttctgctctctgatgttctcttccctcttatttgctcctcaaccttgctttgcttttctttttc

SEQ ID NO: 447463 - DNA, 573 bp, Homo sapiens
tcccaaaataaaattgtgttttcatttgtgcatgtcacctgctagttcttgtgatgtggacatttttttaacctatttagagtattatcatgaatattttaaattttcacctaaatttacgtatyagagattaaaaaaaaaaaagaaaatgggctgggtgtggtggctcacgcctgtaatcccaacactttgggaggccaaggcaggcagattacctgaggtcaggagttcgagaccagcctggccaaaatggtgaaaccccttctctactaaaaatacaaaaaaattagccgggtgtaatggtgcgtacctgtaatcccagctactcgagaggctgagacaggagaatctcttgaacccaggaggcagaggttgcagtgagctgagatcacgccactgcactctagcctaggaggcagagtgaggctccgtctcaaaaaaaaaaaaaaatagaaaataacaattagacctactgttggtgctgatggatgaagcagcagaatgatgacagtaagcagtggctttcctgcctggctttgcctttggggccttcaacatttagtatttcagctt

SEQ ID NO: 447464 - DNA, 573 bp, Homo sapiens
tcccaaaataaaattgtgttttcatttgtgcatgtcacctgctagttcttgtgatgtggacatttttttaacctatttagagtattatcatgaatattttaaattttcacctaaatttacgtattagagattaaaaaaaaaaaagaaaatgggctgggtgtggtggctcacgcctgtaatcccaacactttgggaggccaaggcaggcagattacctgaggtcaggagttcgagaccagcctggccaaaatggtgaaaccccttctctactaaaaatacaaaaaaattagccgggtgtaatggtgcgtacctgtaatcccagctactcgrgaggctgagacaggagaatctcttgaacccaggaggcagaggttgcagtgagctgagatcacgccactgcactctagcctaggaggcagagtgaggctccgtctcaaaaaaaaaaaaaaatagaaaataacaattagacctactgttggtgctgatggatgaagcagcagaatgatgacagtaagcagtggctttcctgcctggctttgcctttggggccttcaacatttagtatttcagctt

SEQ ID NO: 447465 - DNA, 576 bp, Homo sapiens
tgacagtaagcagtggctttcctgcctggctttgcctttggggccttcaacatttagtatttcagcttggcctctaaaaaaatgggagcttacgaatagctaccttacaaatatattaggtggaaaaatcactggtgtgtgattttggggccaccaagatgcaaatakgtagtatcaaatgcatcaatacggacaaagggttccaatatctgggcaggccaccaggcagaactgcctccttcagttgtttatgtcattcacttctttcttttcttttttccctcagttttcagccattccttcctcaaaatcctgctcaagtctaagagcaaggatcctacttgctaactgccgtgtgctaggcagggtgctaagcactttattcatgtatctaatttagtcctactacgccacgagagagataccatcatccacactttacagatgagcaaatggaaccgctagttaagaatcttgctcaaggtcacatcggtagtaagggatggagccagtgttctcacacagatatttgcagtcagccctttctaattacagatcaggctcttttgcaacact

SEQ ID NO: 447466 - DNA, 503 bp, Homo sapiens
ctattgatgggcacttaggttgattccgtatctcggctgttttgaatagtgctgcaataaacatgggagtgcagatatctctttgatacattcatttcctttcttttggatatgtagtcagtagtgggatttctagatcacatggtagttctatttttagttttttgaggcacctccatactgttttccatagtggcygcactaatttacattcccaccagcagtgtatgagggttccttcccctttctctacatcctcactagcatctttttaataaatgccattttaactgggatgagatgatatctcattgtagttttgatttgcatttctctgataattagtgatggtgagcattttttcatatacctgtttgccacttgtatgccatcttttgagaaatgtctattagatcttttgcttgtttcaaaatttgattttttaaaaacaattgcattgcattccttatgtattctagttattcaccctttatcagacggat

SEQ ID NO: 447467 - DNA, 562 bp, Homo sapiens
tgggtctcttgtttggcctctcagacatggtgccattcctattggagtcaatagggatctggcatgacacctacgttccttaaaaccaatacaattagtatgcttttatcttgttaatctgcctggtgtccatttggtttctagttctagccaaaaataccacctaagaacttaagggtgttggggktgctcgctgactctcctacaatcctgtgctcataaaacaaggaaacagaaatctcagatattcaatacctaaatgtttatcttaaagcaaattctacttatatggtttcattctttgtttggtaacctatcccatttcactttatttttttggatctcttttctctcattttctgtattaaaaccattcacagtaacttgtatagcccttcatttggaagagaacgtggactttttcttttccaaatcattttaaatcaacagctcctcagtgagtgcctcctaaattaagattaaggcatgacccctgccttcatggtgcttactttacgtggctgtagggacagacaggaaccccagggcatatgagattgca

SEQ ID NO: 447468 - DNA, 562 bp, Homo sapiens
tgggtctcttgtttggcctctcagacatggtgccattcctattggagtcaatagggatctggcatgacacctacgttccttaaaaccaatacaattagtatgcttttatcttgttaatctgcctggtgtccatttggtttctagttctagccaaaaataccacctaagaacttaagggtgttggggttgctcgctgactctcctacaatcctgtgctcataaaacaaggaaacagaaatctcagatattcaatacctaaatgtttatcttaaagcaaattctacttatatggtttcattctttgtttggtaacctatcccatttcactytatttttttggatctcttttctctcattttctgtattaaaaccattcacagtaacttgtatagcccttcatttggaagagaacgtggactttttcttttccaaatcattttaaatcaacagctcctcagtgagtgcctcctaaattaagattaaggcatgacccctgccttcatggtgcttactttacgtggctgtagggacagacaggaaccccagggcatatgagattgca

SEQ ID NO: 447469 - DNA, 366 bp, Homo sapiens
acacctgctgctctgcagatggcctcttctgtgctgctttctttttagaggaagcccttcaagcttcttgtatcaggtgccacacagacattagttgcatcttcattgtcctctcctgtgaaggcagaacctggtgctgagtccccagcatttccaggtaggagggaggctgtgcaggagagaagccagacctggggaaagagtcagggcatgaaccaaactctcctttattggcacaagctcccctaggccagccytcctggggctccacagctccagggtgcatcacggagctgcaccccaatgccagcttgtcctggccctcgggagcacaaacctcctgggaagggccctcagaggactgcc

SEQ ID NO: 447470 - DNA, 607 bp, Homo sapiens
ctagtggtaaagataagtgaattgtctcaagtattttagagtagcttcctgcttttgattaaaaagagtataaacatctagccagtcctgtagctcttagtgatgcaatcctggatcaagatttggattcagaagttactagtttcttgatgtcaactatgcagattaattgaattctgtatccaaaatattgttgtatttacctgaaaagatgatgtgctatcaggagctaaagaagccatgctttaactatgaagggataaacccaaggacaatatgcaaagtatgttatttatccaatgctctctgacaaattactccaaaatgtagtggcttaaaacaacaataataataatctcccatgrtttctgtgagtcaggaatttgagagcagttctggcttggagatttctcatgaagttacaatcacatgttggctggagctgtaactatctgaaggcttgactggggctgaaggactcacttccaagatagctaactccatggcagacaagctgatgctccccgttggagggaggccttagcttttctctatgttggcttctccatgtgtcctggatttcctcacaacatggtggttgagttcc

SEQ ID NO: 447471 - DNA, 549 bp, Homo sapiens
aacttgaaaacagcaaatcatattttgccaagggagaaaaaccctccctcacccaagagattccttcttaattcagcccttagtaaacattgtttctgattggatttctagcccggcctggcactggttctaccaatgagatcactaacagaatttgagaaaaacatttgggacctgtggccttgatttgaaaaatcaccctgtctctgttctgttgtattgcagatgaggagacaagagatgcttacggtgtgtgtgtacagaagggcacacctattgtttacaggtgttgaaatagaatgtcaactgtcatgacaaggagggccttaaccagcaggccactgcatcaccatgttgaatgaactcaamtccaaacatgttaatgtaatatgaaacataccgatggtgatcgggccccaactttctctcttacttcctctcctgcctatatgcctatcctttcctcaataattggccaaattgcttcaaattattgcctttagcaatgctacttacatgtctccaagaattctggttaaaaggagtggg

SEQ ID NO: 447472 - DNA, 582 bp, Homo sapiens
caggaagagcagatgtaaggattgaatgacagggtgaacatggtggcaagtgtgagcattttctgccttgtctcacccaagggtatctccccagtaggtatttagactattcctccactcacccttgtagcctaccaagagcaacatgatgaagggcttcttggccactgctcaagggctacttcctattagataaaacaaggaaacaacagaggtaaaacctgytggcttccaggtacagcccaggctcatatccaggagtccttggctagacttttgtgtggcagatagggcactgggcttggagtcagaagacctggctccagcccagctctgccatggaccagctatgagatcttcaggcagcctcagtcccttcatctgtctaatgacatcaggcttctgcatcctccctttgggagacctcacatacttctgtgacaccatctacagctactatgccagagtcccctaaatccatatcaccaagccagacctctcccttgagttgccgagccctgaacccaaacttccccaaacatctctgtttgggatttatatgtccctagaactcagcatgcc

SEQ ID NO: 447473 - DNA, 569 bp, Homo sapiens
gcacacacacatatcacaaatagatttaaaataaaacgctgtcctgttcttcaagaaatcctgcaagtttcctaagactgaaggattgatttcaaaatgcaggagccaaaagtagctagttttgccctggatatggaaatgcctcttcaagtcatcaaaatgtggccaagcaaaatattaatagaaatacaagaaaatattctacaatcaggggcaactgcttagcatgcatttccagataaggaagccagataattttatgtgttatccaatcaattgcttctaattgataaactaactttaaatcttggttatagattttaaaatatcaacaattcagatatctttttaaaaagtaaatgaaaacaattccaaaatacaatgtaaacctattggyaaaatgtcctgaatttactaaggacacatagctatactcaaaaggttggaatcaggtaagtttgtgaaactgaccaagtcaccaactctaaggtggtgacgggggaagagattaacattgtgtgagaacagaagacttgggaaaagtccaatcttctcttgtttggcaggcc

SEQ ID NO: 447474 - DNA, 550 bp, Homo sapiens
tgtcctacaggacctggacgctaatgggggccagactctcctctcagctgccctgtgctgtcaagtgcacatatacgcacacctcccaacctggcacagtcagcggtgggagcagctgaagtgatgagtcaagatccgcttagacattatttggcattcccccaaagaatggcatttggcactccccaaagaagcagaacctgcaagttatttttgagtgatcactattgtttctgaacatccttatcaaagccatcttctatttgttcctggggctgtttaggactttcctttagggcagggtttctcaccgacattgtggaccagatcttcgctggggctggggctggggctggggctgtcctgcgcactggagggtgttagcaacaagcctcgcctctctacacagatgccaggaagctctccctcccctcccacagccacgacaacccaaaaatgtgtccacacattgccaaatgccatatcaggggcaaaaagtcaccggggggcgsggggggcttgagaaccattggtttagacaaacgttcag

SEQ ID NO: 447475 - DNA, 652 bp, Homo sapiens
tttttttaatttgcttttatcagactaaaattacatcagatctgtttttattatttgtatacttttggttgtaaagttcatattataagattgactaattccatttctttaaaaaaatgccctttaaatkaagatttttctatatgatatgtcttctgttcattagcaaaggaagcaatattgagttctttactcagaacaaatcatgctattatacctttgacaatatgcattattttatgaggatatgtagatgtacttacaaacatatctttggcatttttaacttacacatattgtgtgttccatgcttgtggatgtggaaacttcattagtttagttgaaaaatactactctgtttcaaaaagtatttacattttttatgtctgcctttccagaatttttttctttcgtgtcttctttatagtccttgatatcaagaacctatatgcccttctttaatatattaagactgccactagaaggtggtcaacccttgctctgtctagtatatgtacacaaaacaagaaccagcactgttgtacaatacagctcactagggctgccataacatcactcaagtgcttcccaatctcaatcattttaccaaagcatgtggataaaatatatgaatcaggattttattgctgca

SEQ ID NO: 447476 - DNA, 570 bp, Homo sapiens
gtattttgactaaatttgagtattagtagttgatataatatattcatcatataaaatttaatttgttaccaaattaacaaatgctgactttataaacttttattttaagttcaggggtatttgtgcaggatgggcaggtttgttacataagtamatgtgtggcatggggatttattgtaccaattatttcatcacctaggtattaagcctattattcattatttttcctgatcctctccctcctgccaccctctaccctcctctaaagcccagtgtgtgctgttcccctctatgtgtccatgtattctcatcatttagcttccacttacaagtgagaacatgcagtatttggttttctgttcctgcattagtttgctaaggaaaatggcctccagcaccatccatgttcctgcaaaggacatgatctcgttctttgttacgggtgcatagtattccatggtgtatatgtaccatattttctttatccagtctatcactggcaattatcacatcaaggcaactattctaaggactggagcagaaaactttgccataggaactgggtaacag

SEQ ID NO: 447477 - DNA, 570 bp, Homo sapiens
gtattttgactaaatttgagtattagtagttgatataatatattcatcatataaaatttaatttgttaccaaattaacaaatgctgactttataaacttttattttaagttcaggggtatttgtgcaggatgggcaggtttgttacataagtaaatgtgtggcatggggatttattgtaccaattatttcatcacctaggtattaagcctattattcattatttttcctgatcctctccctcctgccaccctctaccctcctctaaagcccagtgtgtgctgttcccctctatgtgtccatgtattctcatcatttagcttccacttacaagtgagaacatgcagtatttggttttctgttcctgcattagtttgctaaggaaaatggcctccagcaccatccatgttcctgcaaaggacatgatctcgttctttgttacsggtgcatagtattccatggtgtatatgtaccatattttctttatccagtctatcactggcaattatcacatcaaggcaactattctaaggactggagcagaaaactttgccataggaactgggtaacag

SEQ ID NO: 447478 - DNA, 641 bp, Homo sapiens
ctaagatactgtttgctcatatctatgatcagagccaacacaaatatttttcatctgaatcacctatagtaatgctttctaaagtatctctctggtggaatgcaacacgaatttacatatggcacatgggtaaacatttttaactttactatttaaatattgatttcaatatgtattaggaaaaaattacacacgattttctattttaaaagtgagtcaacttggaaaacatattaagttaataataatacaggtggcatgagaaaatgrcaaaacttacatgtctaaggtttgggatgctggcttacataatataacttctctgggcatgagctagcataaatattattgttgaaagatgtgaaaattccaagctaaattatattttattctctgtattactgcctggcttttatctcataaagtaagcataatatgaaagtgagttctttctatataaatttaagatattttactgatggaagacagcttattaaagccagcagtttaatgagtaaaactcacctttctaattgccagtaaaattaaaaactctaattcacctgattagagggcatatgtatcagtaacattctgcataatactacatatactacattctgcaaactctcaatactaaa

SEQ ID NO: 447479 - DNA, 641 bp, Homo sapiens
ctaagatactgtttgctcatatctatgatcagagccaacacaaatatttttcatctgaatcacctatagtaatgctttctaaagtatctctctggtggaatgcaacacgaatttacatatggcacatgggtaaacatttttaactttactatttaaatattgatttcaatatgtattaggaaaaaattacacacgattttctattttaaaagtgagtcaacttggaaaacatattaagttaataataatacaggtggcatgagaaaatggcaaaacttacatgtctaaggtttgggatgctggcttacataatataacttctctgggcatgagctagcayaaatattattgttgaaagatgtgaaaattccaagctaaattatattttattctctgtattactgcctggcttttatctcataaagtaagcataatatgaaagtgagttctttctatataaatttaagatattttactgatggaagacagcttattaaagccagcagtttaatgagtaaaactcacctttctaattgccagtaaaattaaaaactctaattcacctgattagagggcatatgtatcagtaacattctgcataatactacatatactacattctgcaaactctcaatactaaa

SEQ ID NO: 447480 - DNA, 572 bp, Homo sapiens
ccagacttcatatatcccactctaagrctaccatttcttatctttctagctcaatccctctgcaaccctaaccctgaaactttcgctataaaatcctgaaaatccaattatttcccttctcttccctgccccttactcctatttctgccctcctgcctgacccagtttaaagtcatggtcagtcggtacaatctctcccttgcactcaccctgaactcccttaacccacccttagtttgctgtgctttgcagatgctgcctagatcaagctctctgtcaaccgtatgctgaggcctcagcagcccaatgtagctggtgcagaacaagcgatttcaccacacttctctactccattcaattggccatgcacacagatggctattttatatatttcattctctcctcaaacctccaacacctcttctccagcctcattcacagctaatgttcttgctcctagtcattgaatagaaataacataaaggggacttcggaaggctgctaccaccacatctacacacccgtcagcatgtgaaacatcacacaggagcctcctgcaggagaggatgtac

SEQ ID NO: 447481 - DNA, 599 bp, Homo sapiens
tgccatttttaatacattttactcttatgaattgggaaacaattggtcacatttctcaaatattttattagttttcttataatcatattgactttacagatkaattaggagaaaattccaaatttagaatattgagtcttccctaagaacaagatgaaatcttgtggaaccagaaatttttatttcttcaagtaatcctttatgtccttcagtagagctttattattttctttgtttaacaatgtgacaggaacttaccaaacctcttttctttttgaatagttttctatcttcccctgtagttaattaagcatggccatttaactaagtcctagctagtgaacaccagtttcagtccttgttctaatacccccagcccatggtcatcttatcttaatttctcgatctcccttgtctgcgtggaaaggactgtgaggacctagaggaagatagagctgcaagatggaaagatgacattcaaggctatgcagcaagaaagaacatcagtgtgggactttgtgtgatccaaaaataagcttgtactattttcagacactgaaggttttttttgtttgttgtttgtttgttttattgttgtt

SEQ ID NO: 447482 - DNA, 599 bp, Homo sapiens
tgccatttttaatacattttactcttatgaattgggaaacaattggtcacatttctcaaatattttattagttttcttataatcatattgactttacagattaattaggagaaaattccaaatttagaatattgagtcttccctaagaacaagatgaaatcttgtggaacmagaaatttttatttcttcaagtaatcctttatgtccttcagtagagctttattattttctttgtttaacaatgtgacaggaacttaccaaacctcttttctttttgaatagttttctatcttcccctgtagttaattaagcatggccatttaactaagtcctagctagtgaacaccagtttcagtccttgttctaatacccccagcccatggtcatcttatcttaatttctcgatctcccttgtctgcgtggaaaggactgtgaggacctagaggaagatagagctgcaagatggaaagatgacattcaaggctatgcagcaagaaagaacatcagtgtgggactttgtgtgatccaaaaataagcttgtactattttcagacactgaaggttttttttgtttgttgtttgtttgttttattgttgtt

SEQ ID NO: 447483 - DNA, 632 bp, Homo sapiens
tgcatgtgtgtgtgaatagttattgtagaacactgattactggtcagcaaaagcctcatttattttattttatttttcttgtttaactttttgttaagataatcatagatccatatgcagttgtaagaaataacacacagagaacacacatagcctttakttgctttcccgaatgggaatatcctacaaactgtgatactatatcacaataggttattgacattgatacagacaagaacatttctaccaccacaaagttccctcaatttgcccttatacagccacactctttcttccccttaaccttcgtcccctagcaacaactatgtcctcttcatttctataattttgttatttcaagaatcatacaacatgtaaccctttggaattggcctttttcactccacataaatctctgtagaatcatataagttgttgtgtgtacagattgagtatcaaaatctgaaaagctccaaaatctgaaactttttgagcgctgacatggttgttcacaggaaatgcttattggagctgaaaaaatcaaaaatccaaaacactttgaatcccaagcatttcagataaggggttgtcaacctatatcaacagttcattgctgtttaatggtgaatggt

SEQ ID NO: 447484 - DNA, 632 bp, Homo sapiens
tgcatgtgtgtgtgaatagttattgtagaacactgattactggtcagcaaaagcctcatttattttattttatttttcttgtttaactttttgttaagataatcatagatccatatgcagttgtaagaaataacacacagagaacacacatagcctttagttgctttcccgaatgggaatatcctacaaactgtgatactatatcacaataggttattgacattgatacagacaagaacatttctaccaccacaaagttccctcaatttgcccttatacagccacactctttcttccccttaaccttcgtcccctagcaacaactatgtcctcttcatttctataattttgttatttcaagaatcatacaacatgtaaccctttggaattggcctttttcactccacataaatctctgtagaatcayataagttgttgtgtgtacagattgagtatcaaaatctgaaaagctccaaaatctgaaactttttgagcgctgacatggttgttcacaggaaatgcttattggagctgaaaaaatcaaaaatccaaaacactttgaatcccaagcatttcagataaggggttgtcaacctatatcaacagttcattgctgtttaatggtgaatggt

SEQ ID NO: 447485 - DNA, 632 bp, Homo sapiens
tgcatgtgtgtgtgaatagttattgtagaacactgattactggtcagcaaaagcctcatttattttattttatttttcttgtttaactttttgttaagataatcatagatccatatgcagttgtaagaaataacacacagagaacacacatagcctttagttgctttcccgaatgggaatatcctacaaactgtgatactatatcacaataggttattgacattgatacagacaagaacatttctaccaccacaaagttccctcaatttgcccttatacagccacactctttcttccccttaaccttcgtcccctagcaacaactatgtcctcttcatttctataattttgttatttcaagaatcatacaacatgtaaccctttggaattggcctttttcactccacataaatctctgtagaatcatataagttgttstgtgtacagattgagtatcaaaatctgaaaagctccaaaatctgaaactttttgagcgctgacatggttgttcacaggaaatgcttattggagctgaaaaaatcaaaaatccaaaacactttgaatcccaagcatttcagataaggggttgtcaacctatatcaacagttcattgctgtttaatggtgaatggt

SEQ ID NO: 447486 - DNA, 509 bp, Homo sapiens
gtgtattgttgaatggataaggggcctcagtataaaggtgtaagctgagatacaggtatgggaacagttacagttggaggtatacgaatggacgtggtccccaaggtaaaaagggcaggaaggaagcatcacccgaggtgaacacatgtgtcctgcattcacttagggaagatagagcatgtttgaaggcacaaaggggccaacagcagcatgcattgcaagattcacagtagttctgaataacctgaacaaggagctactrggggcagggctcaggaggaggatagaagtggaaagaaacctgaccatcaagtattttatatacatgttgagtgatctggactttatatcaaaggctagtgagaagccctgaaaggttttaaggaggaagaggcctgagcagatttgcctttcagaaagatcattccatcaggaatagggaagagaaattgccagggggcagaccagagccaagaagcccccaagttgctccttagtgaccccggcag

SEQ ID NO: 447487 - DNA, 509 bp, Homo sapiens
gtgtattgttgaatggataaggggcctcagtataaaggtgtaagctgagatacaggtatgggaacagttacagttggaggtatacgaatggacgtggtccccaaggtaaaaagggcaggaaggaagcatcacccgaggtgaacacatgtgtcctgcattcacttagggaagatagagcatgtttgaaggcacaaaggggccaacagcagcatgcattgcaagattcacagtagttctgaataacctgaacaaggagctactaggggcagggctcaggaggaggatagaagtggaaagaaacctgaccatcaagtattttatatacatgttgagtgatctggactttayatcaaaggctagtgagaagccctgaaaggttttaaggaggaagaggcctgagcagatttgcctttcagaaagatcattccatcaggaatagggaagagaaattgccagggggcagaccagagccaagaagcccccaagttgctccttagtgaccccggcag

SEQ ID NO: 447488 - DNA, 588 bp, Homo sapiens
ataaacacccacatcagtggtccaccattcctcttccagggttatatttcattgtgttctgattttaaagcaaattagggagtctgtttttgccaattttcccatgttgctgtggttctgagtgctgtgattatcaagacgatagaagtggaaggcgggagtggaggtggcttctacagtcttcagtgcagcatccactacrgagttaatggcatttttacgaagaccaggtgtattttgtacttttttttttggtacacgtttctcaaactatgttaaaattaaccatcaatatcaaagtatactgtcaagaaaaaaagaaatgcttatgatgaatattcatagctgttagtatctttggaaaaggtgggtaatcatttttaaaaatagagtaattttctttggaatacataactctcaagaacattttgatagctatatacatctaagaaaagtgtattccatttattattctgttaattaaatatttgttgatcattactgtgcatgaaacattctctcggatggaggtaagtggagctcctccttgttaaggagaatagtagggagatgtgacggctgcacaaa

SEQ ID NO: 447489 - DNA, 578 bp, Homo sapiens
aaatgatgctaagtactaagtattaaaatagtacttagggtccgtcttgattcataggaactagatggtagaggttcagatagctagtttattaccaataatttaaaaaatagaacttagtttttcttttagacaaaagtacatgtcayttatcccctccacaccccctgtttttttgcaaccagtctgcttgacgtagctttggaaaactgaataattaattgccaaagaataagcagaagcatttttggtgagagaacctaaaagaaaaggaataatgttttaacaacaggaatgatgttttaataatagaggtaacacttatagcatcttctgtcttgtcgtaaaattttctagatacttattttgactagctgctgcatggtgatatggattgggagtgaaggaactgaatcttagtgtcagccgtgtcactaatgcattatattaaccagtagaaaaatcatacaacctctttgtgcctcagtttcctctctgtaaagtgaaaaccaggcctctaaaactaagagcctgctgttagtaagccctgcaggacatagtcccagttccactggatg

SEQ ID NO: 447490 - DNA, 578 bp, Homo sapiens
aaatgatgctaagtactaagtattaaaatagtacttagggtccgtcttgattcataggaactagatggtagaggttcagatagctagtttattaccaataatttaaaaaatagaacttagtttttcttttagacaaaagtacatgtcacttatcccctccacaccccctgtttttttgcaaccagtctgcttgacgtagctttggaaaactgaataattaattgccaaagaataagcagaagcatttttggtgagagaacctaaaagaaaaggaataatgttttaacaacaggaatgatgttttaataatagaggtaacacttatagcatcttctgtcttgtcgtaaaattttctagatacttattttgactagctgctgcatggtgatatggattgggagtgaaggaactgaatcttagtgtcagccgtgtcactaatgcattatattaaccagtagaaaaatcatacaacctctttgtgcctcagtttcctstctgtaaagtgaaaaccaggcctctaaaactaagagcctgctgttagtaagccctgcaggacatagtcccagttccactggatg

SEQ ID NO: 447491 - DNA, 570 bp, Homo sapiens
atttgctctctactactccctactctccctaaaattcaaagtcaaattgtgggatatagggcaggcaaatatattaacagaggctgatggccattaattatctcagaaggcaacctctttacaaatactctaatttcaatctaacagtatgctttatttatgtggcactgcccttcattagtacttgtagagcttgacaaatttgttgtccctgacattattgtgacaattgatgaaatgtaagttctatagatatcaatgataatttcctgattttaataaacgtactgtgatcatgtaaagtctttgttattaggagatgatatgctttggctgrgtcctcatccaaatctcaacttgaattgtgtctcccagaattcccatgtgttgtgggagggatccggggcaaggtaattgaatcatgggggccggtctttcccatgctattttcgttatagttaataagtctcacgaaatctgacgggtttatcaggggttcccacttttgcttcttcctcattttcttttgctgctgccatgtaagaagtgcctttcacttccgaccatgat

SEQ ID NO: 447492 - DNA, 543 bp, Homo sapiens
tccacactatgaagatcagtttcttcatttgaaaatacaaataccaccatctactacattcaggtaactgctatgaataccaaacracaaagtacatataatgaaagcactctataactacaaatcatttttcatagaacaagtacttttctctgtatcccatacttttccttgctaatttcacctgctactgttaaagagtccataagatatcaaacctttaactccaaaaatctacatttctttagtcatgcaattccactgattatatatgttataaaatagtttttaaatgtttttataataatctttttaaggtgaaatcacacattaaaaatacacattaattattagatacttgtcaagatgagaaaaacaagaaaggactttttaaaataagaaaatgtggcatatctctagtcttcatcccttctccaagcaacactttttttttttttttttttttttgagatggagtcttacactgtcacccaggctggagtgaagtggtacaatctcagctcactgcaacctctacttccc

SEQ ID NO: 447493 - DNA, 595 bp, Homo sapiens
acctttaactccaaaaatctacatttctttagtcatgcaattccactgattatatatgttataaaatagtttttaaatgtttttataataatctttttaaggtgaaatcacacattaaaaatacacattaattattagatacttgtcaagatgagaaaaacaagaaaggactttttaaaataagaaaatgtggcatatctctagtcttcatcccttctccaagcaacactttttttttttttttttttttttgagatggagtcttacactgtcacccaggctggagtgaagtggtacaatctcagctcactgcaacctctacttcccggttcaagggattttcctgcctcagcctcccaagtagctgggattwcaggtgcccgccaccacgcccagctaattgtttgtatttttagcagagacgggattggatcatgttggccaggctggtctccaactcctgaccttgtgattcacccgccttggcctcccatagtgctgggattataggtatgagccaccatgctcagccccaagcatcgcattcttataaccaacttggataatgccaattaaatatgtccaagatggaatt

SEQ ID NO: 447494 - DNA, 599 bp, Homo sapiens
agttggtgatgtaaggggagaaataaaaatgtcattcttgctcctctctttctttcattatccttaaccatttaatcaagcaaacatcttgattattttatcttctcttttcaaattcatgactttaccctcatcccagctggacctctgccccagttcaggatctcattagctacaatgtcctcctggttccaaacactgcttctcagattcattaacccattagataaaatttaatttaatatgcatacgtacacatgtgtgcatgcctggttgccagtaaacaataaaattttttaagtcggaaggggaaaaaaaaacaccaaaaaaattggaaggggagcttgtggagcttgtggggaggatggaatattaataaaatagtcattttattttagtcattgcttctataamaatctgctctgtgaaaaccggcaagtgataattcatctaactttttcctttcccaatgaacaacactaaaatagatatataagataaacttcctgaaattcaatatattattttctcatcatcaagtatttaatcttctaagagaatatacccaggaaaaaggagaaccaattcttaaagatgcc

SEQ ID NO: 447495 - DNA, 500 bp, Homo sapiens
acattatcatcaaattgtcaaaaattaaagacagagaggattttgaaagcagcaagaaagaagcaacttgctaagtacaggggactctctatttcttattagatttttcagcagaaaccttgcaggctgaagggaatagaattatatatgcaaagtgcagaaagaaaaaaaaattgtcagccaagaatactatacccagcaatcctgtcctttaaagctgaaggggagataaaggtgttctcaaaccaataaaagccaaggtactttatccactattcctgccttgcaagcatgctaaaggtagttattcaagttgaaatgaaaagatgcaaaacaacaacataatgttttttttgttttttataccaaaaaaagtacaaaacttgttagtaaagttaaatatacrggcaaaataaaaagaatattttattactataacagtggtgtgaagttaattataatcccagtacaaaacctaaaagataaaagtactaaaaaca

SEQ ID NO: 447496 - DNA, 604 bp, Homo sapiens
gaaagaagaaactgatagcaatacagtaatagtaggtgacttcagtaccccattttcaacaatagataggacatccagacaaaaaaattaataaagaaacggggcttgaacaacactacacaccaaataaacttgacaagcctatrcagaacgttctactcaacagaagaatatacattcttttcaagtgtacataaaatattttccaggacagatcacattaggtcacaaaacaagtctaaacaaatttaagaagttcaaaataatatcatcaaataccttgtccaacaacaatggaattgaactagataacaagaagaacatggaaaattcacaaatactaaataacgcactattgaacaaccactaggtcaaacagtaagtcaaaagagaattttttaaatatctcaggataaacaaaaacaaaaagagaacaaaccaaaacttacgtgatacagcaaaagcagtaataagaggaaattttgtagtgataaatgtctgcattaaaaaaaatctcaaaataaacaacctaactatacacctcaaggagctagaataagaacagacttaacccaaagttagcagaagaaagaaagtaaaaaaa

SEQ ID NO: 447497 - DNA, 604 bp, Homo sapiens
gaaagaagaaactgatagcaatacagtaatagtaggtgacttcagtaccccattttcaacaatagataggacatccagacaaaaaaattaataaagaaacggggcttgaacaacactacacaccaaataaacttgacaagcctatacagaackttctactcaacagaagaatatacattcttttcaagtgtacataaaatattttccaggacagatcacattaggtcacaaaacaagtctaaacaaatttaagaagttcaaaataatatcatcaaataccttgtccaacaacaatggaattgaactagataacaagaagaacatggaaaattcacaaatactaaataacgcactattgaacaaccactaggtcaaacagtaagtcaaaagagaattttttaaatatctcaggataaacaaaaacaaaaagagaacaaaccaaaacttacgtgatacagcaaaagcagtaataagaggaaattttgtagtgataaatgtctgcattaaaaaaaatctcaaaataaacaacctaactatacacctcaaggagctagaataagaacagacttaacccaaagttagcagaagaaagaaagtaaaaaaa

SEQ ID NO: 447498 - DNA, 604 bp, Homo sapiens
gaaagaagaaactgatagcaatacagtaatagtaggtgacttcagtaccccattttcaacaatagataggacatccagacaaaaaaattaataaagaaacggggcttgaacaacactacacaccaaataaacttgacaagcctatacagaacgttctactcaacagaagaatatacattcttttcaagtgtacataaaatattttccaggacagatcacattaggtcacaaaacaagtctaaacaaatttaagaagttcaaaataatatcatcaaataccttgtccaacaacaatggaattgaactagataacaagaagaacatggaaaattcacaaatactaaataacgcactattgaacaaccactaggtcaaacagtaagtcaaaagagaattttttaaatatctcaggataaacaaaaacaaaaagagaacaaaccaaaacttacrtgatacagcaaaagcagtaataagaggaaattttgtagtgataaatgtctgcattaaaaaaaatctcaaaataaacaacctaactatacacctcaaggagctagaataagaacagacttaacccaaagttagcagaagaaagaaagtaaaaaaa

SEQ ID NO: 447499 - DNA, 564 bp, Homo sapiens
taaagcctggccaacatgtagacatagtgaaaccccatctctactaaaaatatgaaaattagctagtgtggtggcatgcgcctgtagtcccagctactcaggaggctgaggcaggagaatcacttgaacacaggaggtggaggttgcagtgagctaagatcccactactgcactccagcttgggtgacagagtgagactctgtctcaaaaataaatataaayaaataaataaatgtttaaaatgtgttacattaacaatattaggtttcagatgtctattttcaagcttttttaaatgccaaaatagtttgcttttgaaaatatgtgtttagttttcttttcgcaaaggcaacagtaaaagacctttactgttatgttaattaacagatcatgctctcaatagctttcaggctgactttcaacatacatcaattttgcctaccattccttttagctaaaaaaaaagttaatgaggataatataaaagttttatttaggattaccaatttaagattaacatcctttattactgaaataataaatcacattcatgaaaagagaaag

SEQ ID NO: 447500 - DNA, 563 bp, Homo sapiens
cttggggatggatgcaggagctgaactggctgcgaccactgatggaacrgccacttctgtcactgatggaatgatgatttgaagcagatcagagacagaggccgctcttcttgcaaaaccaaaagcaagcgaacaaaaagcaatggccgatggcaacaacagaagctggccacgggtcttcacctctccagacccagcagcagtttcacttcttctggttggacatcggggcaatctgtttgtggggcaacttcctaaacaccaggaagaaacagaatggattccccatccgctgctcctccaggacgcggctgctagcaggaggagatgaattctagaggagaggatcaggaagagtgttcatctgaagggagaaacagacaacggtgacctctgctaagatccacaggatgaaatctgttcttattaaggtcactgtctaatacagagaagtggacccgcaagaatgaagagccccactgcccagctgcatagggagagctctgagactctaaaactacgtcctagtgtaatttccacacatcagaaagagggggagtaaa

SEQ ID NO: 447501 - DNA, 563 bp, Homo sapiens
cttggggatggatgcaggagctgaactggctgcgaccactgatggaacggccacttctgtcactgatggaatgatgatttgaagcagatcagagacagaggccgctcttcttgcaaaaccaaaagcaagcgaacaaaaagcaatggccgatggcaacaacagaagctggccacgggtcttcacctctccagacccagcagcagtttcacttcttctggttggacatcggggcaatctgtktgtggggcaacttcctaaacaccaggaagaaacagaatggattccccatccgctgctcctccaggacgcggctgctagcaggaggagatgaattctagaggagaggatcaggaagagtgttcatctgaagggagaaacagacaacggtgacctctgctaagatccacaggatgaaatctgttcttattaaggtcactgtctaatacagagaagtggacccgcaagaatgaagagccccactgcccagctgcatagggagagctctgagactctaaaactacgtcctagtgtaatttccacacatcagaaagagggggagtaaa

SEQ ID NO: 447502 - DNA, 526 bp, Homo sapiens
tcaagttttctgttttcctattgatcttctgtttggatattttataatggataaagtattgaaagtgggctatcaaaatctccttctcttattgtgttgctgtttctyccttcaattctttcagtgtttgcttcatttatttaggtgctctgatgttggatgaacatatatttataacggttatatttttctggagaattgacccttttcttattatatgatgtccttcatagcctgttatgacaggttttgatttaatgtctattttgtgtgggataaggacacacaccccttgcgggttatcttgcggttcttgcagttaccatttgcaaaggtacccttattatcacttgattttcatcctatgtgtgttcttaagtctaagtgagttcttggggacagcatgctgttgtattttgtcatgacatgctttgactcagtattatccttctttctttccttccttttttttttttggtttgctaatattttgctgaggatcattccatctatatttataaaagag

SEQ ID NO: 447503 - DNA, 526 bp, Homo sapiens
tcaagttttctgttttcctattgatcttctgtttggatattttataatggataaagtattgaaagtgggctatcaaaatctccttctcttattgtgttgctgtttcttccttcaattctttcagtgtttgcttcatttatttaggtgctctgatgttggatgaacatatatttataacggttatatttttctggagaattgacccttttcttattatatgatgtccttcatagcctgttatgacaggttttgatttaatgtctattttgtgtgggataaggacacacaccccttgcgggttatcttgcggttcttgcagttaccatttgcaaaggtacccttattatcacttgattttcatyctatgtgtgttcttaagtctaagtgagttcttggggacagcatgctgttgtattttgtcatgacatgctttgactcagtattatccttctttctttccttccttttttttttttggtttgctaatattttgctgaggatcattccatctatatttataaaagag

SEQ ID NO: 447504 - DNA, 438 bp, Homo sapiens
tgtcttatgcatctattattaccaatatttggagcataactaatattttcttagtgtaactatgtgtttgatgtaggtaatcatatctggaatgagccagaggtttgaagtaaaatgcctcaaattccttttgtgccaaagtaaggcatatatacaaatataagattttatagatgtgttttcttcttctaagacttttaatttgcctactgattttttaatttccaccactgccaaggaatagaaataataaaataaggataactcttgggtgaatacaaaagtttggattaaaaaagtaaaaacaaagtccaaaaggacatctgaatattagtctaaagcaggggtccccaacccccaggcccaggccttttaggaactgggctgcacagtaggatgtgagtggyaggtgagcaaacattaccacctgagttctgc

SEQ ID NO: 447505 - DNA, 551 bp, Homo sapiens
tgacctgaagcctgaactggtcaatccagtatataaaatactgaggaaaataaataaataagagcacaccacagggaaacaggataaacatcaagaaacctctgccatttcaaccccacaggagacagtgaatctactcacacacagagcacattgctaccacaactatcctttaagtatgccatcatagaaagactgtctaaaactaaggaactcatacagagtcatcaccattgaaagcactcagaaccatattaggttacaataaaatacaatcattatagtcacatcctcaaggggtgggggagagtatctagttaacaatcaatatgaggactggaacagtacctcatatctcaatagtaatgttgaatgtgaatgttctatatgctccacttaaaggatagattgaaagaatggattttaacaattacaagccaaatatctgctgtcttcaagagactcacctaacatgtaaggattcttacagactcaaggtaaaggggtggaggtagatattttacamaaatgaaaaccaaaagtgagcagga

SEQ ID NO: 447506 - DNA, 594 bp, Homo sapiens
tgacactagtgtttccacagccaaagtctctagtttacccagccccactgtttctctctctccttccatccctcctttccttcctaccttctttaattccttccctcctcttttacttcctttcttcttttcttcccctatttcttccttccttcttttctttctttttaaatttcaaatagttttattgtctaactggcctacccagcacaggcaagattcctgagaaataattccttctagtgaccatgagttaaaattccttctcacaaaaatgagcctccagaaaaccatctgcacttcattaccacatcaaatttaattcccagggatcccaaatccctcttagcatgttggagctggttttarttaatgccgtaagtatagttgctactaactctttatgctgtgagtgctgttgaagtatataattggcacccaaaatactgatcttccagaagattgtcagttgaacatgatgactcctaggtgcagttcaatttaatatgcataagactgcccataatcattcttttcaaagtttcaaaggcaaatccatcagtgatatttgatcatcatatcaagcaatagttt

SEQ ID NO: 447507 - DNA, 562 bp, Homo sapiens
gttagttttttggggagtgggaagagcaaatatttttaattagttacttgcctttttttttttaacacaaatatactggagaatcacgcaatgctgtcagcatctaacacaatcctgggccacaagtctgcacactcctttccaactggtcttatgatggcaggacctttccatcttgccttcattgttttctatgacccctatattatctgcaaaataaaraaacatgccattctttctttggtatgactttttttttgttgaactaccactgctggatatacttcctttctgagctctggttgtttgcctttattgactgaccatcaccatgtcacccactccagcagtggaaagtctgttcagctgccctttgattcccttcacagacatgatatagagatttttggctcctgtgttgtcaacacaattgatcttggctcctatcagaaaacccaaggaattccagtatttcacactggagaacccaccacatccttgcttagacatgttgaacgctgaaaaagggcagaatgacccatttcagttcttgatcaaactg

SEQ ID NO: 447508 - DNA, 610 bp, Homo sapiens
tctatcaccataacaattaaaaaagttaaaactcactttaactttactaggatttcttatcttgagtaaatagaaacttttgggcagaccagaagttaaaggtcatagagagtctgaggaattccttgaaacaaaagttcatataagttttctttccttttatttaattaattaatttatttttttaccttaaatccaacttgactctttggacctgtggttgcctggcctgctttctgttaaccctcctaactcctgtgcttgtaattgcctgtttcttcttgtcttccccaactcaastgtaggagtctcttcctaatgatgttctacaaagtagaggagtaggatttgagaaagttaaagacatagttcctaccctcaagacacaagggactattatacatatactgacattatctcatttcaatatgttctacatattatactgatattatgtttatcaatattaaaggagtggtgtcacacataatggctgtatagaatgagacattactcagctacagagagatcaagaaaggttttctgcagaagatgggacaagggtaggaggatttagatatgtaatttttagtgagggaagggcagggaa

SEQ ID NO: 447509 - DNA, 596 bp, Homo sapiens
ggatttgagggcttccaaattcccatggcttttggttgcaggattccatgacgactttgatcagccttgccatcttgtgggtaccttagcattagattgagttatgttgctaggagatgattattcatcagctgatcattaagcatatggggcttacttggcccccctatcaatttgcgtcaaaataaattaattgtagacctgtcttgttttatgaaaaagcaatgtgakagtctttaaatttatctttctaaacaagacacaagtttacacattacccagcacagtaacccctcttggtattgttgacctaaaaggaagaagtgtaggaaaaactgatataagtagagagtttatttgggccaagcatgagggttacaacccaactgtatggagacaagttgtcctgaacaatacacattcttattagcaacagttataagtaggttttcaaagaaaaagaagaggcagttcctaagttatttaccacgaatttacattgaaacagcataagctatcaattggctataaattgctctctgtatcaaattccaggaaaatgaagataatgtgcaaggcagctagtcgggaacaaa

SEQ ID NO: 447510 - DNA, 511 bp, Homo sapiens
aacttgctctggaagctctcacataattacacctagaagttctaagggtcatataagggtctgatctttgggtcatatgtcaaaacagagcagctctgatgataagatctctctctctccacatccccatctcctttgtcatctctatctctgcacatatatttctcaacttgctttgctcaaagcagcctatacgttctggataaaaacctcataatccttatgttccccacgtttcatttcagaatttatcaaagagtatggcatgaatctaactgttcctttcactttccttgctcttgtagatcaattattacctaccgaacacaaggattagaatcataatgtgagatgtaggattatctaattttacawaccttcaactcgaaaaacttcacattccaaatactgacagtggccataaaaccttagtttcaagtttcttgttatcattttatctagataaattttattatctcgacatataatgaaaatatccgttttcgataaa

SEQ ID NO: 447511 - DNA, 578 bp, Homo sapiens
ctgtattacccaagatggtttcctgggcttgagcaatcctcccaccttggcctcccaaaatgctgggattacaggcatgagccacyttgcccagcctcatggagctttttgataatgcaaagttgctccactcttttagtactggcaatttcatcagtttcctaaattgtattttttgcctcaacaccaaaccatttagacctgaaaaatgtaaaagctgtgcagaaagaggcaagaacatgagattatatcaattgacagtaaaaaatgtacataaaaaaacaaaacacataagtgagtcaagtgttggctggtctaaaatctcttattagtttcaaaaggattattgtcatcatgtagacaggcaaaattcccatagtcatctctgggaatattgcttatattttattattttaactaaagcttttcttctttttaaaaattccaggtcatttggattaattttacgttttcattcttacactttcaatgtttataatcttctttgatccttgtattttccactcttgttttagtccagttggtcttaagataatttcctactctagtaaaataag

SEQ ID NO: 447512 - DNA, 557 bp, Homo sapiens
gatgtatagctgtctgggtgtttttttttacccctaccttttcattcccctaagggttaccactgagttttgaattttctcctaaaatataattatgactgttgtacttacctgttttgaattatttttattcttcattgtttacagaataagatccaaactacttagcatgataatcaaagatcttcattatcttgtctttagtggatccttcctggagaatctaatcagcctataaatcaccctcccctctctgagatttctgagtctttttctgtcatgatcagaggtgtctaccagtaactacgtttatactctgtgactgcctggatttgaccatgtttacacctgttcattagccataaaaataagattctcttgcctggaagttttagatttgtaaccttcacaattatttaatttgrtccttactgtggtattattatatgactgtattattatgtcatcttaaatagacaaaaacactacagcttgaagaaactatttgctaaaatcccagagaggattaaaacatcagcctcttaagattcaggcta

SEQ ID NO: 447513 - DNA, 364 bp, Homo sapiens
ccaacaaccacaggatgtacattcctctcatttgcacatggaacacactttaagattaaccacgtgcttggtcataaagcaaatctcaataaattcaaaataattagaatcatactaagcatcttcttggaccagagtagaataaaaatagaaatcaatatcaagagaaactctcaaaaccaaacaagtacatggraactaagcaacttactcctgaatgacttttggaaaaacaatgaaattaaggcagaaataaaagaaattctttgaaacaaacaaaaatagagacacaacataccaaaacctctgggatatggcaaaagtgttaacatgaaagtttatagccctaaatgcctatatcaag

SEQ ID NO: 447514 - DNA, 581 bp, Homo sapiens
ttgggcatattaaaggggtcatttttgaaattctgcctaacacaagtacatacccagcttttgttatgtactgttatatttttgttcatattcttctactcctttctcaaagcatatacacatgtattagagaggctctatcgagcttgtccaaccagacttattttgttattgttgttctgttttgttttgttttaggcttttagcagactgaagccatggttttcagtttctgtctctagtgataagcagaaaagagggatgaggaaagggctttactggcccaacaagaaacagaaactaagaacgcatgactgtattctctcccttggacgcccctgcaaaatctgttttttctaaaaaaacagtttgactttgtgaacccaatttatcttaactatctgtttggctttactcaggataattgacttccttttktctccttttccttatcattgaaatgggaatattagtggtacctatgtcagaaagtacataggaattatgcaataagttttaactacgtaattattattatgttaaccaaactaaaacacttttactttgtaatcttctttatt

SEQ ID NO: 447515 - DNA, 487 bp, Homo sapiens
gatgaaaaaattcttattgagtactgccttcactatctgggtgatgggatcaatagaagcccaaacctcagcatcatgcaacatatccttgtaacaaacctgcatgtgtacctccaaatctraaataaaaacagaaataaaaaaaaagacaaatggaaaaaaataatgaaaggctttgcacattcattacatcataactttgctattaatgttaattttgcagaaaattatgttagcaaaaaataaaacgacaaacaataacaactaagaaactaaaacaaacaaatcaaaaaactaggagaattgttctgataaagtttttgtagtcaggatgtgagagactctaaggtagtcaagtctctccagtgagatctgaatttacctggagtcttgggaaaatttagtgactgtgaattactgaactgtggcatgtaaatgtgatggccaaagtttgaaaatccagttttaaactatctgcatcactatc

SEQ ID NO: 447516 - DNA, 491 bp, Homo sapiens
aactgtggcatgtaaatgtgatggccaaagtttgaaaatccagttttaaactatctgcatcactatctgcaccactttcatgggtgtagatggaaaaggttatttacagaaaaatcacacagagtgtattagttcagcatttgaggtttcagttacagaaatcactcagtcctagttatttggtaacattcttattcactgggaatggctatagtgcaatactcatgttctgtctttgactttgttattttgtgccttcaggattcctatattcacacactagatttttaaactgtaatatatgaaaaaaatagctcttaattgatgcygtttaaacaaaattttccttggtcaaaaacttttgagaaattcattcttattttttttttcagggcatgtcaaaatctacactaggataaaaacctgtttaactttgtttaaagacttgacaatacattagctacagtaaaaaatgttttgcttgatatatt

SEQ ID NO: 447517 - DNA, 587 bp, Homo sapiens
aagctctctgggttccttgggacaggyactgagtgaacactgagactccagaggctgagaataggtacctgggccaagaattgcagctcctcttgagatgtggtgttctgcattggtatgacctccaaatcacaccagtccttttattaataacaactgaaggatgaattgtttatgctgccagtaaaatgggccattattttcttagattgttgctaacacttcaagatgatttatttctccttgttattgctctgtttgtacctttggtattggagacctgatttaaccaaaagtttccattttaaatggtctaaaatagcctaaggttagttctaaactaatctcttaaggaatgattagatttttattgtggtaaatgattgttcaacaagtaagggtgaacaaaatggaaagttacatacattgcattctcttgtctcctcttgcatatctatgttttgaggcattgtaggaggaaaatgcttttgtaaatagagcaggaggtttggaattaaggtgagtttgaatgtggcttcattatttgtgttatcatattgtttacttccttaagaatttgagccaca

SEQ ID NO: 447518 - DNA, 600 bp, Homo sapiens
agctctctgggttccttgggacaggtactgagtgaacactgagactccagaggctgagaataggtacctgggccaagaattgcagctcctcttgagatgtggtgttctgcattggtatgacctccaaatcacaccagtccttttattaataacaactgaaggatgaattgtttatgctgccagtaaaatgggccattattttcttagattgttgctaacacttcaagatgatttatttctccttgttattgctctgtttgtacctttggtattggagacctgatttaaccaaaagtttccattttaaatggtctaaaatagcctaaggttagttctaaactaatctcttaaggaatgattagatttttatwgtggtaaatgattgttcaacaagtaagggtgaacaaaatggaaagttacatacattgcattctcttgtctcctcttgcatatctatgttttgaggcattgtaggaggaaaatgcttttgtaaatagagcaggaggtttggaattaaggtgagtttgaatgtggcttcattatttgtgttatcatattgtttacttccttaagaatttgagccacagttttttcaactaa

SEQ ID NO: 447519 - DNA, 583 bp, Homo sapiens
cttaagagaagaatagcaatgaagaaaaaatctgcagcattgagttctcaattatgttcaattctaacttaaaatatttttcaggtaaaattggataatctgttatgagagtattggaaaataaatgaatgtaaatcttataactgttcattttatctttgcctttgtaaataaaaatcttaatatatcaggcaaaagtttatttttattttaaaaataatgccatgtctatctgtattattaaaattagtcaaatagttactaaatttcaataatttatttttattatatatgtttaagttatacaacatgatgtttatacatgtataaatgattcctacagtyaaacaaaacaacatgtctgtcaccacagtttccattttttgtgtggtaaagggacctaaaataactttcttagcaaattttcattatgcatcaaaatattattgactatatcatgctgtatattagctctctagacttattcattcttcatcactgctactttgtactgttttacctacatttctttattcccaccctaccctgcccctagtaactaattcatgttgtcacaaatggc

SEQ ID NO: 447520 - DNA, 572 bp, Homo sapiens
ggtgtccttgtcaaaggtttgttgactatatatgtctgggtttatttccagsctattttgtttgctctgaagatgttttatatgttcatggaaaatgcttaaataattctggaatatgtatattttaaaatattcctagaattgaatttcataaccttttaaaagtaatttattccaatgtttaaattcctttagtgtcaataattgcttccttataactaatggaaattgattatgtgtgtattaagttgtttatcagtctctatacattaactcttcatctaaaaatagagaatgtctccaggaagtccaaactgaaatattcaattaactagtcaacatttccacttgaatgtctagcattttaattatgtccaggccttaagtaatggttccccctatgtcccacaaacctgccaatctcagatttctgtatctcagttaatgattccttcagatttttagttattcaggttaaataatctttgatctgtatcctctattaagtccatcagaaaatcctgttggcctttcaaaatatatcctattctaacccagtacccagatattgg

SEQ ID NO: 447521 - DNA, 572 bp, Homo sapiens
ggtgtccttgtcaaaggtttgttgactatatatgtctgggtttatttccagcctattttgtttgctctgaagatgttttatatgttcatggaaaatgcttaaataattctggaatatgtatattttaaaatattcctagaattgaatttcataaccttttaaaagtaatttattccaatgtttaaattcctttagtgtcaataattgcttccttataactaatggaaattgattatgtgtgtattaagttgtttatcagtctctatacattaactcttcatctaaaaatagagaatgtctccaggaagtccaaactgaaatattcaattaactagtcaacatttccacttgaatgtctagcattttaattatgtccaggccttaagtaatggttccccctatgtcccacaaacctgccaatctcagatttctgtatctcagttaatgattccttcagrtttttagttattcaggttaaataatctttgatctgtatcctctattaagtccatcagaaaatcctgttggcctttcaaaatatatcctattctaacccagtacccagatattgg

SEQ ID NO: 447522 - DNA, 562 bp, Homo sapiens
tacttcaaagtgtatacaacatttagatgattttatgaattttgagtccacatttttaaaacagaaaagtttctgtaaaattgggccctgatattaaaaaatgacttggcagcataggttctcatgggggacgacagcgtgtactattattatttacattttagagatgaggagactgaggcatggagagcctcatacaactttgcactgctggtaagaagctagtgcagctgcagaggctgggcctgcaaaccccacactgcacactgcttcttattgctacaaggcactgttagacacttcgtraattcttggatctattgacatatcaacaactacactcttgtggttattaagacacccaggcatccttgaaagaagaacaagtgataataacttgaattttgtgtgattaatcattttgtgcaagccattctagcttgaaattgcttttcaatgattcattatccatgaagaactgtggtatatagtttgtttccacagttaaagaaactctcctccagattcatctggagaagctgggtcttcttttcctgcaaat

SEQ ID NO: 447523 - DNA, 376 bp, Homo sapiens
ctgctaaacatgttctagtgctcttgccttttgctgtatgtttggtgtcattcatcagcagggaatggctgaaatgtgaggtgtaaattgacagagtagagagaacctatacagttttaacaccatagccacagacatccaggcatcctaacattttgtcctaratcttcctgaacctggacggcaggatgagaacactagtgattttattggaatgaagccaagacaaataacctttttttgtgctctttataatatagctctcaagaatgaacaaataaaaagaatggggtcaccatatatatcattgtttagcaagtgacaagtgacacagtgagcaatccttagtcagtggcatgacaaggaaatactcaag

SEQ ID NO: 447524 - DNA, 630 bp, Homo sapiens
aaaacaaaaccgtatgtatctatctaaaaaaatttgggaatgaaaaaatactattattccaaaacctcagaggcagagtctacctctggaaattagatataccaccaaaaatatagaaaacactggcattctggaaatgatgaattaatataaagtacaatgaaagaggaggctgagataaaaagctgaataaaataaacaaaaaactggaaatgaaatagaaagattaaaagccacattagggataataaacagcaaaacttatattggggacagttttattagaaataatggaggtcagatttgataaaatctcctagagtgtaaaggaaaatgaattaagagattaaagtgatgaaatagttagtaagagaaatagaaaaaagaaaatagaactcccaytgaagaattaattgcaatccttaggaagtactttataaaagaacaaaatgtccctatgtagtaaaataaaaggcctcattaaaaggacttattattttcaaagtaaaattaatttaaaaatccatagaaagatactctgaatttttaacattatatgtgaaaaagaaataagcttgtatgataaaggaaatgtgttaagcatccaaacagagagaaagaaaggaataa

SEQ ID NO: 447525 - DNA, 609 bp, Homo sapiens
ggatgcaatctgttttatagaaggcatatcttgcagggccttgtagctttgttaaggatagatgatagtcagcaggctgaaattttctctctagtggaccactttgacacattctcaaggttttatttgtatacattaccacaagacatggacttcagttacaatggcagcaaatataatacatgctactaactatgaatttttaggtaagatgaaatgcttcttaaaagaytgttggtcagaaatctggagattggtactttttctcagaaagaaaatcagctcaacctaatggctgtatactgcattgtaacatttatttttatttaaaagttggatttttatgatttaaaaaagtaatgtgagtcttcatttaaaagtttaaatggcataaagacagcaagttttcatatagtagtaaaattgtatgaattttagacaatgattgatggcctctcttgactgtatcttaaacaaaaggacttactgcaattttttcattatcagtgttatgcaaatataccagtaaacgactgctttctgagatcttagggaagtaatgattaatgaagtataaaaatgtaattgtaattatatcacctaaattat

SEQ ID NO: 447526 - DNA, 580 bp, Homo sapiens
gataaaatactgatgtcaatgattcattttaaaataatggaggtgtataatttttcaaaggtagcacacagacattaggtgccagattaatgctggatcttattatttaatgaagatgtttcattctaggagtgtcaattgggaattgtactctgctgcataaagtaaactaaattatcagtgrttaacttaaaaaagtcctaaaatagaatcaaacatttatgaaatcatgagagaaagacctctaaatttaagataaataatgaaatggaaactattccaagagttagtgagttgggctactttcaccaaggttaattactttatatagaaggaaaaaaagtaatatttctattttgagaaacaatagtaagaattgtggagtataaaaaactaatttctagatactttgaaatttgaagcaaggtatcaagtatagtcaaatgaatattatacgataaaaaaattgagaatctggagagtgtcagtgccaataaaatggaattataaaggatctttagctttcataaattggtcttttttttgggaaaagaataaacatttttacacaatgttgtgt

SEQ ID NO: 447527 - DNA, 537 bp, Homo sapiens
attaccacatttaaatctgatgggcacccagggaggcaggtgtgtccctaaccttatctgtttaatagaggagtagttatagttgccttactaaatccaaagaatgttcaaaacacatgagaagactttgctctctccaaagcaccatgcagatgagagtgtgattgatctgcatcctatctaagcrtgttcctgactcactgttcacagtacaagcacatcacgatgttttgctaagagtgggataaaggtgacactgctctgctcagctcttctcctgggtgagatgccaggcaggagggggccagtgctgcccccttgactacagcacaaaggggccaacagagggcaagaacttagttcctatcacctcaagcccctgcagacacgaatcagaaattgtcattgcctgttactcttttatagcattaattctaactgtattttcttaaattacaagaacacctgacatttcactatataactgcatgaaacagcaatttaatctaattgtaactcatactattaacaccattt

SEQ ID NO: 447528 - DNA, 542 bp, Homo sapiens
tggtttcttcccaggcatgtgtgttctgtatcaaatattgaaaggccaggtctccacacccaggaaagaagagagctgaggaacttatctggataattcagaaaataaaagaaaaacctcctttgctctaaattgcccaaattatttaggagcacggggaaggtgttgcctggaatgtccgtgaacggagacatcgttcctgttcccttttgcctgtaaagatctggcgagacagggcctcagcagtcgggttttcatcctgrattaaaatagacacaaatagacgactgtctggggatgaaggaagaccttgtctcctttgaagctgatgggaagcagagttcgataattgaaacaacagagcacaaactttagtgaatctgctgctgctgccacagccgccggttccgtgtacacagatggtgtttaattattttaaagggcaccttaatcctcccttatctgtgcagagggcttctagcattggcttttccagagcagccctcccaaaatgctatgtgtgtgggttagtagtaaacttt

SEQ ID NO: 447529 - DNA, 434 bp, Homo sapiens
gtagggtggtttgggagatggtcttattttcagagcaacaagcccttttcctgcctcctcccactgcctgaccctggcaggacgaatggctctcaaggtaaaagctccacttgcctctccaaagggtcacgactcatccattcctggtggggatgcttgtgggtgacratcacactgcctcccattcactgagtaattacagttggagacattacagcttcaaacactgaacaactgagattctgaaaacccttaagacaggaaaactataaacattaataattaatttgctttgacaactgcttcttcctttttcaggcatttacagtccatcaccttaagtgcaagcacattgctcgtagcatcgctgagaactccgcaaggattaaaaaccaacaaaaaaggatgcaaatggcttactagaagagatttac

SEQ ID NO: 447530 - DNA, 361 bp, Homo sapiens
cactttccgtgtgtccttttgggagactccaatgtgtaggcctgacatggttaaatttcggttattaaaagtcagtacaggctgggcgcagtggctcacgcctgtaatctcaaaactttgggaatctgacgcaggtggatcacctgaagtcaggagtttgagaccmgcctgactaatatggtgaaaccctgtctctactaaaaatacaaaaatcaactgggtgtggtggcatgtacctgtagtcctagccacctgggaggctgagacaggagaattgcttgaacccaggaggcagaggttgcagtgagccaagatcgtgccactgcactccagcctgggtgacagactgagactccatctc

SEQ ID NO: 447531 - DNA, 583 bp, Homo sapiens
aaatgacctacatccaaaagtgcatcaagaaataggaaaaaaaagttgcttagagtctcaatgcagaaagtgatctaccaatctggttatcatctgtagctatcggatggttgatttctgttctgccaaagatatcagcatgcactggagaagcagtacagggatgattactctcagagaccagactaaatatttcaagtgaagcagaacagaaaatgcctaaggttttggaaactgcagcctgtgagtaagataaggtggaaagcagccagacaaaaatcaaagaagtccaaagcagcccctccagcactttggaggaagccagcctrtgatctgggacgctgctgaaagcacagcaaccaaaagggaaatgagaacattatcaaccggcatgcactctggagctccaggcaaccacgtgcttctccttggagaagagcatggagcaggtgtggcaatgctaaagtcaaacctgctgttggttattgacggtgcccatggagggagcaggggctccttctccgaggacagctttgaagccccttcttctggccttcagcacctacctgactcccattttcct

SEQ ID NO: 447532 - DNA, 583 bp, Homo sapiens
aaatgacctacatccaaaagtgcatcaagaaataggaaaaaaaagttgcttagagtctcaatgcagaaagtgatctaccaatctggttatcatctgtagctatcggatggttgatttctgttctgccaaagatatcagcatgcactggagaagcagtacagggatgattactctcagagaccagactaaatatttcaagtgaagcagaacagaaaatgcctaaggttttggaaactgcagcctgtgagtaagataaggtggaaagcagccagacaaaaatcaaagaagtccaaagcagcccctccagcactttggaggaagccagcctgtgatctgggacgctgctgaaagcacagcaaccaaaagggaaatgagaacattatcaaccggcatgcactctggagctcyaggcaaccacgtgcttctccttggagaagagcatggagcaggtgtggcaatgctaaagtcaaacctgctgttggttattgacggtgcccatggagggagcaggggctccttctccgaggacagctttgaagccccttcttctggccttcagcacctacctgactcccattttcct

SEQ ID NO: 447533 - DNA, 500 bp, Homo sapiens
ctacttattgttccataaatgtatattaaaaattagaaaggttggctattctactgagaagtccaagcagaacaatttccttcgaagaaataaagaaaaattccacccataaagaaaataccaaaacacaacaaaacaaaaaaaaggtctggattgttattcagggaaattctacctaaacattgaagagctracgatctaatgccatttaagctgtccaaaaccataaaacaaagaaaatagtatttcaaattattttcataaacctgtaagaaattcacaaaagataaagatcaataacacttgcaaaggctgacggaaacattgtgagtaaaatactaacaaacagaaatcaaaacatgtttaaaaatcatgaaacgtagattttattataagaatggctgaatgcctctaattaggcaaccaattaatattcctaatttccaattaagaaaccaattaatattaccacatggatggttcagcattaggaaacatta

SEQ ID NO: 447534 - DNA, 500 bp, Homo sapiens
ctacttattgttccataaatgtatattaaaaattagaaaggttggctattctactgagaagtccaagcagaacaatttccttcgaagaaataaagaaaaattccacccataaagaaaataccaaaacacaacaaaacaaaaaaaaggtctggattgttattcagggaaattctacctaaacattgaagagctaacgatctaatgccatttaagctgtccaaaaccataaaacaaagaaaatagtatttcaaattattttcataaacctgtaagaaattcacaaaagataaagatcaataacacttgcaaaggctgacrgaaacattgtgagtaaaatactaacaaacagaaatcaaaacatgtttaaaaatcatgaaacgtagattttattataagaatggctgaatgcctctaattaggcaaccaattaatattcctaatttccaattaagaaaccaattaatattaccacatggatggttcagcattaggaaacatta

SEQ ID NO: 447535 - DNA, 631 bp, Homo sapiens
acctttacatacatttatttaaaatgtrgtgttattcaataaagtacacatttttgctattaaaatacaaagaaaacttcttcagtctttaacagatcaagagttagaaaaaaataaatttttagcacacctggaagatgtgttataatggtaattaaaacaatattgttctaactttgtcctctataaaaaacatgtattcatttcaggggtacacagaatacttacaaaaattaagtatgcatcagagcacatgtttaaaaaaacctcactgaatttcaaaaggcagaaattatacaggccaaatactctgaccacagcaaaatagaatgaagctgtgttcaaagacagattcatatccgtaaaagcttttattattacataagaagaaatgaaaacaaatgaaagcattcacttcaggaagttaatataaggaaaacaaagcaaaaggaaggaaataatttttacaaaaaaaaattgatggccaaaatagaataaaaccagatttgatatacacatctaagagctcattcactgaggccaaaaaaactaattaaaatgccaaacatctggcaatctctttaagaaaaatgggaaaatatagatatacaaaatgaagaatgagaacata

SEQ ID NO: 447536 - DNA, 631 bp, Homo sapiens
acctttacatacatttatttaaaatgtagtgttattcaataaagtacacatttttgctattaaaatacaaagaaaacttcttcagtctttaacagatcaagagttagaaaaaaataaatttttagcacacctggaagatgtgttataatggtaattaaaayaatattgttctaactttgtcctctataaaaaacatgtattcatttcaggggtacacagaatacttacaaaaattaagtatgcatcagagcacatgtttaaaaaaacctcactgaatttcaaaaggcagaaattatacaggccaaatactctgaccacagcaaaatagaatgaagctgtgttcaaagacagattcatatccgtaaaagcttttattattacataagaagaaatgaaaacaaatgaaagcattcacttcaggaagttaatataaggaaaacaaagcaaaaggaaggaaataatttttacaaaaaaaaattgatggccaaaatagaataaaaccagatttgatatacacatctaagagctcattcactgaggccaaaaaaactaattaaaatgccaaacatctggcaatctctttaagaaaaatgggaaaatatagatatacaaaatgaagaatgagaacata

SEQ ID NO: 447537 - DNA, 525 bp, Homo sapiens
atgtgggtttctactaggaataattcacartgttcactgatggatagatttccagtggcaggctatagcaaaacttgtctgtctgggaaaaatggttgtgggttttttttttttttttttttttttgagatggagtctcgccctgtcacccaggctggagctcagtggctgagtagctgggactacaggcacccgccaccacgcccggctaattttttgtatttttagtagagatggggtttcaccatgttagccgggatggtctcaatctcctgacctcatgatctgcctgcctcggcctcccaaacttctgggattacaggtgtgagccaccgtgcctggccggcaaaatgtttttattttacttcactatgaagtttccttcagcttcagtgagtaatgtagtgatactttttaaggttctgaagctttgcaaccagagttccaaggaaggtgctcagatatgcccaacttcgatggcttgtctggagataaatgactccagggaaaaacagtgacggtccc

SEQ ID NO: 447538 - DNA, 516 bp, Homo sapiens
gtctctactaaaagtacaaaaattagccaggcgtggtggcgggcatctgtaattccagctacttgggaggctgaggcaggagaattgcttgaacctgggaggcagaggttgcagtgagcagagatcatgtcactgtactccagcctgggaaacaagtgaaattccatctcaaagacaaacaaaataataaaaaagaaaacatgaatatttcatatgttacaaaatattttctattcacttctttgagcttttaaatatcaaatgatatttgatcaaacttttcatttgcggataagctgttgtaaacacattttactagcattgctatattttagtaaatttaaaactcattttctgacaatgatcctgacttctcaagattggattaaattacattgatcactgtgcataagacagkatataaaaaaaagccagaacacacatagtgcttgctagaagggtttttattaaaaacaacaacaaacacataaacacaaaaacagcttaaagagtaag

SEQ ID NO: 447539 - DNA, 497 bp, Homo sapiens
tgtgagccactgtgcctggccaagataaatttctttagcattagattcaagacccttcacatctgatttgcctttagggacaccagatagactgtgctagaaaatagtcattgatctatttagggtggctggtgatctacatcaggtactatgaagttggaagagtcatagaactgctacaaacaaaagtctgatggggaattagtgatttgattctggtcttaaatacaaataaatactatagacaaagagacagagccaaataataagtggatggtccttcctctctgttttatatctcttgtatgattatttgagattctttgtgctcatttctacagaccctgtggctgcctratgttgtgcccattgactgtcctgtcccttattctggtgccagttcatgtcttgtccagacctaattcttcaggggtgagctggacagtgaacaaagaacaagagagataggaagagcttcttcccttctctgtctacca

SEQ ID NO: 447540 - DNA, 497 bp, Homo sapiens
tgtgagccactgtgcctggccaagataaatttctttagcattagattcaagacccttcacatctgatttgcctttagggacaccagatagactgtgctagaaaatagtcattgatctatttagggtggctggtgatctacatcaggtactatgaagttggaagagtcatagaactgctacaaacaaaagtctgatggggaattagtgatttgattctggtcttaaatacaaataaatactatagacaaagagacagagccaaataataagtggatggtccttcctctctgttttatatctcttgtatgattatttgagattctttgtgctcatttctacagaccctgtggctgcctgwtgttgtgcccattgactgtcctgtcccttattctggtgccagttcatgtcttgtccagacctaattcttcaggggtgagctggacagtgaacaaagaacaagagagataggaagagcttcttcccttctctgtctacca

SEQ ID NO: 447541 - DNA, 594 bp, Homo sapiens
ttaaagggggtaataatacttatttataaaattctgaaagtgagacatgctttcaagaattgacagatttcagaagataattgcaagggctatttgtaaaagttcaagtttggctgaaaggtcattggttgagaattgcatctttatgctgcttctttatagcatttataactatatagtatattgtttctatatctatatattatatgtagatatcttcaaatatgcatcttataagtatatttttgcttaaaaatgcttagtaaagaactctaatttcaaaccctgagtatataaaatgatgcacaatttcaccagaatttcagaataaaaaaggctcagatgtttttggaattagaataatctttgaaggaaaatcccaagtttaccataaccaataggaataaaaactgccctaggtagagagagattcagctctctggtagattagctagtgggctaaatcgctggcaaattaattttatattccctaataattagctttgttaatcttgtgccmtaagagactttctattcatggaatcacaaacagcatttgttgttgaaaaatactaacactagtgaaacctaacc

SEQ ID NO: 447542 - DNA, 570 bp, Homo sapiens
ctccagaactatttggactgagatagaaagaggatggtttccaagctgagatgcttcaggcagtcagataaaatagatgtccactaggcttaggttttgtggtttttcaacttttactgtctaccacttctttcctaccaaggatcttactgccgttttgtctttctggataagacactttcgcataagtgtctccstatgcagaaaactagaataaatcttctcaatgtgtttattagttgtttcctgaagattttagtatttcattttgcagcttgccaattgtttcctacacataattttagtgaattagccttagttaggcagtgacagttgttgaaattacaattgtgcaattcttttctgaacattgaagttaatgattagatctctctttcaagaaggttgatttatttcaataattacagcataccattcaggacactagggaaaagtctttgtgtttgtgtgtgtttgtgtgcacatgtgtttcattaaatattggaggagaaatttaaactttctctctacctagtgtcaactatagtaaattcttgaattttgtacttt

SEQ ID NO: 447543 - DNA, 534 bp, Homo sapiens
catagtgaaacccaaactctattaaaaatacaaaaattagcttggtagtggcccatgcctgtaatcccagctactcaggaggctgaggcacgagaatctcttgaacccgggaggcagaggtttcagtgagctgagatcgtgcctgggcaacagagtgagaatctgtctcaaaaaaaaaaaaaaaaaaaaaaaaaagtatctgggaatgctttaagaaggtggtggaatatgaaataaataaattttataaaatgggttgggtgttgaccacatattagaagaatcagctgaaggagcagtttaagtaaaagatcttgggtaagaaaatgtaccatcggatgagtgaatgatttaaatggaaaaatactgtaaagttacttgaatccatatgggatatacttcgtatggatagttacctgagcatgcatttgtgtgttatttracatcaggggaagctcttgacattttttaaacgagaagtaaagccactctcgtctcaaattttagaaaataattctcacagtggtaaagaga

SEQ ID NO: 447544 - DNA, 601 bp, Homo sapiens
aattagaaattcagtaggtcattggtggggcccagaaatctgaattgttaacaaatgctttggatgattctaaggcagtggacatatgagacactgcattcaagaatctggaaggtagcaagtatgtttttaagttgcgttccatatattactgactttactgagccaggcaggattaaytttatatgtcccacaaccagtcttaaaatttgaaagggcccaagctgtgacccaaatgagaaacaagacaaaagattaaggcagatggaagataaaaatgtcatcttcattatctataaagctgatattggaggatgcttctgtctatggacagatcttcataatattaaattgcataattaaacaaacttacctactcagtcatgcaggctggtctccacttttatttatgaccaagaacatgtgttgtcttcagtcagattcacctccatgagtaagagaagtactacccaatatattctttcttgaacttttcattccttttctcctgaggagcagtgagtaagggactgctcactggatcatcctagtcaaggtcttcccacatggaaagaaacagcttagaatagggaaggacgga

SEQ ID NO: 447545 - DNA, 571 bp, Homo sapiens
ctcactagaccagcccacccaccagctgatacctccaggtaacctacatttataccatgtggagcaaaagaatcatctagctgagcccaagccacatttttgacacacacaaatgtgagatgcaatcagatgattgtgcttttaagtcactaacttgggggtagtttgttacacagtaattgataaccagagcaccctaattgacatactttttcttctgtggttttgtttttcattacttacatagtcaatatatctagctgcagtgtgtctacaccactaaagaaaacaaattgtcttttctttgtttccaaagtccttttgtattcagagtcgaaagagaagtttaatgaacaatggagccatccattatttgttggygaatgagtctgttttcatgctgcttataaaaacatacctgagactgtgtaatttataaagaaaaagaggtttaatggactcacattttcttgtggctggggaggtctcatgatcatggcggaaggtaaaaggcatgtcttacgtggtggcaggcaaagagagagagtgagaatcaagtgaaaggggaaac

SEQ ID NO: 447546 - DNA, 613 bp, Homo sapiens
tgatgtcatgggtgggatgagattttgagatatcgtgtccttacttttaatatacaccttaagaatgcttcatattgtgtatattttgtcatattttaggttcttgatctgggataactatcattttataaaatgatgtttataaagttaaaaaaatcaagtaaacacttgacaaataaacaatagaagtaactggtattttaaaagtgctttaatctttctcatatacatataattatctatactatatagcaatagataaatgtttcatcgttttaaaatatttttgaatagcaatcctaagagtggtattgttagggtagacccacaaataactaaacattttgttaaaaatatattacaataagtcctaatgaagaaatattgttggccttgccaaaatggaaagtaaataakagaaggaactaaaatatccaagagatgtgaagaaaatcatttctattttaactagttccagggaaattaataatctggaggttctttaatgagtatttcgtaccttcctcatctttattaaaccatttcatttttatgttatgtctttcagttttattttttatcacaaaatggcagaaacattttttgaaggcca

SEQ ID NO: 447547 - DNA, 584 bp, Homo sapiens
gtattaaatttcaatcagggttaatcagctgacatatattgggctgtagagaagttgagtaatgattgggaagttccatatttaatcactgcttggctgcctagcactgcataggtmatggactctagacaggtatttttggattacaacattcttagggaagaataattacatctcagaattttatcctatccttctattgcccccttaccttaaagaagtggaaatactagtgacattttgccccaaaatgtgaaagtttaccatgacaatattttagtctttccaaactgggagggatttttttgccatttccaacaatatatgtatgtgcttgtgtatgtatacatatacacacatacatatagttgaatacatatgtacatgaatacacatattgttttgtacatatatacacatacatatacataaacacatatatatacattcatatacatgtctatgaataatgcacatttttttaaacagtagttcattttcttttctttgatctcctaaggaatagtgcatataaattagaaggccacctgaactggtgtaatatctcctctggaaaaagaagc

SEQ ID NO: 447548 - DNA, 584 bp, Homo sapiens
ggaggtgttttgatcatgggggtggatccctcatggcttggtgctgtctttgcaatagtgagttctcatgagatcttgtcttctaaaagtgtgtggctccccgaccttcactctctctcctttgctcccgttctcaccatgtgatgatgtgtctgctcccgttttgccttccaccctaaataaaagatccttgaggcctccctagaatccaagcagatgccagtgccaygcttcctgtatagcctgcagaaccattagccaattaaacctattttctttataaattacccagtctcaggtatttctttataacaataccttaacagtctgatacagattccaagcattaacgacatacctcatatgactaagtcttagttagagtgccgatttgaatttgccaaatccccttttagattcagcatgtcaaactgatgagtaatgtgttaatctgtggaatgggtgtctcaaagcatagggtcttttgctaagcccttggagatctgtcaatactccagccaaaacaaaaaaatcagaagcaataactaaaagccattcctctctataatcatacatgaggaaga

SEQ ID NO: 447549 - DNA, 580 bp, Homo sapiens
tctactcaaacaaagaatagtagaatgcaaaatattttaagaagtggtacctagtggcatccagtaatagcatattttctgacttcatgtttttggaaaaggttttattgggaataggtatagtgagattattttttcagtatgttatttatatcaaaagatctttccatggttgggcttcttagaaaaaaattcaagtcargttacttaaccactctatactcagagtttccatttgtaaaatggggtgggtgtacaataaggatagtacctagtacatggagttattatgaaaattgagtaagtcaatattggtaaagtaactataagtgttcctagtacatagtatgatagaagtgtaggttaaatttgggggaaaaatacacacacacacatacacacacacctcctcatgacacccagatatggaaaaagtttactaatgtgcttaaaggcaaaaatttggactgcttagcctttcaagcactctgagacataataattgttggcacgacttctaaaatgcccaagcagcagccattatgtcccagaattggtcaatttgttgctagggttaaat

SEQ ID NO: 447550 - DNA, 598 bp, Homo sapiens
aattgtgaatttgttgaaggcctccagggaacagtttggttaggcaaggatttaaagagtatgtggttatagcaggattgaaagagcggtataaatgataaacaaaagcttttaaaagaatgtkcaatctgctgagcaagatacaaaggagaaggatttggcaatatataactaagcaaaagaacataaaggcaggtgggaaaataatttactctgtgaataaaatcaaactactaaaagttccagttgtttcaaacaaagctttaaaaaatgttatccaaatgaaaatagtaaatgaaaattctcacaaaagtattcaggagataataaatattagatttgcaaactaccccatttactgcttctacataagtggaaaaagagaatgtaaaataactcagcacagatctcatatttcctaatattactgccagagagttaaagcagagataaagtggatatagttatgaaaatattggacacactgaaaatagattgaagtaagtggatttatatcatttatgatcataagttctgaagaaatgaaggtcctgaagtcataacttatgctttatatattcttgacaagtcagaatct

SEQ ID NO: 447551 - DNA, 567 bp, Homo sapiens
aagcctgtccaagggagatttctctggcacacaaaatgcaactgagtttgcttcgaaaagagcaatggattcttgagactacatctgattccacgcttacggagcaacgttatgacattggaggtaggtcagcctgtctccacagcatgtcagcattgcagtggaatccaaataaaaggcattactatttaytaggcaattagtctgtggcagacactgtgttaaataattttaaatccattatctcagttaaccatcatgacaaccccaccactggtcattttcatcccaatttacagaagaatctgaagctgagagagctaataagtatggtcagagttcgtctgactccaactcctacaaacttaaaaattaagccagtttctcatcccaccttctcacccatatttttagggacccacaaattctgtgaaaaaagttgaaattttgtcttttttgtgtattagataatcctcaaataatcattttactagatattttttaaaagacctttccttagctgtgaataatgagaaagttttaaaaaccccaggtacacacacctag

SEQ ID NO: 447552 - DNA, 482 bp, Homo sapiens
tcttccttcacatctctggtaaactgcaccttaatactactttagggatgtctgggatcaggctaaatagtctaatttttgccttcaggaggcttgcttagcagctttatttgcaagcttctttcctacagcttttacagtgttctctttttgatgaccatttacatgaactatggctacctctgctggaagcaggagactttttaagacctgtttgaccagttctccatgtatgaattcttttcccctcctatttattagaccctgctttgtccagatttttttaagtgtgyaccactccataggcacatttagaatcagtatatatagtatcatcttgaccttcaaggagctttagggcctggttaagaacacataacttacaggtttgggctgactagccattaggtaatttacctttcccacgtaaacagtgtttattttcatcaatgacagcataaccattatggttttttttgttt

SEQ ID NO: 447553 - DNA, 614 bp, Homo sapiens
agatcaggaatgacagatttcattctacctgcctagtcttattgattggtagtgaacatctactgcaaaggttaagaaggatcatgtggctgtgtcagggctcaggaagaaatgatactgggataagtttataatatttctatcctcatgggattataagcaatcgtgaggtcaggaactttgtgttctttgtcacattttgagtgcctataataattcccagcatatggtaaacactaatatatatataataataatatatataacatatacaattatatatacatattatatacmatatatacattttatatataattatatatgttatatataattatgtgccatatatatataactatgtgcaaggaaaagaggaaggagaatagcagaacacatggtacatctttgccttctctgcactaggtgattgtaaactgccaagatctataagtcacaatcctcaagcatgtattgaaatataatctggtccatttttaaaaagaaatttcagaatgtaagaaataaaaactggcttatacatatggaaagatatcatgagcccaataaatcccaacaagaggcctgatttttagaagaccattctgttagac

SEQ ID NO: 447554 - DNA, 614 bp, Homo sapiens
agatcaggaatgacagatttcattctacctgcctagtcttattgattggtagtgaacatctactgcaaaggttaagaaggatcatgtggctgtgtcagggctcaggaagaaatgatactgggataagtttataatatttctatcctcatgggattataagcaatcgtgaggtcaggaactttgtgttctttgtcacattttgagtgcctataataattcccagcatatggtaaacactaatatatatataataataatatatataacatatacaattatatatacatattatatacaatatatacattttatatataattatatatgttatatataattatgtgccatatatatataactatgtgcaaggaaaagaggaaggagaatrgcagaacacatggtacatctttgccttctctgcactaggtgattgtaaactgccaagatctataagtcacaatcctcaagcatgtattgaaatataatctggtccatttttaaaaagaaatttcagaatgtaagaaataaaaactggcttatacatatggaaagatatcatgagcccaataaatcccaacaagaggcctgatttttagaagaccattctgttagac

SEQ ID NO: 447555 - DNA, 470 bp, Homo sapiens
tggaaatcggacacaccacrctttgcatatctgattcataaatgctaatgtttcaaacagaaaccagattaagcacatcaaaacctaacgcattattttgatttatcaattttccagtagtgaaaatggatgttaggaaagttgcaagtggcttaactagctacaaaggggttttgtgaaatatgaagactgcttaaaaagtagagatttacacacttattccattgataggttatcatagaactctagcaggtggataatgaattcttgccttgttactgatctattgcacatcccccagctcagccaggctctgtagtgtgattttagcagaacaagagataatcaaacatcctgtttttatagaattgtcccaatttagggtccttcagggccctccaggatgcctatttgagatgtttttctttctgaaaagcattatctagggataaaaaaaaaaagaatgtaat

SEQ ID NO: 447556 - DNA, 470 bp, Homo sapiens
tggaaatcggacacaccacgctttgcatatctgattcataaatgctaatgtttcaaacagaaaccagattaagcacatcaaaacctaacgcattattttgatttatcaattttccagtagtgaaaatggatgttaggaaagttgcaagtggcttaactagctacaaaggggttttgtgaaatatgaagactgcttaaaaagtagagatttacacacttattccattgataggttatcatagaactctagcaggtggataatgaattcttgccttgttactgatctattgcacatcccccagctcagccaggctctgtagtgtgattttagcagaacaagagataatcaaacatcctgtttttatagaattgtcccaatttarggtccttcagggccctccaggatgcctatttgagatgtttttctttctgaaaagcattatctagggataaaaaaaaaaagaatgtaat

SEQ ID NO: 447557 - DNA, 501 bp, Homo sapiens
tttctttgcatttgacctaaatatagggacatatagaaacttttctattcttaaatttttgtaacacagattttatttatttgcagtctatttcgttccacagaaaaattgagtcaggttgtaaaaatgttaaaaaaaacctaggcaatttcctgtttctttcttttatccttctattattaaaaattctgctgagtatatactttctagaaataagagtatatttgaactgcatttcttactatagcatatgtttattaacagcaagtgccaaaatatcttaacttttgatttatatctagcctctttttgaatgaccagtctcatctctaagtttttctgtctttaaataataaggctatttcaagcatttcagaatgaataattaattgctgaacctgaaatctstctggtatcaaagtattaatgcctgaattaattttcaacttataactgttttcatttacacctacttccttggtagttatttaaagcaatttt

SEQ ID NO: 447558 - DNA, 611 bp, Homo sapiens
ttttctatgatgctatgtaatctaaaaaatatgaatatacttgccactactagatcataaaggatggtatgaacttctgaacttggtatacttagagaatattacttaatataccatgagatgtcatttactagacctcttcaaatgaaaataaaatagtttgaggatgtattctgagtactcagattcatcaaactttaatgcacaatagcaatctctctgttttgcaaggaaatctggggtttctctgctgccttttagcatttgaagcatagaactcacatttttatgaaatatttctgcaaacttttctgccttacatgtctaaaacaatyggttcattagctagttaagagactggccagacagaaagtggaaaaagtttgctgaagagagaggtacacacagctcagttagttaaagagaaagaatttcttgaaggtctgaagaattaaaacaacatgaccattaagtcaaactgaatgctatggtttactcagcaattttagaagcgtttgctatgataatgtatatatcctggtgcacacattatcttggatatacacaacattctaagaaaatccatcaaagtgcaataatttgttattcat

SEQ ID NO: 447559 - DNA, 549 bp, Homo sapiens
ttatggagaaactgcaataatgaagctgagtccctatatacactctactcagtttcctttaaggtaaaaatcttatataaccatgggacaattatcaaatatcaattatgaattatcattgcaattttcaatactaagaaattaacataggcacaatgtcattaaccaaactgaatatttaatcagatttcccaaatgtttcccataatgtcttttttctattccaagatccaatccaggatacggtattgcatttagttttcatgtctcttgatctcctcttgtctgtaatgtttcttcagtgtctttcattatcttgacacttggaagagcactggttggatttttgcagaaagcccctctatttggatttctctgatattttctcatgattagactcaacttatgtatttgagagaggaataccacagagctgatgtgcccttctttatcatattaaggatasattacattaatgtgtcttacttctggtgatgctaaccttaataatttggttaagctgttttttgtcatatttctccactgtaa

SEQ ID NO: 447560 - DNA, 586 bp, Homo sapiens
atatatatatgtatatatcaacatgacttcatattcatatctccaactccagtcaaacacctttatggttcattctagcattttggctttgcttatttttaatttctttcttaggcagttggaaagctaatttttattactatatttttcttatttttcaaccctagtatacatgtaatattagtttcagaactgtaacacataatctaatgagaaatggatttaccaattatgatacagttatttttaatctttagtcttacattatcaaatcaaaagataatttcacaaagttacttagatcagctcctttcttcctcatctgtttcagtatggttatgtgattcatttgttacacagttagattcatttctcagagtctgcattccatcttgtgtttctcaaatatcctgtttaattttttaaagttgcatagaataacgttctctttttgtgatgcacatttctatggattttgacaaatgcacatagttgtatatccactaacacaataccctgcgacatagttctttcacccsaaaagttcccagaaaggtcctttaaaagaaaaacaaattaaaataac

SEQ ID NO: 447561 - DNA, 565 bp, Homo sapiens
attatatatatatatatatatgtatatatatatttccaattaaccatcattctgtcaattctctaagaaaactgctatcagattgggatactagaactctgagatgcagaacaactttcccaaagtcacccagcatatttcaactccaaattgtgtgagcacaaattccctttctttccaatagaatcatactgggttttggttaaggtaattagaattactcttagctctcaaaaaacattttgtgtctcatraaagtgatcattttgcatttcttaaaagaccagccaagattctaaaagccattaaatgagaaaggatgtatgatatcctttacatagtgtgatactatgtaaaggataagcttcatatccattgtcttccctgaagtaggaaagattttcctggcatttgccttctatccctctgaaggcaagactaaagggaaaaattctcaaaagctttaagaaataatgtatctttttctgtctaggtagaactgggtttgaatcaggctccacttcatacttgcttatgaatttggacaagttatttcatgtttccg

SEQ ID NO: 447562 - DNA, 566 bp, Homo sapiens
acaatctttatcttccccattctgctatcttttcttacatttatttttgtacccacaaaagaacaaaaaataaaagctctgcttcctttggatctcaattttttaaaagtcaaaacccagtacttcctttactcatatttcctccctgtctcaatcttctctcttagtgttgatatgtacaaagatgtgctctatacagtaagaaaacatcaaaaatttaatcgcaattyttgttgatagttcaaagaaataagaaaattttttataaatgactatgttttatcaattctggatgccagtcgtttttataaaattgtcaaagcaactagtatatggatatgatagactatttataattatgtttcacaaggataaaactggaactcacagatcatataatcattgactcagctataaaaagatttagagataatctcttcctgtgccctatgacattaggttactttccaaggtcacctattgcagagacatggttaaaactcaagtattcagatttgcagtgtagggttcatccttttctactatgtatcatactgcttcaaaga

SEQ ID NO: 447563 - DNA, 582 bp, Homo sapiens
ttttaaaacctccttgatgggggatacgcattccatatcagagagccctatcttaaaccacaaagtatgatgaactctagtgaagaatcatttctggtaaatttacagaccatgwgccctgtttctgttcttttacctatgagagattctcttgacaaacagggagagaacttgggaaaagcaggaagaaggccaggcttccaggagtccctgaggaccttggaggttatccatgtgttccagatgaggagactcagaaaataagaaatttgttcattactagccaatcaagtatttattgaagttaccatgtgacaagttctggttgagtattgaatttccagtggtaaataacaacaaaaaatgtagaaatgtaaacatgaataaacacctgaaaataaaaatataaggaaaaaaatacacatatatacatctatatacatatattgtttgtatatatacatatggtgggtgtatatatatctacatatgtgtaaattatatatatgtgagtatatatgtgtttatgcacatataaaataaaattataagaattatgttttatatgtatgtgtgtgtatg

SEQ ID NO: 447564 - DNA, 582 bp, Homo sapiens
ttttaaaacctccttgatgggggatacgcattccatatcagagagccctatcttaaaccacaaagtatgatgaactctagtgaagaatcatttctggtaaatttacagaccatgagccctgtttctgttcttttacctatgasagattctcttgacaaacagggagagaacttgggaaaagcaggaagaaggccaggcttccaggagtccctgaggaccttggaggttatccatgtgttccagatgaggagactcagaaaataagaaatttgttcattactagccaatcaagtatttattgaagttaccatgtgacaagttctggttgagtattgaatttccagtggtaaataacaacaaaaaatgtagaaatgtaaacatgaataaacacctgaaaataaaaatataaggaaaaaaatacacatatatacatctatatacatatattgtttgtatatatacatatggtgggtgtatatatatctacatatgtgtaaattatatatatgtgagtatatatgtgtttatgcacatataaaataaaattataagaattatgttttatatgtatgtgtgtgtatg

SEQ ID NO: 447565 - DNA, 582 bp, Homo sapiens
ttttaaaacctccttgatgggggatacgcattccatatcagagagccctatcttaaaccacaaagtatgatgaactctagtgaagaatcatttctggtaaatttacagaccatgagccctgtttctgttcttttacctatgagagattctcttgacaaacagggagagaacttgggaaaagcaggaagaaggccaggcttccaggagtccctgaggaccttggaggttatccatgtgttccagatgaggagactcagaaaataagaaatttgttcattactagccaatcaagtatttattgaagttaccatgtgacaagttctggttgagtattgamtttccagtggtaaataacaacaaaaaatgtagaaatgtaaacatgaataaacacctgaaaataaaaatataaggaaaaaaatacacatatatacatctatatacatatattgtttgtatatatacatatggtgggtgtatatatatctacatatgtgtaaattatatatatgtgagtatatatgtgtttatgcacatataaaataaaattataagaattatgttttatatgtatgtgtgtgtatg

SEQ ID NO: 447566 - DNA, 582 bp, Homo sapiens
ttttaaaacctccttgatgggggatacgcattccatatcagagagccctatcttaaaccacaaagtatgatgaactctagtgaagaatcatttctggtaaatttacagaccatgagccctgtttctgttcttttacctatgagagattctcttgacaaacagggagagaacttgggaaaagcaggaagaaggccaggcttccaggagtccctgaggaccttggaggttatccatgtgttccagatgaggagactcagaaaataagaaatttgttcattactagccaatcaagtatttattgaagttaccatgtgacaagttctggttgagtattgaatttccagtggtaaataacaacaaaaaatgtagaaatgtaaacatgaataaacacctgaaaataaaaatataaggaaaaaaatacacatatatacatctatatacatatattgtttgtatatatacatatggtgggtgtatatatatstacatatgtgtaaattatatatatgtgagtatatatgtgtttatgcacatataaaataaaattataagaattatgttttatatgtatgtgtgtgtatg

SEQ ID NO: 447567 - DNA, 442 bp, Homo sapiens
cttctcttttctcacacccatcagttagtagggtataatacacataaacatttatattatacttgctgattaacagtgatgctggatttgtgttaagccatctcagctctctcatcgtgctcctattataaccarttttaagatggtaggctgggactagagatgtaagttattagaaatgaaagcaaaataaaatgaaacaaaaaacaactaacatgcaaaggcaagttcttctttagagaacttaattcttcattgatctggggctggtgacagtatatactatggctagtaattcattggatagaacaaactgtagctgaattggtaaactatctttatggggtgatttccaggtcactgaaatcagttttaatatttattaatcagctgttatcatgccattatcaatcaggcaattctctaatcacaagacaaggtg

SEQ ID NO: 447568 - DNA, 442 bp, Homo sapiens
cttctcttttctcacacccatcagttagtagggtataatacacataaacatttatattatacttgctgattaacagtgatgctggatttgtgttaagccatctcagctctctcatcgtgctcctattataaccagttttaagatggtaggctgggactagagatrtaagttattagaaatgaaagcaaaataaaatgaaacaaaaaacaactaacatgcaaaggcaagttcttctttagagaacttaattcttcattgatctggggctggtgacagtatatactatggctagtaattcattggatagaacaaactgtagctgaattggtaaactatctttatggggtgatttccaggtcactgaaatcagttttaatatttattaatcagctgttatcatgccattatcaatcaggcaattctctaatcacaagacaaggtg

SEQ ID NO: 447569 - DNA, 584 bp, Homo sapiens
agatagtggcatgctaaagctggcttatactagcttttaaggccaattgagaaagttttagaaattctgcgatttatttattaaatacagccattattaaaattraattctataagtttagaattaataaatgatactaaacacaaatgcaatagctattcaaacctcattacctccaaattactttactacagtttactattatttataatcttgaggttacttgcatccctgtgtctgtattgtagaaatattataaaatggtgtgtgatatggcacatctcttcccaactctgcattcagtaacatcacttggtagcttgaaatcagccatggtgggaatgtttataccatggaaaccggcaaatggtccaagttacaggttgatttattgcttagttcattgtcgagacttaagaaaatgatgaagtgaatattaatagggattaaacgtaatgtgtcatgtctgtggccattacattaatgtcgacacaaaaaattggggaaattttcttgcagtattccaaaactattctccgattcagcaaaaaagttgcacaggttattttcatctaactcattac

SEQ ID NO: 447570 - DNA, 632 bp, Homo sapiens
aaaagactgttatgatgcagaaaagcatcttgtaatgtttcttcatgccaatcttataaaatattttggaaagaaagggagggatttgtcatagaatacaatcctatacagaccyacagactattattttgcttcataaccatatatatatttttttaacttttgcctctagaactataaaatggagtgtgtttctggcctttctctctatctaatagcagcatattattttgccttattttttctcattaattttcatttcctctaaattttagtacacatatggaaggagcagatctcatcttttcaaagtcagaagagattctctgggggaaacaaagttttctcaaatcaaaacaaatatgaaaacaaggaaacaaaatatgctttgggcagccaattctgtgactaagataatattttaaaaaagtaatcctgcttttccccagaaatgtatgagaaaatctttctgcaaatttcaagcacaagcaagttgcctcccaaattggccatttgcactccagggctaaagctgaaagcgcacagaattgcctgagtaattcaattgcaggcagaatcaatgcaagtgtgaacgctgccctggtcaaaggttggcccttaggctgcaactt

SEQ ID NO: 447571 - DNA, 572 bp, Homo sapiens
aaatccaacctactataaatgcctggccagagcataggtgaaataacatttccatgcaagcaagtctggcttggtttattcaaatcttgtctaactatatactgggtggatagttaatttgtatctctgcagagaaatcccaattgaattacatttataaagaaaggaaaccctgtccacactgaatagacacattcaatgaggacatgccattttcagtcttttccctagcagttttatggattctaaaactgaatttagagtgctttagagaaagagtggcccaytgaaatattattgctttcacagttaattcctcctctttttacctttatctggaacatcagaatggccaaaaaaagagccaatttcaatttactttttcgtttagtggagtaccctagtaactatgtttcactctgactaaagagaaataggaagtttaatcataatgatactcagaccttcataataatcattttgttcacacgtattcctggatcttttattaggggtcacatttccattttcagagaaagaaatcacagcacagaagcgaagatgatacagtg

SEQ ID NO: 447572 - DNA, 535 bp, Homo sapiens
tagttggcatactgtcatccattataaattttgttaaagcacttcattcctgagggctaatatacagtgatctgcasaatattctctctgcctttccttctcttcccttccaattttgtactttttacaacatagaaatctttcaggaatttttggacagagaatctagaggatgagggatcttcattgtatactagctttcctgtagtttttccaccataaagtttgctttctctttattttagaaaacatacatttttaccttaagtaatttaaagtaattctattgatgaaattactaaaacctctacttaaaattataggtcctcttacaattactgcctaaagcctacaggccatggaagataaaggggtttaagttgtcttcatgttaaatcaaaacttttgcttatttccctcgcacccaaagaagatttgagaaagaggcaaacaagctgaaaatgatggagacttgcagaaaaacagaaaacattgcaagttcactatagtatagttcatcaaatgttagggtgtt

SEQ ID NO: 447573 - DNA, 535 bp, Homo sapiens
tagttggcatactgtcatccattataaattttgttaaagcacttcattcctgagggctaatatacagtgatctgcacaatattctctctgcctttccttctcttcccttccaattttgtactttttacaacatagaaatctttcaggaatttttggacagagaatctagaggatgagggatcttcattgtatactagctttcctgtagtttttccaccataaagtttgctttctctttattttagaaaacatacatttttaccttaagtaatttaaagtaattctattgatgaaattactaaaacctctacttaaaattataggtyctcttacaattactgcctaaagcctacaggccatggaagataaaggggtttaagttgtcttcatgttaaatcaaaacttttgcttatttccctcgcacccaaagaagatttgagaaagaggcaaacaagctgaaaatgatggagacttgcagaaaaacagaaaacattgcaagttcactatagtatagttcatcaaatgttagggtgtt

SEQ ID NO: 447574 - DNA, 291 bp, Homo sapiens
ataaaataactaatcagacatagatcctgtctttttaaagaacttataatttgatggagagatggaatatatataaaaataactataagacaaaataaaaatgcttagtgcagtaagagcttcagatgaggtcataccaggggttctgaatatatgaacattttttcaaactcccagggctatgttcataattacagacaagattttcacatttgcctttattaacaaattaatcaaattgtaygtacttaatagcacctcagcatacagcaagtcaatggcagagagaga

SEQ ID NO: 447575 - DNA, 563 bp, Homo sapiens
ttacttactgtttcattttatgtatggcttgtgaaattctggctaccccaagatgaatgttttatgaaaaccaaccaagagtaaattcaagccatgttaatctatacttcaagaatatgcaatacatttaaaaaacaacaaaatctcaccaaatctactgacttcagccaaaagacactttttcagttagccctattatttatgtattttttcctttctcagctctaacatatttttttaaacacatgtcgacttctacagggattataaaatccttggacaactatatgatttgggagcaaagtttccatgtgtaaggattgygtgatgtataaggaatgtgtcacatcaggttgagttttaaaatgaacgtactccattcttaggttttatctctacagatggataggggcccagaggcccctggaagcattttggtaccattgcattacttacggttaagaggcaggctcgcattggttgtgcctagcttgttggcagccacacaggtataattgccgaagtgctcctgtgtcacgttggtaacagtgagaatggatctt

SEQ ID NO: 447576 - DNA, 563 bp, Homo sapiens
ttacttactgtttcattttatgtatggcttgtgaaattctggctaccccaagatgaatgttttatgaaaaccaaccaagagtaaattcaagccatgttaatctatacttcaagaatatgcaatacatttaaaaaacaacaaaatctcaccaaatctactgacttcagccaaaagacactttttcagttagccctattatttatgtattttttcctttctcagctctaacatatttttttaaacacatgtcgacttctacagggattataaaatccttggacaactatatgatttgggagcaaagtttccatgtgtaaggattgcgtgatgtataaggaatgtgtcacatcaggttgagtttyaaaatgaacgtactccattcttaggttttatctctacagatggataggggcccagaggcccctggaagcattttggtaccattgcattacttacggttaagaggcaggctcgcattggttgtgcctagcttgttggcagccacacaggtataattgccgaagtgctcctgtgtcacgttggtaacagtgagaatggatctt

SEQ ID NO: 447577 - DNA, 646 bp, Homo sapiens
aattttcctacaatgagtatgtcaacttgataataacttctacacaatttaccccaagtttattgcaaaggagatgcactgatcacaacataggctatgtaaactgatagtccaaatggcatrgtagtttttctctctttaatgtgttcaagtttttgtatttttttaaattatgaaaatgctaataaatggcatcccctgagagttcaatttgaactcctttgcattatactgtgtggcttgcacctgaatttagatgaaatatactgtagttaaatgcagattaaaatgagcagtcatacttgattactctgggaattacttatatttcatgtaatagctgaatttggcttaccccaaatgcaaactttaatcagattaataaaagtgtgagttaaataaacattgaacaaactttagcttgagcaataaatttaatgatctccaactctgacataagataatggggcataaaatatcatggatatggcagcttttattcttctctctcatatttttagcctagcaacatttatgctaaattcccctagtcattattatatattttctgcatcacattaacaacttcgtttttaactaatccgtatatatgctgtgtaaaaaaccagtttcattgccttgcaag

SEQ ID NO: 447578 - DNA, 646 bp, Homo sapiens
aattttcctacaatgagtatgtcaacttgataataacttctacacaatttaccccaagtttattgcaaaggagatgcactgatcacaacataggctatgtaaactgatagtccaaatggcatagtagtttttctctctttaatgtgttcaagtttttgtatttttttaaattatgaaaatgctaataaatggcatcccctgagagttcaatttgaactcctttgcattatactgtgtggcttgcacctgaatttagatgaaatatactgtagttaaatgcagattaaaatgagcagtcatacttgattactctgggaattacttatatttcatgtaatagctgaatttggcttaccccaaatgcaaactttaatcagattaataaaastgtgagttaaataaacattgaacaaactttagcttgagcaataaatttaatgatctccaactctgacataagataatggggcataaaatatcatggatatggcagcttttattcttctctctcatatttttagcctagcaacatttatgctaaattcccctagtcattattatatattttctgcatcacattaacaacttcgtttttaactaatccgtatatatgctgtgtaaaaaaccagtttcattgccttgcaag

SEQ ID NO: 447579 - DNA, 646 bp, Homo sapiens
aattttcctacaatgagtatgtcaacttgataataacttctacacaatttaccccaagtttattgcaaaggagatgcactgatcacaacataggctatgtaaactgatagtccaaatggcatagtagtttttctctctttaatgtgttcaagtttttgtatttttttaaattatgaaaatgctaataaatggcatcccctgagagttcaatttgaactcctttgcattatactgtgtggcttgcacctgaatttagatgaaatatactgtagttaaatgcagattaaaatgagcagtcatacttgattactctgggaattacttatatttcatgtaatagctgaatttggcttaccccaaatgcaaactttaatcagattaataaaagtgtgagttaaataaacattgaacaaactttagcttgagcaataaatttaatgatctccaactctgacataagataatrgggcataaaatatcatggatatggcagcttttattcttctctctcatatttttagcctagcaacatttatgctaaattcccctagtcattattatatattttctgcatcacattaacaacttcgtttttaactaatccgtatatatgctgtgtaaaaaaccagtttcattgccttgcaag

SEQ ID NO: 447580 - DNA, 614 bp, Homo sapiens
tatgaccctaatgtgattcactccttgactaaaaccaaataatgataaaagagctctctaattgatgacatgtttttctttacaaaattgatttattctaatatgattgtctataactttatttctgtaaaaagaatcattcttatattgacttagattatacaatgaaatatgctttcttatagcccctgccaaaccctgcccctccctgccacaaaaaaaaaaaaaaaaaaargagaaacaaattctgtagagctcggagttaaatatgacatccatttcttcagcatagatcagtactatatggtgcctacttggaaatacctggtcatttttcttcattgcgtttttatcatagggaatatagttataagatccttctatttctgtggaccctgctgtcctctactctctgacaccaatagaagtttgctccacatcgagaaccataactctcgctcctcttctcccttctggcttttgccaatgcctcataaatctgtgaaccacaggctatttgctttgctagccaaggctgtcagctcataagtaacacagcccaacccactaactagttctgaattagaatagtcccctatattttctagtgtcag

SEQ ID NO: 447581 - DNA, 614 bp, Homo sapiens
tatgaccctaatgtgattcactccttgactaaaaccaaataatgataaaagagctctctaattgatgacatgtttttctttacaaaattgatttattctaatatgattgtctataactttatttctgtaaaaagaatcattcttatattgacttagattatacaatgaaatatgctttcttatagcccctgccaaaccctgcccctccctgccacaaaaaaaaaaaaaaaaaaaagagaaacaaattctgtagagctcggagttaaatatgacatccatttcttcagcatagatcagtactatatggtgcctacttggaaatacctggtcatttttcttcattgcgtttttatcatagggaatatagttataagatccttctatttctgtggaccctgctgtcctctactctctgacaccaatagaagtttgctccacatygagaaccataactctcgctcctcttctcccttctggcttttgccaatgcctcataaatctgtgaaccacaggctatttgctttgctagccaaggctgtcagctcataagtaacacagcccaacccactaactagttctgaattagaatagtcccctatattttctagtgtcag

SEQ ID NO: 447582 - DNA, 588 bp, Homo sapiens
tgtgtgccccataaaataatggtccattatggttttatgttcttcttcctgaagtaatccaacaaggtagcctagtaatagtatcaaataattttttatgtgggttttgagtgtgtgtttgtgtgtctgtgtgtcttgttggctctgattcttccaaaataraaatcagcctgcatttggtaactgaaacaaatgtttccagggcattttaaatgcataatttataaaaaccaaaaatggtgaaataatgcaaagattctactggcattcatttagctatagaaaatatgctaaaacactaggtagaacaggttttgtcttttaacattttaatgagctttgggactttcatgcatattagttatgttgccctaattactcattataattctaatgtgcattttatatttaattacaatgcttataaagatttggtatggacagtaaattattataactagcatgtgcatagcgattatgaactgaatttattaacttttacaccagcattcactgttggtaactttcaatttcaccttggtgattaaccacattgtctgattaaacaaatatttgtgtgggaattaa

SEQ ID NO: 447583 - DNA, 603 bp, Homo sapiens
ccgtgtccccttccagcgctatttggaatgagatttgtattcgccctaatccaataaccattgcccaggacggcccatgtagttctgctgggaaatggtgtccaggcttgtagcaacatctaatgggtatttaggtgcaaactagctgtgaagtgttaaatatttacatgcggaatgccaatagtaattgtccactttatctgagctagcctagggaaatgtcttatttgtttccacgttacttcaataaacagaaagctggaaaatcctcccgctatttcttgggggcttagaattaataaagccaggyggtataaaatatgtgctttgggtttttgaatgatcacttctgcaccaggtcatataatatggctttaactccatgtggcctgtctattaagcaagacgggatgagcctcacaaataataaaaaatatttatgcttttcttagtgatactaacaaggtaacatatcagaggagaaatggcaggagaagaatgaggtagctgtgtcttatggatccatggctcagtggggtcccggccagctcccataaacaccctaggattctctgttcagtgctgctattattccacaaattg

SEQ ID NO: 447584 - DNA, 371 bp, Homo sapiens
ttactcttccattgtcttagccaggcagaaaggttgcctcttaactgtaagcagcaacctttcttgcttgcattatagccgctgtgcttgrgagaactaatgtatctttattgcccttacttttttatgctcggtaacaagacagcgcttgggctcactttagagccatatattatacattagcgataaaatgatgcaaatagtcctgaatactcttcaaacagatagtggagatcaggctggatcaagctgcttgtcacaaaaacagaaaatgaaaggtgacgtgcaaagttgggccgagtggcatgctccccagccgtgggctgttgcaggcccagggctgagggtcccaggtggggctgcaacttgta

SEQ ID NO: 447585 - DNA, 371 bp, Homo sapiens
ttactcttccattgtcttagccaggcagaaaggttgcctcttaactgtaagcagcaacctttcttgcttgcattatagccgctgtgcttgagagaactaatgtatctttattgcccttacttttttatgctcggtaacaagacagcgcttgggctcactttagagccatatattatacattagcgataaaatgatgcaaatagtcctgaatactcttcaaacagatagtggagatcaggctggatcaagctgcttgtcacaaaaacagaaaatgaaaggtgacgtgcaaagttgggccgagtggcatgctccccagccgtgggctgttgcaggcccrgggctgagggtcccaggtggggctgcaacttgta

SEQ ID NO: 447586 - DNA, 518 bp, Homo sapiens
accctccttagagttatgcagttttcaataaattacattgaattaaaatttttaataagtaatttgaagggttgatttttttaaaggtgtacagtgaaaaaaggcataatgtctatcacattttgggtgttcagtagatcagtagatagtgaataaataatggaataaattayattacttgcagagaaaacttcatttttgctattcctaaatctctgcttttgggtaatctccttcgccaggattacattttttcttagtgtgtttctgcaatattccttctagcatgggtatataaagaaaagacatttcttcaacttattagcctgctgatatataacctatgattatgtcggtgtacttcatattatttttagggtttatttaatataaaaacaacagatgatttctaatactacaagaatttttggcctattaaattataagttcctttcctagtgcaaatgcgggtcattcatttgtgccacctctaaacataatgtgaaaacttgtaatgc

SEQ ID NO: 447587 - DNA, 586 bp, Homo sapiens
atcattttacaggagcatggtaggacatttgtgatacatgttgtgaaatttatgacaaagtcttctgtgagaattttaaaagaacatttttcttcttgtttagttttactgtcaaatttaatatttaagtctttcattacctttatcatgattgttctaacattaaaaaatcagatatatttcttctgtgagttttacctgcatttttttctgatatatytgaatgtatattgtcagagataaggtcttacccattgcattcttttctttaacatggtaaaaatgaacagaactgcctttaaattaattttctttgaaaagcataatgcaaatttcagggaattgactatattgctagtgtctaaactatgtgaaaccataaaaacaccaacttaactaactaccaatcgtccatccaagtactcatctattaagcactttctgatttttattattgttataaaataccaatttatcattactttacatcttaaaattatattgttataaaataccaatttatcattactttacatcttaaaattataaagtagtagggaaagttgagtttagaatgaaaaagatg

SEQ ID NO: 447588 - DNA, 624 bp, Homo sapiens
ataatttatttgcaaaatatacaaagaactcttcacacttcacagtttaaaaaaaatttaatagaattttaaaatttgaacatatacctcaccaaaagatatacagatggcaaaaaaatggcatgaaaaaaatgctcaacatttatgtcattatggaattccaaataaaaacaaccatgagaaaccactatccacctattagaatggctaatattcaaaatactgacaattctaaatagtggacagcaagcagaacaacaagaatttccattcattgctggcagaatgcaatatgctacaatcaatttgaaagacagtctggcattttcttccaaagttaaattgagtgttattcactccagcattcatgttccttggtatttaaccagatgaattcaaaacttatgyccacacaaaaatcttcacataaacgtttatagaaatatattcacaactgccaaaacctggagacaaccgagatattctgcaataggttaataagtatgttggcagcggggaatttgatccgtctgcagcaaacttgattcttgcctcctcagaggaagcaatttggccaaggggtcataaggcagagtgagagactgaggcaagttttaaagcagg

SEQ ID NO: 447589 - DNA, 367 bp, Homo sapiens
gggtgatatattccaaactctttcaccacatttcctggagttgtgcattgtttgttttaatgagagtgtgacattagtaatttttcttagccttaactttcatgtataaaaaaataaacaataataggatcttttagtatcatgtggaagtttaaaacaagaaccaaaaattgaaagctatcagagagcattatttttgcacctgccatttttaacatgcattttcttcaaaatactcaatatgccataaaggttaatatggtgtggttctgtgtcccagctcaaaactcacatcaaattgtrttctccaatgttggaggcagggcctagtgggaggtaattagatcatgggggtggtttctcatgg

SEQ ID NO: 447590 - DNA, 579 bp, Homo sapiens
atagcatgtaggtttcccctcaatattcagagtatcttacaaaccatatgacaatgagtcatctagtatgtttcattatacatatttatgtgtaaatgtgcttttagagaaaaatacttcaggtggaatagctgaagagtaagaactggaattccataggcaggtctgcaatgttattaactattgtctaatatctccccaaaaggcactcattatataaattttacttgactatgatgcatttttaatacactgaagaattcagcttsgtaatattttacttagtgcttaatgtctatattcatattgattttttaatgttattttctgctctcacttctgttctcacttctttcattgtatcctcataaaatgagtttggtaacatttcctttttatgtttaatttgaattctctaaaatgtgttggataacacaggaactaactgcaagttggagacttgatagaatatgatcatagaataatacatatccagtgcgatttgcagggatatagggacctcaaaaaaaattaaattttaaaaattgtgatcttaaaaatgatcctatgtttttccca

SEQ ID NO: 447591 - DNA, 579 bp, Homo sapiens
atagcatgtaggtttcccctcaatattcagagtatcttacaaaccatatgacaatgagtcatctagtatgtttcattatacatatttatgtgtaaatgtgcttttagagaaaaatacttcaggtggaatagctgaagagtaagaactggaattccataggcaggtctgcaatgttattaactattgtctaatatctccccaaaaggcactcattatataaattttacttgactatgatgcatttttaatacactgaagaattcagcttcgtaatattttacttagtgcttaatgtctatattcatattgattttttaatgttattttctgctctcacttctgttctcrcttctttcattgtatcctcataaaatgagtttggtaacatttcctttttatgtttaatttgaattctctaaaatgtgttggataacacaggaactaactgcaagttggagacttgatagaatatgatcatagaataatacatatccagtgcgatttgcagggatatagggacctcaaaaaaaattaaattttaaaaattgtgatcttaaaaatgatcctatgtttttccca

SEQ ID NO: 447592 - DNA, 577 bp, Homo sapiens
gtagggcctggtggctaagtatttggatcatgggggcagatcacaggggccatcaccttggtgataagtgagctcttgctctgagttcacmtgacatctgatcatttaaagtgtgtggcaactccccccgactcttgctcctgctttgccatgtgagctcctgttttgctcctgctctgacttccaccatgagaaacagcttcctgaggcatctccagaagcagatgctggcactatgcttgctatatagctggcaggactgtgagccaaataaacctctttaaaaacaaattacccagtctcaggcatttatttatagcaaggcaagagtggcctaatacagatgatgtgggtagagccataccatgcagtgctatcaggcattggaatgtctgtacaccaaaaacactttatgacataggaaagacagtgtgtcagttaaatgtacacaatatagacatctaaaaattataactgcatacatatagtgatcctatttttatatatttttaaaacaagtaactgattccaaaattcttagtgtatttttgcaattactcatgacatttattattgc

SEQ ID NO: 447593 - DNA, 577 bp, Homo sapiens
gtagggcctggtggctaagtatttggatcatgggggcagatcacaggggccatcaccttggtgataagtgagctcttgctctgagttcacctgacatctgatcatttaaagtgtgtggcaactccccccgactcttgctcctgctttgccatgtgagctcctgttttgctcctgctctgacttccaccatgagaaacagcttcctgaggcatctccagaagcagatgctggcactatgcttgctatatagctggcaggactgtgagccaawtaaacctctttaaaaacaaattacccagtctcaggcatttatttatagcaaggcaagagtggcctaatacagatgatgtgggtagagccataccatgcagtgctatcaggcattggaatgtctgtacaccaaaaacactttatgacataggaaagacagtgtgtcagttaaatgtacacaatatagacatctaaaaattataactgcatacatatagtgatcctatttttatatatttttaaaacaagtaactgattccaaaattcttagtgtatttttgcaattactcatgacatttattattgc

SEQ ID NO: 447594 - DNA, 577 bp, Homo sapiens
gtagggcctggtggctaagtatttggatcatgggggcagatcacaggggccatcaccttggtgataagtgagctcttgctctgagttcacctgacatctgatcatttaaagtgtgtggcaactccccccgactcttgctcctgctttgccatgtgagctcctgttttgctcctgctctgacttccaccatgagaaacagcttcctgaggcatctccagaagcagatgctggcactatgcttgctatatagctggcaggactgtgagccaaataaacctctttaaaaacaaattacccagtctcaggcatttatttatagcaaggcaagagtggcctaatacagatgatgtgggtagagccataccatgsagtgctatcaggcattggaatgtctgtacaccaaaaacactttatgacataggaaagacagtgtgtcagttaaatgtacacaatatagacatctaaaaattataactgcatacatatagtgatcctatttttatatatttttaaaacaagtaactgattccaaaattcttagtgtatttttgcaattactcatgacatttattattgc

SEQ ID NO: 447595 - DNA, 577 bp, Homo sapiens
gtagggcctggtggctaagtatttggatcatgggggcagatcacaggggccatcaccttggtgataagtgagctcttgctctgagttcacctgacatctgatcatttaaagtgtgtggcaactccccccgactcttgctcctgctttgccatgtgagctcctgttttgctcctgctctgacttccaccatgagaaacagcttcctgaggcatctccagaagcagatgctggcactatgcttgctatatagctggcaggactgtgagccaaataaacctctttaaaaacaaattacccagtctcaggcatttatttatagcaaggcaagagtggcctaatacagatgatgtgggtagagccataccatgcagtgctatcaggcattggaatgtctgtacaccaaaaacactttatgacataggaaagacagtgtgtcagttaaatgtacacaatatagacatctaaaaattataactgcatacatatagtgatcctatttttatatatttttaaaacaagtaactgattccaaaattcttagtgtatttttgcrattactcatgacatttattattgc

SEQ ID NO: 447596 - DNA, 609 bp, Homo sapiens
tttaatttaggagtacatgattatttgcttatacatccccaagccctgtaagtcccaagcagaatatgagtcagatatttggaatattgagttttttcagcttccaagagtgtgcccttgattcctttagatatgatgagaaatatgagacatggtgataagacagagattctgtaaggccatcccactttctatctgcatcaacaatttcaagggatttcatgtcacgtgccctactcaaggatacatacatttgtgtgagtgtgtgtcttaaagtatgcacatgtgactgaaaaaattagatacagatttatttgcgctgttttctaagtgtgaaattttcagatgtatttcctatttgctcttttgattatttaaaataatgctgttatagaaacattaagattagacaaaacagatraaataaattaatatttaatgaggagggcagaaggatattcactaggagccaacatttgtgtagtaacatgaagctttccattaaagtctgttgcatcatcctattgggagtagttctagagaaaatatctctgaaggtgatgagtgagaggagaaggtgccaacccaaaacagagaattctatagtgc

SEQ ID NO: 447597 - DNA, 548 bp, Homo sapiens
atcaaacacttaaaggagaattaatatcaatcctaatcaaactattctgaaaaatagaggaggagggaatacttccaaactcattctatgaggccagaattaccctgataccaagacaaagacacatcaaaaaagaaaaccacaggccaaaattcctaatgaacattgagcaaaaatcttcaacaaatactagcaaaccaaattcaagarcacattaaaaatatcgttcatcatgactaagtggatttacccagggatgcaaggatggttcaatatacacaagtcaatgtgatgcatcatatcaacagaaagaaagacaaaaatatatgagcttttcaactggtgcagaaaaagcatttgataatactcaacatttcttcatgataaaaacccttaaaaagctgggtatagaacgaacataccttaacacaacaaaagccatatatgacagactcatatgtagtattataccgaatggagaaaacctgaaagctcttcctctaagacatggaacacaagattgcccattttcacgactgttattcaac

SEQ ID NO: 447598 - DNA, 547 bp, Homo sapiens
gaacttatttagacaaagatacaagaacatgcataggacaaaagatagtctcttcaatgggtggtgctgtgaaaactgagtatccatatccagaagagtaaaactaggcasctatcttttgccttgtttgaaaatctaatcaaaatgaattaaagacttaaatctaacatctcaaagtataaaactacttaaagaaaacattggcaaaacccttcaggacatatacacaataaaataccatttagctataaaaaagagtgagataatgtcatttgcaacaacatggatagaactggaggtcattatgtgaagtgaaataagcttgcacagaaagacaaacttcacatgctctcatttattgtgggaattaaaccttaaaacaattgtactcatggagatagagagtacaatcatggtaaccagaggctgtgaatggtagtgagaggtgagggaatgaggaatgtttaatgagtacaaaagtataattagatagaatgaataagatctactatttaatagcacagcagagtgagtatagtcaacaata

SEQ ID NO: 447599 - DNA, 629 bp, Homo sapiens
acaatggtaactgtagtaaaggatgtgttagttggattatggttaccatttcacaatgtgtgtgtgtgtacatatatacgtataatcacattgtacatcttgaatgtatacatattttatttgttaaaaataccttaatatagctagaaaaaaattttaatgtaactctagacaggtctcaatataaaaagargaaggggactagagatgggtttcgagcagtgatactgctatatttgaaaataagccttgttgagctattggatattttaaactatgagcttataaaacttgtaaattaaaactacaggaccaccacaacccatatggaaaattcatgtcaattagaaacggacagttcctctggtcaggcacaaattgttatggagctgggtgactgcaatttgggctagattttagtctctatctacaaactcagtcccagacccttgatcaatggaaaatctgcatgataatacatggcagccctccacctaaacagtggaatactattcagctgttggaataaatttggacttgctgtgtaaagatgttcactatacaataaacattggcgataaaggattacaaaagagcatttctaaagcatctcattttggtcaaaacaa

SEQ ID NO: 447600 - DNA, 538 bp, Homo sapiens
gaacactggaatattttgaggatggagctgatgtgatctaatggtaccattatggatgctctgttaaaacacaccaaaattatgcaagaacaatgatcaattaggagacagtaattgaaatgacagatcatgctaggtggctgttgcctggtagctcagaccacagtagtaacaatagaagggtgrgaagtgatttaattttaaatatgttttagagttacagcagccagagtgcactgatggatcagatgcaggaagtaaaactatgaaaaatatgaataattattaaaagtaatatgaatgtgtaacatcagtgtggacatgctcttgtaaaacacttcaggtacatacaggatttgcatatcttactagttcttgaatgtttcataccttgtaagttactaaagagaaaaagatgacaaaaataatccattaatatagtatttttgctcttaataagtaagatgaaataatctgacggtagattcagataagcctacctgtgtatcttgttttctggtagtatatctatatctct

SEQ ID NO: 447601 - DNA, 579 bp, Homo sapiens
taaatttcaagtgaatttttgagaattcacagacatctttytatcttcattcttgttagaatccttctgctagagggaccttggccagagtttaaagaagggcttcttttttattgtattgtgcttttataatgaataattagaattttaaacttgaaaatatttaggatgctgtgttttagttgggtacacaagcacaacacacaaacacacacacacattcacaaacactccaccagctttcctagcaccattcccgttattgctgtagttttgccttacagattcattttgagataatatgtaaagtttgcatttctttttgtagttttgttagtaagacccactaagaataattcaagagagtagcaaagtattttttcccttttcttctgtgtgtttttgaatttttgtctatggtgctcttcttagaccacaatatttgacaatcaccagtggatagggagtgttctgcatggtataaaaacaattctccccccataacttgttgtgataaatgtgattaccactttattcattctttgggttaattgccataagcatatttggaaggcatat

SEQ ID NO: 447602 - DNA, 576 bp, Homo sapiens
gtgccatcttttatatcccacattttagtagtctcacatataattttgatgttagttaagatttttaaccaaagtgtgcaacttttaaaaattatgagtaaagaaaaaacttaaagagcaasaaatcttttgctttatcttagtaaattttacttatgtgtctttaagttctacctgagcaatttctcctagtggttcttaaaaatctctttcaactcattataaacttacggactatcactaatactattttacaaaataaccctgtgtgtcatttcaattaaaaggtctggagtatatgggataaactttaaaatgtccctcttacccactctgtaatattatatctccttttgttcttgtcttgtaggaatcaagggcataaaattacctaaatggccacaagataaaatgctacttcctttgtagtctttcacttcttttatttgtctctggcttgtgctattgtactttttccaacaacaactatagcaaatcttcatgtgacatcttgaattctcattttacccttgattatctttctttctgcttcacagagaaaatacagtatattgg

SEQ ID NO: 447603 - DNA, 576 bp, Homo sapiens
gtgccatcttttatatcccacattttagtagtctcacatataattttgatgttagttaagatttttaaccaaagtgtgcaacttttaaaaattatgagtaaagaaaaaacttaaagagcaacaaatcttttgctttatcttagtaaattttacttatgtgtctttaagttctacctgagcaatttctcctagtggttcttaaaaatctctttcaactcattataaacttacggactatcactaayactattttacaaaataaccctgtgtgtcatttcaattaaaaggtctggagtatatgggataaactttaaaatgtccctcttacccactctgtaatattatatctccttttgttcttgtcttgtaggaatcaagggcataaaattacctaaatggccacaagataaaatgctacttcctttgtagtctttcacttcttttatttgtctctggcttgtgctattgtactttttccaacaacaactatagcaaatcttcatgtgacatcttgaattctcattttacccttgattatctttctttctgcttcacagagaaaatacagtatattgg

SEQ ID NO: 447604 - DNA, 576 bp, Homo sapiens
gtgccatcttttatatcccacattttagtagtctcacatataattttgatgttagttaagatttttaaccaaagtgtgcaacttttaaaaattatgagtaaagaaaaaacttaaagagcaacaaatcttttgctttatcttagtaaattttacttatgtgtctttaagttctacctgagcaatttctcctagtggttcttaaaaatctctttcaactcattataaacttacggactatcactaatactattttacaaaataaccctgtgtstcatttcaattaaaaggtctggagtatatgggataaactttaaaatgtccctcttacccactctgtaatattatatctccttttgttcttgtcttgtaggaatcaagggcataaaattacctaaatggccacaagataaaatgctacttcctttgtagtctttcacttcttttatttgtctctggcttgtgctattgtactttttccaacaacaactatagcaaatcttcatgtgacatcttgaattctcattttacccttgattatctttctttctgcttcacagagaaaatacagtatattgg

SEQ ID NO: 447605 - DNA, 576 bp, Homo sapiens
gtgccatcttttatatcccacattttagtagtctcacatataattttgatgttagttaagatttttaaccaaagtgtgcaacttttaaaaattatgagtaaagaaaaaacttaaagagcaacaaatcttttgctttatcttagtaaattttacttatgtgtctttaagttctacctgagcaatttctcctagtggttcttaaaaatctctttcaactcattataaacttacggactatcactaatactattttacaaaataaccctgtgtgtcatttcaattaaaaggtctggagtataygggataaactttaaaatgtccctcttacccactctgtaatattatatctccttttgttcttgtcttgtaggaatcaagggcataaaattacctaaatggccacaagataaaatgctacttcctttgtagtctttcacttcttttatttgtctctggcttgtgctattgtactttttccaacaacaactatagcaaatcttcatgtgacatcttgaattctcattttacccttgattatctttctttctgcttcacagagaaaatacagtatattgg

SEQ ID NO: 447606 - DNA, 563 bp, Homo sapiens
caaatattttcccatttctcaccttgcttgaagttaatgtgacatttgataatgttaactgttttctattcttggactttttattttttgtctttgaggctttatactattcttgttctttatttctctaacttcctagttcctctctgctcctctatcaccaagaaaatattttgcagtttgtgccttctttctgtttgtctcaacattcacgacatctgatatcatttagtttcctatataacatgagtggcataaaatatgtctttatactgtatttgttgtttatgcctttttgggtatcatgttggtatcagaacgtcaacatttctgaaacaaggatgttatcttatctcataaataccacrttttttcttccttatttcaattaatgatgctgcattacccttcctactgtgacatgaacctggaacacagacatatcttgacatgactatttcatatgacactgatgcaattaatttctcactcctataaggttcccctcagtatgcatatttttcacacttgagaacagaaaatttccaattttccctcatttt

SEQ ID NO: 447607 - DNA, 589 bp, Homo sapiens
tgaaaccctgtctctaagaaaatacaaaaattaggtggacatggtggcaggtgtctrtaatccccactacttgggaggctgaggtgggagaatctcttgaatctgggaggcagaggttttggtgagtcgagattgcaccattgcactccagcctgggtgatagagcaaaactaagtctcaaaaaaaaaaaaaaaattaaattgtattgatctttagttgtttttatttcaatttcatttatttttgctttgatctttattattcatttttttctaccaattttaggtttgttttatcttgtttttctctcattctttaagatgcatcattagcttgttcattcgatgtttttcctcttttttgatgtaggcacttagataaacttccctcttagtactgcttttgctgtatcctacagattttggtatgttgtgtttccattatcatttgtttcaagaaattctttaattttcttgttaatttcttcatttactctagtcattcaagagcagattgtttaatttctatgtacttgtgttgtttccaaagtttctcttgttattaatttctagttttattccactgggtc

SEQ ID NO: 447608 - DNA, 576 bp, Homo sapiens
ggtaatgagtcttataaagcttttgttatgtgttcaccaatattatcaagtcttttttgttatcatttttggaaacatctacagctttaatcttctgacaaccttttcactatttgttaaaaatttattttctaacaagctgtcttgtccatatatttttcactttaaccttctgtcttctgttaaaataacaatttgcctaggcatttaggctaaaacttgcagcccacagtgaatgagtcaccaagttcttccaattctttaaattgcaacttgaatcactgtgttgatctctgtttctgctgtcactttgtatgtcatcattatatcatcatggttttatgtttagattatttaattatttaaaaagtagtccgactctcagcttgcttttaaattttgaaattattttgaacatcgtttcctgattatcttcttaaaacactrctttgtgtatgtattagtccattctcatgctgataataaaaacataccctagactgggtcatttataaaggaaagaagtttaattgactcagttccacagggctggggaggcctcaggaaacttacaat

SEQ ID NO: 447609 - DNA, 584 bp, Homo sapiens
ttaaagataaagcttagcatctactaatgtctttcataattagaaaaactatttaaagggaacttatctcttgcatctaaaatcttactacctaaattcaaaaaaaatcatggacaaaatataggcagtggtttaatccacatgtaaagtaaaatgttctcaccagttagtgaatttaaaatattgcttgacactaacagagaaaagcgataatttgaaactgagtttgaaattcagactaacttgattttaactctttcttacaaattatgtaatcttgagtaaattatttaacctctgtgaccaattgtttctcctcagtgggaataatatagcrtaaggtttttgtgatccttacatgccacaatgtacataaataacactatattatatacattggtttatttccttcctgttaaaatacagattttataactgcatactgcagggtaaaatttatgctttgtgtggaaaaaagtactcttatgaaacttgattcatattttctattacttctttctttacacgtagaatattttgctggaacatataaaggaatctgctgacatccattccattcactt

SEQ ID NO: 447610 - DNA, 584 bp, Homo sapiens
ttaaagataaagcttagcatctactaatgtctttcataattagaaaaactatttaaagggaacttatctcttgcatctaaaatcttactacctaaattcaaaaaaaatcatggacaaaatataggcagtggtttaatccacatgtaaagtaaaatgttctcaccagttagtgaatttaaaatattgcttgacactaacagagaaaagcgataatttgaaactgagtttgaaattcagactaacttgattttaactctttcttacaaattatgtaatcttgagtaaattatttaacctctgtgaccaattgtttctcctcagtgggaataatatagcgtaaggtttttgtgatccttacatgccacaatgtacataaataacaytatattatatacattggtttatttccttcctgttaaaatacagattttataactgcatactgcagggtaaaatttatgctttgtgtggaaaaaagtactcttatgaaacttgattcatattttctattacttctttctttacacgtagaatattttgctggaacatataaaggaatctgctgacatccattccattcactt

SEQ ID NO: 447611 - DNA, 602 bp, Homo sapiens
ttctcttgttattaatttctagttttattccactgggtcagagaagatgcttgaaataattgaaaaactacttcgatttttaaaaaatgttttaagacttgttttataacctcacgtagggtctattgttgagaatgatccatgtgctaaagaaaagaatgtgtattctgcagctcttagstgaaatgttttgcattatttttagatcaatttcgtctatattgcagattaagtctgatgtttctttgtctattttctgtcagaaagatctgtccaatgctgatagtggagtgttaagtctccagctattaatggttgggagcccatcactctctttagctctaatactatttatatatatacatatctgggtgctctagtgttaggtgcatacatatttaaaattgttatatcctcttgctgattgacccctttattgttaaatagtgaccttccttgtctcctcttatagtttttgtcttgaaatctattttgtttaaaataagtatagcaactcctgcacttttttgcttttcattggcatggaatatctttttccatccttttatttttagtttctgtgtgtctttataggttaagtg

SEQ ID NO: 447612 - DNA, 602 bp, Homo sapiens
ttctcttgttattaatttctagttttattccactgggtcagagaagatgcttgaaataattgaaaaactacttcgatttttaaaaaatgttttaagacttgttttataacctcacgtagggtctattgttgagaatgatccatgtgctaaagaaaagaatgtgtattctgcagctcttaggtgaaatgttttgcattatttttagatcaatttygtctatattgcagattaagtctgatgtttctttgtctattttctgtcagaaagatctgtccaatgctgatagtggagtgttaagtctccagctattaatggttgggagcccatcactctctttagctctaatactatttatatatatacatatctgggtgctctagtgttaggtgcatacatatttaaaattgttatatcctcttgctgattgacccctttattgttaaatagtgaccttccttgtctcctcttatagtttttgtcttgaaatctattttgtttaaaataagtatagcaactcctgcacttttttgcttttcattggcatggaatatctttttccatccttttatttttagtttctgtgtgtctttataggttaagtg

SEQ ID NO: 447613 - DNA, 523 bp, Homo sapiens
aagaaatttacaacaacaaatctagaattctgttttccattggaaaataaaaactgaattgctttgattttatatgtatttacttatacatgcttacattagtttaaacagagacaaaataacttacagacatatrtacacatgtatgtatacacacacacacacacagaggcacaaacgagatataaaagcacaagccaggcatgatggtgtgcacctgaagcaccagcaactcaggaagctgaggcagaaagatccctgaggtcagtagttccggactacagtgcactataatcatgcctgtgaatatctactgcactccatcctgagcaacataacaagacccagtctctaaaatccaggctatataaaatttttaaaaacttaaaaataaaaacatgtcgggttagaattggtgtctattgatttttagagcaactattttcaatatgcagaatcattcaccatcaaagtattttccctagtccctaaaaatggtttttagttataaacgtcataaaat

SEQ ID NO: 447614 - DNA, 523 bp, Homo sapiens
aagaaatttacaacaacaaatctagaattctgttttccattggaaaataaaaactgaattgctttgattttatatgtatttacttatacatgcttacattagtttaaacagagacaaaataacttacagacatatgtacacatgtatgtatacacacacacacacacagaggcacaaacgagatataaaagcacaagccaggcatgayggtgtgcacctgaagcaccagcaactcaggaagctgaggcagaaagatccctgaggtcagtagttccggactacagtgcactataatcatgcctgtgaatatctactgcactccatcctgagcaacataacaagacccagtctctaaaatccaggctatataaaatttttaaaaacttaaaaataaaaacatgtcgggttagaattggtgtctattgatttttagagcaactattttcaatatgcagaatcattcaccatcaaagtattttccctagtccctaaaaatggtttttagttataaacgtcataaaat

SEQ ID NO: 447615 - DNA, 523 bp, Homo sapiens
aagaaatttacaacaacaaatctagaattctgttttccattggaaaataaaaactgaattgctttgattttatatgtatttacttatacatgcttacattagtttaaacagagacaaaataacttacagacatatgtacacatgtatgtatacacacacacacacacagaggcacaaacgagatataaaagcacaagccaggcatgatggtgtgcacctgaagcaccagcawctcaggaagctgaggcagaaagatccctgaggtcagtagttccggactacagtgcactataatcatgcctgtgaatatctactgcactccatcctgagcaacataacaagacccagtctctaaaatccaggctatataaaatttttaaaaacttaaaaataaaaacatgtcgggttagaattggtgtctattgatttttagagcaactattttcaatatgcagaatcattcaccatcaaagtattttccctagtccctaaaaatggtttttagttataaacgtcataaaat

SEQ ID NO: 447616 - DNA, 602 bp, Homo sapiens
ttctcttgttattaatttctagttttattccactgggtcagagaagatgcttgaaataattgaaaaactacttcgatttttaaaaaatgttttaagacttgttttataacctcacgtagggtctattgttgagaatgatccatgtgctaaagaaaagaatgtgtattctgcagctcttaggtgaaatgttttgcattatttttagatcaatttcgtctatattgcagattaagtctgatgtttctttgtctattttctgtcagaaagatctgtccaatgctgatagtggagtgttaagtctccagctattaatggttgggagcccatcactctctttagctctaatactatttatatatatacatatctgggtgctctagtgttaggtgcatacatatttaaaattgttatatcctcttgctgattgacccctttattgttaaatagtgaccttccttgtctcctcttatagtttttgtcttgaaatctattttgtttaaaataagtatagcaactcctgcacttttttgcttttcattggcatggaatatctttttccatccytttatttttagtttctgtgtgtctttataggttaagtg

SEQ ID NO: 447617 - DNA, 546 bp, Homo sapiens
ttatttctgctttgtcagttctgctattaaagaactaatgcattcttcmgtatgccaattgtatttctcaactccagaatttctgcctaattctttttaaattattccaatcccttagttaaatttctctgataaaattccaaatttcttctcagtgttatcttgaatttctttgattttcttcaatacagctatttttaattctctatataaaaggtcatatatctctgtttctccaggattcatccctggaacctggtttagtttatttagtgaagtcatgttgtcctggatggtgttgatgctagatgttctttggtgtctgaacattgatgagttaggtatttattgtagtcttcactgactgggcttatttgtagttttccttcttggaaaagctttccagatatttggaaggacttgggtgttgtcatgtaaactatatcttctttatggggcaccccacgcccatggttcttgaagacttatagagacaccacattgatggtcttgggcaaaatccaggagagttcttatcaggattac

SEQ ID NO: 447618 - DNA, 535 bp, Homo sapiens
gttctttggtgtctgaacattgatgagttaggtatttattgtagtcttcactgactgggcttatttgtagttttccttcttggaaaagctttccagatatttggaaggacttgggtgttgtcatgtaaactatatcttctttatggggcaccccacgcccatggttcttgaagacttatagagacaccacattgatggtcttgggcaaaatccaggagagttcttatcaggattaccagggagactcttgctctctttccttactttctcccaaacatacagagactctctctctgttctgagccagctgatgctgggggtggagtgacacaagcacctctatggycaccactactatgactacactgggtcagacccgaagccatcacagtgctgttttgcctaaggcctgctgtaaaaactccctggcgactatctgtgttctctcaaggtccttggactctacaatcagcaagtggcaaagccatccaggcttgtatccttttctttagagtggtgatgtcccccaggccct

SEQ ID NO: 447619 - DNA, 535 bp, Homo sapiens
gttctttggtgtctgaacattgatgagttaggtatttattgtagtcttcactgactgggcttatttgtagttttccttcttggaaaagctttccagatatttggaaggacttgggtgttgtcatgtaaactatatcttctttatggggcaccccacgcccatggttcttgaagacttatagagacaccacattgatggtcttgggcaaaatccaggagagttcttatcaggattaccagggagactcttgctctctttccttactttctcccaaacatacagagactctctctctgttctgagccagctgatgctgggggtggagtgacacaagcacctctatggccaccactactatgactacactgggtcagacccgaagccatcacagtgctgttttgcctaaggcctgctgtaaaaactccctggckactatctgtgttctctcaaggtccttggactctacaatcagcaagtggcaaagccatccaggcttgtatccttttctttagagtggtgatgtcccccaggccct

SEQ ID NO: 447620 - DNA, 535 bp, Homo sapiens
gttctttggtgtctgaacattgatgagttaggtatttattgtagtcttcactgactgggcttatttgtagttttccttcttggaaaagctttccagatatttggaaggacttgggtgttgtcatgtaaactatatcttctttatggggcaccccacgcccatggttcttgaagacttatagagacaccacattgatggtcttgggcaaaatccaggagagttcttatcaggattaccagggagactcttgctctctttccttactttctcccaaacatacagagactctctctctgttctgagccagctgatgctgggggtggagtgacacaagcacctctatggccaccactactatgactacactgggtcagacccgaagccatcacagtgctgttttgcctaaggcctgctgtaaaaactccctggcgactatctgtgttctctcaaggtccttggactctacaatcagcaagtggcaaagccatccaggcttstatccttttctttagagtggtgatgtcccccaggccct

SEQ ID NO: 447621 - DNA, 416 bp, Homo sapiens
gggagaggtgatgtcaacactcccttggctggcccaactggtgtttcagtatgttgyaggcactcacgtccaccatctgaaggcctaatccagccctgggactcatctaaaaggcgcagtcattatgggctagactgcctttcaagtttacttggagacagagtgctatagccctcagtgctgtggtttgcaggcactcaggttcagaccgctggcattggcgattcccctctggctaggtctggtttaaatgctccctttgtggatgggtgtcagctgagtttggtccgggtttcctttctgctttaatagtacaacactgagttcagtgcctcagaattgttgtattctccctctcctagcatgcaggttgcagatatgctctctgcgctatgccacggctgctggtggttggg

SEQ ID NO: 447622 - DNA, 416 bp, Homo sapiens
gggagaggtgatgtcaacactcccttggctggcccaactggtgtttcagtatgttgcaggcactcacgtccaccatctgaaggcctaatccagccctrggactcatctaaaaggcgcagtcattatgggctagactgcctttcaagtttacttggagacagagtgctatagccctcagtgctgtggtttgcaggcactcaggttcagaccgctggcattggcgattcccctctggctaggtctggtttaaatgctccctttgtggatgggtgtcagctgagtttggtccgggtttcctttctgctttaatagtacaacactgagttcagtgcctcagaattgttgtattctccctctcctagcatgcaggttgcagatatgctctctgcgctatgccacggctgctggtggttggg

SEQ ID NO: 447623 - DNA, 523 bp, Homo sapiens
ggctggcccaactggtgtttcagtatgttgcaggcactcacgtccaccatctgaaggcctaatccagccctgggactcatctaaaaggcgcagtcattatgggctagactgcctttcaagtttacttggagacagagtgctatagccctcagtgctgtggtttgcaggcactcaggttcagaccgctggcattggcgattcccctctggctaggtctggtttaaatgctccctttgtggatgggtgtcagctgagtttggtccgggtttcctttctgctttaatagtacarcactgagttcagtgcctcagaattgttgtattctccctctcctagcatgcaggttgcagatatgctctctgcgctatgccacggctgctggtggttgggaagggttggagtcggcaattcagtactgttttgttttaatctcttaagtgtctctttcagtgataggaagttaaaaccaggtactatgagtgcttaccagattttggttcttaagaagatgtttttttctatg

SEQ ID NO: 447624 - DNA, 523 bp, Homo sapiens
ggctggcccaactggtgtttcagtatgttgcaggcactcacgtccaccatctgaaggcctaatccagccctgggactcatctaaaaggcgcagtcattatgggctagactgcctttcaagtttacttggagacagagtgctatagccctcagtgctgtggtttgcaggcactcaggttcagaccgctggcattggcgattcccctctggctaggtctggtttaaatgctccctttgtggatgggtgtcagctgagtttggtccgggtttcctttctgctttaatagtacaacactgagttcagtgcctcagaattgttgtattctccctctcctagcatgcaggttgcagatatgctctctgcrctatgccacggctgctggtggttgggaagggttggagtcggcaattcagtactgttttgttttaatctcttaagtgtctctttcagtgataggaagttaaaaccaggtactatgagtgcttaccagattttggttcttaagaagatgtttttttctatg

SEQ ID NO: 447625 - DNA, 516 bp, Homo sapiens
gcaattcagtactgttttgttttaatctcttaagtgtctctttcagtgataggaagttaaaaccaggtactatgagtgcttaccagattttggttcttaagaagatgtttttttctatgtagagagttgttaacttggtgtccttattggrgggatgattggtggaacattctactttgccatcttgctccacctcctctcaaaagtctacctaaagtgttgacacaagttgcacacacagtatgaccctcactcattatcatcatgttcttgaaatgtgtgatacaaagaacaatgtgtagccaatccatagtttatattattttaatcaaacaatgtaaattcttggtaaaacacttaactgctcccaacttccttttttttatttcctttaaaaatttgcttgtaactgctactaatctgagcatatatttaggacaacttgaatctatgactttcaggctgcagtcctcaaccttggccccagtaaaactctatttatatcaactttgcttc

SEQ ID NO: 447626 - DNA, 549 bp, Homo sapiens
acttgttttgtttaatgttggacagttttgagtacaattatttttcccttggagtttttgaaattcttacccacccaatctaattttatgttcttaaagtcataagcagagatttatatttcagagcacctgtcagwgtctttttattctttccataaacctccttgaagaagcaacactttagaatttgcaaagagcttttaggaaataagcattagaataaagcaaattagtgaatatacgaagacatagcaaattttcagaaatctcatacaattttggaaacccatataatagcatattcaagcaaatataactcaattttaaacatttctaattttacaatgcttcttgtaagcattgtaaataaggcatagcaacaaataagcctaatatgtctctctcgggcttccaggggaccattttggaaggtccaaaagttagtttgaggtcaaaagacttaactttacaattttaattatgaaaaggttgtcaaatataaaagatttaaggcacttgagcaaattagaatcacagcttactgtaaaa

SEQ ID NO: 447627 - DNA, 549 bp, Homo sapiens
acttgttttgtttaatgttggacagttttgagtacaattatttttcccttggagtttttgaaattcttacccacccaatctaattttatgttcttaaagtcataagcagagatttatatttcagagcacctgtcagagtctttttattctttccataaacctccttgaagaagcaacactttagaatttgcaaagagcttttaggaaataagcattagaataaagcaaattagtgaatatacgaagacatagcaaattttcagaaatctcatacaattttggaaacccatataatagcatattcaagcaaatataactcaattttaaacatttctaattttacaatgcttcttgtaagcattgtaaataaggcatagcaacaaataagcytaatatgtctctctcgggcttccaggggaccattttggaaggtccaaaagttagtttgaggtcaaaagacttaactttacaattttaattatgaaaaggttgtcaaatataaaagatttaaggcacttgagcaaattagaatcacagcttactgtaaaa

SEQ ID NO: 447628 - DNA, 622 bp, Homo sapiens
aaatataaaagatttaaggcacttgagcaaattagaatcacagcttactgtaaaataatagtcattcacttagccaaagtaataatttaaagatttcaaagttgctggctgggctcsgtggctcatgcctataatcccagcactttggcaggctgaggcagtcaaatcacttgaggtcaggagttcaagatcagcctggccaacatggtgaaaccccgtgtctactaaaaatacaaaaaagtagctgggtgtggtggtgcatgtctgtaatcccagctactcaggaggatgaggcatgagaatcacttgaacccgagaggaagaggttgcagtgagtcaagatggcgccactgcactccagcctgggtgacagaggaagactctgtctcaaataataataataataatcaaaatgcaaaaatgtttgctctttaatagggaagcgactcagttaaaaaaaaaatgaataaagacagcatgaaaaaaaatctatctctttctcaccctttctccccacaccttttcaattttttggcagtttactcaaaaggcaaacaaaagtcttttggtgtctcttattaataccatatgaaaatcttgctcaaaggagaaaaacaaacta

SEQ ID NO: 447629 - DNA, 622 bp, Homo sapiens
aaatataaaagatttaaggcacttgagcaaattagaatcacagcttactgtaaaataatagtcattcacttagccaaagtaataatttaaagatttcaaagttgctggctgggctccgtggctcatgcctataatcccagcactttggcaggctgaggcagtcaaatcacttgaggtcaggagttcaagatcagcctggccaacatggtgaaaccccgtgtctactaaaaatacaaaaaagtagctgggtgtggtggtgcatgtctgtaatcccagctactcaggaggwtgaggcatgagaatcacttgaacccgagaggaagaggttgcagtgagtcaagatggcgccactgcactccagcctgggtgacagaggaagactctgtctcaaataataataataataatcaaaatgcaaaaatgtttgctctttaatagggaagcgactcagttaaaaaaaaaatgaataaagacagcatgaaaaaaaatctatctctttctcaccctttctccccacaccttttcaattttttggcagtttactcaaaaggcaaacaaaagtcttttggtgtctcttattaataccatatgaaaatcttgctcaaaggagaaaaacaaacta

SEQ ID NO: 447630 - DNA, 622 bp, Homo sapiens
aaatataaaagatttaaggcacttgagcaaattagaatcacagcttactgtaaaataatagtcattcacttagccaaagtaataatttaaagatttcaaagttgctggctgggctccgtggctcatgcctataatcccagcactttggcaggctgaggcagtcaaatcacttgaggtcaggagttcaagatcagcctggccaacatggtgaaaccccgtgtctactaaaaatacaaaaaagtagctgggtgtggtggtgcatgtctgtaatcccagctactcaggaggatgaggcatgagaatcacttgaacccgagaggaagaggttgcagtgagtcaagatggcgccactgcactccagcctgggtgacagaggaagactctgtctcaaataataataataataatcaaaatgcaaaaaygtttgctctttaatagggaagcgactcagttaaaaaaaaaatgaataaagacagcatgaaaaaaaatctatctctttctcaccctttctccccacaccttttcaattttttggcagtttactcaaaaggcaaacaaaagtcttttggtgtctcttattaataccatatgaaaatcttgctcaaaggagaaaaacaaacta

SEQ ID NO: 447631 - DNA, 622 bp, Homo sapiens
aaatataaaagatttaaggcacttgagcaaattagaatcacagcttactgtaaaataatagtcattcacttagccaaagtaataatttaaagatttcaaagttgctggctgggctccgtggctcatgcctataatcccagcactttggcaggctgaggcagtcaaatcacttgaggtcaggagttcaagatcagcctggccaacatggtgaaaccccgtgtctactaaaaatacaaaaaagtagctgggtgtggtggtgcatgtctgtaatcccagctactcaggaggatgaggcatgagaatcacttgaacccgagaggaagaggttgcagtgagtcaagatggcgccactgcactccagcctgggtgacagaggaagactctgtctcaaataataataataataatcaaaatgcaaaaatrtttgctctttaatagggaagcgactcagttaaaaaaaaaatgaataaagacagcatgaaaaaaaatctatctctttctcaccctttctccccacaccttttcaattttttggcagtttactcaaaaggcaaacaaaagtcttttggtgtctcttattaataccatatgaaaatcttgctcaaaggagaaaaacaaacta

SEQ ID NO: 447632 - DNA, 589 bp, Homo sapiens
ggttgcagtgagtcaagatggcgccactgcactccagcctgggtgacagaggaagactctgtctcaaataataataataataatcaaaatgcaaaaatgtttgctctttaatagggaagcgactcagttaaaaaaaaaatgaataaagacagcatgaaaaaaaatctatctctttctcaccctttctccccacaccttttcaattttttggcagtttactcaaaaggcaaasaaaagtcttttggtgtctcttattaataccatatgaaaatcttgctcaaaggagaaaaacaaactatactcttaatttagtgtactattaatatcaagcctaattttaataagaccttaaaatcacatcgatccaatctcaatcagctttgatcagacaagataagatttccgtaaacatttgtagtctttataatttttcctatcctcttttttcctctagctttctgtatccattcagttttatctgtcattttttgttttatttcttcaatttaaaacaacctcggccaggtgtggtggttcatgcctgtaatcccaacactttggggggctaaggcaggaggagtgtttgagc

SEQ ID NO: 447633 - DNA, 575 bp, Homo sapiens
aataagaccttaaaatcacatcgatccaatctcaatcagctttgakcagacaagataagatttccgtaaacatttgtagtctttataatttttcctatcctcttttttcctctagctttctgtatccattcagttttatctgtcattttttgttttatttcttcaatttaaaacaacctcggccaggtgtggtggttcatgcctgtaatcccaacactttggggggctaaggcaggaggagtgtttgagcccaggagtttggggccagcctgagcaacatagtttgaccccatctaggtaaaaataaatgaatcaatgaataaataaaaaaacttttaaataagctttcaactaagcaaaattactttttctttaacaaaaaccatgttctcgtgcctttcttacaactttccatataaaaaatgtatcctactttcctcatacacaatcgtatttacatgtcacttttaattaaatatattaattgaaatgttaactcttagcaaccctaatctacattgaaaagctaggaattaagcaattttaattgttatgtatcaggagcttagcctagg

SEQ ID NO: 447634 - DNA, 575 bp, Homo sapiens
aataagaccttaaaatcacatcgatccaatctcaatcagctttgatyagacaagataagatttccgtaaacatttgtagtctttataatttttcctatcctcttttttcctctagctttctgtatccattcagttttatctgtcattttttgttttatttcttcaatttaaaacaacctcggccaggtgtggtggttcatgcctgtaatcccaacactttggggggctaaggcaggaggagtgtttgagcccaggagtttggggccagcctgagcaacatagtttgaccccatctaggtaaaaataaatgaatcaatgaataaataaaaaaacttttaaataagctttcaactaagcaaaattactttttctttaacaaaaaccatgttctcgtgcctttcttacaactttccatataaaaaatgtatcctactttcctcatacacaatcgtatttacatgtcacttttaattaaatatattaattgaaatgttaactcttagcaaccctaatctacattgaaaagctaggaattaagcaattttaattgttatgtatcaggagcttagcctagg

SEQ ID NO: 447635 - DNA, 575 bp, Homo sapiens
aataagaccttaaaatcacatcgatccaatctcaatcagctttgatcagacaagataagatttccrtaaacatttgtagtctttataatttttcctatcctcttttttcctctagctttctgtatccattcagttttatctgtcattttttgttttatttcttcaatttaaaacaacctcggccaggtgtggtggttcatgcctgtaatcccaacactttggggggctaaggcaggaggagtgtttgagcccaggagtttggggccagcctgagcaacatagtttgaccccatctaggtaaaaataaatgaatcaatgaataaataaaaaaacttttaaataagctttcaactaagcaaaattactttttctttaacaaaaaccatgttctcgtgcctttcttacaactttccatataaaaaatgtatcctactttcctcatacacaatcgtatttacatgtcacttttaattaaatatattaattgaaatgttaactcttagcaaccctaatctacattgaaaagctaggaattaagcaattttaattgttatgtatcaggagcttagcctagg

SEQ ID NO: 447636 - DNA, 575 bp, Homo sapiens
aataagaccttaaaatcacatcgatccaatctcaatcagctttgatcagacaagataagatttccgtaaacatttgtagtctttataatttttcctatcctcttttttcctctagctttctgtatccattcagttttatctgtcattttttgttttatttcttcaatttaaaacaacctcggccaggtgtggtggttcatgcctgtaatcccaacactttggggggctaaggcaggaggagtgtttgagcccaggagtttggggccagcctgagcaacatagtttgaccccatctakgtaaaaataaatgaatcaatgaataaataaaaaaacttttaaataagctttcaactaagcaaaattactttttctttaacaaaaaccatgttctcgtgcctttcttacaactttccatataaaaaatgtatcctactttcctcatacacaatcgtatttacatgtcacttttaattaaatatattaattgaaatgttaactcttagcaaccctaatctacattgaaaagctaggaattaagcaattttaattgttatgtatcaggagcttagcctagg

SEQ ID NO: 447637 - DNA, 527 bp, Homo sapiens
ctaggtaagaggtgttaagataattgcatttctttttggaaagaagctttcttgataatataaaagaattccagaaagagttcttcctggtgctcaggaaaaaaaaaaaaaagatggatcagtgaggctagggcggatgggtgggagacagtcagagagagaccttagttctgaggcttagttctgaggcttttcartgttctttaattcaaagcatttagcatgacaaagtgccatattttgggatatcattttctgtgccccatcaatagtagtgaagcagtcatagattaacataacctaatgaatggagattcatttcaataaagatttatttatttatttggcccatgtggcatactttcctgactcttggcatagaccatacgagggagttgcatgccattgtaggaaaaaaaatgtaatttttttttctcacccattacaaggttcctgactgaggcacctgtgagaagagactaacatgacaaagcatacaaatttattatataatttttatacgagat

SEQ ID NO: 447638 - DNA, 607 bp, Homo sapiens
cctgttcctgccttaattgatgacgttgtcttgtgaaattccttctcctggctcatcctggctcaaaagctcccctactgagcaccttgtgactcccactcctgcccaccagagaacaacccctytttgactgtaattttcctttacctacccaaatcttataaaacggccccacccttatctccctttgctgactcttttttcggactcggcccacctgcacccaggtgaaataaacagccttgttgctcacacaaagcctgtttggtggtctcttcacacggactcgagtggaagtcctcactgttctttatatgctaactataatgcattagcatgctaaaagacactcccatcagcgccactgcagtttacagatacttttggcaatgtcgggatattaccctatatggactaaatagggaagaagctccgggttccatgaactctccacccccttcctgcaaaactcatgaataatccaccacttatttagcatatgactaacaagtaaccataaaaacagccaaccagcaatccttagggctattctgcctgtacatagccattcttttgtttctttatttctcacataaacttgatttca

SEQ ID NO: 447639 - DNA, 607 bp, Homo sapiens
cctgttcctgccttaattgatgacgttgtcttgtgaaattccttctcctggctcatcctggctcaaaagctcccctactgagcaccttgtgactcccactcctgcccaccagagaacaacccctctttgactgtaattttcctttacctacccaaatcttataaaacggccccacccttatctccctttgctgactcttttttcggactcggcccacctgcacccaggtgaaataaacagccttgttgctcacacaaagcctgtttggtggtctcttcacacggactcgagtggaagtcctcactgttctttatatgctaactataatgcattagcatgctaaaagacactcccatcagcgccactgcagtttacagatacttttggcaatgtcgggatattaccctatatggactaaatagggaagaagctccgggttccatgaactctccacccccttcctgcaaaactcatgaayaatccaccacttatttagcatatgactaacaagtaaccataaaaacagccaaccagcaatccttagggctattctgcctgtacatagccattcttttgtttctttatttctcacataaacttgatttca

SEQ ID NO: 447640 - DNA, 512 bp, Homo sapiens
atgatgtgaactctctgagagtggcctaaaattgaagtcagtcagatgaaattctacaactgaacaacaggtagcaaatattcagctattattttttatattaacaattggtctgggtcactaaaatccacctaatttttttcttatgctaaacacaaagaaaagggtgtacaatatttattcataaaaagcccatgtctatattcccatcaaaacaagggagattattatataaataatattcatttacatatttattactccaaactattttacataaaagtgacaaatgtaaaatggctttggcaaagcataaataaacatataaacaaataaaaggaaaacgtaaagattttggctctcaacatatgagagcaattttagacttctatgaccaggtatacgggcacaaacagtgtcatgatgtctcagtctttckccgtccacctttggccaatgggtctgctctattttcaggtgagcttttctttgttgcgacaatatgtccccta

SEQ ID NO: 447641 - DNA, 411 bp, Homo sapiens
aaagcaaacacaatttcacgtattgttgaagtgcaatatttaaagtatacatttcatcagttttgacatgtgtatgtacttgaaaattattgccataagcaagataagaaatatttccatcacctttagcaattttcttataccctttgtaatatgcttcktccttcactctcattcatggaaaacattgacctacttttaatatttttgtgacttagaattatattaattgaagtagtaagtactttttgtttttatttttaactgactgttcctgctgcctactgattttgagatccatctatgttattatatgtatcatgttattaaatgtattttagtgagtaaaggaagatgaataactctacaactcactttagcagccaagaataaccttaacactgaaacatg

SEQ ID NO: 447642 - DNA, 411 bp, Homo sapiens
aaagcaaacacaatttcacgtattgttgaagtgcaatatttaaagtatacatttcatcagttttgacatgtgtatgtacttgaaaattattgccataagcaagataagaaatatttccatcacctttagcaattttcttataccctttgtaatatgcttcgtccttcactctcattcatggaaaacattgacctacttttaatatttttgtgacttagaattatattaattgaagwagtaagtactttttgtttttatttttaactgactgttcctgctgcctactgattttgagatccatctatgttattatatgtatcatgttattaaatgtattttagtgagtaaaggaagatgaataactctacaactcactttagcagccaagaataaccttaacactgaaacatg

SEQ ID NO: 447643 - DNA, 552 bp, Homo sapiens
atcatgggggcctgtctttcccatgttgatctcatgatagtgaataagtctcacagtatctgatgggtttatcaggggtttctgcttttgcttcttgctcattttctcttgccatcatcctgcaagaagtgcctttcctctcccaccatatggaactgtaagtccagttaaatttctttttcttcccagtctcggatatgtctttatcagcagtatgaaaacacattaatacagatgcattatatgaattgcctgatatagatcatagatcaatctataaacattgattagtgaaatgatatgccagatcacagtaagaggtagaaaacacacacacacacagagtatattacatacttctaacaatccttcaataaggaaactcatttaacttaatttagcatttcccactatcatttttaggacacctactatattttaatttccccaaaaaaraaatattgtatagaatccattaagccattttggaaaatcataggctaaataataaatattttattttgttttgcactgtagaggcaagattgtgtg

SEQ ID NO: 447644 - DNA, 538 bp, Homo sapiens
aaaaaaaagaaaatctcaaagaatcattatcattaacaacaacaaaaatttctggaataagtgcttatattaaggttgcagggtacaaagttaatatacaaaagtcaaatagtttyttacacatcaccgataagaaaagaaatttgaaattaagaccatgacactatttacatgagcaccaaaaaaaaattgaaatacctacatatgtctgacaaattatgtaaaacatctatatcaggaaaatgacaaaacagtgataaaaaaatcaaaaaagtcctaaataaatggagaggtattccatattcatggatagaaattttcagtatagttaatataatcaaattttcccaacttgatcaatatattcaataaaattctaataaaaattctaaaaagttgtttttaaacataaatttattcaagtttatgtgaaaagacaaaagatacagaataagcaacttaaatttgaagaacaaggacaaagatggagcactgacaccacctgacttcaagacttactataaagctacagaaatca

SEQ ID NO: 447645 - DNA, 622 bp, Homo sapiens
gtggcactaagccagggatctgcacgtatgatccaatacctctcagtaggccccacctccaacattggggattacatgtcaacataagatttggagaggacaacacattcaaaccatatcagcccccatcctacttttgcccatgttgatagcytgagataaaaggtggagtcctggacatctagtggaatggttgtataaaacacaaattgccaaacacctgaacatatatgaaaatgaatgtcaccaactcaggatctttctctgagctagaatagtggtcaaatgcacttcttggataaatatataaatatataacagatgtgtatgtacatatatatgaatataagtattgcatgtttgtttagagggagcaaaagagcacatttacttttcattctcaaggttaaagatatgaacaatttctgtttagtacattctaatttctctgtaactgtattgctctttacccatttgaagggaagttaggaaagtatgctaaaaaactgaaaaactgaaactttttttttcctcttcatttctggatgtatttagattgaaaagacagtgcagtaaagagtagaaaaaataatctacccttggcacctaaacactcacaatt

SEQ ID NO: 447646 - DNA, 622 bp, Homo sapiens
gtggcactaagccagggatctgcacgtatgatccaatacctctcagtaggccccacctccaacattggggattacatgtcaacataagatttggagaggacaacacattcaaaccatatcagcccccatcctacttttgcccatgttgatagcttgagataaaaggtggagtcctggacatctagtggaatggttgtataaaacacaaattgccaaacacctgaacatatatgaaaatgaatgtcaccaactcaggatctttctctgagctagaatagtggtcaaatgcacttcttggataaatatataaatatataacagatgtgtatgtacatatatatgaatataagtattgcatgtttgtttagagggagcaaaagagcacatttacttttcattctcaaggttaaagatatgaacaawttctgtttagtacattctaatttctctgtaactgtattgctctttacccatttgaagggaagttaggaaagtatgctaaaaaactgaaaaactgaaactttttttttcctcttcatttctggatgtatttagattgaaaagacagtgcagtaaagagtagaaaaaataatctacccttggcacctaaacactcacaatt

SEQ ID NO: 447647 - DNA, 534 bp, Homo sapiens
aaataaaacatttaccttcaagtttttaacatcctgtttatttctcttcatgttaagttataacaagtatcacgtataytgttgagaaatatttttcaaaagaaggactagaagaccacagaattatgacctatagaaaatgacaagaaatagatggaagtttggtttttttttttagaggccattatgtaaggaagaaaaaattgtgaggtggttattatcttggaaccaaggcgattgcagaaattagccagtggaagaatcagaagtttataatgattgtgaaatattgtagttcaagaaaccaggtgtaaacatacagtgaaacgtgtgctgcagttgcaccgacagtttgtctccttaaagagaacctcttaagggacctctagctaaaataagaattgtcttttaggaaggataccaggggaagagttgtcaaaatgcaggatgacccatagttatttcaaataaacaacaaataattttctaccataacttgtcccaaatcttgcactattatgctatatttatgct

SEQ ID NO: 447648 - DNA, 534 bp, Homo sapiens
aaataaaacatttaccttcaagtttttaacatcctgtttatttctcttcatgttaagttataacaagtatcacgtatattgttgagaaatatttttcaaaagaaggactagaagaccacagaattatgacctatagaaaatgacaagaaatagatggaagtttggkttttttttttagaggccattatgtaaggaagaaaaaattgtgaggtggttattatcttggaaccaaggcgattgcagaaattagccagtggaagaatcagaagtttataatgattgtgaaatattgtagttcaagaaaccaggtgtaaacatacagtgaaacgtgtgctgcagttgcaccgacagtttgtctccttaaagagaacctcttaagggacctctagctaaaataagaattgtcttttaggaaggataccaggggaagagttgtcaaaatgcaggatgacccatagttatttcaaataaacaacaaataattttctaccataacttgtcccaaatcttgcactattatgctatatttatgct

SEQ ID NO: 447649 - DNA, 534 bp, Homo sapiens
aaataaaacatttaccttcaagtttttaacatcctgtttatttctcttcatgttaagttataacaagtatcacgtatattgttgagaaatatttttcaaaagaaggactagaagaccacagaattatgacctatagaaaatgacaagaaatagatggaagtttggtktttttttttagaggccattatgtaaggaagaaaaaattgtgaggtggttattatcttggaaccaaggcgattgcagaaattagccagtggaagaatcagaagtttataatgattgtgaaatattgtagttcaagaaaccaggtgtaaacatacagtgaaacgtgtgctgcagttgcaccgacagtttgtctccttaaagagaacctcttaagggacctctagctaaaataagaattgtcttttaggaaggataccaggggaagagttgtcaaaatgcaggatgacccatagttatttcaaataaacaacaaataattttctaccataacttgtcccaaatcttgcactattatgctatatttatgct

SEQ ID NO: 447650 - DNA, 562 bp, Homo sapiens
ttgaatcaataaatagactgcatgtttaaaagaaaaaaaagtcttttagactcattatctaattattatctaatatgttttgtaacacaaaatttattgctataaccaattacattgatatacccaggcaggtaaaatgaactgaaaccacaaggaaaggggatacttacatccacattatgttgtatgtttaatgtaagtgtagatcctggatagtagacagaaatgcctttaagtaagtcgctaatatcctacctcccaaaagctcatgttattttttatagtatcttcagattatgaaataattctgagaaggttgattttgtttgacctcccagcatctgatgagttttgyaactgctgttttaaattagaattaaatacataaacatggtaagacatgatggcagcctctgcatattctgcagagaatggtttaatatgaagcaaaaaagaaaacatcaatttgattatgaaataatcatcattatcacattttctttacaggttacaaaaaaaagacaaacataaaattacatacaatgattacactgtcaccacc

SEQ ID NO: 447651 - DNA, 544 bp, Homo sapiens
agactgaggcagaagaggtctagggggacagaacatcaggagttcagctctgcatgtattacattggtgatattaattacccatctaaatggagatttcgrttatgcagttagatatatgagcatagtgttcaggacagctgtgcaagcaggctgaagacataaatttgaaagtcatcagcatatatgcttaaagctttgaaactaggtgggaaaatcaaaggagtgagcgtagacataaaagagattcaaggcctgagcttctggtggcttcttctaccttaaggggcacttctatgttaagaggtggagagaaaaggattcagcaaagtagactgagaaggagatgcctcatggagaaaagccttatgagcacaatgtcctggaaaccaagaaaagaaagtgttttaaggagaaagaaatgatcagttatgttaaatgatgctgtcagagccaagaagattatggctgagaattggccattgagtttacaacatggaaggccctggagacctaggtataggcagtttcattggaataatgga

SEQ ID NO: 447652 - DNA, 482 bp, Homo sapiens
gatttgaaacagcagtaagtatgtataaagcttacatggtcaacattctggccatgaaacagacctctttctgaaagactccaaaacttacaagggtctgtagcagggagacagaaataatctctggacgtgattacgtatatacagatgcaaaatgtcaayagtcattaaagaacaatgattgctaaaagagaaagtcttatcacagtactatcaacgatcctaaactgagccacttggtcaattccaagctgcatgataacctgacaacagagtggaacaaaaggaagagaaaacttggtaatttgaaatctgttctcttgttaatgccccacaaactagagctgtgcttagttttaacctgttgttctctgatatttttaaaggaaaggccaatatattgaatcatatacacaaatggagacttctgaaaagacgagatagatgtcttcattagaaatacaggtggtatgtcaacagta

SEQ ID NO: 447653 - DNA, 556 bp, Homo sapiens
ccataagcagtccctttaaattctaatattcagagactatttttactttggggatgtcttccattaggctgagacttcttatcccagccctaagagaacatacccttcatgaccattttcagaaccttttatttatcactttttaaaactatatatatttaaggtatacaacatgatgtttcgatatacacagtaaaatagtattctagtcaggcaaattaatatgttcattatttcacatacttatctccaccttttttttttttttggtggcaatcatacatggttttgaaaatggtagtcagagatgataggttggaagttaattccaagactwttttagacaaaaaggactgtagcattgcattcaaacacatgctcaaacattattcatgccactcaaatccaattcaggccagcatcacccggaatgcacaataatattgggaatggcttatacaattgcatgtgcatgtgagcattatctcatattcatgcatgcacttgtgtggaaatggctcttggtcttggacctattgaaagaatgattgaaacg

SEQ ID NO: 447654 - DNA, 556 bp, Homo sapiens
ccataagcagtccctttaaattctaatattcagagactatttttactttggggatgtcttccattaggctgagacttcttatcccagccctaagagaacatacccttcatgaccattttcagaaccttttatttatcactttttaaaactatatatatttaaggtatacaacatgatgtttcgatatacacagtaaaatagtattctagtcaggcaaattaatatgttcattatttcacatacttatctccaccttttttttttttttggtggcaatcatacatggttttgaaaatggtagtcagagatgataggttggaagttaattccaagacttttttagacaaaaaggactgtagcattgcattcaaacacatgctcaaacattattcatgccactcaaatccaattcaggccagcatcacccggratgcacaataatattgggaatggcttatacaattgcatgtgcatgtgagcattatctcatattcatgcatgcacttgtgtggaaatggctcttggtcttggacctattgaaagaatgattgaaacg

SEQ ID NO: 447655 - DNA, 633 bp, Homo sapiens
ccatgagccccgccttccatacacaatgacatttcatccccacaatcgattaacacaaccatgatagccatgaactcccaactcctccagctgctagtgctcaacgggagagtcccctccaggtctgtctcattgcagagcccatattctttctgcctggccagcagttactctcctcaatgagcaggcactggtgcagtcttgggtgggcaccagtcacccctatggaaatccttgatggatgttacaggacaggattggatgtgaggggtcttgcaaatggggctcaagaatcttcatcatgaggcgtttctgcgcctactgacctgagatacagagaggaagttccatggacaccaacacccagttccaaggaggcacacattaaccttcccatgatgtggatgtgtgggaacacatgggcttttaatcacacgccatgcaatccacagaagagctgacccagcctgggggcatacacgcactcatgtgtactcaacgttcacatgcactcacaccctggctcggctctggggacgctgaggccgctgtgagaagaaggayggctctggctccgtcagatgaggctggcaatgctggatgtggtctcgtgacgccggccagcagacaact

SEQ ID NO: 447656 - DNA, 570 bp, Homo sapiens
agacattcaaattgaaaggcagaagtaaaactactctatttgcagataacattatttagcaaataatccacaaaaaaactatgagstaacaaatggtttcggcgaagttgcagagtacaaaatcaacacataacaattaggttttctgtaaaaaaaaatactccaacaatgaactatccaaaaggaaattcagaaaataatcccatttatgatagtatccagtagaataaaatacttaagtgttatggtctgaatgtttgtgcccttcacaacttcatatgttgaaatctaataccattgcaatagtatgaagaggcatggcctttaggaggtgattaggaagctctgccttccttcatgaatgagataagtgtccttataacttaatggacaaagtagtggcttcacaacctggagagacaggtttagatactgtgctgccaataagcagaaattttatttttgataagcttacataaagtaataatgtttttccaaaaataagactttgtcaaatggccccttttaacttctaaaattttttaatacatcaaatctgatttgaatatt

SEQ ID NO: 447657 - DNA, 570 bp, Homo sapiens
agacattcaaattgaaaggcagaagtaaaactactctatttgcagataacattatttagcaaataatccacaaaaaaactatgagctaacaaatggtttcggcgaagttgcagagtacaaaatcaacacataacaattaggttttctgtaaaaaaaaawactccaacaatgaactatccaaaaggaaattcagaaaataatcccatttatgatagtatccagtagaataaaatacttaagtgttatggtctgaatgtttgtgcccttcacaacttcatatgttgaaatctaataccattgcaatagtatgaagaggcatggcctttaggaggtgattaggaagctctgccttccttcatgaatgagataagtgtccttataacttaatggacaaagtagtggcttcacaacctggagagacaggtttagatactgtgctgccaataagcagaaattttatttttgataagcttacataaagtaataatgtttttccaaaaataagactttgtcaaatggccccttttaacttctaaaattttttaatacatcaaatctgatttgaatatt

SEQ ID NO: 447658 - DNA, 543 bp, Homo sapiens
cctcagcttccagatcctgaggagctctggggccttccttctggacagggaacatgtctgcctggcttcctcagccaggtacgggaggcttyggggacctgtgtctgtctctgggaaggaggaaggagcctgtggcatcttccttaagcaaaagcacatccagcccatggccaaacttcagagtggggcgaggggcccagcacagctcctccgttcctgcagcagagcccagaaaacacatctgatgttgtggctgcctcaaacctacaaacaccatgggtttgaagtgtcctgttgacatggccatggccactttccccgtggaccgtggcaagtttttgtttttggtttttgttgtttgtttgagacaaggtctcactttgtggcccaggctagagtgcagtggtgcaaactcggctcattacagcctccacctcctgggctcaagcaatccttccacctcagcctcccaaagtgctagaattccgggcttgagccaccgtgccaggccttgtgtagaagtattatacattatctttaaaa

SEQ ID NO: 447659 - DNA, 543 bp, Homo sapiens
cctcagcttccagatcctgaggagctctggggccttccttctggacagggaacatgtctgcctggcttcctcagccaggtacgggaggctttggggacctgtgtctgtctctgggaaggaggaaggagcctgtggcatcttccttaagcaaaagcacatccagcccatggccaaacttcagagtggggcgaggggcccagcacagctcctccgttcctgcagcagagcccagaaaacacatctgatgttgtggctgcctcaaacctacaaacaccatgggtttgaagtgtcctgttgacatggccatggccactttccccgtggaccgtggcaagtttttgtttttggtttttgttgtttgtttgagacaaggtctcactttgtggcccaggctagagtgcagtggtgcaaactcrgctcattacagcctccacctcctgggctcaagcaatccttccacctcagcctcccaaagtgctagaattccgggcttgagccaccgtgccaggccttgtgtagaagtattatacattatctttaaaa

SEQ ID NO: 447660 - DNA, 543 bp, Homo sapiens
cctcagcttccagatcctgaggagctctggggccttccttctggacagggaacatgtctgcctggcttcctcagccaggtacgggaggctttggggacctgtgtctgtctctgggaaggaggaaggagcctgtggcatcttccttaagcaaaagcacatccagcccatggccaaacttcagagtggggcgaggggcccagcacagctcctccgttcctgcagcagagcccagaaaacacatctgatgttgtggctgcctcaaacctacaaacaccatgggtttgaagtgtcctgttgacatggccatggccactttccccgtggaccgtggcaagtttttgtttttggtttttgttgtttgtttgagacaaggtctcactttgtggcccaggctagagtgcagtggtgcaaactcggctcattacagcctccacctcctgggctcaagcaatccttccacctcagcctcccaaagtgctagaattccrggcttgagccaccgtgccaggccttgtgtagaagtattatacattatctttaaaa

SEQ ID NO: 447661 - DNA, 473 bp, Homo sapiens
tattttcaaaaatagttatttcaaaaaaagcacagcagttgcatcctattgaatagtgggaacactggatgataagttaaagtatcattttgtgttaaaatattgaagcaaatatggcttggtgtggtggctcacacctgtaatcccagcactttgggaggccaaggagggtggatcacttgaggtcaggagttcgagatcagcctggccaatagggtggaatccygtctctactaaaagtacaaaaattagccagttttgttggtgagtgcctgtaatccaagctactgaggaggctgaggcaagagaattgcttgaacccaggcggcagaggctgcagtgagctgggattgtgccattgcactccagcctgggtgacagagcaagactccattaaaaaaaataataataatattaaagctacccattaaaaaaatttgaaagtcccagaaatgtggcaagacaaacaaccc

SEQ ID NO: 447662 - DNA, 491 bp, Homo sapiens
gatgggacagcttgcataacttagttgatgactctcccacaatcttatagacttcactaatctttgaggctcttcactgactcatgtgacaaagtcacttaattctgtaaatttgggccagttcattttgctagctctcagtttgctcatctgtatgcaagaagtttagtgtaggtaaaccaaggacgccaatatgcctgtctctccagaaggtcaataacagaaaatctgagctggggggtgcagttccaagtcccaattccatgcctcaaagatcagctggttgtctttattcatcaccaggcacacatctccttgatactctcaatatctaggcataaaatgtgacaagacagattatctctgtgttatttttttctccatycctcatcacttgtatttccttaactcattgaaatcagttttccacattttttgaaggagagtcttttggcaaagatgtgaattatctacaagcagctgagagaaat

SEQ ID NO: 447663 - DNA, 356 bp, Homo sapiens
tcccataacatttctgggggcctgtctgggattggagatggcaggtttctgtctcctttgcctgtgggctaaagccacaggacgcgggagatttgggaactttggtgccactggggaagacttagcccagaaggagaacggctcccatgtattggagcctcgccctgacagcgcaaacggaaccgactcaggagttgcaggacagtcacaggagcagtgcrctggcagactactgaaccgccataaggttgggccctggaaaagcccatcccataaggacagaaggggagcttgattaccttccccggaacgatcacttatccaacccagagtggctgggggcagcaggagtggcc

SEQ ID NO: 447664 - DNA, 578 bp, Homo sapiens
taccctataaattgatttgcagattcaatataatcccttcaaatttccaagtgtatttttttagaaattagaaagtctctcactcccttaaatcaatatgtatgtacagaaaatcaaattgcacaaaacaatttttaaaaagaaaaacagaatcaaatgacttatacttcctaatagcaagtcttactagaaaggatagagtacaattccgcagtttcttcacattttccatctgttctgaccaagaatacacagacgcttgacttctctgttattctgtggcccrgatacctgcatgctttcccctgcagacttgaacccaagccagggctctgaacattcgcagacataagtaaaggtgttgtgtttaggttgtaattcaaaacactaaaagaaagtatccctggtcctgggagattccttaaacgctcctataaactgcataaccagactcctcactgcaaagatacctagacaaagcatccttggtctcctttcctcccaataagatgagctgcagccctcactgtgtgtacatcccttaagaaatgctttgggctcatcataccagggtttag

SEQ ID NO: 447665 - DNA, 609 bp, Homo sapiens
agaaaatatttgataagacataattttatgaaacatcaggtttataacaaagttattaaattatgtacatattagggttgygaagataaaggccacataggcccatttcaagtcaacacataaacatagaaggatgattaacaaaataagcgtgtagcttatgctaaatgttgattggaatagacaataaattatggagaacttcacaggatactaagcttggatgggatcttagaagttttacaggtcaatgccactccatctactggctgatttgcactagtttaataaatgaacaacaaagataacatgtatcagtaaaagttaaaatcattttattgaatatctgtcatgtctgtgccattgtagtgtactaggtgccttataccacttatgagtcctctacttacaaaacgcttttcacaaaatatgagtctccaaagtcaatggcatgaatagttgtggtccagacatatgatgtttgtttttaaaatctttacacagccttgtatcctttttccttttcttccttttaccctttttaaaatgtgctgagttttatctaaggctaacctctgtaatgttgctatatgccagtattcagttact

SEQ ID NO: 447666 - DNA, 471 bp, Homo sapiens
cccctggtcctggcacaaagcttctaaagttctcataaagttctcagtgataaagttgataggagcatcttttgtttcaatatttggtcttagtcccaggtttctaacacaagaccctctaagacctttgggatctccaccatagtaagaatgcatttgatgatgctactgagatgactgggtgactgaaagctcccagacagcttcaggaggagggctggttgccagaacaaaccatgtgattagaggcttgaaacttgcagcctcacccactgagctccaggaagaaatagtggctgaagattgacttaatcaccaatggtcaatgattttatcaatcatgcctgtgtaatgaagccttcagaaacaccctaaacaacagggtttggagagtgtctgggttcctgaacacaagggggatactgggagggtaacatgcccaatagasggcatggaagctctgtgcccctc

SEQ ID NO: 447667 - DNA, 596 bp, Homo sapiens
tatttattcacttactcttcactcactgcggacactcaggtggcagcaggaaggaaagtgttttgctcaaccaaatgaaagtttgatctgctctttgaatgctgttccttcaatcagataattctattttcttcatatattaccaagtctttttattttctcccctaattgagcattcagagatgtgactctgttttctagtttttcttacgtttcaccactaaatcttaaatttcatatgagacagacagtgatgaaattcctgtcactggacatatatatgtatgtttatgatggtgccttacacatacacatttttctatctagcgattaaccattaaaactctatactcagagtgaggaaacattacacgttccttcccaaaccctgtcaactaccctgtcaattaaataatccctgaaaaaatggcaacatctatattaatgyggtttttatatctcatcaatgacccatttgataaaatagttctagaaacttgtaatgaaccagcagtgatggaaatttgtactgaactatttcatatctaaaagggtatctactttgttttagacatgacaactctctcatgttttag

SEQ ID NO: 447668 - DNA, 571 bp, Homo sapiens
aacttttccctcatattctatttctgctgttataataccaaaatattgatcccaaaggtaaaaataaattctttctcaggggtaacatgattttttactcttaactttttgatatgtctgaattgttgcatgtaatcaggaaacttcccatgctattaggttggtgcacaagtaattgtggtttttgccattactttcaatggcaaaaactgcaattaccgcaccaacctaatactaggagccatatatccacctgctcaaggtgctagctttcatgtttacattcttctataatacaatgttcactcatgaccttgaatacattgtgcctgtgtctaattaaattcaagtatcttttycatcaggtttgacttccaagttatttaaaccgactttacttaggcacttcccattctcaagtatgccttagtccaggttgttcagatagttgctcagattaagccagtgagatgattggggtcacagatttaattcattaagccactaaagcatcagcccagatagccatattttcagttaatttcaattagctgctcatgaagggttggcc

SEQ ID NO: 447669 - DNA, 571 bp, Homo sapiens
aacttttccctcatattctatttctgctgttataataccaaaatattgatcccaaaggtaaaaataaattctttctcaggggtaacatgattttttactcttaactttttgatatgtctgaattgttgcatgtaatcaggaaacttcccatgctattaggttggtgcacaagtaattgtggtttttgccattactttcaatggcaaaaactgcaattaccgcaccaacctaatactaggagccatatatccacctgctcaaggtgctagctttcatgtttacattcttctataatacaatgttcactcatgaccttgaatacattgtgcctgtgtctaattaaattcaagtatctttttcatcaggtttgacttccaagttatttaaaccgactttacttaggcacttcccattctcaagtatgycttagtccaggttgttcagatagttgctcagattaagccagtgagatgattggggtcacagatttaattcattaagccactaaagcatcagcccagatagccatattttcagttaatttcaattagctgctcatgaagggttggcc

SEQ ID NO: 447670 - DNA, 591 bp, Homo sapiens
gatgaagtagtacagaaagttctcatacacccttcccccacctcagcatcctttttgtaatcacatcttacatgagtgtggtaaatgttacaatgactgaaataatattgatacattcttattaatgaaagtctagagtttggcacagaggtagagatggacaatcttgatgtccagttttttcatagctgtatgtatccagtrattaatttcccatttggtaggagggcaacagttttatcaatatttgtatcgtatgttagtgtaggcgacattacttctccattagatgctggcttcatttcttgttgtacttgaaattagacttctcacagaccagcaaggggcctgcaaccattcacatactactgagggttgccatggttatgttggccctacaggagcttgacaaaccgtaggtggtcttcttatcgggagaaagttactgaaatcagtctcttgtccaatcaaagctgcagttatggtttgtggaacaggggttggaggttagtcagtatctggtgttgagctacaattattttaatattgcttgagggtcagtgcttatttagctgctagagaaaaattaac

SEQ ID NO: 447671 - DNA, 591 bp, Homo sapiens
gatgaagtagtacagaaagttctcatacacccttcccccacctcagcatcctttttgtaatcacatcttacatgagtgtggtaaatgttacaatgactgaaataatattgatacattcttattaatgaaagtctagagtttggcacagaggtagagatggacaatcttgatgtccagttttttcatagctgtatgtatccagtaattaatttcccatttggtaggagggcaacagttttatcaatatttgtatcgtatgttagtgtaggcgacattacttctccattagatgctggcttcatttcttgttgtacttgaaattagacttctcacagaccagcaaggggcctgcaaccattcacatactactgagggttgccatggttatgttggccctacaggagcttgacaaacygtaggtggtcttcttatcgggagaaagttactgaaatcagtctcttgtccaatcaaagctgcagttatggtttgtggaacaggggttggaggttagtcagtatctggtgttgagctacaattattttaatattgcttgagggtcagtgcttatttagctgctagagaaaaattaac

SEQ ID NO: 447672 - DNA, 303 bp, Homo sapiens
cttttgggggtttgtggctgggcttgtttagatagatgcacaagtggccatgcaggatgatgccatagagcagcttagaggagtgtgcattagaggttgggaaaaaaatcacttcaggaggagaacaatacccttcttttagtgctgtcaagcaggggcctaaagaaccttatgcagattttatagccagkttacagaaatctcttaaaaaggtaattacagattcgcctgctaaggatatagtgttttggttattagctttcgacaatgccaatcctgagtgccaagctgctctgtgaccta

SEQ ID NO: 447673 - DNA, 598 bp, Homo sapiens
catagatttaaaagactgtttcattactaactccttagctgagcaagactgtgaatggtttgcatttataattcctgcagtaaacaacacgcagcctgctaagcattttcactggaaagtgttgccacaaggcatgttaaacagtccaacaatttgtcagacttatgtaggacaagcaattgaacttactcataaaagatttgtcacagtgttaaattattcattatatggacaatattctttgtgctgcccccactcgggaaatattactccaatgttatgatcacttgcaaaacscgatttctcctgccagtttaattgtagctcctgacaaaattcagactactactccttacttctacttagggaccttagtaaatgacactaccattgtgccacagaaagtaaccatacgtaggcctcaattgaaaactttgagtgactttcaaaaattactaggggacattaattggacacgacctgctctaggcattcctatctatgccatgagtaatctattttctatccttacaggaaatcctagtctcactagccctcagcaattaacaacagagactgaggcagagatacagctgat

SEQ ID NO: 447674 - DNA, 588 bp, Homo sapiens
gtgctgtatgtggtaatgggaaaaagtgaaattaaatgaacaggaggatttggaagcacgaatgaacaaggcaaagcagcttattgggtaaatcaaattactgataaasgtcctacctgtgacataactattcagggaaagaaatttaaaggtttggcagatacaggagcggacatttcaatcatttctctacagcagtggccatccgtgtggccaattcaacccactaaatttaacatagttggaaacggtaaagcccctgaagtatatcagagtagttatattttgcattgtgaagggcctgatgaaaaacatgggactattcaacaaattataacttctgtacctataaatttatggggaaaagatttattacatcaatgaggagcacaagttctaattccagaacagttatatagacttcaaagtcaacatatgatgcatgaaatggcgtatgtccctggtatgggactagaaaaaaatttgcaaggtttgaaaagtttccaccaaagattaggatatcatttttgctggtggccattgttaagcctccagaacctatacctttaaaatggttaacagataagc

SEQ ID NO: 447675 - DNA, 561 bp, Homo sapiens
gtagttatattttgcattgtgaagggcctgatgaaaaacatgggactattcaacaaattataacttctgtacctataaatttatggggaaaagatttattacawcaatgaggagcacaagttctaattccagaacagttatatagacttcaaagtcaacatatgatgcatgaaatggcgtatgtccctggtatgggactagaaaaaaatttgcaaggtttgaaaagtttccaccaaagattaggatatcatttttgctggtggccattgttaagcctccagaacctatacctttaaaatggttaacagataagccaatttggatagaacaatggctgctaagtaaagagaaactggaggctttagagaaattagttactgaacaattagaaaatgggcacagagctccaacattttcccatgggaattcaccagggttttttgtttgtttgtttgtttgtttgtttcataattaagaaaaaatcaggtaaatggagaatgttaactgacttaagagccatcaattcagttatacaacctgtgggagcattacagacaggat

SEQ ID NO: 447676 - DNA, 616 bp, Homo sapiens
gtttctttactatccctttagctgagcaagactgtgaayggtttgcatttacaattcctgcagtaaacaacctgcagcctgctaagtgttatcattgcaaagtgttgccacagggcatgctaaacagtcccacaatttgcctgtggggcaagcaattgaacctactcgtaaaaaattttcacagtgttacgttattcactatatggatggtatactttgtgctgcccccactggagaaatattacttcaatgttatgatcacttgcaaaaatcgatttcttgcactggtttaattatagctcctgacaaaattcagactactacttcttaatcctacttggagaccttagtaaatgacactaccactgtgtcacagaaagtaaccattcatagggatcaactaaaaacattaaatgactttcaaaaattactaggggacattaattggatacgacctgctctaggcattcctacccatgccatgagtaacctgttttctatccttagaggaaatcctagtctcactagccctcggcaattaatgatggaggctgaggcagagttacaactgattgagaagcaagtccataaagctcaaataaattgaatagatcca

SEQ ID NO: 447677 - DNA, 653 bp, Homo sapiens
gtgtcccatgaaccaaagggtgaaaattgtgcctgagtgacgaatttgaaagcctaatctagtactccaaaagttttatactccattcatgtgatagaaaagatccctagtgagaatgtagagataatatgaaaaatgtagagataatgtgaaaaaaataataacaggtccattgttaaaaatttcccacacaaattttaaagtataaaatgcctggcaagaaaatgtttaaagggaaatgacacttgtggaattcaaatcactctcggagcacttacagcctctcttagtcggtacggtgagctagataccctaacaaacaatttgtttccttcctaaatttcaaatgatattagtgactgattttattataatagtcacaggcagtgtgagccagaattatttccataccttctgttaaaatttgtggcattccgatccttttttcccctggatctgcttttattgttrttctttttgttttggaaatggggagtgtgtgaaagtcaataaagctgttgaatttgtctcctgtacgtttagcatccaagccgctcaaaactgccccaggtgtgaaggagtgagaagggatttgcatttctgcctttctttttaactttccatgtatctgctgtcaaatcttcatatgctat

SEQ ID NO: 447678 - DNA, 621 bp, Homo sapiens
cttagtgtctcccattcttgactggacaacagagcaatgaagggctccttcctgacagttcataaatgttccttcataccacagtgagattttgctactaacaccatgtcttcgttttctgaaaatgacctgtgtgtttcgtttcatagacttcacaatcaggagagaacagataattagggtgggttgggtcaggtgcagttctttccagagatgacactggggaccagatatgcctccttactcttcaaaatcaacctcatataaaacatcaatttcctgtctttagatgatctcaatatgtagtgtggagctgtttctccctggtcctactagcctcaacttggtttagcccttaaatatttattgaaatgattaccatatctttccagtgagtcccccaggccttccagattatccaaaagattaatcctcataaatacagaccatcaccttgaaataatggcttccatccaattctgtctggtttcagaagtgctggtgccytatcttttaggtcaagtgcagaccccctgccacaatttcaagacctcctacagcccatgcccaccctgtgtatcctagatccacagtgccggctgccagggggacctgggactc

SEQ ID NO: 447679 - DNA, 562 bp, Homo sapiens
atgggttaatagctgctaatctgtctgcagctcctttcagccctccagttcttggcattaaggccaggcgtgcctgggatgctttaaatatttgttcttttaattttgcaatatccaaaaacaagtttgtasagtgtccttttagatgcttttttattcttcccccaattttgatcttattaagagctattaatagtttccacaaatccttaatgtttagctcctacagcaggccatatcatttgaggttgaggtgccactatactgccatggttccatataataataactcttgctgtacttcttattatgtctaccatctgaccattttgttcagatcagctgaacatagtgtggccttggcacacagactgagaggtgcaatttatgctaaatatccccttagggatcaatcaataatgattccataggaatcattgtgcagcacctctgtatgttctgcaatgcaatcttcctaaacaagtacattcattttttctggccaggttcaattttgtttacaaataggttttttagggcggtatacctcaattataggagc

SEQ ID NO: 447680 - DNA, 562 bp, Homo sapiens
atgggttaatagctgctaatctgtctgcagctcctttcagccctccagttcttggcattaaggccaggcgtgcctgggatgctttaaatatttgttcttttaattttgcaatatccaaaaacaagtttgtacagtgtccttttagatgcttttttattcttcccccaattttgatcttattaagagctattaatagtttccacaaatccttaatgtttagctcctacagcaggccatatcatttgaggttgaggtgccactatactgccatggttccatataataataactcttgctgtacttcttattatgtctaccatctgaccattttgttcagatcagctgaacatagtgtggccttggcacacagactgagaggtgcaatttatgctaaatatccccttagggatcaatcaataatgattccataggaatcattgtgcagcacctctgtatgttctgcaatgcaatcttcctaaacaagtacattcattttttctggccaggttcaattttgtttacaaataggttttttagggyggtatacctcaattataggagc

SEQ ID NO: 447681 - DNA, 538 bp, Homo sapiens
cacagactgagaggtgcaatttatgctaaatatccccttagggatcaatcaataatgattccataggaatcattgtgcagcacctctgtatgttctgcaatgcaatcttcctaaacaagtacattcattttttctggccaggttcaattttgtttacaaataggttttttagggcggtatacctcaattataggagcagatttattatggtaaatccagagatcagaaagcatgtgtaactgtgtcatagagtgattatatccaggcattattgccagccaagattgataaatatgcccaataagtatgattgttccctgtgtcagcccttactgaaggaatactcatggcagtggtgatcatcactatcatagctaccattaaattactcattgtgactggttgttccactttcctcaggttttcttttatcatcagtgacagcttcttgatctgtccccaggtgggtggctgtgtttgacgggtattgctcatgacagttgaagtyctcctcagcatcagtatcaacctggctgca

SEQ ID NO: 447682 - DNA, 619 bp, Homo sapiens
tgtgtatggactgtcctgtaatccctatttctccctcttttttgtttttgtcatcagttgtttatctgtatgatatcataactgagcattttcaattaactctgtggaatgaaccatgtatgatgaatcagaaatcacattaataggcataacaaaagcagccaatatctcrattacagctacaagctttgctttttatagggcatctgaataactttacttttttgagccagaataagaagctttactattactagacccatctgtgaaacaatgaaaacacttagcaggctgcaggttgtttactgcaggaattatacatgcaaaccgcttacaggcttgctcagctaaagggatagtaaagaactgaactgatggctcttaagtcagttaacattctccatttacctgattttttcttaattacaaaaactggagaattccaaggggaaaattttggagctgtgtgcccattttctaattgttcagtaactcatttctccaaaacctccagtttctcttaacttagtggctactgttctatccaaattggcttatctgttaaccattttaagggtataggttctggaggcttaacaatggccaccagcaagaatga

SEQ ID NO: 447683 - DNA, 517 bp, Homo sapiens
catttctccaaaacctccagtttctcttaacttagtggctactgttctatccaaattggcttatctgttaaccattttaagggtataggttctggaggcttaacaatggccaccagcaaraatgatatcctaatctttgatgggatctttgtctttccacttgaagcagttctttcaaatcttgcaaatttttttctagtcctatgccagggacataccccatttcatgcattgtatgttgactttgagggctatataattgttctggaattagaacttgtgctccccattgttctaataaatctctcccacatacatttataggtacagaagttataattggttgaatagtcccacgttgtccattgggcccttcacagtgcaaaatataactactttgatatacttcaggggctttaccaactccaactatgttaaatttagtgggttgaattggtcacgcggacagccagtgctgtagagaaatgattgaaatgtccactgctgtatctaccaa

SEQ ID NO: 447684 - DNA, 450 bp, Homo sapiens
tataatatttccctgttgaactagggagtgtattctaacagggaactgccaagcctctaaatcaccctctcgtctagcttgctgaatttctccctgaatagaactaaaagcggtcacttgaggcgctgctcagtcactggggcaactactttttacccagtgtcctccagaaaagaaagatctggagggtcattttcttcaaaataataatgagggggtgcagaatggtagggatgaacctctccctcctttgccgctttagctttagctggtaaataaacatgctttgtaacctcttctgttacttcgttatactctccttcctcctcctcatcagtgtgaaaaagttccaaggtggaatgaaccagaccccacacttktcccattggtaccctgatgcttctgagctccccttcttactcaccacagggattgcttaattccacgttc

SEQ ID NO: 447685 - DNA, 591 bp, Homo sapiens
tttattcgcccatgcaccccccttttttttccttcatagtgttctttttgtcttggatcatttgtgtttttcctacattgatgtgaagcatttttaaagacactttagagattagtcctttattggttcatttctwttgtaggttgttgtttcctactctggtctttgttgtttaatttcagttttaatttcttgcttggtttagttcatgtaacaatatttttcttagaatatttgtatctgtgtttgtgaaacagaacatctattatttctgggttttttattgtctgatcagattgtgtattaatgtaatgctggcttctcgaaacaaattgaaaaaccatccctttcgtctttctctttgagagagagtgagcagtgtcaatatttttttcttccttaaatatttggaacattttcaaagtctgatcctggtgttttccttgtggagcattattgttgatttgttggatttttaaaattagttagttaattttgtttaatatatataggagtgttcttattttatgctatttttgtgccagttttagtaagttgggttcagcatctgttgcgatctctgttgtcaga

SEQ ID NO: 447686 - DNA, 619 bp, Homo sapiens
ttctttctgttaggtacatgaaatgattcaggctcatcttctttttctcccaatctccgactaggaatcatccctggtccccttttttgtggatagtatttaggaaataataacttggcagttggtgtgtttactgttactgagctgtgactgcatttatgtcctctcggtagaatgaatcacaaaatatatgtatatgggcacacccaacaatttctctattgttcctatgtatttaaaagatatgagttctattctaatcccacactccaggttttctagctctcctcattcctatttctacaaataccttctctaacagggagaaaccttgccatcatcattctcaacatatttgctcagtggtaccaatctcttaacaatgctgcccatctcctccccctgtcccttccacacctcaccctcagccctcttggtgccagcagacacatagccacaactcctctcatcccacaatgcaggtctaactcctccactctgggaagggaaggcaaaagagacacataaaaactcaaagaggggaatcaaaagaaagaggaarggaaggccacattgattttttaaaaaataataaatcatcttttgattgccctaataa

SEQ ID NO: 447687 - DNA, 585 bp, Homo sapiens
attgttattatcaaatgtgaagatagatcattgtcatactattattgtaaaaaaatgtggatgatggagctgtatgtgtatttagttaaatacttaaactggtgagtattttataaagcgaatccttgtatttaacctgtgtacatatcataaaaaagacacaaaatatggataaatcaattctttatttgaatgtttatgttatttgaagtctgtataattcttgcaagatacataatagaaaaaaagacttgaaaaattaatagcatgacaaatattatgaataataccaaagaatcatttacattcttctccctttattgtgattcagttggctgttatagcargtgtttttggttgcctctctgacaaccatctttctgctgctgttacttgttaacagaattctaattctattcaggtatctactttccccccagtgcctcagggttagactctgatagatcttatcctgtttggtgcaatctcctattccctggatccataattggtttaaccaagggcatgttatacagctctaactaatgagacctgagggaaagtctgctgaagggattgggagaa

SEQ ID NO: 447688 - DNA, 585 bp, Homo sapiens
attcttttggaggtgagacattctgcctttctatagcccctgactcttagctcttcaaagatcttctagggctctacctgttcagatactcccacacccttggtggtggcttctgaaaacattgaatgaagcacagtttgaaaataatcatcctatagtttgtttgcctctatgaccctatctccctgtagaacttggcaaggtcacctaagatggagagaactagttaacagaaatyacattgttatatgtcagaagtagcgtgatggcaaatctgttccagtttggcgggatgtgctcttttcccaaaggattccttcccagacacttagcattacatgtttagtttttgtatattcagtagttcattcatcagtcatattttaagcctttactatgtgccagggtgtgttaagtgctagagatactgacaagagtaagattacatcacagtttccaggaaaactcaaagtgtggatggggaccatacataggccaacagataattacaatagttataagatggtgcaataattctatattatatgtgagtccaggatcctatggggatggatacaaagattt

SEQ ID NO: 447689 - DNA, 585 bp, Homo sapiens
attcttttggaggtgagacattctgcctttctatagcccctgactcttagctcttcaaagatcttctagggctctacctgttcagatactcccacacccttggtggtggcttctgaaaacattgaatgaagcacagtttgaaaataatcatcctatagtttgtttgcctctatgaccctatctccctgtagaacttggcaaggtcacctaagatggagagaactagttaacagaaatcacattgttatatgtcagaagtagcgtgatggcaaatctgttccagtttggcgggatgtgctcttttcccaaaggattccttcccagacacttagcattacatgtttagtttttgtatattcagtagttcattcatcagtcatattttaagcctttactatgtgccagggtgtgttaagtgctagagatactgacaagagtaagattacatcacagtttccaggaaaactcaaagtgtggatggggaccwtacataggccaacagataattacaatagttataagatggtgcaataattctatattatatgtgagtccaggatcctatggggatggatacaaagattt

SEQ ID NO: 447690 - DNA, 622 bp, Homo sapiens
ttttatctgtgagaaagttgcaaatcttttctcacagttaaatatatatctttcaactttgtttattgcattttttggacatttataactttagtttttgaagtgaaatttattatttttcttttggattttgagtcatagttagagatctttttctacaaccagtttatgctagaatttattaatattttttctataacttgtaagagttgtatttatgtctggatttttgatacacttggaattgtgtatgtttgagttatggatctgattttatctttcctcaaatatctatccaggagtcctagmaccatttattattatgtctcttcttttagccccagtaatctgagagctcgcctttatcatttactgaaattctattttgggtttacttctcttttgttcctcagtctcttattcatacattagcatcacactatttgaaatacagagaattttttattttaatatttgtttgggctaattccctactagtttcttttctttctcagtttttcttaatttagtttgcatgttcatttttccatatgaactttcataacgctataaaaactttttgattttttttggaatagtatcaaatttataaattgactca

SEQ ID NO: 447691 - DNA, 571 bp, Homo sapiens
agaaatttgtgggtatttatttaaaataatttttaaagaaaaataatatatcacaaaatttggaaawaaaacctttctcctgggtttcctttatccatattcattctttcctagatactaagaagttacagaatgtcttcccaagagtattgcaatcattaatttgttattccacacaatgttcccctgaggaaaataatgataattatccattattatgaaaagcaatagcagacttctaaagaccaacttgcccaagtgtatacccaaagaatgtgagttttctctaaagcattccagacctccactctccccactaagtcaagagaagtctatcattcctggttaagccatctgttcactgtgggaaataccttttatcttgtagacactaaaatcaatgtgttaagcagatcatttgctaatattgcagctagatctctgcttattctacttggtcccaaaccctaggcttcagaacatgtaacaacttgttttacttgcaagagataagtcattattacttccccaggataaataattataaatttataattatgtcatgtatttt

SEQ ID NO: 447692 - DNA, 585 bp, Homo sapiens
cctggtcagcctgacagtcaagaagatttgtatggagatattactgagaaatggaatggctaaaatgaaagctaagatgaggtgcatacagggaagacttgttttaacagaaataatacttgtgccgaaaaaccacatttataaataattctgaaaaaaactaacttggactgaaaagaggtgtcagaaaaaaaaatcaaataaataaagtttatgtaattccaaatcttctagaaatggatctttaaatgcctttttaaaatttttgttttggaattttcctaaaatgtaaaattctttctgatttctctaaactgaacaccatgaacagaatttaacatcttcttctgaacacygtgaacagaatttaacatcttcttcatgagtcagaatcattacgctgaacaataggtactgaattgtgttgaaattcactaatgccctctggagccattgaaagtttatggctattttctcacacattaaatagcccagagtgctgtactttttgagttcttatgcttagttttcatggttttttattctttattttgagctggcagctcaaaattttatcctaaacta

SEQ ID NO: 447693 - DNA, 582 bp, Homo sapiens
taccacagttacatatgatgttaccattggggaatacagagtgatgaatatagaaaacctccctctatatcttctgcaactttccatgaattgataattattataaaaaaaactacatattatatataaaataacaaaaagaaagcctgtatattcatttacaaagaaggatttaaagcaaataaatctaagaaatagagtggcatttcacgacgacacatttatgagtaacaaaaattctaaatatatatgcaccaataatatacatttaaacttaataaggaaaattctaacagaaayctaaaaagagtgaaccaatccacaattatagtatgggatttaatacatttttttgcagtaatggtagaaaaattacacaaaaaatcattaagtatgaagatttgaacaacctaatcaaaaaatttgacctaaatgacatatccattacattaaaaagcactgcataaatgtcattcttttcaagtgtataaattggatttataaaatttgaatatacagtggactaaaagggactctccacagatttcaaagtactaaaacaatagagagtatgttccctgg

SEQ ID NO: 447694 - DNA, 582 bp, Homo sapiens
taccacagttacatatgatgttaccattggggaatacagagtgatgaatatagaaaacctccctctatatcttctgcaactttccatgaattgataattattataaaaaaaactacatattatatataaaataacaaaaagaaagcctgtatattcatttacaaagaaggatttaaagcaaataaatctaagaaatagagtggcatttcacgacgacacatttatgagtaacaaaaattctaaatatatatgcaccaataatatacatttaaacttaataaggaaaattctaacagaaacctaaaaagagtgaaccaatccacaattatagtatgggatttaatacatttttttgcagtaatggtagaaaaattacacaaaaaatcatyaagtatgaagatttgaacaacctaatcaaaaaatttgacctaaatgacatatccattacattaaaaagcactgcataaatgtcattcttttcaagtgtataaattggatttataaaatttgaatatacagtggactaaaagggactctccacagatttcaaagtactaaaacaatagagagtatgttccctgg

SEQ ID NO: 447695 - DNA, 582 bp, Homo sapiens
taccacagttacatatgatgttaccattggggaatacagagtgatgaatatagaaaacctccctctatatcttctgcaactttccatgaattgataattattataaaaaaaactacatattatatataaaataacaaaaagaaagcctgtatattcatttacaaagaaggatttaaagcaaataaatctaagaaatagagtggcatttcacgacgacacatttatgagtaacaaaaattctaaatatatatgcaccaataatatacatttaaacttaataaggaaaattctaacagaaacctaaaaagagtgaaccaatccacaattatagtatgggatttaatacatttttttgcagtaatggtagaaaaattacacaaaaaatcattaagtatgaagatttgaacaacctaatcaaaaaatttgacctaaatgacatatccattayattaaaaagcactgcataaatgtcattcttttcaagtgtataaattggatttataaaatttgaatatacagtggactaaaagggactctccacagatttcaaagtactaaaacaatagagagtatgttccctgg

SEQ ID NO: 447696 - DNA, 510 bp, Homo sapiens
tttacttctatattaccttgggtcaaaaaactcaaaaatcaaaaaggaaattgaaaacattttgaaccaaatgataatgtaaatatgacacataaaaagctgttgagtgcacctaaatctgtgcttataagaaatttatcrccctaaattcatatactacaaaggaagactgaaaacaatattgtataaacccaaagaagatacataaataagaaaaagaaatgtaaagcagacggtagatttaaatctcatctatagcaataattattacagacacatatttgaaatacttaaaacattattattatcttgtcatgggggtttgttgtacaaattatttggccacccaggtactaagcctagtaccgaacagtttttttttctctgatcctctccatcttcccgctctccaccttccagtgggccccagtgtctgttgcttcccaatttgtgtccatgtgttatcattcagctcccacttataaacgacaatatgcagtattttgttcc

SEQ ID NO: 447697 - DNA, 577 bp, Homo sapiens
gcccccctcttcttttagcttattcatagtttgggttactattgtctctaaaatgcacaagatttttgtattttaaaatataagctcacacgtaggtgtatggaaagtggtagggaagagtgaatgtaattgatgaaacaaataagagtaaggctggaaatggaacaaaagaccattgaaaacagaaggattaaggagaaaaaacaaactgcaaatggagaatatttagagcagttattgtgcatgaagtagaaaagtgtgtaaagggggaatcgttagatgatcagagcccatttagtgggataaacatgctcagagggacttrtaagtctggaggaggattttggtccatgcgctgtctccagaaaggaatatctttattctaaatatgtgggtatccactttatttttatagctcttcaggaaagagggctgtccctcagcagtgctttctattatcttaccataattatctgtaatgaagtgaagccatgacctaatcttgattgtgtaattatttccatagattttattattggcttgtcagtacagtctttgttttatgcatgcaaaagca

SEQ ID NO: 447698 - DNA, 661 bp, Homo sapiens
tggaatttgcaggcctggtaacatggcaggtcccaggcatagttcacaaaactgaaatagagacaagcatacagcaycagacaatggttgctgctgctactacatcaagtgcaatcttgccaccacggcccttaaggccatctgcacggattctagctaatttaaccaacaaatctccccctccttacaagctattctgtcattcacatacatcatatcaatcccttttgccagctctttacttgttgtgttcatctggcctagaatgtttctttacccttgttaaatttacctgtttttcaaagcccaattcaagacctaacacctcactggtcatcaatagaagcaagctgtaattggctataaaatggaaggagttatctggattacgttattcagcttggtctttaatcatgcattctgcttataaattactgcatatgtttcaaatcccatcacaagtggatctttttggaaggcctttcccacaatgctatccttcatatgaagttctttagcaaaagagtctattaaagttagttgaatgcctgtgatctgtcattctgtacttgactttcaagcatttttccaaactagattagatatcaccttccctggaaagacatgtttttatcccaaaggaacattcccttaatataag

SEQ ID NO: 447699 - DNA, 478 bp, Homo sapiens
aaagtcatttattgaggcagtgcttttagtaaaagggaaatgagaaaagcatagcaggggcagggaggaaaaaaaaaaaaaaaacytaagcaaggatgtcagctgagctggggacgtgcttcagcctggttgcaggggataccctggaacacaaataacgtcagagacttactctcacctcgaggcaaggaaactggctatttgtacactatatcagccaattgttggctgcccctgggatagtgataatgggacacagtctcctgggtgaggcaactctccttcagttgagggcagttttcctgagaaaggggtagctgtgagcctgtaacagccaacagtcacaggtgcaggtgcatcacctagagaagggggatctggtaggggtatcaacagcatctgctacaagtagccaaccctattagataccgtttcacttttcattataacattatatattatctacttgttggtctat

SEQ ID NO: 447700 - DNA, 586 bp, Homo sapiens
cctgtaacagccaacagtcacaggtgcaggtgcatcacctagagaagggggatctggtaggggtatcaacagcatctgctacaagtagccaaccctattagataccgtttcacttttcattataacattatatattatctacttgttggtctatcatctgtctgtctttctatctatatctaatctatctattgattgattgattgattattgattgatctttccttgtccaagattaaaatgaagaggttaggggttttgccttgcttattggtatattcctagtaccmaaatgagtacccagtatgttaaaagtatcaaaaataatcataactaacatgtattaagtgtttacaacatgccagatgtgattctaagtgctttacaagtattaattcatttacctctcataatgatattaaaaaagagatactattattatcttcattttacagttgaggaaagtgacacagaggggccaagtaacttacccacagttacacatttagggagtggtgagtctaggattttattccaggctgaatccactgcctctctataaatactcgttgagtgttgaaggaat

SEQ ID NO: 447701 - DNA, 532 bp, Homo sapiens
caactaaatagctgcctagaaataggatgagaggggaggaggcaggtcttgtttactctgtttagcatgtggaaaaaagaaagaagaaagtacaatagtaaaaggagagcctgggcaaactgatgtgtgcctatagtcccagctacttgggaggttgaggtgggtggattgcttgagcccaggaattggggtccagcctggtcaacatagtgagaccccgtctcttaaaaaaagtaaagggatacaattagattcaagagaagggtttacatttcatcactgatgtgrggggattatttttctctttcctattaaactgaacaaaggaaaaaaattctcccctttctgctggcagttatctagcagataacaattttatgacaagcagtgaagcaaagctgagacatggaaagaacctgaatccttggtgacatgattgagttgctgactcaaccagttatgaagcccattcatctctggacttcttgttatgtgaattaagaaacgtttttattgtttggaatcaaagtca

SEQ ID NO: 447702 - DNA, 452 bp, Homo sapiens
cattctttttttcttttgtctatattttttatttttctacaatgcacatgtattgtttctctaagtatcattaagaaaattaatagtcaacctggcaaaatagtttgcccaatctgtatgagatgtttttcagactcccaccatatttgatgtgttcccatggttgaactcttgttcgctattgtcctccctgaattgtgaagcctgctatttggcagtatgcctcagatacaatcttacttacctgaggtaaaatttctgacctggccattttaaagattcttaataatgttcaattataaaggcaattgaagactacactgcctttttggaagttcaataacatggttagctgtttagaatatagtctgttgactatttagaatcgatgttaagaacataggctctggagatctcaggaawattgctgaaacttatttaaaccttaattt

SEQ ID NO: 447703 - DNA, 548 bp, Homo sapiens
gtaagtcagttaaacctctttcctttctaaattacccggtctcaggcagttctttatagcactgtgaaaatggactgatacactacctttctgactgtagggccaagacccagctttacacagaagttgagaagaaagccccctaacccagtgacagaactttttgtctgtaaaccctatctgcaaagtggattttataaggtaggatttctacatattgagtcatttttggggagaaaaatagaaaaagaaatataagattataggaaaagaacatgaagaaagaaagtatgtgaaagttgtgtactggtgagggagtttaagtaatgcctttgattctccaaagttttctcctttatctgtgcctaagatggaatatatatatatttcttactaacttctaatcatctctatagtgccaagaaataggtgttatcacaatctgatagataagaaattttaagggtaggggctcgcacacaattaatwaatgaacgagcttggatttagaaccagctctctcagattccagagcaactgatgtttct

SEQ ID NO: 447704 - DNA, 585 bp, Homo sapiens
atctttatttttatttatttatttatttttgagatggagcctcactctgtctaccagactggagtgcagtggcatgatctcggctcactgcaacctctgcctcccaggttccagcaattctcttgcttcagcctcccaagtagctgggattacaggcgcctgccaccatgcctggcctaatttttgtatttttagtagagacagggtttcgtcatattgtccaggctagtctcgaactccygacctcaagtgatccacccgcctcggcctcccaaagtgctgggattacaggcgtgagccaccatgcccagccgaaacacctttattttctaaagaatctttccctgacttttgtctacaagttatggtgaaaagagtcctgaaggcaattggttctgtccttcaaacttgaagcaattatgaatggtgattgacaaatagtagcctacatactggtgctccactggaagaaggcacagagcctgccagtagtgatgggatccgggatgttgcttccccctgggaactgattgtttctaactgcttctggacaacagccattgaatccagggcaagaaagaaggg

SEQ ID NO: 447705 - DNA, 618 bp, Homo sapiens
ttgctctgcccacagactcattttctacttatcaacaggcagtttccagtcttttcatctcctctgctcacattctgcttctatgtcctgtacactcgaagtatgttcaaacaagatttcccatctttcctgccacttggattgtgtcatcatttttttaagatattgatgatgtcatcaattgtttccacatgaaagtcaaactcaccacttcaaagttctcaatattacytctttccccccgtgcaccattccaagtccctctgcctgccttcattcctttttgaattccataaccacactgttttgctgcacagggagaggggggcatcactgcctcaaaatcaccttgacctctcctggtatgcattcttgctttcttgccaattggaacgatatgagaaggatttaacatgaatggggtctctcattctttccatgttcttcaaagcactacttaaagttaaataattttcgaattcatttagtggtagtcgctaccccaaaacagacttaaaatcctttaccttatttttatccctaattctttcccattcaaaccgttgtataatgtattagtatacttattacattctcttgatttaggaactaattata

SEQ ID NO: 447706 - DNA, 618 bp, Homo sapiens
ttgctctgcccacagactcattttctacttatcaacaggcagtttccagtcttttcatctcctctgctcacattctgcttctatgtcctgtacactcgaagtatgttcaaacaagatttcccatctttcctgccacttggattgtgtcatcatttttttaagatattgatgatgtcatcaattgtttccacatgaaagtcaaactcaccacttcaaagttctcaatattacttctttccccccgtgcaccattcsaagtccctctgcctgccttcattcctttttgaattccataaccacactgttttgctgcacagggagaggggggcatcactgcctcaaaatcaccttgacctctcctggtatgcattcttgctttcttgccaattggaacgatatgagaaggatttaacatgaatggggtctctcattctttccatgttcttcaaagcactacttaaagttaaataattttcgaattcatttagtggtagtcgctaccccaaaacagacttaaaatcctttaccttatttttatccctaattctttcccattcaaaccgttgtataatgtattagtatacttattacattctcttgatttaggaactaattata

SEQ ID NO: 447707 - DNA, 618 bp, Homo sapiens
ttgctctgcccacagactcattttctacttatcaacaggcagtttccagtcttttcatctcctctgctcacattctgcttctatgtcctgtacactcgaagtatgttcaaacaagatttcccatctttcctgccacttggattgtgtcatcatttttttaagatattgatgatgtcatcaattgtttccacatgaaagtcaaactcaccacttcaaagttctcaatattacttctttccccccgtgcaccattccaagtccctctgcctgccttcattyctttttgaattccataaccacactgttttgctgcacagggagaggggggcatcactgcctcaaaatcaccttgacctctcctggtatgcattcttgctttcttgccaattggaacgatatgagaaggatttaacatgaatggggtctctcattctttccatgttcttcaaagcactacttaaagttaaataattttcgaattcatttagtggtagtcgctaccccaaaacagacttaaaatcctttaccttatttttatccctaattctttcccattcaaaccgttgtataatgtattagtatacttattacattctcttgatttaggaactaattata

SEQ ID NO: 447708 - DNA, 629 bp, Homo sapiens
acaactctgctctacaaaaatcattcagggacccaggtttttttcatgttgggcttctgccttctcctgagtggtgtcttcacctgcatagccaaaactagggtgctgtcrtatcaaaatgctgaccatgggatgtgagggatagaggcaaagtccaaagccagaatcttatctgaatttgcaagtgacacggtatttgagcacatcatatactctaatagtctattgttccaaacttaatcacatgaccacatgtaactgcaaggaaggctgagaaatatcgtcttggcaactttgtgcccaggaaaaaagtctctagaagacaaccaacaaatagtcgtagcatgtaccacaatatcagattttcctaatgtgagaagagttattgctgttgttattttttgatttgctttgtattatatttatttacatcacaccttgttcaagcaaggtattaaggcaccttcagtatatgagtcagaagatctcagtcaagtggcttattaagatgcacatgttacctcgagtgggagaagtataatctactaccatcttttaaagaaatccatgcttaggtttaacagatcagacacctgacatccagtaaaaagtaagctactgtgacaatg

SEQ ID NO: 447709 - DNA, 587 bp, Homo sapiens
gaattgaatcttagattgattaagaaatttactcaatgtcacacaggtaaggaagcatgattcaaaccccagtctaccagatcaaaaagtccacaccattttaccacactgcattagactacagaaatattactttttaattttttctttctagcttcttcaatcctatctaagccattttatcataatgcttttccagctgattaagttgcatctaaagaaaaattaagtcgtattttgtgtggtttttattcctacattctgaaattttactaattcacatttttagccaaagaaaatgaggattgatatttgtggtagaataaaattstgaatgtctatttgatatattatgttaattgaacttaaaatatgggttttatccctttacctgtaggctcgttgactatgaacaaattagaagcagttttattcatggattacacctaaagccctattcagcccttctttagatatgtaatatttgctataagagactctgcattggcttaaagcaaactaatcatcatcatcagaaaattaactgcacatgtatacacattttacatacatatataattgttttg

SEQ ID NO: 447710 - DNA, 633 bp, Homo sapiens
taagatgtaatcatatgtctccattttacagatgaagggattgaggcaaaataactgtaaggtgaaattaacttatccaaatctcacatctggtgaatggcatagctagggctggaaactagttctaattctaaatatggtgcttcttccactaagtcatgttcaccatctagacaaattatrtaattcagaggcacatttacaagagaaaatagtcaacatatttaaataaaaacttttcaatattttattatgaatccccaaactgggtaattgaggcgattcaatttcctagggaagtatttccatggctgaatggatatttataaaaccaattgtgctatcagatcattcaggtcacgtgtaattgaggagaggggctattctagtatagtactacacataaattgtgcatcattgagtttaatttttgaatagtttgagttataactgagtattacagcttcttgaaggagattcaaaatgaaaaagtgatttatacttttgttgttattaatatgtagttagtcctatagtacctttaatcaaacatttataagtgtataaatttaaatcttagcttaaaatataggtcactaacataccatacggtgctatggtgcttctgtaaca

SEQ ID NO: 447711 - DNA, 590 bp, Homo sapiens
tattgggcatttcaataaggtccactttgtagctatttcaaattgcatgactatgaacaaggtaaaacattttggtgatcatatgtttacatgtctaatgggtatatacctataagggaaattgctgggtcatagggtatgtatacgttcagctacagtacrtacttccaaaaagttttctaaagttggttgactaaatacatatttccaccagtggtatatagaagttcaacattctggtattttatgccttccattttagctactctgatgggattgcagtttatcttattacggttttaatttgaaatctgtaaactaatgaagttggacaccttttcatattgtgtatgggccatttgaatacttactttttttgttaaatttctggtaaagtcttttgtcaagattccattgtcttctagatgttctttaattactgtgaatatgagttcattttgagatatatgtattgcaaatatctacccccacagtgtaggttgcctttttatcaccataatgatagcttttgatgaacagaagttttaaattttaaaacagtaccattattcattttttaaaaattgtcc

SEQ ID NO: 447712 - DNA, 620 bp, Homo sapiens
aattatagaatggttttattccatttctgcaaaaaagtcatttgcattttgttaagaattgcattgaatcagtaaatcactttgggtacatggatatcttaacactaagtctttcaattcatgagtacaggatgtctttctatttatttatgtctctttaatttctttcagcaatgtcttgtaggttttttgtgttttgctgtgttttgttttgttttgttgagacagggtctcactctgtttgcccaggctggagtgcagtggcatgatctcggctcactgcagcctcgacctcctgagctcaggtgattctcccacctcagcctcycaagtaactgggactacaggcatgtgccaccatgcctggctattttttgtatttttagtagagagggggtttcgccatgttgcccaacttggtcttgaactcctggactcaagcaatccacccaccttggcctcccaaagtgctgggattacaggtgtgagccactgcacccagcctgtttcgtagttttcagtgtgcaaggttttcccatccttggttaagtttattccaaagtatcttattcttcttgttactattgtttatgcttttataagttcctgatgggattgtt

SEQ ID NO: 447713 - DNA, 620 bp, Homo sapiens
aattatagaatggttttattccatttctgcaaaaaagtcatttgcattttgttaagaattgcattgaatcagtaaatcactttgggtacatggatatcttaacactaagtctttcaattcatgagtacaggatgtctttctatttatttatgtctctttaatttctttcagcaatgtcttgtaggttttttgtgttttgctgtgttttgttttgttttgttgagacagggtctcactctgtttgcccaggctggagtgcagtggcatgatctcggctcactgcagcctcgacctcctgagctcaggtgattctcccacctcagcctcccaagtaactgggactacaggcaygtgccaccatgcctggctattttttgtatttttagtagagagggggtttcgccatgttgcccaacttggtcttgaactcctggactcaagcaatccacccaccttggcctcccaaagtgctgggattacaggtgtgagccactgcacccagcctgtttcgtagttttcagtgtgcaaggttttcccatccttggttaagtttattccaaagtatcttattcttcttgttactattgtttatgcttttataagttcctgatgggattgtt

SEQ ID NO: 447714 - DNA, 566 bp, Homo sapiens
tagcctgggcaacataacaagaccccatctctacataaaacttaaaaactagctggatgtggttgtgcatacctgcagtcccaggtactcaagaggctgaggtaggaagatcgcttgagcccaggagtttgaggctgcagtacgctatgatcgtgccactgtactccagcctgggtgatagagagagaccctgtctcttgaaaaaaaaactaatgatcttctgggggtaaatagcattatgctcrttttagaaatgagaaaaatgaagcctggggagatcagacacttggttcaagttgcacaagccatcaggagcactggattcaagccaggtctgtttcaccccagcaacatcctggctcttctcagttctcactggagtttgttgaccatcaagggcccttgcaggtttaagcaactctaaggaggtctggcctaaggaagcgggacccaaggttcttgctcagcacccaaaccctcattctggtaaagaaaagaattggggccttgcaggccaaagaagactctgtcctttcctggatgtagaggttcagctgcaaaccacc

SEQ ID NO: 447715 - DNA, 566 bp, Homo sapiens
tagcctgggcaacataacaagaccccatctctacataaaacttaaaaactagctggatgtggttgtgcatacctgcagtcccaggtactcaagaggctgaggtaggaagatcgcttgagcccaggagtttgaggctgcagtacgctatgatcgtgccactgtactccagcctgggtgatagagagagaccctgtctcttgaaaaaaaaactaatgatcttctgggggtaaatagcattatgctcattttagaaatgagaaaaatgaagcctggggagatcagacacttggttcaagttgcacaagccatcaggagcactggattcaagccaggtctgtttcaccccagcaacatcctggctcttctcagttctcactggagtttgttgaccatcaagggcccttgcaggtttaagcaactctaaggaggtctggcctaaggaagcrggacccaaggttcttgctcagcacccaaaccctcattctggtaaagaaaagaattggggccttgcaggccaaagaagactctgtcctttcctggatgtagaggttcagctgcaaaccacc

SEQ ID NO: 447716 - DNA, 485 bp, Homo sapiens
actatactaagggctgtgtatacaatacctctttcaatcctaactatctacgtatctatctatatattatrtaaatacacatacatatgtatatgcatgcatgtgtatatttatgtatatgcataggaatgtctattttatcaacatgtagtttttatttccatttcctaagtgaagaccatgagacacagaggggttaaataacatatccaaggtgagtaagcagcgaagtcatgatctacaccgaggtctgtaaatttccagaggcaatgcttttaaatgctatactacacctcacccactgtcaggctaagaagttgagaatttatcatgtaggccaagagggagacaccaaaggtatctaagggaataacacaatctaacaaatgttttcagaagatgactctagggccactcctgccccaacatccttgggcgatccctgccctcctatttttaatggagccccttctggggcaagaagg

SEQ ID NO: 447717 - DNA, 481 bp, Homo sapiens
ttctctcttgttctctctcacatgcccacactgaacctcaacttcaccctaagcatggcagtgattgtagagktaaatgaagccgggctttgccttcaagaaatgcacaatctgatgggcaaataagtaaggaaagtgagggatggggggaggggagcagacagtcatgctttgccttagatttttcatatctgatcttcctttctgggctataagttctcagtaggcagacgccatattttactcaaccagagcctgctgcagggcttggcgcatagccatatctgagtgaatgaatgacactctagcacagcacatataggtgctacttgagtggagtgccttgcaaataataaagagattaagagtagtgcaggccagttatggagtctagccttaaggggtaaatgccacacaggtggccacttactcccacttactctggagggaacagttcattatgtcatggtctcctttgcat

SEQ ID NO: 447718 - DNA, 481 bp, Homo sapiens
ttctctcttgttctctctcacatgcccacactgaacctcaacttcaccctaagcatggcagtgattgtagagttaaatgaagccgggctttgccttcaagaaatgcacaatctgatgggcaaataagtaaggaaagtgagggatsgggggaggggagcagacagtcatgctttgccttagatttttcatatctgatcttcctttctgggctataagttctcagtaggcagacgccatattttactcaaccagagcctgctgcagggcttggcgcatagccatatctgagtgaatgaatgacactctagcacagcacatataggtgctacttgagtggagtgccttgcaaataataaagagattaagagtagtgcaggccagttatggagtctagccttaaggggtaaatgccacacaggtggccacttactcccacttactctggagggaacagttcattatgtcatggtctcctttgcat

SEQ ID NO: 447719 - DNA, 481 bp, Homo sapiens
ttctctcttgttctctctcacatgcccacactgaacctcaacttcaccctaagcatggcagtgattgtagagttaaatgaagccgggctttgccttcaagaaatgcacaatctgatgggcaaataagtaaggaaagtgagggatggggggaggggagcagacagtcatgctttgccttagatttttcatatctgatcttcctttctgggctataagttctcagtaggcagacgccatattttactcaaccagagcctgctgcagggcttggcgcatagccatatctgagtgaatgaatgacactctagcacagcacatataggtgctacttgagtggagtgccttgcaaataataaagagattaagagtagtgcaggccagttatggagtctagccttaaggggtaaatgccacacaggtggccacttactcccacttactctggaggraacagttcattatgtcatggtctcctttgcat

SEQ ID NO: 447720 - DNA, 606 bp, Homo sapiens
taacttcatcttggtataattccttgcatgaggctcttttgaggactgactctgaaatgccacctggatgattggcttccaccaggcttcctgctaacttggatccatgtgtcttttttccttccagtctctaattgctagagatgtgcatgtctcctttctgcttccctcctctrtgttcaaatacagcttaggggatagatgttctggccatgaaaagagacaggtgggaggctgtgggcttccctcctgtctatgtcttcctttcttgggcatcattaacttattacaaaccagtggaaacttgccaatttgctgcacagctgatgacttgctattgtatctcagctttcttctgcggagagctagataacgaatcagatcaattgtttttgagcccagaggcatggacaagagggtgtatgtctgtatgtctgtgtgtatgtgctggaggagtgaataaatggagttgggagtggcaccttcctaacctcatacatgttgaggcaaggtgaatttcttcaggcttctgctaaggagaagacatttcaaattaagattttcatcttcctctacaactactaaaccacagttactgcaaaacag

SEQ ID NO: 447721 - DNA, 612 bp, Homo sapiens
tcatggtttaagtggaacctcattttgatgatgcaatgtcaaaacttcctttgtcaaaaggggcggtaaacctaaatcccacccaaaaatccttggtaggaagggaaggctgctaagaaggacaaagtgtagggaagcaaagatggggaccaaagaaacaaaggaagatcaatcctgggactacctgttcaatatttaagcagagcaacgacccattaaggcaactaatttaaagtcgctaatgtttctattttcttccaactaattgaataattcatgaccagttactaatgaaaattatatatatatatatatatatatatatayacacacacacacacacacacacacacacacacacacacacacacgcctgtgttccagggacagtgtcccacagtaaaagcacattgaaacattgaagcttatctatcaagaaggataaaggagccagaatttgcttctcctcccaactgtgggatgctgctgggaaatgtgtgagcaagatccaaagatccagggtctgattttgatggaggattttgtggcttcccatcttcccactggcacctgcctggatcacattttcccccagatattcccgttaccccc

SEQ ID NO: 447722 - DNA, 538 bp, Homo sapiens
gcatgatatacaaatcatgctgtgtaattgtcacaagaaccctgtgagatatttattatcttcgtgttatatataaagaaactgargtggtggcttatgcctgtaatcccagcactttgggaggctgaggcgggtggatcacctgtggtcaggagttccagaccagcctggccaacatggtgaaaacccgtctctactaaaaatacaaaaattagctgggcttggtggtgggtgcctgtaatcccagctactcaggaggctgaagtgggagaatcacttgaacccgtgtggcggaggttacagtgagccgagattgtgccactgcactctagcctgggcgacaaagcgagactccgcctcaaacaaaaaagaaaaagaaagaaagaaactgaggtttggaaaatggagatcacagagccaatgagggccaaagcccaaatttgaatccagaatgatctaactccaaagcccatgcttatttcactagactctactgaatttaacagcatggtatcttctcacttgcctctaaggagaa

SEQ ID NO: 447723 - DNA, 538 bp, Homo sapiens
gcatgatatacaaatcatgctgtgtaattgtcacaagaaccctgtgagatatttattatcttcgtgttatatataaagaaactgaagtggtggcttatgcctgtaatcccagcactttgggaggctgaggcgggtggatcacctgtggtcaggagttccagaccagcctggccaacatggtgaaaacccgtctctactaaaaatacaaaaattagctgggcttggtggtgggtgcctgtaatcccagctactcaggaggctgaagtgggagaatcacttgaacccgtgtggcggaggttacagtgagccgagattgtgccactgcactctagcctgggcgacaaagcgagactccgcctcaaacaaaaaagaaaaagaaagaaagaaactgaggtttggaaaatggagatcacasagccaatgagggccaaagcccaaatttgaatccagaatgatctaactccaaagcccatgcttatttcactagactctactgaatttaacagcatggtatcttctcacttgcctctaaggagaa

SEQ ID NO: 447724 - DNA, 538 bp, Homo sapiens
gcatgatatacaaatcatgctgtgtaattgtcacaagaaccctgtgagatatttattatcttcgtgttatatataaagaaactgaagtggtggcttatgcctgtaatcccagcactttgggaggctgaggcgggtggatcacctgtggtcaggagttccagaccagcctggccaacatggtgaaaacccgtctctactaaaaatacaaaaattagctgggcttggtggtgggtgcctgtaatcccagctactcaggaggctgaagtgggagaatcacttgaacccgtgtggcggaggttacagtgagccgagattgtgccactgcactctagcctgggcgacaaagcgagactccgcctcaaacaaaaaagaaaaagaaagaaagaaactgaggtttggaaaatggagatcacagagccaaygagggccaaagcccaaatttgaatccagaatgatctaactccaaagcccatgcttatttcactagactctactgaatttaacagcatggtatcttctcacttgcctctaaggagaa

SEQ ID NO: 447725 - DNA, 568 bp, Homo sapiens
attcatatgctcattccctgtaaatatacaagtgtcttatattctagcatttacttttcacccaattaaattgaattaatgagacactgttgccaccatagtcattagcaaagcatggtccaagaccctgattaaggtggttactatctattgctaaagtgccctccagaaaagttgtcccagtttacacattccaggatatgttggcgtctgtttctcaaacacttctcacatgccatcaccgtctttagctgtattgaagtttggcataattataataaagaaggcataccttaactgtgcaacttaataaatttttagttttagaactttttaccctttaaaaattgtatacattttacactttttaaaatatatatgtctcgatgagtttgaagataagtaaatacccatgaaatcatcaccataaggaatgccataaacrtagccatcacctctaaaagtgtcttctcactataatttttttgtgataaggacatgtaacaagattccatatgaatctacacagataaaatcatagaatatttccagcacctcatatggtttc

SEQ ID NO: 447726 - DNA, 559 bp, Homo sapiens
cttgaacccatgtcatccgttagcattgatatttataaatgtgttacaacctaacataaatgtggtgacaaacacagatggaaagtgcacaattctatgatattttacatatatgtattcacccacatcataatactggccccttaaractggcaaagttttaaaaaacaagaaaaacaaagtctcaatgaggtctgtcaggatgagggcagctcatgtcaagtgcaagaagctccatttgagaccaggtctcccagggaccaaagccagagcagctttcatcctttttcagtcacccccatgagttccaagctgcccaggtgctggcccttcttagtagagagagctctcagctaccattacacattgagctgtccgtggtgctggatcattggatggggctgagtaatgggtcctgtcttccaggagaaaatgaattctgcccttgtgttactgcatagttatactcaatgtttactgtcgattataaagaaaaggtcattatgacatagcacttgtccagagcccagctggcaagagttctgacacagttcctatc

SEQ ID NO: 447727 - DNA, 572 bp, Homo sapiens
tttccacatttccctatcagtatcagtgagtgcatggcagaagggcattgggtgaggccacgtcctagactctgggattttgtcaagactagaagattcaggcagatagccaggaagaacactggtgaaatgtgcaggggggcttgtggaagactgaacttgaaactttggtaaacaaaatttatgcaaatatttacactgtcctattaaatttgcttatcatgaatctctctgtggctttgacctaccaggtaagtcaaatccttgtggtctcactgcttttctgggacaacagacattgcactcactctgatcttcactgcttgcccaccttcagcaaagtctccatccctttctgcatccttgtcctcttggatgtacctggccctccctacctcatcctctctccagtcacagtcytcattcacttccaagctaattgtctccactggtgtatgcaaacgaaccatttatgggaaatgccgtggaatgttaatttcatttgaaattgggtaattgcaaaaagtgcttccacttttttattatatagaatgaataagtattgtattaat

SEQ ID NO: 447728 - DNA, 565 bp, Homo sapiens
ccatttatgggaaatgccgtggaatgttaatttcatttgaaattgggtaattgcaaaaagtgcttccacttttttattatatagaatgaataagtattgtattaatagtgccatttccaattatgaccactatcgcaggcctgtcgtctgctaactgtgggttatttttcatggagcatttttctgaacagtttttttaaaatccccccttctttgcaccattgtaattaagataatgcagaataattataaaaacattggaagctcaaatgccagcatagactatccaactagtgctgcatgcttattctaatttctcaagcgaaaaagaaaaagtgttggagtctactgaggaaggcggatgaaggttgatgaagtcagcaagaaatyggccagaacagctcagaaaacctggccagagcccatgtgtggggagctgagcttgattagatatttctagaaagcaaccaggaagtgtgctaaagatttttgggtattgaaaaaatatttattgagcatcaattcattattgagttgtgtgccaccatgcacagctaaattttgt

SEQ ID NO: 447729 - DNA, 560 bp, Homo sapiens
atatatttatttttattatttttcctcccttgagtttccaaatgtatgctaaatgaatataatgactttctatttcattaacttttatattgcccatacctaaaacactgactagaatgtagtaggcactcagtaagatttcttaataagtgaaatgcaaggtgtgcaaaccccagcttataaatatcctgtatatgtaacacaaagaatgatacaaagaactgaacttgcactaactaggtactgtcttgactctgaagaaaggacaaggttttgtgagagacacagtgggatgatgaagatcataatgggaagagatggtgatttcatgttggtactaatgataatggaaattataaagtacacacacacacacacgcacacatacacacacacaaatggtccctcaayttgaaatcaaaagtagtgatgacattttctgagctgtgaaattttggcagatcttttaaccactgcaattctcaagggatcttatctatgtaattggtttaataatatagactgccagaatatctcaagtctctgagataacatgttaa

SEQ ID NO: 447730 - DNA, 566 bp, Homo sapiens
  misc_feature (1)...(566): n = A,T,C or G
atggaaatttcagctcagaccttgaagtgacacatttcagaaatcaaaatgagtggaggtagatcaccccatagatcatgagaaaagcagatagataaganccagttagtaaactattaaacttttctatcctatcaggggaagaacaggtaacttttgaagagatgatttatagaggattttttgggaaacagcattattgtgagcctcacctcctccttcctggaggtgagtgcctgctctcttggcaagtgtagagagaagggttctctcaggactactcayggagcttcacttgtggtccctggccagtgatctggtgtccaggtttacaccagggaaatgtatggaatgagatgggctggccagctgctctggtgagagcaaagcagaagtatctgtgtaggcattcgcttatatgcccagagcattctccaaggcccaggtaggatgacaaaccagagaaaacaagcatgtggttaaaatacagaagagctactaaaaacaaggactctaagccagactgtatgagctccaatcctggctcctccacataccagctgtga

SEQ ID NO: 447731 - DNA, 531 bp, Homo sapiens
atcacatgggccattcctggacagcatactgggttacaactttctcatactatttttgtaatacttactattttattacatttatacaactttttttcactctagccagggcttttaaataaatcatcacaaccaatccagataaaaattacttagcatggaagtggcagaatttgacttgagtytacatctcccaactcaggaaccattctccctaccatgagacaatcgatatatacaatttatgagtctaaataatgcatttttccctttagttcacacttggattgaccattaataagtcttttttcccccaacgggttaagtacttttgctatatattcccattttattgtagacttccactcttgtaacacttttcataggtgcaatgatgtgtgattgctaccaattgaaaatgacttccacacaggcaaaggccatatttgtataacttatgactctccagcgaccagcatagtgcctggcatatagcaggaactcactatatgtctgataaatgaatgaata

SEQ ID NO: 447732 - DNA, 572 bp, Homo sapiens
ctgacttcagagcccacactgacaaccactgagctttgtaactcctacagctcacatggtggcaatatttgtttggggaggtcatggcctctcaacacacctccctgatgctgccctgcctattccatccctctcccgccatttgcatttacactgacgtagagtgtatgagtcttttgaygaacacttacaacatgccttgtatgattttagttcattacagtcagtacttttcttcagtctctgcacagtaggtattgttacatctgccttacagaagagcaaatggaggctcaagaaggtgaaatatcttcctgaaggtcatctgggcagcaaggggcaaggcttagattctgagttcaagggctgggctcctttcaaagtgcttgagtggagccctgcctgactgacccagattgaagtgattcccatacctctaaactgcggctcctcttttcctgatactgtcttcatggaatgcagaactgcgcagcacggaagtccaacagttaactcatgataatggatagttacttgtgtcatgagactttggggtcctgagagtgagggcc

SEQ ID NO: 447733 - DNA, 594 bp, Homo sapiens
aaattaagggcaaggatctgagtacaagatgaagatgaataagccacgacctccactaaaatgttcaatcttaaaawacaatttggatttttgacctggatgaaaaaatggcacagctgggattctgttaaacaacagtatctatggtccctactctcaaggcacttggagtctagttagtttctatatttgtttatccatgagccaagggaagtaatggacttcagtagaaataaattaagttattggagtcagacatgagttctagttctttgattcacttattagcatatggccttggacagggcatttgatctctctgatctcatctttaaaaggggtacaagaactcagctcaatggttattattgggaaaagagtatgctgcatgtaaacattctgcacaaagaccaagaagtgagagtcagggcacattcctcaattacttgatgcttgtctgtgtttaacagaatgaaagggaggaagtgctgctggtttgaggtgccccctgactctcctgcctgctgtgacatcctggggaggtggcagccacccaaggcatacagcctctgagtatccatataatctgaaggg

SEQ ID NO: 447734 - DNA, 520 bp, Homo sapiens
ctcttttgcccaggttggagtgcagtggcacaatcttggcccactgtaaactccacctcccaggttcaagcaattcttgtgcctcagcctcccaggtagctggaactgcaagtgcacaccaccatgcctggctaatttttgtatttttagtagagatggggtttcaccatgttagccaggctggtctcaaacttctgtcctcaagccatctgctcgccttggcctcrcaaagtgctgggattacaggcatgagccaccacgcctgacctatcacgtctaatttcaagccactgcatttaacaactgccatgcaacatccctaaatatttaacaattggatcttgtgagccagctggagtcagttctaggaaaccactgttcccatcccaaagataaaccaggatgcatcacttaggaattgcggtcttgtctttccctgtatctccaatgcccagtttggcccatacaggaaatatggaaactttataagtatttgttgattagagaataagtaaacaat

SEQ ID NO: 447735 - DNA, 603 bp, Homo sapiens
cttaatgtgggtgccactgtgactatgataggatatcactccataattagattacattatatgacaagggtgaaaggatttttcaaatgtactaaaggtctcaaataagttgacaatgagtttatcagaaagaagttcatcttgggtaggcctggctgaatcaagtgagcccttaaaagagaatcgggccttgaaggaggggagtcaaagtgtgatgatctcctgctggccttgaataaacatgttgtgaaccgcctacaggggagacatgtggcaagggcttcagagyggcctctaaaatctgagaacggtccctgctgacagctggcaggaaaacaggcacatcactcatacagctacaaggaaatgaattctgccaacaaccacataagcttggaagaggattctacatgtcagctgcaatggcagtccactgaccccttgacttcagcctcttacatgatcttgagtaaagaacccagttatgccatgactggactttcacctacaaaactgggagttaataaatgcatgttctttgaagctgctatgtttctgtcaactggttactcatagaaactaatacacgaccacagagtgctg

SEQ ID NO: 447736 - DNA, 652 bp, Homo sapiens
ctgccttttgtcctccatactgaactaacttttcagtgcctgagctggttctgaccacgactatttctggtcccagcccctcccaggctacctttccccaacatctcaggggttacagagctrataccaggaagttctcagggatatgatcaggtttgctgtatcagacacagacatgggtatcctcttcctgtctctttttgagtatataccttgtgtcaggcactgttgtatgcactttacatgatttatctcattcatccttataatggcctgaccagattttgaaatcaaatagcttaaatacaaattcaagcttcccttaactcatggcagcctcaggaaagtgaaccctctcaattcttagtttcttcatctgtaaaatggagagaagaataatcccttctcctggtattgtttagaataatatgaaatcatgcatttagacaggacagaacagcatagagataattcaataaaactaatacagtttcttctgttcttttcctctatctcccttcttgttgaacccatttctattatggaccctagaatggttttattgtgaactcagagagggtcatattctaccttgctggtctacagataggaaactgaggcccaaagccttgctcaaagcctcttaaccaaa

SEQ ID NO: 447737 - DNA, 587 bp, Homo sapiens
cattttcatttcctggagtctctgatccattttgggactcatggcttatatttcataacaggaggcttcagttcccaaaggcctcctctgcagatatgacttgaacttttcctcacctatccttttcctcgaaaacaggattaaactgtgtgtgttggaggtgggaggaraatcataaagaaaagccatacatccacataccttagtacgaagttttgcttatggattcagtggttcttagttacagaaaatcccagcttaggaattgccaaattaaaacaagcaacaaaaacaaagaaataagacaaccagtagcattcatgctctggttctctctgctggagaactaagcagcaaagcttagaggaaagtacctgagattggggatcagaaaacctggatttctataactggctgagcaacctgcagatgagaaaagcgaggtccagagagggagacagatgcacccaaacccatacagcacagagctgggctgggaggttcatgctgggtgcctgcactgctgaaatgatccagcagctataacagctccgtctcctgctcagcattgtgcccagggctgggca

SEQ ID NO: 447738 - DNA, 587 bp, Homo sapiens
cattttcatttcctggagtctctgatccattttgggactcatggcttatatttcataacaggaggcttcagttcccaaaggcctcctctgcagatatgacttgaacttttcctcacctatccttttcctcgaaaacaggattaaactgtgtgtgttggaggtgggaggagaatcataaagaaaagccatacatccacataccttagtacgaagttttgcttatggattcagtggttcttakttacagaaaatcccagcttaggaattgccaaattaaaacaagcaacaaaaacaaagaaataagacaaccagtagcattcatgctctggttctctctgctggagaactaagcagcaaagcttagaggaaagtacctgagattggggatcagaaaacctggatttctataactggctgagcaacctgcagatgagaaaagcgaggtccagagagggagacagatgcacccaaacccatacagcacagagctgggctgggaggttcatgctgggtgcctgcactgctgaaatgatccagcagctataacagctccgtctcctgctcagcattgtgcccagggctgggca

SEQ ID NO: 447739 - DNA, 592 bp, Homo sapiens
tctttcaaacattcactcatcattcattcattcattcaaaatattcacccagtgcctactatgagcccatccccctgtgcttgatgttgaggacaaaactggacacaaatgacaatgtgtctatgctcrtgaagtttccagttcagtggaggacacaaatagtactcagggagcatatcagtaagtgtaaaattatagtggtgaccaagtctacaaaggggggtacagcacagcatctggtatagaatgagacagggaaattaactcaggtatggacagctttgcagaaaatatgccatttaagtggaggtctcacgtgatgggggggcaggtgaatgagtcaaacggcagggaagagcattccaggagacaaatgttgtgaaggctgtggcaggacagatgcaggagtgctggggaagaggccccgggggagaggtggagtggggagggaaggagcggacagagccctggggagagagtcagggcaagatcactcaggattgcaggtgtgtagggagtttccatttcatcctgaaaacaaaaggaaagcattgaaagcttctaagaggagaaacaacatgatccctactta

SEQ ID NO: 447740 - DNA, 514 bp, Homo sapiens
ctctggctacatgattgagaatggactggaagacagcaagggagacttagcaagagaggacttttagcagttttaaagcaaaggatgcaggtggcagggactaggatggcagcagtagagaaggggagaacttgttggcagaagttgaagttataaaggagatactcattattttaatcttcacaatgaccctgtgaaggagatgtagtgactgcattttaaagatgggaatttgagaatactggttcatgtcccatggatgaaaagrggcagagccatgtctgagactcaggcaacttcccagcctcaactctttcaggaagccctcccacatttagctgctgtttattgtgtctttcttctcccaaagctgggataatctgaaacgctcagttcaataactttgtcttccaaaatcttctaacatctgaaacagtctgaactgcagtgcagggcccttaaccagtgctgatctagttgcttctgagcactcctcttaaatctctacttagag

SEQ ID NO: 447741 - DNA, 589 bp, Homo sapiens
attcccgtcttctgttcctggaggcagctggtgaaatgtagtctgaaggagccagtccctggagccagagaagactggttggaacaccagccttgccatttaccacctgaaggactttatgcctatgattcactctgtgaaccttgcggattctcttctgtaaaatgggacaacaatacctaacatataactcctgtgtgtaatggcacattgagatgtccatggttcatgaaggaagcaagttgcccgaaaatagataargtatcatctcagatttgaaataaacaaacataaaaatagccattcagggtttctgtgtgtgtgtgtgtgtgtgtgtgtgtgtgtgtgtgtgtgtgtatgtgtgtgtgtgtagcaaaaattctagaaggaaatacatcaaaagggtaatcaactgggcagactaggattggaaatatcctaggaataggaaagagggtatatttaatatgtgcttcatttacacctatattacctttgtaataaggatactgatgatggtactattactagtacttctatgatattgaaaacagcaataacaccaacttcagaagatttgggaaggaag

SEQ ID NO: 447742 - DNA, 589 bp, Homo sapiens
attcccgtcttctgttcctggaggcagctggtgaaatgtagtctgaaggagccagtccctggagccagagaagactggttggaacaccagccttgccatttaccacctgaaggactttatgcctatgattcactctgtgaaccttgcggattctcttctgtaaaatgggacaacaatacctaacatataactcctgtgtgtaatggcacattgagatgtccatggttcatgaaggaagcaagttgcccgaaaatagataaagtatyatctcagatttgaaataaacaaacataaaaatagccattcagggtttctgtgtgtgtgtgtgtgtgtgtgtgtgtgtgtgtgtgtgtgtgtatgtgtgtgtgtgtagcaaaaattctagaaggaaatacatcaaaagggtaatcaactgggcagactaggattggaaatatcctaggaataggaaagagggtatatttaatatgtgcttcatttacacctatattacctttgtaataaggatactgatgatggtactattactagtacttctatgatattgaaaacagcaataacaccaacttcagaagatttgggaaggaag

SEQ ID NO: 447743 - DNA, 589 bp, Homo sapiens
attcccgtcttctgttcctggaggcagctggtgaaatgtagtctgaaggagccagtccctggagccagagaagactggttggaacaccagccttgccatttaccacctgaaggactttatgcctatgattcactctgtgaaccttgcggattctcttctgtaaaatgggacaacaatacctaacatataactcctgtgtgtaatggcacattgagatgtccatggttcatgaaggaagcaagttgcccgaaaatagataaagtatcatctcagatttgaaataaacaaacataaaaatagccattcagggtttctgtgtgtgtgtgtgtgtgtgtgtgtgtgtgtgtgtgtgtgtgtatgtgtgtgtgtgtagcaaaaattctagaaggaaatacatcaaaagrgtaatcaactgggcagactaggattggaaatatcctaggaataggaaagagggtatatttaatatgtgcttcatttacacctatattacctttgtaataaggatactgatgatggtactattactagtacttctatgatattgaaaacagcaataacaccaacttcagaagatttgggaaggaag

SEQ ID NO: 447744 - DNA, 589 bp, Homo sapiens
attcccgtcttctgttcctggaggcagctggtgaaatgtagtctgaaggagccagtccctggagccagagaagactggttggaacaccagccttgccatttaccacctgaaggactttatgcctatgattcactctgtgaaccttgcggattctcttctgtaaaatgggacaacaatacctaacatataactcctgtgtgtaatggcacattgagatgtccatggttcatgaaggaagcaagttgcccgaaaatagataaagtatcatctcagatttgaaataaacaaacataaaaatagccattcagggtttctgtgtgtgtgtgtgtgtgtgtgtgtgtgtgtgtgtgtgtgtgtatgtgtgtgtgtgtagcaaaaattctagaaggaaatacatcaaaagggtaatcaacygggcagactaggattggaaatatcctaggaataggaaagagggtatatttaatatgtgcttcatttacacctatattacctttgtaataaggatactgatgatggtactattactagtacttctatgatattgaaaacagcaataacaccaacttcagaagatttgggaaggaag

SEQ ID NO: 447745 - DNA, 622 bp, Homo sapiens
tcgctctttcaaaaaactagtcaactgctattctttgttgttgtcaaattcatttagatgakgaagtctttctgttttttataaacagagagtccagggtaatgtttaatagcagaaatacagagcgaggcagctggtattcacgttctggccatgccactaactaaccaaatgataatgatccagttaaatgggccttggttcctcagctataaaaatttggataacaatctcacaggaatgtgggaggtaatacatgtaaattaaatttcccttgtttcagattactcacttttagtataaacgaggtaatagatgtaaagtgcttaaaactgcacccgacacataataaatgctggataaatattagctattcttacactatttctacctacatatatttgatagttctactgtgaaataaaagaaaatgttgccttgttcaaatacagtttcgcaaaaacaaacacaataaccaagactcctgcttgaacaacatattagctttggatatagcagtgtaatcaaaagcccattctgtgactcatttctactttcctaattgcctgttcctgctctggtcctcagccaggagtcagtctttagccacacatggatatat

SEQ ID NO: 447746 - DNA, 622 bp, Homo sapiens
tcgctctttcaaaaaactagtcaactgctattctttgttgttgtcaaattcatttagatgaggaagtctttctgttttttataaacagagagtccagggtaatgtttaakagcagaaatacagagcgaggcagctggtattcacgttctggccatgccactaactaaccaaatgataatgatccagttaaatgggccttggttcctcagctataaaaatttggataacaatctcacaggaatgtgggaggtaatacatgtaaattaaatttcccttgtttcagattactcacttttagtataaacgaggtaatagatgtaaagtgcttaaaactgcacccgacacataataaatgctggataaatattagctattcttacactatttctacctacatatatttgatagttctactgtgaaataaaagaaaatgttgccttgttcaaatacagtttcgcaaaaacaaacacaataaccaagactcctgcttgaacaacatattagctttggatatagcagtgtaatcaaaagcccattctgtgactcatttctactttcctaattgcctgttcctgctctggtcctcagccaggagtcagtctttagccacacatggatatat

SEQ ID NO: 447747 - DNA, 622 bp, Homo sapiens
tcgctctttcaaaaaactagtcaactgctattctttgttgttgtcaaattcatttagatgaggaagtctttctgttttttataaacagagagtccagggtaatgtttaatagcagaaatacagagcgaggcagctggtattcacgttctggccatgccactaactaaccaaatgataatgatccagttaaatgggccttggttcctcagctataaaaatttggataacaatctcacaggaatgtgggaggtaatacatgtaaattaaatttcccttgtttcagattactcacttttagtataaacgaggtaatagatgtaaagtgcttaaaactgcacccgacacataataaatgctgrataaatattagctattcttacactatttctacctacatatatttgatagttctactgtgaaataaaagaaaatgttgccttgttcaaatacagtttcgcaaaaacaaacacaataaccaagactcctgcttgaacaacatattagctttggatatagcagtgtaatcaaaagcccattctgtgactcatttctactttcctaattgcctgttcctgctctggtcctcagccaggagtcagtctttagccacacatggatatat

SEQ ID NO: 447748 - DNA, 622 bp, Homo sapiens
tcgctctttcaaaaaactagtcaactgctattctttgttgttgtcaaattcatttagatgaggaagtctttctgttttttataaacagagagtccagggtaatgtttaatagcagaaatacagagcgaggcagctggtattcacgttctggccatgccactaactaaccaaatgataatgatccagttaaatgggccttggttcctcagctataaaaatttggataacaatctcacaggaatgtgggaggtaatacatgtaaattaaatttcccttgtttcagattactcacttttagtataaacgaggtaatagatgtaaagtgcttaaaactgcacccgacacataataaatgctggataaatattagctattcttacactatttctacctacatatatttgatagttctactgtgaaataaaagaaaatgttgcyttgttcaaatacagtttcgcaaaaacaaacacaataaccaagactcctgcttgaacaacatattagctttggatatagcagtgtaatcaaaagcccattctgtgactcatttctactttcctaattgcctgttcctgctctggtcctcagccaggagtcagtctttagccacacatggatatat

SEQ ID NO: 447749 - DNA, 589 bp, Homo sapiens
tgcagtgagccgagattgcgctactgcactccagcctgggttacagaatgagattctgtctcaaaagaaaaaaaaaagaagaaaagaaatatgtagcttggatgaaaagattgtgagtgggcacataagcaacctcagatgactgaggaccatcataaagggaagctaacagtctgactctaccatttcaaaagtctggacggaatctagaaagtggaaatttcacggaacttaatacctgaccaacctcagatactcaaatctgcccccttactctactgtagcttccagaattggttctatattctcctctctgctctgccatttatgagctatgggaccttgaccaaggcatctgtagtgtctctgacyctctgtgtcctcatctttcaagtgggaatagcaatgcccatcatccagttattgtgaatgtcaaatgagctgctgtgtttgggaagagagtaaaagtattatctgttatgcaatatctgtgagatgataatatatttttcagtcacaccgtatgtcaggaacaggacagacctaggaccagggtctctggacaccacaccagctcatcttcccattg

SEQ ID NO: 447750 - DNA, 589 bp, Homo sapiens
tgcagtgagccgagattgcgctactgcactccagcctgggttacagaatgagattctgtctcaaaagaaaaaaaaaagaagaaaagaaatatgtagcttggatgaaaagattgtgagtgggcacataagcaacctcagatgactgaggaccatcataaagggaagctaacagtctgactctaccatttcaaaagtctggacggaatctagaaagtggaaatttcacggaacttaatacctgaccaacctcagatactcaaatctgcccccttactctactgtagcttccagaattggttctatattctcctctctgctctgccatttatgagctatgggaccttgaccaaggcatctgtagtgtctctgaccctcygtgtcctcatctttcaagtgggaatagcaatgcccatcatccagttattgtgaatgtcaaatgagctgctgtgtttgggaagagagtaaaagtattatctgttatgcaatatctgtgagatgataatatatttttcagtcacaccgtatgtcaggaacaggacagacctaggaccagggtctctggacaccacaccagctcatcttcccattg

SEQ ID NO: 447751 - DNA, 589 bp, Homo sapiens
tgcagtgagccgagattgcgctactgcactccagcctgggttacagaatgagattctgtctcaaaagaaaaaaaaaagaagaaaagaaatatgtagcttggatgaaaagattgtgagtgggcacataagcaacctcagatgactgaggaccatcataaagggaagctaacagtctgactctaccatttcaaaagtctggacggaatctagaaagtggaaatttcacggaacttaatacctgaccaacctcagatactcaaatctgcccccttactctactgtagcttccagaattggttctatattctcctctctgctctgccatttatgagctatgggaccttgaccaaggcatctgtagtgtctctgaccctctgtgtcctcatctttcaagtgggaatarcaatgcccatcatccagttattgtgaatgtcaaatgagctgctgtgtttgggaagagagtaaaagtattatctgttatgcaatatctgtgagatgataatatatttttcagtcacaccgtatgtcaggaacaggacagacctaggaccagggtctctggacaccacaccagctcatcttcccattg

SEQ ID NO: 447752 - DNA, 599 bp, Homo sapiens
tctgtagtgtctctgaccctctgtgtcctcatctttcaagtgggaatagcaatgcccatcatccagttattgtgaatgtcaaatgagctgctgtgtttgggaagagagtaaaagtattatctgttatgcaatatctgtgagatgataatatatttttcagtcacaccgtatgtcaggaacaggacagacctaggaccagggtctctggacaccacaccagctcatcttcccattgcccaggctgccatatggtgataacttggaaagagtgtggagatttttgtaggactggaaaaggggagtgttctgtttacctatggttgcatgatataacatcccaaagctagtgcattaaaccaacaatcttatactcacggattccaggagtcagggagtcataatgataaaggaaaggtgaattatctcagttccacaaggactggacttcagcttggaaaactcaaarcatccacgggtaacagatggcagagggtagaatcaactagaaggttctctcatgtttttgccacctgggatggggtgggatgtcttaaatgctgggcttagctgagactcttgactcaaccacttacacatag

SEQ ID NO: 447753 - DNA, 647 bp, Homo sapiens
gtccagccccacacagagcaggggacacatgcagtttgctaaaggggaaagaaagagacaggagaaagaagagaggggagggaggaagcagaggagagggaggagaggagctcctctcgctctgaaagttccttcctcatctgtagacaattgcacagctaacataacctcttttgatgcaacttaaaaggaggttactgtttgaagaatgattgatgacgtctcctgtggtttacctttcccaagtgactaattgggtgcattcacccacagcacagagaggcaccatttgccctgaatgatttcatgaaccagagaagttgaggggctcgggtcaatggctgtggtgcatggaaagccatggtcttcccctacccccaaccccascctaaaaaaatctcagctaggacagattaatcacaggaattgactggcagacgggcttcgtgtaggaagaaatgccaggaggctttggataacaggggctggtggaggggggtctcccacctgcagaggccatggtaagtgggaggtatgatgtgcaaaatagacacttggcccaagcctccatgcccaaaaagtcccagagtacactggaaagcttctccacttgaagctttgcacacagtcacagagccaccctggca

SEQ ID NO: 447754 - DNA, 535 bp, Homo sapiens
tgagtggtgaagcagggtttaatccaaatttgactgattacttagcctggtgccaggctgcctctggccagaagaactctttgcacatctatgtccctgtgatgcccagagccttgtcaatgtatccaactccttcttcccatagggtgagttctctcttgccagactcctcacttcctgccaacaaaccatgagataggcttggataaatctgatctgcatggaaaggaaggatgtagtgccatcaacactaagagcccaggcaactgaatcaataagagagttaaatctatgagtggttgatcacaatctcatgtcctaattgagaaatcagcaatgtacagaaaaagaccctgcataccacaggacaaaaattataacttatctggagattaacatacaaagtacaggtgaactttatggagaaaatttcaaaactcaaagagcagagtacataaataagagaagtgatgggtcgtgtrggaaaggaagagttaaatgttataaggatgtcaatctccctgtatgtttcaat

SEQ ID NO: 447755 - DNA, 521 bp, Homo sapiens
taatatcacctgctgccatagcaagggggatgggagccctcatgtgctgttggtggcgtaggaactgggccaggtattctcaagaactagctagtgactctaagcatacgcacgccttgggacatgagtggaaaccccagagacagggtttcacaaaatcagaggtaagttcaaggatgtccattgctgcattgtttgcaattgcagaattgtaatcagaaagtacaagatgtgcactgatgaatccacctggtacaagaaaactaaacatctgtcacaggaacaacttaagtcatcaggtacaaacacggagatcagaaaagagtgttcagttattttgaaaaggaggacacagtgtgagataatatggcacaatcattcaagggaattaaatacagccggaatgatcaatacacgtgtcctaagatctaaggagaagagctgtaagtcataaygtatgtcctcagtgtggtgctccctctcccatgttcaatactgagtgtaaactttttttccaattc

SEQ ID NO: 447756 - DNA, 407 bp, Homo sapiens
tatgtctttagactctagactccttttccagctgggaagctcacattcgtgtccccaggagccaagctgggctgatggctgattgatatctttgctatattgctatattgttacattactggggataggaaggtgggggtctaaatgcatgtgttcgggtcactaccttgagctgaaaagaggcatcaaaggatttcggaactggaattcccaattttacctacaatgaaacagaattagagagcttgccctggctctgtaattagagggtggcctggctaatgaggactattaaggtttcctaagttgtatgatgacaggagaggagtgagatttaagaaaatgccaaataaaattggacccarcactgatcctacttcagccagataagcccctgtcactggtcg

SEQ ID NO: 447757 - DNA, 533 bp, Homo sapiens
aaatgtagtcttagcccagatggctctgtaaccagctaacattctgctaatgagaaaagagaaaagatatttgtggaggtggtaggggtgaggaacaagtgactgtcactgactcaagcagctctgagtggttggataataacgtttaattgcgatgcagttcgtttacagactgactcagggcaaaccccacctaggtcaaggaattggaaagagtaattggtctatagctagaccattcataggaggactattataagtgaactcagtttcctaataaaaatrtgttttaaatagccagtttggtcttgaatttagaatgataatagaagtaatataagtaataatatgtatttttatttatgtgtcagctctcctcagcatcctaaaggacaaatactattattattcccatgtatcataggaggcaactgaggctcagagaggttaagaggcttgtttaaggtcactctacctggtaagtggcaaagtcacactcgaacccagcagcacagcctcacacagagccccgg

SEQ ID NO: 447758 - DNA, 533 bp, Homo sapiens
aaatgtagtcttagcccagatggctctgtaaccagctaacattctgctaatgagaaaagagaaaagatatttgtggaggtggtaggggtgaggaacaagtgactgtcactgactcaagcagctctgagtggttggataataacgtttaattgcgatgcagttcgtttacagactgactcagggcaaaccccacctaggtcaaggaattggaaagagtaattggtctatagctagaccattcataggaggactattataagtgaactcagtttcctaataaaaatatgttttaaatagccagtttggtcttgaatttagaatgataatagaagtaatataagtaataatatgtatttttatttatgtgtcagctctcctcagcatcctaaaggrcaaatactattattattcccatgtatcataggaggcaactgaggctcagagaggttaagaggcttgtttaaggtcactctacctggtaagtggcaaagtcacactcgaacccagcagcacagcctcacacagagccccgg

SEQ ID NO: 447759 - DNA, 535 bp, Homo sapiens
gaggactggagggttcctaattggagatgcaccttctcactgtccttacatggcagagagagagaaagcaaattctcatgtctctttttataacyccattcatgaaggctgcatgctcatgacctaaataccaatcaaaggccccacctctaagtatccttatgttaggggttagggcttcaacattggaatgtgtggggggagcacagacatgcagcctatggcaccaaccgccaggagacaccagtgctgggtcaggagctgtctggattctacagaaagcagagcctgaagtgaccccagggagcagggaatccccattgagacaaggaaggaggagacagcaacacaaggctgtgttaccaaggcacagatggctcagttccctgggaccccggagaagcaaacagaagttgtccacctgaacgcagagggtgtgtgctcctgtgcctctgattcaagtatctttcttcttccagtataatgggagtgtggggaaaaggatgcctctttatcgtgactctacttggacttt

SEQ ID NO: 447760 - DNA, 510 bp, Homo sapiens
aaccttgggcaggttaatttacctctcagattcaatttcctcacctggagaacagagataataagagtgcccacctcatgcaggtaaaaggaattagcatggtggttcacaaacagtagccactccacaaaatagtagaaatcagtaatagtaatggtttgaaatatcacttaccttgaccaagctggtttctactgatcccctaaagatccaaaagtccccgtcgggatccccatcacagatcccacctgtggcctgtggtcctagctgctgctctgcttctgggccagagaaaacactctgtattagtctgctctcatgctgctaataaagacatacccgagactgagtaatttacaaaggaaagaggtctaatggactcacagttccatatcgctagggagacctcacaatcacggtggaagacgawggaagagcaaagggacgtcttacatggtggccagcaagggagcttgtgcaggagagctcctgtttatgtaaccatcaaat

SEQ ID NO: 447761 - DNA, 625 bp, Homo sapiens
atgaacaatgatttttagtataaatatggcccatgaaatatttggaacatacttatactaaaaaaagtttttttgctgttgatctgaaaattcaaagttaggtggacatcctgtattttatcctgaaactctcctcataaccatcacgcccccagtatagacaaaattcttcaacaacagtctcagcaaggaataaacatgaaatagggatgtctttccaatcacatggctctttcaagtctyctttccttatctgaagcagaagttgcgggttgcttctgaatttctggcctttatttttaatttggaaacagagccccattgaccattgccattcagctagaagttgtgctctccagggttcccgacagctaggtcttctggaaatgagactgaattataaccagtgggataggggagggagtgttggggtatgcctgggaatacttctttaatggggggtcttctctttcttcatcctactgctaagaatatagctatgatgactggagcaacagcagccacattggactgtgagaacacagttcacatcagtgtagaaagctggaagtaaccgagtccctagtagcttcctggagcagaactaccatatcagccctggatg

SEQ ID NO: 447762 - DNA, 625 bp, Homo sapiens
atgaacaatgatttttagtataaatatggcccatgaaatatttggaacatacttatactaaaaaaagtttttttgctgttgatctgaaaattcaaagttaggtggacatcctgtattttatcctgaaactctcctcataaccatcacgcccccagtatagacaaaattcttcaacaacagtctcagcaaggaataaacatgaaatagggatgtctttccaatcacatggctctttcaagtcttctttccttatctgaagcagaagttgcgggttgcttctgaatttctggcctttatttttaatttggaaacagagccccattgaccattgccattcagctaraagttgtgctctccagggttcccgacagctaggtcttctggaaatgagactgaattataaccagtgggataggggagggagtgttggggtatgcctgggaatacttctttaatggggggtcttctctttcttcatcctactgctaagaatatagctatgatgactggagcaacagcagccacattggactgtgagaacacagttcacatcagtgtagaaagctggaagtaaccgagtccctagtagcttcctggagcagaactaccatatcagccctggatg

SEQ ID NO: 447763 - DNA, 535 bp, Homo sapiens
aaaggtgggatgtttttacagcaacgattagcactccggcaggctgggcaaatataacttgtcagatgggattggaggtcttcgagtgttgacttaacacctataaacggcgcagaaacaacccatttctgcctggcccatgcttctcttctcctggcctctcctctcctccacagcagatggtgccctcaggcaagcccgggaggacaccctggctttgggccttggccacctggatgcctatagtgccattttctgagttggagaagaggggctcagggattggcactggaggctggagattcaggatcaagatctcagctggggagtggcagggcggccagcgtgagagccaactcccttgtgggtacttccggccaagaccctccacatcctgaaggtgcctcccagtyatcttcctctgagagctgtatggggaagctggggtcaggatcaggggaagcttcggggaaggcagaccggttgcatcatgtctcttcacctccatctgtgcatgtgggcatctggggagtgt

SEQ ID NO: 447764 - DNA, 614 bp, Homo sapiens
aagcagagctgtgtgcttctgtgcaccactgcgagcccagcactgcacagcggagctcaccaaacactgaatgaatgaatgaatgaatgaatgaatgaatgaatgaatgaatgmatgcatgcatgaatgaactgcttcatccttctgcatgttctccattcagatagggtttccagagagcagctagagattgggaaactggagatgtcatgcgctgaagcctatttaatcaggtcttctatgtcctggaggtgctcgggggtggaaaagggacaacttccaagggaaacagcgttgggaacgtgcccaccatggaacaaaagcttcctgcaccccctgaggaatcagcaccctgcctggtgccctgtgcatttcctgcgctgttttctccacacttccactgccaccagcctggcttgggccatcattactccagcctctccccctgcactccactgtcccttctccagttcacagccagaatgatgcttttaacatgggaatctgagcctgttgccacacagcccaagaacccttcccttctgagcctgcaagcctgcatgacctggcccagccccaagaatctcattgctcccttttcctccctcttgctc

SEQ ID NO: 447765 - DNA, 614 bp, Homo sapiens
aagcagagctgtgtgcttctgtgcaccactgcgagcccagcactgcacagcggagctcaccaaacactgaatgaatgaatgaatgaatgaatgaatgaatgaatgaatgaatgaatgcatgcatgaatgaactgcttcatccttctgcatgttctccattcagatagggtttccagagagcagctagagattgggaaactggagatgtcatgcgctgaagcctatttaatcaggtcttctatgtcctggaggtgctcgggggtggaaaagggacaacttccaagggaaacagcgttgggaacgtgcccaccatggaacaaaagcttcctgcaccccctgaggaatcagcaccctgcctggtgccctgtgcatttcctgcgctgttttctccacacttccactgccaccagcctggcttgggccatcrttactccagcctctccccctgcactccactgtcccttctccagttcacagccagaatgatgcttttaacatgggaatctgagcctgttgccacacagcccaagaacccttcccttctgagcctgcaagcctgcatgacctggcccagccccaagaatctcattgctcccttttcctccctcttgctc

SEQ ID NO: 447766 - DNA, 524 bp, Homo sapiens
taaggaccattatgattatactgggccacctggatcaatgcagggtaatctcctcacttcaagatcggtcacttagcaaccttaattgaatytgcaacccaaattctcccttctgcggtataaagtcacatattcacaagttcccaggattaggtcatggttggaggccattcttctcgctaccacattgcagttcactgtaacctttgcatcaaattgggcattactgtgagttcttgtgcaagtgttgggcaagtgtaccatttctagcatctcacataaacacatcacccacctagttggtgtcaatggattggttccagtgggatgattatttttctgtggacaaatgtaacattgtaatatgtttatttaaatatattatgcagacttacaagttacagcgatatctgtgtaattaaattgaaattcttattattttgactttgatataaactgtttttctagtttcaaaaaataaatatggacaaaatttgagatttaaaatacaggaatggtactga

SEQ ID NO: 447767 - DNA, 524 bp, Homo sapiens
taaggaccattatgattatactgggccacctggatcaatgcagggtaatctcctcacttcaagatcggtcacttagcaaccttaattgaatttgcaacccaaattctcccttctgcggtataaagtcacatattcacaagttcccaggattaggkcatggttggaggccattcttctcgctaccacattgcagttcactgtaacctttgcatcaaattgggcattactgtgagttcttgtgcaagtgttgggcaagtgtaccatttctagcatctcacataaacacatcacccacctagttggtgtcaatggattggttccagtgggatgattatttttctgtggacaaatgtaacattgtaatatgtttatttaaatatattatgcagacttacaagttacagcgatatctgtgtaattaaattgaaattcttattattttgactttgatataaactgtttttctagtttcaaaaaataaatatggacaaaatttgagatttaaaatacaggaatggtactga

SEQ ID NO: 447768 - DNA, 549 bp, Homo sapiens
tctatttattttttaggtaaacattaatagaagtgtaagtgatgttcagataagtgcacaaaccattagcatacagctctaggaatctccacaaagtgattgcactgtgtcctcaccctccacacagaagaatttcagtcccaagcagctccccatcccagtctctgacctataggtcctgacaggtgagttgtgtctcttctccaactgcctgtgactgaactcatacctgttgtatgcgcttttctgtgtctggcttcttttgcacaactttaagttcatgttgttgggtgtgggtgaagcaatgtagcactagtttattcctttctgtactgagcactattccgctgcatgaaatacactatatgtgtccttttacagttggtgaacatttaggctgtttccagtttggggctaatacgcacagctgctgtgtatgtcctcatacaagtcttttgcggacacatatatgtatatctgttgagtctctgcccaggaatggaawtgatggatcctcaaccataaacatgttcagctttattagctact

SEQ ID NO: 447769 - DNA, 513 bp, Homo sapiens
ttggggtacatgactcaaaaagaaggatcagaagaggttcctctgaataaaggctgtctaaactgggcaaataaaataagctgaagttttatgagcaaggagaggaaagagaatgtccctgactraggaaatagtttgggattgtaagcagaaagacagagagatggctggggtggctggagctcagggctgggcaagatagtggggcctggttgtgcaggggctcatcagggccttgtctcatcatagggacaatggtaagctcttggaaggtgttcagcagagaaaagacctggctggacttgcatttcctaagcttatcctggaggggttggagaggacagcaggagaccacgaggagttggctgtaattgatgaggtgacaggagctcgctccaagtaggtgctatggaaatggagaacattcaggaagtggaattggctgtccctggtgatgacaaaaacatggtttatgggaggctcccaattaatatttatgcaataagtgaacaa

SEQ ID NO: 447770 - DNA, 561 bp, Homo sapiens
ggatggtgcagtgagctgacatggcaccactgcactccagcctgggtgacaagagcaaaagtccgtctcaacaacaacaaaaaactcttctgatggaaggcagtgacagttgtacaacaatgtgaatgatgtgaatgtacttagtgaccctaagccatatgtaaaatcctgtgcgtattttaccacaattttttaaataarccttccccaaatctacaaacatgacatctttgagatttgcacaaagcttccatctacagtgaggaagtttcacctcattgtctggaagccccaaccactaaaaattggggtccgaggttctcagtttcttgtcaccccttcactgctcccccacccttactagcctattactgctcccactaacactgccctccaagtactaggcccacagccacagcggcccggcgccgtccccactgccgctctcgagaaccagccatcaacagctccacacaagctctcttttctgttttaccaacagaactgggactggacgggtttaaccccagggctctggcagtttccatttctctgtgttaa

SEQ ID NO: 447771 - DNA, 561 bp, Homo sapiens
ggatggtgcagtgagctgacatggcaccactgcactccagcctgggtgacaagagcaaaagtccgtctcaacaacaacaaaaaactcttctgatggaaggcagtgacagttgtacaacaatgtgaatgatgtgaatgtacttagtgaccctaagccatatgtaaaatcctgtgcgtattttaccacaattttttaaataaaccttccccaaatctacaaacatgacatctttgagatttgcacaaagcttccatctrcagtgaggaagtttcacctcattgtctggaagccccaaccactaaaaattggggtccgaggttctcagtttcttgtcaccccttcactgctcccccacccttactagcctattactgctcccactaacactgccctccaagtactaggcccacagccacagcggcccggcgccgtccccactgccgctctcgagaaccagccatcaacagctccacacaagctctcttttctgttttaccaacagaactgggactggacgggtttaaccccagggctctggcagtttccatttctctgtgttaa

SEQ ID NO: 447772 - DNA, 535 bp, Homo sapiens
gaaacacagacacgtgcccttcccaggatcttttcattcccacccccagtgcaacctatgaggtcatcatttctctgtaagaaggcacagtgaacaacctctgtcaggggcccagcttgccggtgctgagagcttccatctttcctgcccacctggtagttgtctggaggcaagggtgttgtgtcattcatcctaagagcacgaggcagtcctgggatttttcacccggagttcccatttctaaggagttctctgagttccctggtgagagaggggccctygtagagacaagcagaagctgtagactggctgggagcttcgaaggctgtcaggcttagagatgaaagtggcctggctgggaagaaggcagtgggatgagagtgggccagccaggacatgagtgtgagggatgaggagtaccccaattctggacccagcctgcctcacacaacagggcactgccacctgctgactcaccatcactggcaggttactcgtgttctctgtgcctcagtttcctcatccttaatataat

SEQ ID NO: 447773 - DNA, 578 bp, Homo sapiens
gaggtatcggtgcagaggtggtaattaagggagtcacatcatacaggggacctccatgcagtggctcatgcaatatttgggatatactcaaaaatgacctgctgtccatctacaagtcaagcctaactgggtgtcttatgtttttctttgctacgcctggcagtagccccagtggtgactggggccacaggctctggtgagctcacctggaaagcaagtagagaggagaaggggcctgggaagaagctgctggggagtctggcagctgtagttcccggaccgcaggggaaaccaggagagtttggttttgcagaagccagaaggaaaggtcatttsgttactgtgtcaagctgctgaaaaccagttaaaatgagaactgaaggcagagtgctttggacttgggcatatggaggtcatggggtcgctcaccgggtgcttctttgcagagggcaggaagccagatgggaggggcagcgaggggcacaaggagaggcagacaggagcaagttggccatgcggaggtgagagagtcagggcagtggctgagggaggtgggcgcacaggtggagatgggagca

SEQ ID NO: 447774 - DNA, 579 bp, Homo sapiens
ggcctaaaaacccagaccggcactccttgaacagctcctccaatgccagtgaagtcttagaactcagattgctgcaaagtgggaaagcaatctcccttcccctggggccagcgaccagctgacctaactgtgaaggctgctagactgctcaatggctcagcagagcttatgtcttcgttcacaaggaacaagccttaaaatccagctgtgatattcactttgaggctttaacaygttgttagtgaaaaatctgtttggaaatacatttttttatttatgttttattttattttttttatatactttaagttatagggtacacgtgcacaacatgcaggcttgttacatatgtatacatgtgccatgttggtttgctgcacccattaactcgtcatttacattaggtatttctcctaatgctatccctcccccatccccccaccccacgacaggccccagtgtgtgatgttccccaccctgtagaaatacattttgagttaatcaaatgcaatcaagaaaatgagatgtcctccaaaaatttaatgtaacaaagatttttttacagtagtaattctcatt

SEQ ID NO: 447775 - DNA, 607 bp, Homo sapiens
tttaataggatgcccaggtgacccgatgcacattacagttcgagaagcactggtcttaagggacacaagagccacagcccactgggctctgggagaaatggctatcccttgatatrttgaatgcctgtttcttttggtatgtcctggggattacgtgcacatgtctaaactcacatgggatggtgttagaatcctgactccagctgatattctgtgtggcttcaggcaattggcttcacctttctgagcctctgtttctttttctgtggtctgaaatcataataataatagttattaatgtttgacacaaaacattaatgcatccagcacagttcttagcatgcagtaaaactcacagaaaatgatatgaccaccattgttatttggggtgaacactgcaaggtcctccaccaatatccactttctttttcttcttcactaacagaatctcaattttattcaagcagtaaattgcgtttcacaataggcaccttagtagatgtgcctgttcaacaacgttcgccttcccagacctcctggaaaccagaaatgaccatgtgaccatggtcacaatcctttggcagctttctctcctcaatagaaaaaa

SEQ ID NO: 447776 - DNA, 617 bp, Homo sapiens
ggttgccaataaacaaatcataatcatagccattaatggggccaagtcccagctagggtgccctgaggcctccccctccctctgtggccaggtggtacggttgccagattgagcaaacaaaaatacaggacactcagttaaaatcgaatttcagatagacaatgaatcatctttttttagtatccatatgcccctaaatatttcatgggacatactgatactaaaaagttatttattttttatttgaaattcaaatttagccaggyatcctgtgttttttctggcaaccctacagggtgagcttaggtgcagccatagatgaaagaagggatttcaatgtcagtgatggctgagtcgagtggtcaaattaactaaaggaacctatgttctgtgcactcaaattaaaatttctgatctatgaactccaactctcaaagcttaaacgggggggaaaaaagcctcctttagtcgataagcaaactaatgaaatgacagaagactggacaagagtgtcccgttccccagcttcagcagcagtttcctgaaggcccccacgccctctcatcccattttgcaaaagaggagatcgaggctccagcaggtgaagagagttgctg

SEQ ID NO: 447777 - DNA, 518 bp, Homo sapiens
gcaccacctcatgggtctgcatgggagagcacgaatatctatgtaggagcctggaggccagtgggcatgcactggaccatctgtgtgtgaagatctgtgcttgttcaatgraggctcctgtcctggattccgtgtgaaatgtgcccattcaaatcccacatcattcccccaccctcccacgtctttgtcaccatgaagcattgagagatggccaaccatgttttgcagcaaactgtgaggtctttacccagaggagctagtccctagtctcctggttcatgccccagctttcgttcttgaaattactttccctaaggccaaagcaacagggccagtgtcttagtccatattctgttgcttataacagggtacctgaaactgggtaattaataaaggaaaggaacttatttcttacccttatggaggctgagaagtttcaggtaaagggtccacatctgttgagggcctttttgctggtgggggctctgcagattcccgaggtggcccagggcatccca

SEQ ID NO: 447778 - DNA, 518 bp, Homo sapiens
gcaccacctcatgggtctgcatgggagagcacgaatatctatgtaggagcctggaggccagtgggcatgcactggaccatctgtgtgtgaagatctgtgcttgttcaatggaggctcctgtcctggattccgtgtgaaatgtgcccattcaaatcccacatcattcccccaccctcccacgtctttgtcaccatgaagcattgagagatggccaaccatgttttgcagcaaactgtgaggtctttacccagaggagctagtcccyagtctcctggttcatgccccagctttcgttcttgaaattactttccctaaggccaaagcaacagggccagtgtcttagtccatattctgttgcttataacagggtacctgaaactgggtaattaataaaggaaaggaacttatttcttacccttatggaggctgagaagtttcaggtaaagggtccacatctgttgagggcctttttgctggtgggggctctgcagattcccgaggtggcccagggcatccca

SEQ ID NO: 447779 - DNA, 497 bp, Homo sapiens
tctttcctctaagaactggaacaaggcaaggatgcccgctttcatcactcttattgaacatggttttaacaattttagctgggtaaatcaggcaagaaagaaatgtatttaaattggaaaatagaaaatcaaaatgttcttctttgaagatggcatgatcttatgtatagaaaaacctgaagactctgccaagaaacactgagaactgataaatgaattcagtaaatttgcaggatacaatacgaaacatacaaaaatcagtatcatttccatacataaataatgaactagctgaaaaagaaatcaagaaagcaatcccatttacratagattcaaaaactaaaataatgtactgaggaataaatttaactaagaaggtgaaaaaacttctacaataaaacgttcaaacaataaagaaagaaattaaagaggatacaaacaggtggaaggacctcatatgcacatggattggaaaagttgatattgttgaaatgact

SEQ ID NO: 447780 - DNA, 497 bp, Homo sapiens
tctttcctctaagaactggaacaaggcaaggatgcccgctttcatcactcttattgaacatggttttaacaattttagctgggtaaatcaggcaagaaagaaatgtatttaaattggaaaatagaaaatcaaaatgttcttctttgaagatggcatgatcttatgtatagaaaaacctgaagactctgccaagaaacactgagaactgataaatgaattcagtaaatttgcaggatacaatacgaaacatacaaaaatcagtatcatttccatacataaataatgaactagctgaaaaagaaatcaagaaagcaatcccatttacgatagattcaaaaactaaaataatgtactgaggaataaatttaactaagaaggtgaaaaaacttctacaataaaacgttcaaacaataaagaaagaaattaaagaggatacaaacaggtggaaggacctcatawgcacatggattggaaaagttgatattgttgaaatgact

SEQ ID NO: 447781 - DNA, 497 bp, Homo sapiens
tctttcctctaagaactggaacaaggcaaggatgcccgctttcatcactcttattgaacatggttttaacaattttagctgggtaaatcaggcaagaaagaaatgtatttaaattggaaaatagaaaatcaaaatgttcttctttgaagatggcatgatcttatgtatagaaaaacctgaagactctgccaagaaacactgagaactgataaatgaattcagtaaatttgcaggatacaatacgaaacatacaaaaatcagtatcatttccatacataaataatgaactagctgaaaaagaaatcaagaaagcaatcccatttacgatagattcaaaaactaaaataatgtactgaggaataaatttaactaagaaggtgaaaaaacttctacaataaaacgttcaaacaataaagaaagaaattaaagaggatacaaacaggtggaaggacctcatatgcwcatggattggaaaagttgatattgttgaaatgact

SEQ ID NO: 447782 - DNA, 614 bp, Homo sapiens
tgttggcattgtcattgatcaatggtatttctcattttttattcagtaatgtggacaatctcacacagtttgtcaatttacgatttttgctgtgtgtatgcagaggtgcactcataatttaattttgaaaaaccttgaagaagatgttatccaaacagaygaaagggagttcatggttgtaaaaataatgatctagccttctctgactctctgctgttttaaagaactactacgtctggcatctgtccagtatttgtgtggcctgaacccattttattcacccatatgagccacttcttttctttatgcatgtttcattacaggcacattgtatatatctatgtgtgtttctctgtgcatattaatattgtcaaaagacaaaattacaacaaatttagagatcctaattgactttcgtttgtttccagaattgggcaacacctcattctacaaagtagtttcagtgttcccataagccgagcagaagatggttttataaacagaaaggggccaaggaaagcagaaacagaaaataaaaagcagattggttgtttcaaagttactttccttataaaggtcaaagctggccttataaaggccagctaaaactagct

SEQ ID NO: 447783 - DNA, 561 bp, Homo sapiens
atgaagtcccatgatagactatatgcaagctgggtaatgagaaaagrcagtagaatgtcttagtccaggtctgaaagcctcaaaaccagtgaagctgagggtgtagctaccagtccaaggttgaaagcttgagagcacttgagactattggtgcgaactctagagttcaaaggatgaagaacctagagtctgaagtccgagggcaggaggagaaaaggcctgtctctcaggaagggagacagagtgaggaagcagagaaagttaaatatcatccttctgctgcctgctttgtcctagcttcactagcagtcagtcaaatggtgcccacccacattgagggcaggtccgtctttctcagtccactgactcatacttcagtctcctctggaaacatgctcacagacacatccagaaactgtgcttcaccagccattgaggcattcctcaacttagtcaagttgacatctaatattaagcatcacacacattcttttccttgccgttcaaatgagtgctttagtgatgaatctctgtggttttaatttgcacttccctaatagc

SEQ ID NO: 447784 - DNA, 619 bp, Homo sapiens
attcttttaccaggaggaggagtaaagaataatatccaatcactatggacacactgcctgtgtgtgaggctagctccatctgcagaagggctacagttagaagagtacccagatctcctccagcaggaacttgaggaggtgctgacctcctgaaaggaagaaactgaaggcttgtgggaaaagtgctgatctcatgggaaaagaatatctgaaagagaatcctgcctcagccactccaacatttgaaatggcttaggaaaatcatttcatattctgggcctcctctggagtgtctttcacttgcccatggccttcctacaagaatctacaggagtgagttcccagcagcaatgttagtacattgtgaccccacttcttgacaatgattgattggattaggggaaggctcttgacccaggctagtcaaaccagagttccatctgtggcaatgcagaatccaaaaagagaggtacaagttcaatctaccctgtggttggcataataacatatgaatttgggagcctgccatttctccaactatatgtactgagtagctgagaaagccaatctgcagagaaaaataactaaagctaagtagaraaaaggggagaaagaagag

SEQ ID NO: 447785 - DNA, 561 bp, Homo sapiens
atgaagtcccatgatagactatatgcaagctgggtaatgagaaaaggcagtagaatgtcttagtccaggtctgaaagcctcaaaaccagtgaagctgagggtgtagctaccagtccaaggttgaaagcttgagagcacttgagactattggtgcgaactctagagttcaaaggatgaagaacctagagtctgaagtccgagggcaggaggagaaaaggcctgtctctcaggaagggagacagagtgaggaagcagagaaagttaaatatcatccttctgctgcctgctttgtcctagcttcactagcagtcagtcaaatggtgcccacccacattgagggcaggtccgtctttctcagtccactgactcatacttcagtctcctctggaaacatgctcacagamacatccagaaactgtgcttcaccagccattgaggcattcctcaacttagtcaagttgacatctaatattaagcatcacacacattcttttccttgccgttcaaatgagtgctttagtgatgaatctctgtggttttaatttgcacttccctaatagc

SEQ ID NO: 447786 - DNA, 470 bp, Homo sapiens
gactcatacttcagtctcctctggaaacatgctcacagacacatccagaaactgtgcttcaccagccattgaggcattcctcaacttagtcaagttgacatctaatattaagcatcacacacattcttttccttgccgttcaaatgagtgctttagtgatgaatctctgtggttttaatttgcacttccctaatagctgatgatgctgcacatttttgtatgtgtttaagtgccattcttatctcttttctagtgaactatccattcattatttttgcccattttgtaattacatttttttacagattaattttgagacttatttttattgtctgcatatgttcagtgtggtttgcaaatatgtgattgcagtaaataacttttttttatccttttgatagggtctttgatagcacaaatgttttcatakttgacgaagtagaagtcatattttttaaaaagcatatcat

SEQ ID NO: 447787 - DNA, 606 bp, Homo sapiens
cttacaaaatatcctgaacataatttaacatgaatgtcacaatatcttataaaatagcattctgtttcagtactgagaagttgagtgacagattgccaaaaaaaaatgtgaacagaaagaatattgctaagtggagtataataaaatcttgaacaaaatgtctatatctacttttatataaaattttaattgcctagttagctaactgcttccactcatttccaaaataagcatatatattaataatcatgtgataatctcattaaattatccaataacaagtgtcacatttttaaaagcaagtgtagacaacattataagaaaatgtaggtcaagtattatcattggtattaagaacaaaagttaattctgcatttcctggaattgaaagcataaataaaaacataattagctataaaatattcattattagtaagaagtatactagctggttagaagaaatttttcattccctataaactctcaaaaggcttaattacatagattttccatcaatgacatcaaacaagaaaggaataagtttccaaatataattttactaataagcagacaggatgcttatrtagacataatgactttgaaaaa

SEQ ID NO: 447788 - DNA, 593 bp, Homo sapiens
tttcccatctgtaaaatgggatctgagcatctcgttgcgttatgtacctacatgtacagtaagtttgtaagtggcaacaacacaggccctaatctcggctcagccacactcagtgaggctacttaagctttctgtacctactgtgtgtgtgtgtgtgtgtgtgtgygcgcgtgtgtattcttttagtagttaatgagatatgatactttacatgtaatattttctttaattttcattcaacagcatgtgatctttctttttttcactccacctttcccccatcaaatgaggaaggaaagctcaagcagtttactattttgggaaaattgtgccatcgtgcttagtacatagtgtgtatcagacttaagaaaaggacaagaatgaaactattaaaaaaatttctccaactggcaattaaaagacaatgggaaaactgcttctatgtttaagaaaaaataatttaactcttaattttattgccacttatctacttttgaccatatattgaggattcccccccaccttccaccaccagtggaactggggaataaaacaacaaagattgaagatgtaatggagaaaagagtggaaac

SEQ ID NO: 447789 - DNA, 680 bp, Homo sapiens
ggaggttatactcccaacgcctcagagaaacccacccctgtggttttgctggatgcagcccatgtggctgctcttgctggttagagtyctgaagctttttcaggtgagcattgcatgttgacagtgactccacagttctggagacctaatggtggtcctgctaccaagtctctgctaggcattgccctagttggggccctctgcagcagctccgtctcatttttacattctgcattgctctagtggcagctccctgtagtggctcctcctcaaagacatgtctctgtttggatcccaaggccttctgggacgtcttttgaaatctggatggaggctgctaagaattcgtaaggcccttggaacaagcaagaaaccctatgttggaatttggggaaaagagacctaagtgagtagtggtcagcaagcctgtggagggctcaggcccatctctcaaaatcattctggcttcataggcctctgtacttcaataggaggaacagcctagaagatctgcaaaatacctttaagatctcccttccattgtctctaggaatatcacctggcttccttcaatccatatgaacatctttggcaaacagtatctaagctacagccttggttttccttcctgaacctgctttttcattctttacattaccaagctgagagtttttgctatc

SEQ ID NO: 447790 - DNA, 680 bp, Homo sapiens
ggaggttatactcccaacgcctcagagaaacccacccctgtggttttgctggatgcagcccatgtggctgctcttgctggttagagtcctgaagctttttcaggtgagcattgcatgttgacagtgactccacagttctggagacctaatggtggtcctgctaccaagtctytgctaggcattgccctagttggggccctctgcagcagctccgtctcatttttacattctgcattgctctagtggcagctccctgtagtggctcctcctcaaagacatgtctctgtttggatcccaaggccttctgggacgtcttttgaaatctggatggaggctgctaagaattcgtaaggcccttggaacaagcaagaaaccctatgttggaatttggggaaaagagacctaagtgagtagtggtcagcaagcctgtggagggctcaggcccatctctcaaaatcattctggcttcataggcctctgtacttcaataggaggaacagcctagaagatctgcaaaatacctttaagatctcccttccattgtctctaggaatatcacctggcttccttcaatccatatgaacatctttggcaaacagtatctaagctacagccttggttttccttcctgaacctgctttttcattctttacattaccaagctgagagtttttgctatc

SEQ ID NO: 447791 - DNA, 450 bp, Homo sapiens
gataagaaggaggaaagaagagagaatattgaagataatatgataaaagtcagaatttccagtttttgtgactgtagggaaaaaacataatgcatttcaaattttatatttttaattaataaataatattttatgtatgtatggggtatatgtgagtatttctgacatgtgtatgtaatgrtcatgtcagggcatttgaggtatctgtcaccttgagcatttatctttttttttttttctttttgagacagggtcttactctgttacccagactagagtacagtggcatgatcatagctcattgcagccttgaactcctggcctcaaatgatccccctgcctcagcctcccaagtaatttgttacttgggagtcacatgttaccactactggctaattttttatttatattttcttgtggagacaggatctcactatgttaccccagctg

SEQ ID NO: 447792 - DNA, 680 bp, Homo sapiens
ggaggttatactcccaacgcctcagagaaacccacccctgtggttttgctggatgcagcccatgtggctgctcttgctggttagagtcctgaagctttttcaggtgagcattgcatgttgacagtgactccacagttctggagacctaatggtggtcctgctaccaagtctctgctaggcattgccctagttggggccctctgcagcagctccgtctcatttttacattctgcattgctctagtggcagctccctgtagtggctcctcctcaaagacatgtctctgtttggatcccaaggccttctgggacgtcttttgaaatctggatggaggctgctaagaattcgtaaggcccttggaacaascaagaaaccctatgttggaatttggggaaaagagacctaagtgagtagtggtcagcaagcctgtggagggctcaggcccatctctcaaaatcattctggcttcataggcctctgtacttcaataggaggaacagcctagaagatctgcaaaatacctttaagatctcccttccattgtctctaggaatatcacctggcttccttcaatccatatgaacatctttggcaaacagtatctaagctacagccttggttttccttcctgaacctgctttttcattctttacattaccaagctgagagtttttgctatc

SEQ ID NO: 447793 - DNA, 504 bp, Homo sapiens
agcaagcctgtggagggctcaggcccatctctcaaaatcattctggcttcataggcctctgtacttcaataggaggaacagcctagaagatctgcaaaatacctttaagatctcccttccattgtctctaggaatatcacctggcttccttcaatccatatgaacatctttggcaaacagtatctaagctacagccttggttttccttcctgaacctgctttttcattctttacattaccaagctgagagtttttgctatctttccaaattgcttcttttgattatgaatggaattgtcaagttattttatccctctcatgggttaatgtgagcagttaaaagttaaaaatgcagcagcttgattactttcctgcttggatgttttttccacttgataccctatttcgtcactctcaagtttggacttcaatgaaaccctcaggcatgaacacagttcagctaggytttttgccaatttacaacgatggcctttacttaagctt

SEQ ID NO: 447794 - DNA, 504 bp, Homo sapiens
agcaagcctgtggagggctcaggcccatctctcaaaatcattctggcttcataggcctctgtacttcaataggaggaacagcctagaagatctgcaaaatacctttaagatctcccttccattgtctctaggaatatcacctggcttccttcaatccatatgaacatctttggcaaacagtatctaagctacagccttggttttccttcctgaacctgctttttcattctttacattaccaagctgagagtttttgctatctttccaaattgcttcttttgattatgaatggaattgtcaagttattttatccctctcatgggttaatgtgagcagttaaaagttaaaaatgcagcagcttgattactttcctgcttggatgttttttccacttgataccctatttcgtcactctcaagtttggacttcaatgaaaccctcaggcatgaacacagttcagctaggctttttgccaatttacaaygatggcctttacttaagctt

SEQ ID NO: 447795 - DNA, 627 bp, Homo sapiens
atttcactttggtatggggaatcaatcattctgtcctatctttggttcaatggcatgtggatcttgttgtcacactcaacgtaaaatagcaagaccaatgtcacaagccatatttttagtttttctccaataataactgatcaccctacataaaaaaaaatctaagactgtgagaaaagaaaaaaaaatattttgtgagctaatagttaaatgatttagtaagagggaccatgcacacttcctctccttacttttcagacttgtgtattctgattatgaaagaaataacrccatatattacattgtgtaggacagtacctaccttcactggactgttttagcaggtgccataactgaattttcaataagccatttcaccattctattaaaagtattacaggaagagaaactaaatctgtataactttctccttccataatctcccaccaagagcctgactgatctcccaaagcaagcaccatgtcataggttccgcattggcctttgattttaggtttggcacaggagtaattcttccattcattgcttggccagagtctgcaggacaggtttggcagcattgtatccttgtcttcaaagcagcatgctcccttttggcccaggatg

SEQ ID NO: 447796 - DNA, 564 bp, Homo sapiens
tttgtgagctaatagttaaatgatttagtaagagggaccatgcacacttcctctccttacttttcagacttgtgtattctgattatgaaagaaataacgccatatattacattgtgtaggacagtacctaccttcactggactgttttagcaggtgccataactgaattttcaataagccatttcaccattctattaaaagtattacaggaagagaaactaaatctgtataactttctccttccataatctcccaccaagagcctgaytgatctcccaaagcaagcaccatgtcataggttccgcattggcctttgattttaggtttggcacaggagtaattcttccattcattgcttggccagagtctgcaggacaggtttggcagcattgtatccttgtcttcaaagcagcatgctcccttttggcccaggatgtgtctagaaatgttaactgaaagctatgatatggaaagggtgactcacaactctgattgttgccctactttcctgtgtctgatttggtatcagaatgatgcacaaaaaagtcctctttcctctcctct

SEQ ID NO: 447797 - DNA, 564 bp, Homo sapiens
tttgtgagctaatagttaaatgatttagtaagagggaccatgcacacttcctctccttacttttcagacttgtgtattctgattatgaaagaaataacgccatatattacattgtgtaggacagtacctaccttcactggactgttttagcaggtgccataactgaattttcaataagccatttcaccattctattaaaagtattacaggaagagaaactaaatctgtataactttctccttccataatctcccaccaagagcctgactgatctcccaaagcaagcaccatgtcataggttccgcattggcctttgattttaggtttggcacaggagtaattcttccattcattgcttggccagagtctgcaggacaggtttggcagyattgtatccttgtcttcaaagcagcatgctcccttttggcccaggatgtgtctagaaatgttaactgaaagctatgatatggaaagggtgactcacaactctgattgttgccctactttcctgtgtctgatttggtatcagaatgatgcacaaaaaagtcctctttcctctcctct

SEQ ID NO: 447798 - DNA, 564 bp, Homo sapiens
tttgtgagctaatagttaaatgatttagtaagagggaccatgcacacttcctctccttacttttcagacttgtgtattctgattatgaaagaaataacgccatatattacattgtgtaggacagtacctaccttcactggactgttttagcaggtgccataactgaattttcaataagccatttcaccattctattaaaagtattacaggaagagaaactaaatctgtataactttctccttccataatctcccaccaagagcctgactgatctcccaaagcaagcaccatgtcataggttccgcattggcctttgattttaggtttggcacaggagtaattcttccattcattgcttggccagagtctgcaggacaggtttggcagcattgtatccttgtcttcaaagcagcatgctcccttttggcccaggatgtgtctagaaatgttaactgaaagctatgatatggaaagggtgactcacaactctgattgttgccctacyttcctgtgtctgatttggtatcagaatgatgcacaaaaaagtcctctttcctctcctct

SEQ ID NO: 447799 - DNA, 606 bp, Homo sapiens
ttgtattcctatggtagggagttttgttttaagtctgggagaaattggataatgtacctctttatttcacaaaatttgggacacgtatatacatttacaattaacttaacaagtgaatgttgagggtgtattttaatttaggcactgtgttgggaattattgacaccaatatcactaggacagagatcttcctatcagagttcaacatctaaaggtagacccagaaaagtaaattattgcttattgcacttcacagtaattataatcacattccatagagtactgttgggataaggggcaaagcaaaagaaggaaaaaatgaatcctagacaaaaccaaggaataacttttttttattttaaacaatttttatatatgtcatccctaatacctagaacaaacaaaaatagggaaatattcctcaaatgcccttagcrcattattgattacatcatgtattttagcaaccttatatgaccttgaccacatggaagcaacattatccaaaccgttttcctatagtgaatgtggaagaatgcaaaatatctgtctgtcccagtcagaatcaagggtgtgtatatagttcataagctcagtgaaatagcc

SEQ ID NO: 447800 - DNA, 605 bp, Homo sapiens
tgatggtcgtgttcctgatcttaggatgaaggcatttatttagtcattcaccttttgtatgttagtgggtttttcacagacaccctttattaggttgaggaagttcccttctgtttttagctcttgagtggcttgcctttttaaagtaataaatggatattgaattttatagaatgttttttctgcatccattgcagaatttttctcttttttctgttaatatgtaaaataacattaactgatttgtaaatattaaaccaacattgtatttctggaagaaaccctagttagaggtggtatattgtccttttttatatattgttggattttatttactactctttaaaaggatttttacatctaggttcacaaaggatatgtttgtagttttctttttttcataaattctttggtcttgatagtagggtaaggytagcttcatgaaatgatttgtgaagtgttcgctcctccactcttttgtgaaatagtttgtgatggactggtactatttcttccttaactgtttcataatttaacttggaagtctttattgttatttatggaaaggttttaataatggtaacaaattctataataaatttaga

SEQ ID NO: 447801 - DNA, 589 bp, Homo sapiens
gcttctacagctttgtttgttccagtgctcacttccaattttcaggctgtactgagattagcttaagggatatcagagagagaagaaaacactgtttcaaattctcgtcttcttacttgatatgtcatttactttctggttctcaaactgctgccccttacattctgtccaggtttatatctttagctagaaagaaagacagggtaaaatgtgctcacgccgttatgcctggtgttagaacttcgctcctttcaattggcttctgagtctacaggaatttcttccctgtctattttactttagttatgttgttttcatctctcccatattctacagctaaacctgaagcctctctccctcactgttatctcatttctaatgcttctcccaggcatatcatcaatctggatttttcaatttctttacactaatggacattccacactaatttttcacttargaataagtgctcaagtacacttaaacttgttggcagtccagtcttctcttggatagaagaaatagctgacaatttcataccccatactcctctcttgttccattatttccagaagagaagcaaaaagag

SEQ ID NO: 447802 - DNA, 606 bp, Homo sapiens
  misc_feature (1)...(606): n = A,T,C or G
ttcttcttctctgccatgtttagattggataattttattagggnntttttttttttttttttttttttttttttttttactaacttaaaatagcctctctggacccaaggtgtcaattgtaaagcatggaaatatttgatgcactgagagtcaagctggcttttataatagttccactttcatgataactaatctattcccataataacccattaatccactaacccaccaatttataaatytattaatccattcatgaggacagagccctcatgacctaatcactgcttaaaggccccacctcttaatactgttacattggaaattaagtttcaacatgagtttgggaggggacaaacattcaaatcatagcactgttactatcacagtaatattcccgtggtgctgcttgactttctcatgtatatttagactcataaccacatttcactgtaagtataaagtttgagtatttataataaaaatacaatttcgtcacagaataatacttctcatagaaggcactgctgggtccatggcatcattggttaaaatctattaaaagggcttgaaagtataacgagaatataagtgtaatctaaacat

SEQ ID NO: 447803 - DNA, 606 bp, Homo sapiens
  misc_feature (1)...(606): n = A,T,C or G
ttcttcttctctgccatgtttagattggataattttattagggnntttttttttttttttttttttttttttttttttactaacttaaaatagcctctctggacccaaggtgtcaattgtaaagcatggaaatatttgatgcactgagagtcaagctggcttttataatagttccactttcatgataactaatctattcccataataacccattaatccactaacccaccaatttataaatctattaatccattcatgaggacagagccctcatgacctaatsactgcttaaaggccccacctcttaatactgttacattggaaattaagtttcaacatgagtttgggaggggacaaacattcaaatcatagcactgttactatcacagtaatattcccgtggtgctgcttgactttctcatgtatatttagactcataaccacatttcactgtaagtataaagtttgagtatttataataaaaatacaatttcgtcacagaataatacttctcatagaaggcactgctgggtccatggcatcattggttaaaatctattaaaagggcttgaaagtataacgagaatataagtgtaatctaaacat

SEQ ID NO: 447804 - DNA, 606 bp, Homo sapiens
  misc_feature (1)...(606): n = A,T,C or G
ttcttcttctctgccatgtttagattggataattttattagggnntttttttttttttttttttttttttttttttttactaacttaaaatagcctctctggacccaaggtgtcaattgtaaagcatggaaatatttgatgcactgagagtcaagctggcttttataatagttccactttcatgataactaatctattcccataataacccattaatccactaacccaccaatttataaatctattaatccattcatgaggacagagccctcatgacctaatcactgcttaaaggccccacctcttaatactgttacattggaaattaagtttcaacatgagtttgggaggggacaaacattcaaatcatagcactgttactatcacagtaatattcccgtggtgctgcttgactttctcatgtatatttaractcataaccacatttcactgtaagtataaagtttgagtatttataataaaaatacaatttcgtcacagaataatacttctcatagaaggcactgctgggtccatggcatcattggttaaaatctattaaaagggcttgaaagtataacgagaatataagtgtaatctaaacat

SEQ ID NO: 447805 - DNA, 607 bp, Homo sapiens
tatatccaaaaaaatgaatcaatatataaaaaagatacctgcactcccatgtttattgtggcactagtcacaatacctaaaatagggaatcaatctaagtgcccattaatggatgaatagattaaaaaaactttgttatatataaacaatgaaatattattcaggtataaaaaagaatgaaatcttatcatctgcagcaacawggatggaactggaggtcattatgttaagtggattaagccaagcacagaaaggcaaatattgcgttctcactcatacatggaagctcaaaaacataggtctcatagaggtagagaatagacggtgattacaggagaccaggaaaggtagggcagggtgtatgaagagagattgattaatgaatataaaaatattgcttgatggaggaaatgaaatctagtgttgtatagattagtagagtgactatagtttattataatctattgtatatttcaaaatagctataagaattttagtttctaatgttgaaaaagacaaatatttaagatgatggatatcctaagtacactgatttgacctttacaaattataagaatgtatttaattatcacatgcaccctgaaac

SEQ ID NO: 447806 - DNA, 507 bp, Homo sapiens
aagtacctgaacttgatatctcaatgacaaatgaataataataaatacatatttcacattatctgcccttttcttgggataatgctagaggatgttacacaataccttctaaatttcctaataagattgagccctttcttattgcccatagtgataatttaattaaatatgtgtctttttgcttccttctctctactaccttgctttcacatcccctcactctattcttcctcaaatctgcttgcaacagacattggtctctgtcattccaccaaattactcttgaatctttagcrcttatctctatattattaaatttaatggttaattctgggtaacatttctttaacggatcatccctttcccttaaagataaggataaatctcttttttgttgttattacttttagtcatcatagttgttagttttcttcctcactagtcacttctacatcccttttgcttgttttcatttaattttcttgatctaacttacaatggcttaca

SEQ ID NO: 447807 - DNA, 590 bp, Homo sapiens
gataatttaattaaatatgtgtctttttgcttccttctctctactaccttgctttcacatcccctcactctattcttcctcaaatctgcttgcaacagacattggtctctgtcattccaccaaattactcttgaatctttagcgcttatctctatattattaaatttaatggttaattctgggtaacatttctttaacggatcatccctttcccttaaagataaggataaatctcttttttgttgttattacttttagtcatcatagttgttagttttcttcctcactagtcacttctacatcccttttgcttgttttcatttaattttcttgatctaacttacaatggcttayaactcagttcttggacttcatttctctttctatgtacactcatttggttatcaatttctgcctcaaggcttttaatatcatcaacatgatgattttccctaaatgtatatcttaatcccaaatatcttccagaactaaatttttatgtttgacttatttacctttccacttggatagataatagacatctcaaatttaatgtatagaatatcagacatctgatattcttatggtct

SEQ ID NO: 447808 - DNA, 539 bp, Homo sapiens
atactttcttcgtttttcttgttgaaatgtatgtaatggaaacaaatgctggaaatgttttcttacataataaagactcatccatgaaagcacccccttgacaactgcagaaattgttgttcctatgtgtgatgcctggaagtaatggagccatcctatgtgcaagaagagaggcatcaccagcacattgaaaactgcaaagtaactttatgtttaatataaaaatgtttgtctattcacctctggaactctctgcctctgatcttttcatcaaatattataaggcataagtcttcaagtgctagttttctggcttctgttgattcccttccctgatgcccatcctggtgaaaatgaacaattgttccagttttcatcatctttcaaaggcatcttttctgcaatctcaaatgtcctgttcattagctactgattttatagttttgatcccctggttctgtaataagaaataatgtcagaagaattatagaaattatamaaaaggaagaaagattattaatatataaacatttatattg

SEQ ID NO: 447809 - DNA, 522 bp, Homo sapiens
tgaaaacaatgtgcaaactatccattgtagctttcttgccttctttccccatggctgctccccaactagagctaaacccaggctgttccttagactgtgcttctggtgccccctcccaagatggaataaactgtctgaacaccaaggaagtcatcctgctgcagacgcaccacagctcacatggtttcgtgcctctcggattgggctcttgtgtgtctctgcctggaargctttgccgtcattgttctcccagtcaaggcccaggcaaaatcttaggtatcccatttcagtgacacctttccccactcttcctggtgggattttgttgttgttacatttttttctctattaccaaagggctttgtccatacttgtgttacacatagcactgtcatcacatcaagagtctggctttgcttttactgaacaccaggattttgaaaaagaacaaataaagtaatagtgataaccccaaaaaatgtgatgctgtggtatgaatgtttgtgcccctagcccccaaaa

SEQ ID NO: 447810 - DNA, 450 bp, Homo sapiens
  misc_feature (1)...(450): n = A,T,C or G
agcagggcctcttttccaggattccaggacagggttctttctaataggttaccccagtatgatctggaattttaaaaagaagtaaaagcagttgaagaccacccacttgctataatttgaaaggcttgttctcccctcccttcatctctttgaatcctgcttcacagacattgttgtctttgggaccaatacatttcttctatctgcatatctgggtagaagctctcatggaagaaaaaagaaaagcccataggtgaaggggagtgtgcctgccaagntncttgttataacttcacacgcagtgtattttctgaaatggatctgctagagtcatctcatggaatcttctcattcttctggagtctcctcattttacatgtgagtaaagtgaagttcakaggcaataagtcatttgtccaaggcaaacancttataaagtggtaggctggt

SEQ ID NO: 447811 - DNA, 609 bp, Homo sapiens
ctttaaccaactgattttcataccacctaacaaagatggcaaatatcccaattccatatggcagcatcctaacaactccctatggggggctgtcagtgggaacgttccacttccagcacccatttctctactagtcaaaactcctttgatgggaagtgacaaacacccatctgaaataagcttaggtaaagggatgacttattagaaggatataggagaccatatatacctgaagggggaaagcataagacctctgaggkcagtgactcccagcttagtccactgctccatgcttgatgcctggaatacagcctgttcaatgttaaatgaatgaatgaccaaactgcagtaaaggcagggttgccacttagccttgataatagccaaaactagcactgaatgcctcaagaagacagaggagataagactttatgatagataccttctgggttgtctccccagcccctctattctcagaactcccctgcttcatcatatacatgatgtatggggatcagacctaagaagccaagttcatactctgtgatccttctgtgatctgcacagagctggttgttacaccagtgggcacaagatccaagtgtggcc

SEQ ID NO: 447812 - DNA, 609 bp, Homo sapiens
ctttaaccaactgattttcataccacctaacaaagatggcaaatatcccaattccatatggcagcatcctaacaactccctatggggggctgtcagtgggaacgttccacttccagcacccatttctctactagtcaaaactcctttgatgggaagtgacaaacacccatctgaaataagcttaggtaaagggatgacttattagaaggatataggagaccatatatacctgaagggggaaagcataagacctctgaggtcagtgactcccagcttagtccactgctccatgcttgatgcctggaatmcagcctgttcaatgttaaatgaatgaatgaccaaactgcagtaaaggcagggttgccacttagccttgataatagccaaaactagcactgaatgcctcaagaagacagaggagataagactttatgatagataccttctgggttgtctccccagcccctctattctcagaactcccctgcttcatcatatacatgatgtatggggatcagacctaagaagccaagttcatactctgtgatccttctgtgatctgcacagagctggttgttacaccagtgggcacaagatccaagtgtggcc

SEQ ID NO: 447813 - DNA, 612 bp, Homo sapiens
aaaaataataaaaatcagagcaaaatggacactaaaaaaatgraaaatatcaataaaacaaaaatgttattttgaaaaggtaaaaggataagttgctagctaaactaagaaaaaataacatactaaataactaaaatcagatgtgtaggaggagacatttcaactggtatcacagaaatataagggagtatcagtgactattatagacaactatatgctaacaaattggaaaacctagaggaaatgaataaattaatagacaaatacaacctaccaagattgtactagaaaagaatatataatctgaacagaccaatagtgagtgatagaattgaatcagaaataataattcttcccctctcaaaaaaaaataaaagttcaggaccaaatgcctttattgctgaattctattaaacttaaaaagaagaaccaacaccaattcctctcaaacaattccaaaaaaataaagaggaggaaattcttaactcattcagcaagcctggcataaccctagaatactaaaatctgtagtgggcaaaaaaaaaagaaaaaagaaaaaaacaagaaagaaaactgcaggacaatctcctagacgaccatagatgtaaaaat

SEQ ID NO: 447814 - DNA, 612 bp, Homo sapiens
aaaaataataaaaatcagagcaaaatggacactaaaaaaatggaaaatatcaataaaacaaaaatgttattttgaaaaggtaaaaggataagttgctagctaaactaagaaaaaataacatactaaataactaaaatcagatgtgtaggaggagacatttcaactggtatcacagaaatataagggagtatcagtgactattatagacaactatatgctaacaaattggaaaacctagaggaaatgaataaattaatagacaaatacaacctaccaagattgtactagaaaagaatatataatctgaacagaccaatagtgagtgatagaattgaatcagaaataataattcttcccctctcaaaaaaaaataaaagttcaggaccaaatrcctttattgctgaattctattaaacttaaaaagaagaaccaacaccaattcctctcaaacaattccaaaaaaataaagaggaggaaattcttaactcattcagcaagcctggcataaccctagaatactaaaatctgtagtgggcaaaaaaaaaagaaaaaagaaaaaaacaagaaagaaaactgcaggacaatctcctagacgaccatagatgtaaaaat

SEQ ID NO: 447815 - DNA, 512 bp, Homo sapiens
gtgaaatgcaggtctagatccacccaggaagatgcttgagttggagatagagatcagtgtcatccctgagtgggtggtcattgaagctcagcttgctgctcctctcttttcccagagctttcaaaacaagttaccctagtgaattaatcaatagcatcacctgcccaaaactggtcactaatattactttacacctggttagcccttcatggtataactgtactgccatatatgtatctcacttgatcctcatggcaattctaatttcataaacaagaaagctatcatcctcactctacagatgaagtacccagcctaaggtgaccacaatagcagagggtagtgccggggcagatcatgggtcctctgactgccactcctctctagcaaaggtctctttgcaawgttttcttttacctggactgcatttttaaaacagcagttacaaatttcgtctcagctgggttcatgaatctttgaattctaagttggagtgaaatagtggggatgat

SEQ ID NO: 447816 - DNA, 575 bp, Homo sapiens
atttcatgtacatatctctgatgggtatgtgtgtactggggtggcagggagtgagagaaagagagaatttcaaaactctttacgcttaagtccatacataatttgttgactgtttcttcaatcctcagtgattcatggtaggggggtaacaggaaggcgataggtaatgcccacagattatacctaacttcattttagtcattatgttgacctctttcttgtttcatcagaattactaatagataaagagatttactgggttttctcagttcctgcttctgtgtttcctctatagaggtttaggcaagagaaagargcaaaaagttattagcagttgaaagaaggaggccaacagcccaaacagtccacacaagaaatgagttcctaaataaatatgagcttgggtgttacaggcaactaagtgattcctgaagatgttttgcttttcttcaagaaaaaagttcaaaataaatggaagatagttatctttttaacaccattataatagttcctgataggaagcggtggttaaagcataatagaccaacagaaatatatcatgctacagtctttga

SEQ ID NO: 447817 - DNA, 575 bp, Homo sapiens
atttcatgtacatatctctgatgggtatgtgtgtactggggtggcagggagtgagagaaagagagaatttcaaaactctttacgcttaagtccatacataatttgttgactgtttcttcaatcctcagtgattcatggtaggggggtaacaggaaggcgataggtaatgcccacagattatacctaacttcattttagtcattatgttgacctctttcttgtttcatcagaattactaatagataaagagatttactgggttttctcagttcctgcttctgtgtttcctctatagaggtttaggcaagagaaagaagcaaaaagttattagcagttgaaagaaggaggccaacagcccaaacagtccacacargaaatgagttcctaaataaatatgagcttgggtgttacaggcaactaagtgattcctgaagatgttttgcttttcttcaagaaaaaagttcaaaataaatggaagatagttatctttttaacaccattataatagttcctgataggaagcggtggttaaagcataatagaccaacagaaatatatcatgctacagtctttga

SEQ ID NO: 447818 - DNA, 595 bp, Homo sapiens
gacgccactgtaggcctcagcctgcctgcacccaggtgttcattaaacagcatgttgttccacactgactcctgcctattggtgtcctcgcagggttcaaactgataaaagaaccttacatctggtgctgaaacccgggaggggctccagtccatgtccctcatggacctacccctccattccagagagcagacaaaggaagctcctcagtctccagttgcctctctgtgcatgcacctcagtcactgctctcacctactggtaagttttcccaggagcccagttaacaggtaaaaatctgcacagcctctcttggtttctccagtctgaaaacccaacattggtccaagaaggctctggcatgtgccaggcactcgctgatcatctggtcttagggggatgcctctaagccatttgatcctgttccaggagcaaaaaacgcagtagtaacaatcgctccttttatcgtatccctccagccatccaggacagtctccttttccctgttctcccaagcctaccctccattatggggaaactcgyggtcctccattccaaaaaacagccctctagcctgcctcataaaaaacccgca

SEQ ID NO: 447819 - DNA, 566 bp, Homo sapiens
aaaaacatagatatatttgtatattycatgttctgcaagaatacactaaaattaaaacaaaacattttgtagcttctggaggttgctacgaactcactcattattctgcaaattgaatcaaatattcatcttttcccttataacctgtatgtgaggataagcacagttgatgaaggaaagttctttacagaaaaatcacagtgaataaatgcagaacaatgacaaaattagaaaaatcactaatttgattccttaataaaataatggatcttggcaatgattatcaatggctgcttaaaatcattaggttaaaaagttgatctattttctcaaaacttctcacttcatttcattcatttgatcttcagtcactgatatcctttcttccagttgaatgaatcggctactgaagcttgtgcatttgtcatgtagttctcataccatggttttcagctccatcaggtcatttaaggacttctctacactggttattgtagttagccatttgtctaagaaatgagaagagacgtttagagaaaaaagagtaaaaagaaaggagcaaagcc

SEQ ID NO: 447820 - DNA, 566 bp, Homo sapiens
aaaaacatagatatatttgtatatttcatgttctgcaagaatacactaaaattaaaacaaaacattttgtagcttctggaggttgctacgaactcactcattattctgcaaattgaatcaaatattcatcttttcccttataacctgtatgtgaggataagcacagttgatgaaggaaagttctttacagaaaaatcacagtgaataaatgcagaacaatgacaaaattagaaaaatcactaatttgattccttaataaaataatggatcttggcaatgattatcaatggctgcttaaaatcattaggttaaaaagttgatctattttctcaaaacttctcacttcatttcattcatttgatcttcagtcactgatatcctttcttccagttgaatgaatcggctactgaagcttgtgcatttgtcatgtagttctcataccatggttttcagctccrtcaggtcatttaaggacttctctacactggttattgtagttagccatttgtctaagaaatgagaagagacgtttagagaaaaaagagtaaaaagaaaggagcaaagcc

SEQ ID NO: 447821 - DNA, 560 bp, Homo sapiens
tagtagtggcttattcattttgaatgtgaactcccatgaggtagggatttttatctgcttttgttcatggctatatttctagggccttgatagtgcctggagcacagcaaacactcaataaatagctcaaataattctctgcagatccacctaaagagctgtagccactgtgcctccgctctacattctacataaaaacacactggaaggccacaatgccagtaattacaaatcaaaaagcttagaaacagtaatgacaacaattaacatttattgggtacttctttctttcatcattcatccatttactgagcaagtatttactgagcatgtattacgtgcaagacttttttgtttaaattttttcacaggaatattttgatatattgaagactagtattgttttcatattttgtataaaataagctttaatataaattatgaagtataagtttataatataaattaagatatttagaagttttatcagtaagaaaagaatttatrtgttagcaatataattattacctacttcatcagtatggcattcctagatgttg

SEQ ID NO: 447822 - DNA, 540 bp, Homo sapiens
cccaggctggcactgagtatckgtggctcttccaggcacatggtgcaagctgtcaatgcatctaccattctggggtctggaggacttgtggccctcttctcacagctccactaggcagtgctccaatgggactctatgtggggtctccaaccccatatttctcttccacactgccccagcagaggttccccataagggctccacccccgcagcaaacttctgcctggacatccaggcacttccacacatcccctgaaatctaggcagaggttcccaagcctcaattcttgacttgtgtgcacccacaggcccaacaccacatggaagttgccaaggcttggggcatccaccctctgaagaaatggcctgagctatgcattggccccttttagccacaactagaatgcagggcaccaagtcccaagactgtacaaagcagcaaggctctgggcccagcccacaaaaccactttttcctcctaggcctctgggccagtgatgggagggactgccatgaagacctctgacataccccagaaac

SEQ ID NO: 447823 - DNA, 524 bp, Homo sapiens
gaattcagaatgactttctacctaacattctaaaatggaatctacattacatttactgatttctcaacacacaaggaagagaactatttgtctcaggaatttccatgaaaattatcaacagtcatcttctccaggacaaatattgttcagagattccaaggcactccactgcttttgtgttgtgataattgtgtaacaaaaaataagtgttgaacaaaaatgtaataattttatttagcataaaaagtcctgctttataagaaatgctatcattttattggaccaaatgtattcttgtatagaaaarcagacatttcacaataaaatgttttcagtaatgtggaatatactgttaactgacaaatgtacttctgtacaacttgtcagtgttgggtgcaacaaagacacatattctgtatacatgtttaaggatcaaatcattttaaagataacttaaaaattcttcaaactgaatgataagagtgacactatctatcaaaacctctgggatacagcaaaggtgg

SEQ ID NO: 447824 - DNA, 534 bp, Homo sapiens
aatacaggaggaggctgctatagattacaagaaacatatccaccaaatgaaatatgtggatttcattttgatcccaatatgaacaagtcatttgtaaagacattgtaaacattattgatacttaacagtgatacaatattaacaacattgctaattacaaccttaggctgcttattcagaaaaggccaaagaatcaattggaaaactgaaaaaattgattagtaatgtgactaaatacaagataaaacttttacattcrtatatactattaattactagaggttaataattcttaatatctacacgaaaatccaaaatactttgaattaattatacaaagaaatgtgtgtaagtggtttgaagaaaactacagaatttatagaatttatactgataattagaaatacttacataaattgtctttatactctctcttccaattgcctcaaaaatcattacacattaagaatgcgcttacccattttgtaatacactctcttcattaccttcttaccagtctattaatgaataaca

SEQ ID NO: 447825 - DNA, 534 bp, Homo sapiens
aatacaggaggaggctgctatagattacaagaaacatatccaccaaatgaaatatgtggatttcattttgatcccaatatgaacaagtcatttgtaaagacattgtaaacattattgatacttaacagtgatacaatattaacaacattgctaattacaaccttaggctgcttattcagaaaaggccaaagaatcaattggaaaactgaaaaaattgattagtaatgtgactaaatacaagataaaacttttacattcatatatactattaattactagaggttaataattcttaatatctacacgaaaatccaaaatactttgaattaattatacaaagaaatgtgtgtaagtggtttgaagaaaactacagaatttatagaatttatactgataattagaaatacttacataaattgtctttatactctctcttccaattgcctcaaaaatcattacacattaagaatgcgcttacccattttgtaatacactctsttcattaccttcttaccagtctattaatgaataaca

SEQ ID NO: 447826 - DNA, 555 bp, Homo sapiens
ttgcagctaccagaagggccagaagtagaggcattggcaacttatctcagggtttcagcaatggagtgggtttgagattgtaactacatctctaacagaatgactcaaacatgtggtacagctttcccctttccttatttctgaccctcagtatgaaatttcctaagtctgtttcattcttagctctccttcaaagctactctgtcagaaattgaatggtatagcaatccagataggtaccccaatgtcctgaagaagttaaagagcctgtgaaaagcatttgacctatgaccagatgaaagcatttgagaatgcttgcacatgaagataggataggtgggggaactggggtaagctgggaagagttagtgtttaagctccaactaagtgccaggcattttacatatattatttaattctcacataacttaaaattagtttctgtgatcacaaattaaaacactggggcttgaataakgtatggactttgtcccaaatctaacagctagtaaattacagagccataatttgaatgtctatttgcctccaaaaccc

SEQ ID NO: 447827 - DNA, 555 bp, Homo sapiens
ttgcagctaccagaagggccagaagtagaggcattggcaacttatctcagggtttcagcaatggagtgggtttgagattgtaactacatctctaacagaatgactcaaacatgtggtacagctttcccctttccttatttctgaccctcagtatgaaatttcctaagtctgtttcattcttagctctccttcaaagctactctgtcagaaattgaatggtatagcaatccagataggtaccccaatgtcctgaagaagttaaagagcctgtgaaaagcatttgacctatgaccagatgaaagcatttgagaatgcttgcacatgaagataggataggtgggggaactggggtaagctgggaagagttagtgtttaagctccaactaagtgccaggcattttacatatattatttaattctcacataacttaaaattagtttctgtgatcacaaattaaaacactggggcttgaataaggtatggactttgtcccaaayctaacagctagtaaattacagagccataatttgaatgtctatttgcctccaaaaccc

SEQ ID NO: 447828 - DNA, 397 bp, Homo sapiens
ttctcagtggcacacacacagacacagatggacacacatacatacacacacacacacacacacacacacaaaacacatatacatattgtacatagartgataattgtgtatattggatcgtattagatctatttttccaaaatcagcttttaaaaaaacttaacagcatatttaacttttaagtgcatatccagaacaatctgtcatctttcttcccaaaaataaaagaaacaatgttatatataacattttcttgtcttgatagttatatgagtggatatttcagttttggacttaaaatctgttttagcaacagtaatggaaatggtcaggccataagatgaaatataacttcattggaatgatcgttttgctgatctaattggttacaggaaag

SEQ ID NO: 447829 - DNA, 397 bp, Homo sapiens
ttctcagtggcacacacacagacacagatggacacacatacatacacacacacacacacacacacacacaaaacacatatacatattgtacatagagtgataattgtgtatattggatcgtattagatctattkttccaaaatcagcttttaaaaaaacttaacagcatatttaacttttaagtgcatatccagaacaatctgtcatctttcttcccaaaaataaaagaaacaatgttatatataacattttcttgtcttgatagttatatgagtggatatttcagttttggacttaaaatctgttttagcaacagtaatggaaatggtcaggccataagatgaaatataacttcattggaatgatcgttttgctgatctaattggttacaggaaag

SEQ ID NO: 447830 - DNA, 397 bp, Homo sapiens
ttctcagtggcacacacacagacacagatggacacacatacatacacacacacacacacacacacacacaaaacacatatacatattgtacatagagtgataattgtgtatattggatcgtattagatctatttttccaaaatcagcttttaaaaaaacttaacagcatatttaacttttaagtgcatatccagaacaatctgtcatctttcttcccaaaaataaaagaaacaatgttatatataacattttcttgtcttgatagttatatgagtggatatttcagttttggacttaaaatmtgttttagcaacagtaatggaaatggtcaggccataagatgaaatataacttcattggaatgatcgttttgctgatctaattggttacaggaaag

SEQ ID NO: 447831 - DNA, 619 bp, Homo sapiens
catttcttttaatttaggcaaatgtcatagtgactgactggtatggggcacatggagatgatccatacaccctacaatacagagggtgtggaaaagagggaaaatacattcatttcacacctaatttcctactgaatgataacttaacagctggctacggatcacgaggtaagtgggaccaataaaacaatagccattggacaatactacttataatattctgtgcttggtgctgaaagggactcactcacaaaacctgaaacttgtcaaggacttaccactcaaagkgggagataggtcatatgcccatgcaaagatgaggggctaaagtgaactcgaaagagtttagcaccagattagtggcccagagaggagtgctataagaattcaatcaaggaaacgtcatttagagtcaagggtggtcagaaatgtcctcacaaaggaaaaggtcttcaagattgaacatcattttgataaatggaaagaagggagaaaatagtgggaagactatgaagaaaactgtggcagcagaaaaattaaaggcatataggagagacagagaccctgatgatggtgcagggagactgtgggcagtgggagaaaacgttgaaacatacat

SEQ ID NO: 447832 - DNA, 437 bp, Homo sapiens
gataacaaaccatgtatgtgtatatatacacataatcttactcttaaaaacacaacaaaacaatctccctcttcccttagcacaatattgtattaggaaaacagccagaagaagttatcatgatcagcctactccttggaataatatttaatgaccactgcacctttatttgttgatcagtcaayatatatttttctacctcaaatattgatctctgtaaaaatagataaggggataaacaacttaaatttacttcctgatcccccacccccactcaatttggaaatatagatataatttacagaaatatagatataattcactaaatgatactgaacctatgtcaataccccacttaaaaatatggtttgcattgctaagtaatgcatcaccatctattcccagtggctctattcctacaaagagtcgatacttcc

SEQ ID NO: 447833 - DNA, 559 bp, Homo sapiens
ctggttttgctttgcgttgtttaactctttttcttccatttcatgactatggttatgggattgtaaaacttttctgacaagatatttatgagtaggtctttcaaaacatcgtgaagatagtacctagtcataaataatgtggatcgaatgcattaggttagtatcagatattaaagctataaataagaaacataatgtatgggacaagaaatatgaaaaattgtcttaaagttacaaaataacttctagtcctgactaaaaccagaatgaaataaaatagcatgtcaatccaaggggcattggtcagccatggacacaaagagaaaactccacagaggcaygtgtgggctgtacccccagatctgtgaagagatgacccacagatgtgacttacaggcttttgtgaactttgagagatatatcaggtcatgaaggctgatgctactaacctctgaatcacctaactccctcgtttctgattccatgctctctgactatgcatctggtgagaattggctgttccaggctgcttcatccagagagaaaataagttggccag

SEQ ID NO: 447834 - DNA, 517 bp, Homo sapiens
aattatcttataatttaaaacttgaaacatgggaagagaaggaatcctgcaagagtgtgtcattccaagggcatacttacagaagataaactttgcatgaacattattgatgcagttgcattttgggtgctattgtagataaaggtgcatccttctttaaaaagcttactaataatacagttttcttgggggcaaggacctttttcacacacaaaaatgcctgtgatgtcagatgaacacctaaaaatggaaagagaaactgggaattaggtctattttagaaacacttatgtttcttgttgactagcttatataattrttacaaggattgtagcctgctagatatatacaaaactttaaaaactgctctactggcggggtgctgtggctcacacctgtaatcccattactttgggaggctgaggctggtggatcacctgaggtcaagagtttaagaccagcctagccaacatggtgaaaccctgtctctactaaaaatacaaaaattagccaggcg

SEQ ID NO: 447835 - DNA, 585 bp, Homo sapiens
taagccacttggtatatgaacgttgtcagaatcaaaatcgagtcacttgtgtgaaaacaagaagaagaaaaaaactctgacaaatagtgctgaggaagaccatgaagagaagattctgatacataaatgcctgataacagaaactgtcacagaagactgccaaactgcaaccttggacaacggcccacaatcgtatacaaaaaatacttctgcaaaggacatttgcccaacaactgcctgcccaacctcaaactagcatgatcctttttattaatccttggattcatagccaaggataattatctcaaaacaattgtgcaattcttatctttcctttgaaaatctttgtcctcctttactttcccgaatacacacatagtttactatggtatgtgaattcccattgcaatgccttattcctgaataaatacmattttctttagagagcctctctctgatatttaaattaacaggtatatggagtgcagtgtggttctaaatctttttccctagattgctaacaaattgcctccttacttacttttagctattcctgtcaggggaagtctcttttttttttttttt

SEQ ID NO: 447836 - DNA, 607 bp, Homo sapiens
tccccctcctcttcccatattcatttttctttttcctttaaataggccactcgaagctgcactgtctaatttttcataggtgatcgactgctgagcgggggcttaggtagacagagggaaggtgctgataagccagtgcacggattctattagggaaatgcggtggtaattaatgaatcctgccagtaatygggaaggtgtgagtccccgtaatatcgtaatgatagtcatctgtctgcgaaccccccatcactctgagagatcgctcatcgctctgtgatctcagactcttagccatgcaaatctccctgacaggacgctatgtctctgtctccctaattgggcattctagagttgtttatggatattgccggcatttaggcctcagttggaggttgttcaaaaagcgttagcaaacttgccttaacaacattgtcaaatatgtattcccccgtttcgatatctgtttttaagccggcagaggtttgtgatgaaattaagtgatgcattgtgtgcacttgagctctgggcgtgattgttattaaaccgtttttgaagtaaaaaccaatttgcagtaatatctcatcccgcttaagatcaaacttca

SEQ ID NO: 447837 - DNA, 574 bp, Homo sapiens
gactgtccctcaatcattccatgtcttttatgagcttgacacttctgataaacactggttggtgattttgtgaaatgtctcccactttgggtttatctgatgtcctctcatgattggattgatgctatggatgtgtggcaastttaccaatgatgtgctctctcctcggtgcctcatattgttactgaaacaccaggggttccatctgtgtcctgttgctcactgcaaattaaagccaaatcaccaagacagtgagtattgccagggaagaagaaatttttttttttttttttttgagacggagtctcactctgttgcccaggctggagtgcagaggcgtgatctcggctcacggcaagctctgcctccctggttcacgccattctcctgcctcagcctcccgagtagctgggactacaggcacctgccaccatgccccgctacttttttgtatttttagtagagatggggtttcaccgtgttagccaggatggtctcgatctgacctcgtgatccgcccacctcggcctcctggaagaagactttaatcgggtgctgcagctgaggaaagggg

SEQ ID NO: 447838 - DNA, 574 bp, Homo sapiens
gactgtccctcaatcattccatgtcttttatgagcttgacacttctgataaacactggttggtgattttgtgaaatgtctcccactttgggtttatctgatgtcctctcatgattggattgatgctatggatgtgtggcaagtttaccaatgatgtgctctctcctcggtgcctcatattgttactgaaacaccaggggttccatctgtgtcctgttgctcactgcaaattaaagccaaatcaccaagacagtgagtattgccagggaagaagaaatttttttttttttttttttgagacggagtctcactctgttgcccaggctggagtgcagaggcgtgatctcggctcacggcaagctctgcctccctggttcacgccattctcctgcctcagcctcccgagtagctgggactacaggcrcctgccaccatgccccgctacttttttgtatttttagtagagatggggtttcaccgtgttagccaggatggtctcgatctgacctcgtgatccgcccacctcggcctcctggaagaagactttaatcgggtgctgcagctgaggaaagggg

SEQ ID NO: 447839 - DNA, 593 bp, Homo sapiens
ctaatgaaggggacaggagcagcttcagctgcagttcatgcaatgggtctaggcaagtggcttagggctgaactgtgcacagtgtaaggggcttagaggacctactttatgtggcccaggggccagacttagagttcaagggagaatttgagcccatctcttattagttacaggaatttaacaccatctcttattacctacaagaactagagcaggccargcgtggtggctcacgcctgtagtcccagcactttgggaggccgaggcaggtaaatcacttgaggtcaggagttcaagaccagcctggccaacgtggtgaaaccccatctgtactaaaaatacaaaaattagctgggcatggtaaagtgtacctgtaatcccagctactcgggaggctgaggcagagaattgcttgaacctgggaggtggagcctgcagtgagctaagattgagccaccgcactctagcctgggtgacacagtgagactctgtctcaaaaaaaaaaaaaaaaaggaactagaacaaatcaatcactgtatctctctgagcccactgagcccattgacttcacatgcaaaatggggttatatatc

SEQ ID NO: 447840 - DNA, 462 bp, Homo sapiens
tatcagataaatacataaacatttgccaattcagtttggtgttaccaagaagtacaaaatgttgtaagggtctatattaatgaggaagccttgccttagaagtcctgggagtcagggaagaccaccctaagaaattgaagtttggggagaagttagccaagtgagaagagggaggaagaacattccagacagggataccaatttgcactaaagctctaaagcataacggacttggtgtgcttgaagaacagaaagaaatttgtcatgtcatgcatarggtggccaactgtcctggtttgctctggactaagaagtttcccaggatgtggggctttctgtgctaaaatcgggaaagtgttggcaaactggaacagatggaccatccttgtaataagcaataagtacagtgatgttaaaccaagctggagagatgagcaggggccatttatctgaatcaccact

SEQ ID NO: 447841 - DNA, 621 bp, Homo sapiens
aaggaatgtgacctctgaggtttaaggatagacctgctatctcattctttagatgtatgtaaaaggtggtcaatggacaaggatgtcagaacagaacatagaatcccatgaaccgatgtccccagttgaggtttggaataaggcaaagcaggaacaagtgactgtctcaaagaaaacaataattactcaagtgtttacatgtgcttatcagttttattatttttatgtgtactattaaaacaaaataagttgtctataaattaagaaaactggcttaaggttgctacagttacaactctccttgcaaaaactcaartcactaactcaccaaatatctgctaaatatctgccatgtgcagttactgttctggatgttggagatgtgataatgaactagacccatccagtcctgctcttcaggaatgtggtttaggtcaaaaggcaattgattagagcctgccttttcccacttgcttgccatgtgcttttaacagttgcctgggccttaatctccttttcctggccttatttatatagcaatgacaaacacacatgttcacttaccagccccacctcttgcattcaaagcaaacatcactaatcaatctgtctcaaaaaaaa

SEQ ID NO: 447842 - DNA, 617 bp, Homo sapiens
gtttgattttaattgcaggacttctcagagtctttaatatgttaatgtgtgttgtgaatttccaagacaggaactataataaaatcattattttctttctccttactttcattcccaggacaaactttgccctaagagaaactcagttagaaaagtctgggtgttgatttaatgtggagccacttcaaggaagtgataataaaacaaagttccatgaaattgatatcayattaatatcatggtcaaagaggagaaaatgacagcctgcagtaggcctggtgtgaaacagtccttcagccaggacttcactcttgtttcacagtgtaatgccattgcagtttccaaaagtccaccaatttgtggtctccacttttcctttgacccatctctcttcttccaaccacatgatcaccctcctttaagcttctagacctgccagaggatctcaaccaactcaaaacaaagattgccagggaccctttttctctcaagtgcacatctaatgtcaaagggaaatggttctctccactgatggtgatcaaggcattcacctgtaatctaggtagggtggtgcctgtcatgagcttggaagcttcagagtaggaaggactaaattt

SEQ ID NO: 447843 - DNA, 523 bp, Homo sapiens
tgtttctgtgtcctcagtcattgaattagggcccaccctaattgagtctgaccycatcttaattacaaatgggaagaccctatttccaaataaggtcacattctgaggttccaaacggccatcaattttgaggtgactctcttcagtcagtactcagttcaggccgagtgcagtggctcatgccgtaatcctagcactttgggaagtcaaggcaggcggaccacttgaggtcagaagtttgcgaccagcctggccaacatggtgaaaccccatctctactgaaaaaagaaaaaattagccaggcgtagtgtcacgcacctgtagtcccagccactcgggaggctgagataggaaaatcgcctgaacccaagaagcagaggttgcagtgatcggagatcacaccactacactccagcctgggtgacagagtgagatcttgtctcaaaaaaataaagaaggaagaaaggaaggaaggaaagaaggaaggaagggagggaggaagggaaggaaggacccagtttat

SEQ ID NO: 447844 - DNA, 637 bp, Homo sapiens
ctttcagcaaaagcaacacggaatattttaaaccatggcacatgctctaattttcagagcatgagagagaataactgggttttgtattttatacaaattaattattaatagtcraataacatttattatttttatgctcaataattaatgtcaaaactgttgttgaaaaagtatttctcagattttttccagttcataggaggtcactatcaacatggataagtttgcccattcttaatgcaaatactttgtaagaattcccaaatacctatctccatgagtaaactaagaagcattcaaatcaactttttgtgtttcatggaaataggaattaaaaatgcttagatttttgcatgccctttactaaataataatttgaaaataaagtttaaattagtagtgttttatattgtgtttgccatttagtaagccacttgagaaactttgttttctcttgttgtatctccaggagcaaacagcttcattgataagtatatattttaaatgtgaatggtagaaatggaaagtaataaaaaagagatcacacatagatagctttagtctctttttattaaattatttaagaaatatgatattactcagaggactaaatgtataaacacgaatggcttaccac

SEQ ID NO: 447845 - DNA, 637 bp, Homo sapiens
ctttcagcaaaagcaacacggaatattttaaaccatggcacatgctctaattttcagagcatgagagagaataactgggttttgtattttatacaaattaattattaatagtcaartaacatttattatttttatgctcaataattaatgtcaaaactgttgttgaaaaagtatttctcagattttttccagttcataggaggtcactatcaacatggataagtttgcccattcttaatgcaaatactttgtaagaattcccaaatacctatctccatgagtaaactaagaagcattcaaatcaactttttgtgtttcatggaaataggaattaaaaatgcttagatttttgcatgccctttactaaataataatttgaaaataaagtttaaattagtagtgttttatattgtgtttgccatttagtaagccacttgagaaactttgttttctcttgttgtatctccaggagcaaacagcttcattgataagtatatattttaaatgtgaatggtagaaatggaaagtaataaaaaagagatcacacatagatagctttagtctctttttattaaattatttaagaaatatgatattactcagaggactaaatgtataaacacgaatggcttaccac

SEQ ID NO: 447846 - DNA, 534 bp, Homo sapiens
gcagcatttaaatgcaaatatacatttgtctaatcccaaagcccatgcatttaattactatgcaatatcartaatcatgtttggtaggaaagaatattaaaggaaaactattaactttgtcagattttattagtatagaattaagggaaaacaaaatgagttttaaatggtgtgaattaatgaaccagtgaagggtagtcaacattacaggagtatgaaaagcgcattatagttgtgatcaataaactagcagagcattatgtttacaggagcagttacattagaaaaagaataattcgaaagttgttttatgaaatttcagcctctcttccagaacagatgtgattgctaaaggaaataatataatctaattatattattaagtaatgaatatagaagagtaatcaataatcactctgaatttacccagtttatctatgaaatagatatgattaagatactcatgacaaatacaaattaatgtttatactcttataagtatcttaaagaaggcaaaaacaaaattcaagttat

SEQ ID NO: 447847 - DNA, 445 bp, Homo sapiens
ctatttatgaaatctattttgtgttggtgcttacagcaactttataataagccttaatatcagataataaaatcaatggaatattttttctttattgtcaagcttgtgttggctattttaggtgatagaaatttctatattcattttgcaatcaccttgaaaagttttatagaacagcctgctgagaatttgattccaagtgcttttcaattgggggaattaatattttaccaatttttagtcttcccactaaatgcayataatttatatcttatttattcaggtcttctttaatttttctcactgatatttttagttttcaaagtacaattcttgagcatatttcattgtttatttcatatattctactgttactttcactgttttctaaattttaatttatgatagtttttgtggcaagaacaaagaaatccagtggccctcc

SEQ ID NO: 447848 - DNA, 568 bp, Homo sapiens
cttggttctcagaagtttctctaaaaatctgggtctgatgcactgtaagtttggcaaaactgcaatctgattgcgttcatgatgctgctgtggatattcaaccttagggccagtctgtacactgataaatgtatatgattactctcctcagtgggcgaaacccaaggtcatttttacagccctgggcattaccactttcataaacttgtaatgtttttactgacttttggaccgtagatacattctcagctatttgttctgccacttgggaaaactacagacagcctgacagattaaagtcactcctctttgggatcagaattttataaacaaattgtggcttctaatttaaccatctgtgacactcagatgcattcccaaaataagagcctactctctgatgaatctgtctggaactcagttacagattgagcctagaatactcagatggctactttgckgcttgggcccaacattgtacaaggcatagaaacagatgcactgttatagactaggaacaaataaaggactccatgtttctgatgaagtgtttaccaccatattcaca

SEQ ID NO: 447849 - DNA, 586 bp, Homo sapiens
taagcatgatggactagagatgaaattcaatataatctggattaatgtagtgccacatccaagtggggttagttagaaaactcaagaagtaacttctaatcaattgttgtagtggacttttattgaagtaacataaggagagtygatactaccaagtatctgtcccagtgttctctgagaattcctgatcaaaacagggttagatttctgccaactatgctttcactatataattcctctataggagttgttaaattatattgtatttctctctgtctttgttgttttttagcatgtggttgtgaagttaaatgtagagtgagtgccttattattaaatgattctttctgaaaaactctaccttggatgactgtacttcattccagacgaggttattaatattgtagatgccattaaaatggtttgaattcataaattaatagtaaatcaatttcctgttgccatctatattgatttcaaaaattattcccaaaacctttagtcaaaatttcaagtaaaataattctgatgtgtttatatggtgcctttattgactcttaacaatacagtatgtgcatcactgcaa

SEQ ID NO: 447850 - DNA, 586 bp, Homo sapiens
taagcatgatggactagagatgaaattcaatataatctggattaatgtagtgccacatccaagtggggttagttagaaaactcaagaagtaacttctaatcaattgttgtagtggacttttattgaagtaacataaggagagtcgatactaccaagtatctgtcccagtgttctctgagaattcctgaycaaaacagggttagatttctgccaactatgctttcactatataattcctctataggagttgttaaattatattgtatttctctctgtctttgttgttttttagcatgtggttgtgaagttaaatgtagagtgagtgccttattattaaatgattctttctgaaaaactctaccttggatgactgtacttcattccagacgaggttattaatattgtagatgccattaaaatggtttgaattcataaattaatagtaaatcaatttcctgttgccatctatattgatttcaaaaattattcccaaaacctttagtcaaaatttcaagtaaaataattctgatgtgtttatatggtgcctttattgactcttaacaatacagtatgtgcatcactgcaa

SEQ ID NO: 447851 - DNA, 541 bp, Homo sapiens
aatttagaaattagacacattcttacagtattgttggaagtacacattgataattctttcttggaaatgcttttataagatatatatgaagatccataagaaattggcccattgattctatgtctagttaagaactgaaaaaaggaaacagacaaaaagttagccatttatagcacagtgtctgagaagacaactttgaacaaagccaacaataartgattaaataaaatttgaatacccctaagacaaccatctcaggatcactttttcagaaaggtttacccttactaccctgtctaaaatttctctccgccctttttctacatcatctgttcttgatatctctgtttgccctatgtcttgttcctaagaaacagacctgtccttctcctgctgtgcactatttcccaagatgaatagttttctcccatagtaaacccagctgacttctgcctgaatttggtcaatgggagaccaacaagggaaactgaaggatataagaagggaggagcccatggatttctccctctctctttgcctt

SEQ ID NO: 447852 - DNA, 541 bp, Homo sapiens
aatttagaaattagacacattcttacagtattgttggaagtacacattgataattctttcttggaaatgcttttataagatatatatgaagatccataagaaattggcccattgattctatgtctagttaagaactgaaaaaaggaaacagacaaaaagttagccatttatagcacagtgtctgagaagacaactttgaacaaagccaacaataagtgattaaataaaatttgaatacccctaagacaaccatctcaggatcactttttcagaaaggtttacccttactaccctgtctaaaatttctctccgccctttttctacatcatctgttcttgatatctctgtttgccctrtgtcttgttcctaagaaacagacctgtccttctcctgctgtgcactatttcccaagatgaatagttttctcccatagtaaacccagctgacttctgcctgaatttggtcaatgggagaccaacaagggaaactgaaggatataagaagggaggagcccatggatttctccctctctctttgcctt

SEQ ID NO: 447853 - DNA, 523 bp, Homo sapiens
tgtgtctcatgtatgctgatctctctggcgattctttctatttgtatattctctattttcctgctccgctgtgttattccaaatgctttaaggagttcttgagccctctaagggctattctggttagtgaatgctgcctgtatttgttttttgtttgattgttttttgggggaattgctatttgtttcctccaaaaatcatgttgaaatatgactgccattgtggtggtgttgggaagtggcacctaatgtaatatgtttgagttatgggggtagatccctcattaatagattaatgccagtcatgggactggattagttactgggrgagtaaattgagacaaagtgagattcctcctcatgtttgccttgttgcacatgccactcacctttgtacttctcagccatgtgtgacacagcatgtggctcctaccagaagtctagcagatgctggtgccatgctcttacagttttcagccaccagaattgagagcaaaatatgtttttttctttataaattttct

SEQ ID NO: 447854 - DNA, 523 bp, Homo sapiens
tgtgtctcatgtatgctgatctctctggcgattctttctatttgtatattctctattttcctgctccgctgtgttattccaaatgctttaaggagttcttgagccctctaagggctattctggttagtgaatgctgcctgtatttgttttttgtttgattgttttttgggggaattgctatttgtttcctccaaaaatcatgttgaaatatgactgccattgtggtggtgttgggaagtggcacctaatgtaatatgtttgagttatgggggtagatccctcattaatagattaatgccagtcatgggactggattagttactgggagagtaaattgagacaaagtgagattcctcctcatgtttgccttgttgcacatgccactcacctttgtacttctcagccatgtgtgacacagcatgtgrctcctaccagaagtctagcagatgctggtgccatgctcttacagttttcagccaccagaattgagagcaaaatatgtttttttctttataaattttct

SEQ ID NO: 447855 - DNA, 319 bp, Homo sapiens
tgggcacatatgaaaccactacaagccccacagcttggctaaccctataatttgtcttccaaattgagacacttgcaagagttaaagtgggcacaattagaaattgttttgtratatgatattgaaatagagaacatcctagttaatgtagtaaattagggtcattccaccaaaagcctttctaactccagaagaggcagaatcaaagcccatttcagtgatatccaaagagaacctgaaatccatgacctataggatccattattttgccctaagtaaaattcttgacgtgttatttggcactacatccctagacact

SEQ ID NO: 447856 - DNA, 578 bp, Homo sapiens
aaacagtatggaggttcctcatagaactgaaaatagaactactccatgatccagcaatcctgctactggatttatccaaagaagggaaatcagaatgatgaagagatacttttcytcttacatttttaggtttatcaccttcatattgtcaaagcatgatgccaataacctatttaatttatgaagggcagataatacaggcagagattattttaacaaactattttaatgatgataataaatatcttaatattgcctaatgtagaatgtcccaaaacatatgtatcatgtaaacataattttctaaaaaaatgtgacttttttttcagatatcacacatttcaggaatgaaaattttgtatgcttaaaaatattttcattaatggaatttaggacaacacctaaacccaaatgttcaaattaatctttgaccatttatatgtataagtacttacctatgtacacatataaatgtataagtttatatatatataaatttgcatatgataaatcttcatatatttataaggtacttatagatctatacctacaaatatctatatatgctttatatactc

SEQ ID NO: 447857 - DNA, 578 bp, Homo sapiens
aaacagtatggaggttcctcatagaactgaaaatagaactactccatgatccagcaatcctgctactggatttatccaaagaagggaaatcagaatgatgaagagatacttttcctcttayatttttaggtttatcaccttcatattgtcaaagcatgatgccaataacctatttaatttatgaagggcagataatacaggcagagattattttaacaaactattttaatgatgataataaatatcttaatattgcctaatgtagaatgtcccaaaacatatgtatcatgtaaacataattttctaaaaaaatgtgacttttttttcagatatcacacatttcaggaatgaaaattttgtatgcttaaaaatattttcattaatggaatttaggacaacacctaaacccaaatgttcaaattaatctttgaccatttatatgtataagtacttacctatgtacacatataaatgtataagtttatatatatataaatttgcatatgataaatcttcatatatttataaggtacttatagatctatacctacaaatatctatatatgctttatatactc

SEQ ID NO: 447858 - DNA, 578 bp, Homo sapiens
aaacagtatggaggttcctcatagaactgaaaatagaactactccatgatccagcaatcctgctactggatttatccaaagaagggaaatcagaatgatgaagagatacttttcctcttacatttttaggtttatcaccttcatattgtcaaagcatgatgccaataacctatttaatttatgaagggcagataatacaggcagagattattttaacaaactattttaatgatgataataaatatcttaatattgcctaatgtagaatgtcccaaaacatatgtatcatgtaaacataattttctaaaaaaatgtgacttttttttcagatatcacacatttcaggaatgaaaattttgtatgcttaaaaatattttcattaatggaatttaggasaacacctaaacccaaatgttcaaattaatctttgaccatttatatgtataagtacttacctatgtacacatataaatgtataagtttatatatatataaatttgcatatgataaatcttcatatatttataaggtacttatagatctatacctacaaatatctatatatgctttatatactc

SEQ ID NO: 447859 - DNA, 583 bp, Homo sapiens
tgtacatttaacacatttataaatatgttaaaataaatttatagtaaaagtattataaatttacaaaattaaatgtttatttatattactttttattcccaaattcagtgaccattaagaacaagatatttatttttgttttaaatcaatgaatttattttttaataagaagtacaggattataaaaggatcaggctataagtaaactgttttaaaaaaaagaagtagcaaattaattcaaamtagccccctagaagtcatcagtaaaatcatttgacaagtaggattcaagacactcatatagataaatggagagaaagagagggaaattggcagatggcagaaaagttatcattaatgagaacaaaatatatgtatttaaaagtttacatattaattttcttgattatcagagtagataaataaacagaaagaattcccaaaatgtatgtaaacattgcttcaccagatagtctatctggttcttaaaatatattccaccaccataataaaaattattaaaagcatagattttataattttaatatattttatccagtttctatattaaatatttaaaata

SEQ ID NO: 447860 - DNA, 517 bp, Homo sapiens
tgtctgttcatgctctttgcccattttttttttttttgacggagtcttgctytgtggcccaggctggagtgcagtggtgtgatctctgctcattgcagcctccgcctcctgggtttgaactattcttctgcctcagcctcccaagtagctaggactacagttatgcaccaccacacctggctaatttttgtatttttttttttttttttttgtagtagagacagtgttttgccatgttggccaggctggtctcgaactcctgacctcaggtgatccacccactttggcctcccaaagtgaagggattacaggtgtgagccactgtgcctgacctctttgcctatttaaaaaaacagggttgtttttgtgttttgcatgttattttttttaagttccttatagattccagatagtagacctttattgaatgcctagtttgcaaatggtttctcccattctgtaggttgtctgtttactctgttaataatatattttgctgtgaggaagctctttagtt

SEQ ID NO: 447861 - DNA, 586 bp, Homo sapiens
aatcagtcttcatttttagaactaggacaaattttactacaatgtttgatattgaatatttatagtctatctctcaaaaataagctaagtaatgtatttacacatgcaattaaaaacattagtcataataaatattacatttcattatgaatgaaacctaatgactcatagtcttaccttgcagtaaggatccacttaaacattagtatcaacatgtagagaaccatttgcatttttaaatgtgccatttaactcattagtaaaaacaatggattgaattgtgtcctaccargattcataagtttaaaagataacaggcatgcatgatggctcatgcctgtaatcccagcgctttgggaagctgagtggggaggctcacttgaagccaagaatttgagatcagcccgggcaacagaatgagacctcatctctacaaaaaaataaagaatttgctgggtgcggtggtgtatgcctgtagtcctagttactctgaaggctgaggcaggaggattgcttgaacccaggaggttgaggtggcagtgagctaggatcccgcctctgtactccagcctgagcgacagagcgg

SEQ ID NO: 447862 - DNA, 556 bp, Homo sapiens
ccaggaataagcaatgcttcagttcaagtttgaagaaaagaaaaagtgaatgttccagtttaaaggtagtcagccaggaggaatttcctttaactcagggaagagttagtatttttgttccattcaggccttcaattaactggttgatgcctactcacattagrgaggacaatctaccttacttagtcttccaatttaagtgttaatctcatccaaaagcaccatcacagaaacatctagtttaatgtttgagcaaatatctggaaactccatggtccaatcaagtcgacacataaaatgagccatcacagcctgtatgttctagcaatttctgctaaatagtataagaagaaaaaaaattatttttagatatacataaaatgttagctttcaattgctgtgtaacagattaccatgttgagtggcttagaataacacacattagttgtttcataatctacttgagtcaggagcctgtgcacagctagaagggtcctctgcttgaagtattacacagttgcaattaaactgttgactgggctgtgttctcagctgg

SEQ ID NO: 447863 - DNA, 575 bp, Homo sapiens
tgcactcatattcctaattcaaaatcaggatctcaaatttgcagagccagaagttgtgaggattkaagcaaaaattctacaggtgagccatagggacttacgaagagcaggggcaatattactcctgaagtcacaaattctagtagtttgggacacagcactatattttagttcatatactgcatcttagaggaaaacatccaaacacacagggtcttgtttccagtctggcaaattaactcagattttataagacattctaccattttactaggttggctacttctaaatagtgagatatctaccacaaccaataagtctcaagattgtacattcatatcttatttgctagggtgctaaaatcatctgaatccgacttccacctggtggttgttggtggctttcatctgggctgtcaacttttctctacttggacttctctgtttctctccctgtaagctaatttgggctttcttatagcatagttgttgggttccaagagtgtgtgtcctgagaaaaagaaaggagagcaaaagctgtaatgatttttagtaccatgctttagacaatgttac

SEQ ID NO: 447864 - DNA, 575 bp, Homo sapiens
tgcactcatattcctaattcaaaatcaggatctcaaatttgcagagccagaagttgtgaggatttaagcaaaaattctacaggtgagccatagggacttacgaagagcaggggcaatattactcctgaagtcacaaattctagtagtttgggacacagcactatattttagttcatatactgcatcttagaggaaaacatccaaacacacagggtcttgtttccagtctggcaaattaactcagattttataagacattctaccattttactaggttggctacttctaaatagtgagatatctaccacaaccaataagtctcaagattgtacattcatatcttatttgctagggtgctaaaatcatctgaatccgacttccacctggtggttgttggtggctttcatctgggctgtcaacttttctctacttggacttctctgtttctctccctgtaagctaatttgggctttcttatagcatagttgttgggttccaagagtgtgtgtcctgagaaaaagaaaggagagcaaaagctgtaatratttttagtaccatgctttagacaatgttac

SEQ ID NO: 447865 - DNA, 553 bp, Homo sapiens
tcttctcttactcttgctgtttgaaatgccaagtgtaactgctgaatcttcagctataatcttgtactaagaggtaaatctgggaatagaaaataagaaagtacaggactatgattgagagtaactaatctatcttaccttcaagtggattaaaagtcttggattcatgattcctgtacttgtttgacaattcataaaaaatagccttctatcatttttacaacagtgctttttgagtatttttgtaatacatagtcaagcctagacttgctcatacataactttaaactaagtataaccaggycattatgtgagctcaataaacgaagacaaacttgcactagtaaagcacagatatccaccacccccgagctttgtgtttaagatcaagttaatgattctaaatctgtgataattattccatccttttctttcttacttctagtacactatttactgttctactttcaggattctctcactccaaaaacactgtggtgatggtaaattttgtgtgtcaagttgactgggccaagggataaccagaccaatg

SEQ ID NO: 447866 - DNA, 638 bp, Homo sapiens
ctcaaaaatgaaaaaaaaaaaaaaaagaatctggagattacaatgaaattcaaaatcccaaaggatagttaccacttttttcattaggaatagattcccaattatatcagctatcatttaaccatatagtttctattttctagtttaaataagcataaaatctattgatactacattcatacaaacgacaacaccaggcaaaaccagtatgagaaaattgcttacaaatattttagctttatctcagttaagaatagttaagtatctcactaaactacaattaggtcagattatgaaaaggtaagattattttcacttttgaaaatgattctaaaacatgaacttttaatttttcctaaggtgttgtgcrtaaaccaaagatgcatcacttaatttgtattatcttctctaatagaactaattaatacattatgtaatggtgagtaaactcagttaaatttatttacttaagaaaaaaaaattttatcctactgaaaaaacagataacaatgtgatttactaatagattcaacaaatatataaatgagatttccaaaagctaatttgtaacagatttggagatgaaaaaaaccttggacctaaacagacaatgcaaaatcaagaagcaacagcaccat

SEQ ID NO: 447867 - DNA, 569 bp, Homo sapiens
gccattttggaatataccaagcaagtatgagtacatacatacatataaaaatgtgcacgtatcaatggaaaaatatttttcatttgggttctaaatactaagtttgtgttatacatgtatgggtacaagtgtatgtctgtataagtattcagaaatatacatgtgcccatatacctataacacaatttatatgggaattcatgcactgaattttattgggactaacttcacagtcatttttatacttattgaaagtttttgtaacatccttattgagatataattcacraaccacataatgcaagcctttaatatgtacaattcaatggtttttaacattcacagaaatgtacaaccatcaacacagtaaattttaaaacagtttgacaacttaaaaaaaaaaaaaactctgtacactttctgctctcaccccctattcctcaattcctccagccctatgtggtgaataacctgcagctcgtctgttgatatacatttgcctattgtggtcatttttatataaatggaaacatataacttttgtgattggcttttaacaattagcacag

SEQ ID NO: 447868 - DNA, 617 bp, Homo sapiens
ctagtgtgtgtgaagtgatatctcacagtttttattttcgttttcccctgactgatgatacgagcatctttttgtatgcttatcagctagttgtatatattccttggagaaatgtctattaggtcctctgcccatttctcagttgaattatttgtctttttattattaagttgtatttgttctttatatattctagatacaagtttgttattagataygtaacacacaaacatttcttcccattctgtgaattcttttcatttttttgattgtatcctttaaaagaaaagtatttttattttttacaaagcttaacttatctatatttcctgtattgcttgtgcttttggtatcatatctatgaatccattacccaattcaagatagtaaatatatagcttcatactttcttctaaacataatattgtttttcttcttatatgtaaggcattgatctgttttggatatgccctgcagtaaaagtccagcttcattgttttgcatgtggctatcttggtgcccttgcattatttatgagaagattatgcattcccttttaatcttattgatccttctcagaaatcagttgaccatggagacatagatatatttcagaa

SEQ ID NO: 447869 - DNA, 571 bp, Homo sapiens
ttccaaggacttgggcagctcacctatgtggctctgcagcttacagcccctggtgctgctttcatgggctggcgttgagtgcctgtggcttttccaggtgcagggtgccaagatgttagtggatctaccattctggagtctggaggacggtggcccccttcccacagctccactaggcagtgccccagtgggaactctgtttggggcttatagctcctcatttcttctctgcactgccttagtagaggttctctgggaggcctccacccctgtgacaggcttctgccttggcacaaaggctttcttgtatgtcctctgaaatctaggcagaggytgccaagtctccttcagtgtcacattatttgcatctacaggcttaacaccacatgaaagccaccacagcttatggcttgcaccctctgaagcagtggtccaagctatatctggggccctttgacctaaggctggagccagagcagctgggatgtgaggagcagtgtccctagactgtacagactagacctcagggcctgtgatgggaaggcttgcctttttccattgtcatgactat

SEQ ID NO: 447870 - DNA, 571 bp, Homo sapiens
ttccaaggacttgggcagctcacctatgtggctctgcagcttacagcccctggtgctgctttcatgggctggcgttgagtgcctgtggcttttccaggtgcagggtgccaagatgttagtggatctaccattctggagtctggaggacggtggcccccttcccacagctccactaggcagtgccccagtgggaactctgtttggggcttatagctcctcatttcttctctgcactgccttagtagaggttctctgggaggcctccacccctgtgacaggcttctgccttggcacaaaggctttcttgtatgtcctctgaaatctaggcagaggttgccaagtctccttcagtgtcacattatttgcatctacaggcttaacaccacatgaaagccaccacagcttatggcttgcaccctctgaagcagtggtccaagctatatctggggccctttgacctaaggctggagccagagcagctgggatgtgaggagcagtgtccctagactrtacagactagacctcagggcctgtgatgggaaggcttgcctttttccattgtcatgactat

SEQ ID NO: 447871 - DNA, 494 bp, Homo sapiens
gctaaggcaaaatccacttgacttttgctccatttcccagtaagttcctcatttccatctgagacttcatcatcctggaatttggtgtccatatcactatgatcattttggtcacaactatttaaccagtttttaagaagtttcaaattttccttcatcttcctgtcttcctctgagccctccaaactcttccaatttctgcttgttacccaattcyaaagttgcttccatatcttcagatatttttatagcaatgccccgtttcttggtaccaattttctgtattaggccattcttgaatcactattaagaaatacctgaggctgggtaatttataaagaaaacaggtttaattggctcctgattctgcagtctgtataggaagcatgatgctggtatcagttcagcttctggggaagcctgaggaagcttgcaatcatggaagaaggtggaaggagaacaggcttctcacatggcagaagtggcagaaagag

SEQ ID NO: 447872 - DNA, 612 bp, Homo sapiens
agataccctaaatcatcactttgaagttaaaaagtccatacatccctagggcatgaagagaatatagccaaattctttgctaaggcaaaatccacttgacttttgctccatttcccagtaagttcctcatttccatctgagacttcatcatcctggaatttggtgtccatatcactatgatcattttggtcacaactatttaaccagtttttaagaagtttcaaattttccttcatcttcctgtcttcctctgagccctccaaactcttccaatttctgcttgttacccaattccaaagttgcttccatatcttcagatatttttatagcaatgccccrtttcttggtaccaattttctgtattaggccattcttgaatcactattaagaaatacctgaggctgggtaatttataaagaaaacaggtttaattggctcctgattctgcagtctgtataggaagcatgatgctggtatcagttcagcttctggggaagcctgaggaagcttgcaatcatggaagaaggtggaaggagaacaggcttctcacatggcagaagtggcagaaagagttggagggaggtgccacagacttttaaacaaccagatcgc

SEQ ID NO: 447873 - DNA, 547 bp, Homo sapiens
gttactgttgttattgttactagtagtatatcaagatatcctattaagtataccatacttatagctataaatgttgttactcattttatatacaacacatttactagtaaatatagaatgtgtaatatatgcatacatagaatatatataatacacacatatgcacatatacatatatatgatataaagcaattatgcttcatgctagtctcctgcaagctgtttcrtatttttttcttttcaaacaagttaggtttaaaaacattttatttccctgaaaacttgttttcatagaattatacagagctatgttctttcatgcagaaacaaaaagccacatgtgactatttgaactaatagttaaattaaaactaagtataattaaaatgtatgttcttaagtcatactagccacatttcaagtgctcagtcgtcacatgtgaatgtgactactcatattagacattacatataataaatattttcatcttagaaatttctattggccagcatgtctatgtagattaagagcaacacaatagactttt

SEQ ID NO: 447874 - DNA, 522 bp, Homo sapiens
tagatttttcccttttgttcatcataaactttctcactcctctgcctaccttcgagtcttttccaaaacacaattggtggttgccaactctcttgctatagcgaactctgaataaatgcctttacttgttcttacttgagtgaycatatatttccacagttatagtgaaggttctattaagatacgctctgcactgtctgatgctgtggccgcaaatcttcaaccaggtgcataacccagagaggatgcttgcaacttgctgcttacaggttgaattttcaataatgtagtgtcagcactgggtctgaactcaactctgtgatagatttcattgctatttattcaacgtttggtacttaggttttgtcataagttctattttttgacatctttggtggattcatactatttattttcatctctttttgctgacttttgtgttactgtttaacgttgtgctgtctaaaagtgttgcttcttattagaagacgaaacacagagtagaatataggcataggccct

SEQ ID NO: 447875 - DNA, 614 bp, Homo sapiens
tagtatcttcatgaggatgattgttaatattgtatgaagcataaggaccaatgcctcacacacagtaaactctaaatggtttgaacaagaaaaggagttttgttttaactctcagatgacaattttgttaaataattaaatgcaattaataaaatagggcctttgtatcagtaatctggtctttctaacttgcttcttttctgagcctctgaagccctcttgacctttcccaatgagtattgttatgtggataattaacaaaataaactataattagaccccaaagttattttttctatatgattttatatatcgactgaaattcttttaatcttataatttaatatygtatgtcataaggtgtgcacaatacctgttgtatattgagtccctaccaaatatttgccagctacctggataatgcaggaggagggtgagatacttggaaattaattatggctgcagtgtgttgtttttcactgactgcaagctgagtccatgaaggagttttttatttatttttccctctgtctatctgagttttttaaaatttcagagtacaatttctcttcattctctgtacacttggaaagactgtttaaatcacatttatg

SEQ ID NO: 447876 - DNA, 675 bp, Homo sapiens
gactctatgtgataaacagggatgactactgttatgccgaacaacatagatgaatctcaaaatcatgttgaatgaaagaaaccagtcacaaaaaatttcatgccatacaagttcatttatataaaaaggcaaattaattatagtgacagaaagcagatcaatgttcacacgggccagcagccgagagaaatatacactgcaaagtaatataaagaagctttgggggtgactgaaatgttctgagtcttgattgtgtttgtggttttacaggtttgtgcaactctcaaaactcaccaaattgtacactttggaatgatgcagttttattgcatgtgaattattcctgaataaaattacataaagtaaaacacaggaaggaggaaggtgccattggggtgtttcaattctactcataatatattaatagaagtaatatttaatttctttagaaacatagtttgaatttgtctgyttacaattatatatgtatttatttgtatttaaataatagaaaattttaaattgataagaaaatgcaagatttttagcctctgcataaatgtatttcaaagatttgtcaaaaatatatcaaagagtacttaattcaattacattcaacgaacttcatttgcagtttgcaaagtaaatgttttctctcaagtcaggtcataataa

SEQ ID NO: 447877 - DNA, 584 bp, Homo sapiens
ctcttttaggtgctttgacatctcggccaacatacataccctcgttttccaactatttggacttaattttacttaaaagtgaaatagattgtttcagttataggagagaactaaattcctattttgtctctgtttwctatagatttgtttcctgatattaagttaggtttcttggtgttaattctacattccaatttcaggactctgcaaaatggtaataaaatgttaagtgaataagctatatttgtattatgtgtcacatatcaatagatagggcagataggaagaaaataagaaatggaagaaagaaataaatgaagaaaggaaagaagagaggaaattagggagggaagaaaaataaataagagggaaggaaggaatagacatattaaagatataaataatattagtagtgttctcccactcctttcccattagatatctgtatagctcatgttttgctaatgttatttgaactttttgattaatctacatgttatacaatgtacatacatctcactataagcataacagtcaaattgttaaaacaaataaaaattattaacaaaattgagtttcatttg

SEQ ID NO: 447878 - DNA, 584 bp, Homo sapiens
ctcttttaggtgctttgacatctcggccaacatacataccctcgttttccaactatttggacttaattttacttaaaagtgaaatagattgtttcagttataggagagaactaaattcctattttgtctctgttttctatagatttgtttcctgatattaagttaggtttcttggtgttaawtctacattccaatttcaggactctgcaaaatggtaataaaatgttaagtgaataagctatatttgtattatgtgtcacatatcaatagatagggcagataggaagaaaataagaaatggaagaaagaaataaatgaagaaaggaaagaagagaggaaattagggagggaagaaaaataaataagagggaaggaaggaatagacatattaaagatataaataatattagtagtgttctcccactcctttcccattagatatctgtatagctcatgttttgctaatgttatttgaactttttgattaatctacatgttatacaatgtacatacatctcactataagcataacagtcaaattgttaaaacaaataaaaattattaacaaaattgagtttcatttg

SEQ ID NO: 447879 - DNA, 584 bp, Homo sapiens
ctcttttaggtgctttgacatctcggccaacatacataccctcgttttccaactatttggacttaattttacttaaaagtgaaatagattgtttcagttataggagagaactaaattcctattttgtctctgttttctatagatttgtttcctgatattaagttaggtttcttggtgttaattctacattccaatttcaggactctgcaaaatggtaataaaatgttaagtgaataarctatatttgtattatgtgtcacatatcaatagatagggcagataggaagaaaataagaaatggaagaaagaaataaatgaagaaaggaaagaagagaggaaattagggagggaagaaaaataaataagagggaaggaaggaatagacatattaaagatataaataatattagtagtgttctcccactcctttcccattagatatctgtatagctcatgttttgctaatgttatttgaactttttgattaatctacatgttatacaatgtacatacatctcactataagcataacagtcaaattgttaaaacaaataaaaattattaacaaaattgagtttcatttg

SEQ ID NO: 447880 - DNA, 334 bp, Homo sapiens
ctttctatttttcgtaagtgtcggccggctgagaaataaagacaaagagtacaaagagaggaattttacagctgggctgccaggggtgacatcacatattgctacgaccrtgatgcccacctgaacctcaaaccagcaaattttttattaagggtttcataaggggagggggtgtaagaacagggagtagatcacatgcttcaaagggcaaaaaggagaactactgataagggtctatgttcagcagtgcacgtattgtcttgataagtatcttgaacagcagaaaacagggttcaagagcagagaacgggtctgacctcaaatttaccagtgt

SEQ ID NO: 447881 - DNA, 586 bp, Homo sapiens
ctgtttctagaattatctgtttttctttttgacaaggagcactttaaattcttcaagaaccagttgtaaattttactcctcagaatacataagattctggcatatgtttaaagacagaaaatcttaatgctttctatttttttccatcactttgactcaatcaacattgaatgactatttttaccatgcactaaagataactgtaatttcaatcctcatgttagtttctaggtttcgaaaaaatagacaactaagtaaatgttcttcaatataatatgttcattatactgaaggacaatgatagctttatgtatagaatgctatagaaatgcaaacatagagcacytaaatagcctttaaagtttattgaaagcatcctcagggagtactatcatacaataaagctaataatgacaagaaattataatattaacagcaaacaaaaaaaaaacattatttttattcaccctttcatgttccttctcagatactctgagtacagaaatcatgagacattattcaaagaatatagtttcatattttgttccatctttgatagtcatccttgaactttttgaagcattga

SEQ ID NO: 447882 - DNA, 530 bp, Homo sapiens
ttaaaatttaaatttttattggccacagtcttttgtttttctaatttctgtggaagatattcaattataatactatcttcagacttcatttatgattttgcaggctattaataactttaacaaggactaagctggtattctgatatatgggtccagaaattgtgatttattcattaacacaaagagacgatgttcaacttgtagagtttgtctgcatagaaggaacaaattgaagataggttgtatgagraatttaaagtaggatattggctattatttgtggttattttcatagcacttttatgagtagttctaaataactctgcagacatttctttaaagttcaaaaaattaagtatacttaataaggataaaaatatactaaaaaattctttttttcatttttgattttttaatcatttttttagagacagggtctcactctatgacccaggcggtgatgctatcacaactcactgcagcctcaacctcctgggctcaagcattcctcctgcctcagcctcctgagt

SEQ ID NO: 447883 - DNA, 514 bp, Homo sapiens
aaatcctggcctccagcgatccttccacctcaccctcccaaagtgctaggatttaaggtataaacaactgtgctggaccatgaaaacttcttaattttttatttttcctttatttagatatcacatagactacagtatagcgatcccagtagrttataacactattgagaagattataactcatgcaatttgggtcaccttttgtgaggcctgaactttgaagatactatttgtcttagaaaaatgtaggctgatgtaaatttaagaaacacaaggattcttcacagagatatctgtaaataattattttggcttcatttaaattgctaatatattttattttagggttactttaatatgaaaagcctaagatggttacaccaagggctgtaagttttaggtggagtggcataactgtttggggtgatgatataggaataatatttttagtgatgaaaaatctgacgaagacactaccgattgataggcactcgattgagttaattaggaaggg

SEQ ID NO: 447884 - DNA, 514 bp, Homo sapiens
aaatcctggcctccagcgatccttccacctcaccctcccaaagtgctaggatttaaggtataaacaactgtgctggaccatgaaaacttcttaattttttatttttcctttatttagatatcacatagactacagtatagcgatcccagtaggttayaacactattgagaagattataactcatgcaatttgggtcaccttttgtgaggcctgaactttgaagatactatttgtcttagaaaaatgtaggctgatgtaaatttaagaaacacaaggattcttcacagagatatctgtaaataattattttggcttcatttaaattgctaatatattttattttagggttactttaatatgaaaagcctaagatggttacaccaagggctgtaagttttaggtggagtggcataactgtttggggtgatgatataggaataatatttttagtgatgaaaaatctgacgaagacactaccgattgataggcactcgattgagttaattaggaaggg

SEQ ID NO: 447885 - DNA, 514 bp, Homo sapiens
aaatcctggcctccagcgatccttccacctcaccctcccaaagtgctaggatttaaggtataaacaactgtgctggaccatgaaaacttcttaattttttatttttcctttatttagatatcacatagactacagtatagcgatcccagtaggttataacactattgagaagattataactcatgcaatttgggtcaccttttgtgaggcctgaactttgaagatactatttgtcttagaaaaatgtaggctgatgtaaatttaagaaacacaaggattcttcacagagatatctgtaaataattattttggcytcatttaaattgctaatatattttattttagggttactttaatatgaaaagcctaagatggttacaccaagggctgtaagttttaggtggagtggcataactgtttggggtgatgatataggaataatatttttagtgatgaaaaatctgacgaagacactaccgattgataggcactcgattgagttaattaggaaggg

SEQ ID NO: 447886 - DNA, 554 bp, Homo sapiens
aatcatccttctatttttcagatgtcttgttcatcattgaggttatggatgatggatccagaatatatgaatagtatagctttaaaaaaaagtgagtacagatgtgaaggaatgccaggtgtagttgattaatgccaattgtgattattataaggactaggtggtatggtggtagggtgtttttaacckgaaccattatataattttccaaataatcatcagatttttagtgatcctgtgattctgggctgtgaacttcacaaatgtttcttcttgtatagcctcccttctttagttcaaccagggagactaaagcacctggagttagaggaattccttttctctcatctttggtacaaagttctagtaccgtgtttgccctgaagagtagatacttgttatcaagaaggttctatatgaatttcatatggattacactttctctctcctagccagagccagataaggatcattatcagatcttcaacctgagaacttagtggaattctggaagttaaaaccttcaaagtgtgaggcttccactaagacagctg

SEQ ID NO: 447887 - DNA, 554 bp, Homo sapiens
aatcatccttctatttttcagatgtcttgttcatcattgaggttatggatgatggatccagaatatatgaatagtatagctttaaaaaaaagtgagtacagatgtgaaggaatgccaggtgtagttgattaatgccaattgtgattattataaggactaggtggtatggtggtagggtgtttttaaccggaaccattatataattttccaaataatcatcagatttttagtgatmctgtgattctgggctgtgaacttcacaaatgtttcttcttgtatagcctcccttctttagttcaaccagggagactaaagcacctggagttagaggaattccttttctctcatctttggtacaaagttctagtaccgtgtttgccctgaagagtagatacttgttatcaagaaggttctatatgaatttcatatggattacactttctctctcctagccagagccagataaggatcattatcagatcttcaacctgagaacttagtggaattctggaagttaaaaccttcaaagtgtgaggcttccactaagacagctg

SEQ ID NO: 447888 - DNA, 554 bp, Homo sapiens
aatcatccttctatttttcagatgtcttgttcatcattgaggttatggatgatggatccagaatatatgaatagtatagctttaaaaaaaagtgagtacagatgtgaaggaatgccaggtgtagttgattaatgccaattgtgattattataaggactaggtggtatggtggtagggtgtttttaaccggaaccattatataattttccaaataatcatcagatttttagtgatcctgtgattctgggctgtgaacttcacaaatgtttcttcttgtatagcctcccttctttagttcaaccagggagactaaagcacctggagttagaggaattccttttctctcatctttggtacaaagttctagtaccrtgtttgccctgaagagtagatacttgttatcaagaaggttctatatgaatttcatatggattacactttctctctcctagccagagccagataaggatcattatcagatcttcaacctgagaacttagtggaattctggaagttaaaaccttcaaagtgtgaggcttccactaagacagctg

SEQ ID NO: 447889 - DNA, 580 bp, Homo sapiens
acaagtttaaatgaattattcaatgcattttacactggagttgtaaggctgttattgtaatagcccgtgttcttatatatcttaatacataaaccacctaatagtcacagagtctttrttaatatgatgaattaaaaccatgcttcttattttcttaagctttcccttggattatagagtagaggaaagccaccattgaaaggtaagaaaaatagtttttggttttgttttgttttgtttacggtgcctcccttgccccaagcttgcacagataattcccctgaacccactgtttctatagtgaaaaaaagtgagttggaggcagactttcagttttgccacaattttgggaccccctcacaagagcttcactcttgtcttgttccacagtaaacactgaaaccaccagcagggctaggacacctgggatcaattagaaacaggtggatttttgggccaggcgcagtggctcacgcctgtaatcccagcactttgggaggctgaggcaggcggatcacctgaggtcaggagtttgagaccagcctgaccaacatagagaaaccccgtctctactaataat

SEQ ID NO: 447890 - DNA, 574 bp, Homo sapiens
taaaccagcttgtatatctcatttgcaaattaccaaaatataacttaatcgtttgaattaggttcagagggtggttgcttgcatatgtgggtttttggttctatgaaagtggtgaagtggtcaattcaaaaacttttttaagctttgagttttgacatagcttttcacatatttttgacctgtaatgtagtgaaaacctgaaataaaatagtcaaatatctttatctaaacaatttgtatcaaatgttttaaaattttataaatctcatttttttctatcaattatatctaaacatgtataggcaracaatagtaaatgctatatttattttaattctcactgtagtattattagtcatctcatgctaatatttctcttccaccttccctagaaacactattcttttcttcaaagtgtatcagtatctatacttccttcatctaccccgtgtagtgtttgaaatggaataggtattacattgacactcttgtctgttctgctacattcaattttgcagtagtcagaaatttcttagaaaaatctatcattactctgaatttatttcatataaaa

SEQ ID NO: 447891 - DNA, 550 bp, Homo sapiens
atgtgtattttttatttctacatacatattatatgttgactctaggcatcttgcctagagttgggatgagaagagtttggaatctctcttttactgcctctacaayattagaaaattattctgtatttctcttcttttctcctaaatataaaagtgtaggatttaatattttgctttttgttttcttcaacatttattttaagttcagggctatatgcacaggtttagttatataggtaaatgtgtcccgtggtggtttgctgcacaaatcatcccatttcctaggtattaatcccagcatccatgagctattcttcctgatgttctccctgcccccacctccaatatgtagtagttgtacttctatatgaggcataatgaatatatgtgtgggaaaggcagggtttctaccttaaaggtcttaaactctaataaaagaatccaatggctaaacaaaaacctcagtgtcttatatgcaactagagaaggaaatacaaaaacatagacttttgcaactactcagtctcataaggttgcagttggaggttgg

SEQ ID NO: 447892 - DNA, 461 bp, Homo sapiens
tgatccataacaacctggcagttattcgtgagcattgatatgtgaataaaaagtttctttgaaagagcattttgggkccaggcaaggtggtccaggcctgtaatcccagcagtttgggaagcccagatgtgaggattgcttgagggcaggcatttaagaccagcctgggcacatagcaagaccccgtctctgtgaaaaacaaaataaaaatgagcatgatggcacataccattagttccagctactcagggagctgaggtaggaggatggcttgagcccaggagttcaaggctgcagtgagctatgaggtggcatcactgtaccccagcctgggcaacagaacgagaccctgtctttttaaaaaagaaaaaaaaagagagcatgttaggcattgatacatttctatctcacttttttgagagctcaagaaaattaattcattaccatacatttatttcatt

SEQ ID NO: 447893 - DNA, 646 bp, Homo sapiens
tatcagaggaaaggagtgagaggtggaggcagaaatcagaaatcctaactgcaaacttgaatgtcatttacataacagtatattatgcattcacacttcccacctctgcctttatttagagattgcagggcagccaggaatttgcctaccaagagaaaaaaaaatactattcttttttgatggattatataatccctctgggaaaagagtgtacagttaatatggatgttgttaatttaagaatagccttcctttttctagcatttggataaacctgaacataaggtttagttcctctcatgctcactgtaaaggaaagcctctatataactaatcttttcttattattacaagaaaaattataatttgaaataataattttaagaatcacttaactgcttactgtgtgccaatacttttctgaggtaagattttgttgaaaaacaaaacattatcagatatttgaaaaaaagccagaaattgaaggtaaaaatattaatawtaaaaaggcagaaaagtactttaaaataaaaaaaaacagatatgtgagaaataagaagacaaatatttttcagactaaaacctccaaatattagaaaaaaatagaaaactcatggagatcttagattcatagtgaattcattct

SEQ ID NO: 447894 - DNA, 570 bp, Homo sapiens
aaatacgtaaagtatgtagcacaaagcctggcacatattaagtgtttgataaatattatkattgttattattatattccaagccttcatgtgcttgagtagaggtgagtcctttccctacagcttaaaaagaaacaaaataatttggtagaattattcaagaaaaccttgaactaaacttgtctataaggttagacaaattaaacttgtctaacaagttcaaattaaacttgtttaacaatattattggttattcttgtctaacaatactatgatcatttcaaccagtgacctaaagaaagtcattaaccaaattaagtttcaactgggagatgagctatgatatctgttttcttacctatgaattattttattgtattttaatgttgcttctattttttcctttagggtaaggaatggcattaatttcctctctaaatgaatcaagtaacaggaggattccaccagtgagctgcctgagctcctcattctttgcatcacctgccatcagtgacaggttgtttccaaagaactgatagtcatttaacccaggaaggtaaagccaacgtaa

SEQ ID NO: 447895 - DNA, 548 bp, Homo sapiens
gggaagtttgcaattttagatagcttggctctactacttttctgttgctctcaaagattactaattagtggcttaaaccaaaaattcaatatctaatatttcttcaagtaataagtttgatacaagtctcacttggctaaaattaaggtgttgccagagctttattcctttctgagggctccaggagagaatccattttcttcccttttccatctactataggccacccccattgcttggcacatgaccccttcctccatcttcaaagctaaaaaatgtacatgtggttctcacactgccatctctctggttctctctctttcactcaatatagacataaaagttgtccacttttaaaggcttatatgattaaagtattgcccatctagataatacaagacaatcttcccacctcagagtcrgaaaagtaaatcacatctgcaaagtcccctttttcatttaaagttaacatatatttgcagattatggagttagaatattctttatcctacttaccacaatggtcaaggaatgtctcaccaaaaaat

SEQ ID NO: 447896 - DNA, 555 bp, Homo sapiens
  misc_feature (1)...(555): n = A,T,C or G
ctggacaagtgagtcttttttcttggtaccagacagtggaatctgcaccactcaatttgggaaattctgaaaaaatttctcttcacaggttgaacaagccaagccgactgggagaggataaatcaccctgactgtttcagtttggatattcttggggcttgttagttactgcaacagttggattgtgttttgatgattgtgtatcaatatagtcaaggaaatcagaattaatkaactcataatcttttgtaatactgnttgccccatattctttgagatccagggaagaatgtgctctttcaggatctattttgtggttgaaagggaaaattggatggagttctatgtatccaagcttttatggtgcagttttaaacagggttgggattggttagtatgtgatgttcttctgtggtgctgtttggccccagtactctctggagtctggggaggttttagcctttaaaaattatactgccatggaaactactttacctgaaattttgattcacagccttcagtagattacctattgtgggaaacaacgtttaacca

SEQ ID NO: 447897 - DNA, 684 bp, Homo sapiens
tagtagacctaaaggcattaatttgtatgccagaaacaaaatatctatcacatattctttttaaggctctggttaacactgtggcatccaatcagaactaatatctgatagttcaggatttcttgcttcctaaattttcactaaaattaagaatttagtgaagttggccgggcctggtggctcacttctgtaatcccagcactttgggaggcctaggcgggtggatcacgaggtcaggagctcgagaccagcctgaccaacatggtgaaacaccatctctacaaaaatacaaaaaaaattagccaggcgtggtggtgcacgcctgtaatcccagctactcasggggctgaggcaggagaatagcttgaatctgggaggcagaggttgcagtgagccgagatcgcgccactgcactccagcctgggcgacagagcgagactccatataaaaaataaaaacattaaaaaaaattaaaaaaaattaaaaaataaaaaaaattaagaatttagtgaaattgctaagaataagaattctagttaatgtgtaattctgtatataaaacataccaaaaaatgtgtttttattgagaaaaagaatcattttgtccagttcaaaaattatccaaagattaactcagattatggacttggaaagattatttaggaagtaaggtagaaaggaacc

SEQ ID NO: 447898 - DNA, 684 bp, Homo sapiens
tagtagacctaaaggcattaatttgtatgccagaaacaaaatatctatcacatattctttttaaggctctggttaacactgtggcatccaatcagaactaatatctgatagttcaggatttcttgcttcctaaattttcactaaaattaagaatttagtgaagttggccgggcctggtggctcacttctgtaatcccagcactttgggaggcctaggcgggtggatcacgaggtcaggagctcgagaccagcctgaccaacatggtgaaacaccatctctacaaaaatacaaaaaaaattagccaggcgtggtggtgcacgcctgtaatcccagctactcagggggctgaggcaggagaatagcttgaatctgggaggcagaggttgcagtgagccgagatcgcgccactgcactccagcctgggcgacagagcgagactccatataaaaaataaaaacattaaaaaaaattaaaaaaaatwaaaaaataaaaaaaattaagaatttagtgaaattgctaagaataagaattctagttaatgtgtaattctgtatataaaacataccaaaaaatgtgtttttattgagaaaaagaatcattttgtccagttcaaaaattatccaaagattaactcagattatggacttggaaagattatttaggaagtaaggtagaaaggaacc

SEQ ID NO: 447899 - DNA, 557 bp, Homo sapiens
gtgtcaggccagtactcagaccttgagagacaccattaataaaagtgctttttcttcataccctttactaccatcatcaatgttgtttaacccatattaccttattctttttttttttttttttttttcagacagagtctccgagtcttgctctgtcccccaggctggagtgcagtggtgctatctccgcttactgcaaactccgcctcccggattgaagggattctcctgcctcagcttcccgaacagctgggactacaggtgtgygccaccacgccctgctaattttttgtatttttagtagagacgggggtcttactgtgttatccaggatggtcttgatgtcctgacttcttgatctgcctgccttggcctcccaaagtgctgagattacaggtgtgagtgaccgtgcccagcccatattaccttattcttacagttacaccctccaattgtcatgactttttttttcctcaggacatactggatatatctgtaagaataatattcccatggtaaagctgtttgctaaaaataaacctaaaattcaaaatcct

SEQ ID NO: 447900 - DNA, 557 bp, Homo sapiens
gtgtcaggccagtactcagaccttgagagacaccattaataaaagtgctttttcttcataccctttactaccatcatcaatgttgtttaacccatattaccttattctttttttttttttttttttttcagacagagtctccgagtcttgctctgtcccccaggctggagtgcagtggtgctatctccgcttactgcaaactccgcctcccggattgaagggattctcctgcctcagcttcccgaacagctgggactacaggtgtgcgccaccaygccctgctaattttttgtatttttagtagagacgggggtcttactgtgttatccaggatggtcttgatgtcctgacttcttgatctgcctgccttggcctcccaaagtgctgagattacaggtgtgagtgaccgtgcccagcccatattaccttattcttacagttacaccctccaattgtcatgactttttttttcctcaggacatactggatatatctgtaagaataatattcccatggtaaagctgtttgctaaaaataaacctaaaattcaaaatcct

SEQ ID NO: 447901 - DNA, 557 bp, Homo sapiens
gtgtcaggccagtactcagaccttgagagacaccattaataaaagtgctttttcttcataccctttactaccatcatcaatgttgtttaacccatattaccttattctttttttttttttttttttttcagacagagtctccgagtcttgctctgtcccccaggctggagtgcagtggtgctatctccgcttactgcaaactccgcctcccggattgaagggattctcctgcctcagcttcccgaacagctgggactacaggtgtgcgccaccacgccctgctaattttttgtatttttagtagagacgggggtcttactgtgttatccaggatggtcttgatgtcctgacttcttgatctgcctgccttggcctcccaaagtgctgagattacaggtgtgagtgaccgtgcccrgcccatattaccttattcttacagttacaccctccaattgtcatgactttttttttcctcaggacatactggatatatctgtaagaataatattcccatggtaaagctgtttgctaaaaataaacctaaaattcaaaatcct

SEQ ID NO: 447902 - DNA, 498 bp, Homo sapiens
tataaataacttgtagtaaatataagcatgatttgtagtaactcatgataaatttatttttgactagttttaaatatatcacagttaaatccatgtttatactacccataacaataagctgtattagtacttagaatccakgaatcatttcctttttatgaaaacttggaattccgattttttagaaactttaataaaattctcattagtgttaaatttagtagcctataagtcacttttgatagaccctgtacttaaaccaatgagtcttagtttttttctttaattgttgtcagtcaaaacctcattaatcatcccttgtagataaaatttgcacaatactcctgtcagattttcatattaattaaagaatctgttatgcagctcacatgctgaagatggggtagagtttaccaattcatatactgaggtgaggatacaaaagaccaggcagctctgctctaaagattactttggaatggatcttgagaaaaggtg

SEQ ID NO: 447903 - DNA, 477 bp, Homo sapiens
ttcaagatatgatcagagtttgtttctccaagtcatcaagtggcactaacaatgtgagaacacttaaattatattctctacataagctttttggggtaccatatttgtcaygtggattgaaatcttaaatctaaatgagcataagcctatggttcaaatattcaagtgagttttttttcccttgttttatcttttgccaagatagagacagctaagtttccttgctataattttcagttttttcgcctttactttgagatggaaaattacaagtatttttaaactcttattgaattctgctttttgagattttgcttgttaatattaaataaaataaaggtacatgttgaatttggtgaaatttaatatgacacacagaaacacacacattctaaacctctgctcataggaaatgcagtcactgcttagcacaccttataaaaccttttgcacagtcttacatatttaatttttcag

SEQ ID NO: 447904 - DNA, 477 bp, Homo sapiens
ttcaagatatgatcagagtttgtttctccaagtcatcaagtggcactaacaatgtgagaacacttaaattatattctctacataagctttttggggtaccatatttgtcacgtggattgaaatcttaaatctaaatgagcataagcctatggttcaaatattcaagtgagttttttttcccttgttttatcttttgccaagatagagacagctaagtttccttgctataattttcagttttttcrcctttactttgagatggaaaattacaagtatttttaaactcttattgaattctgctttttgagattttgcttgttaatattaaataaaataaaggtacatgttgaatttggtgaaatttaatatgacacacagaaacacacacattctaaacctctgctcataggaaatgcagtcactgcttagcacaccttataaaaccttttgcacagtcttacatatttaatttttcag

SEQ ID NO: 447905 - DNA, 556 bp, Homo sapiens
tctgtttctgacatgaatttggataaaataattcctggagattgtttctttgacccatgttttatttcaagatatgaagaataatttccaaatatttaaactgtccctggattactctttgtttttgatttactatttatttatgcrttacatattatactgcatataatatcaaacataacacattttctgagcctttgttttttttggcccagcatatctttatcctggtgagtgatccatgtgtaccctagaagatattctgtctttattgtttacagtgccctgtacatataatttaagccaagacggttgataacgttgtttgaatactctataaattatttgactagttgtgcttttaattgctaagtgttaaaattttcactctgattgagcacttatttatttctttcattgtttctgccaactttttgccttttgtaataatgagactctttaattagatgcataaaaacttacgatacttaagttacactgagaaatgatcctttcctcattgtgaaattacctctttatttctaatattgtctcc

SEQ ID NO: 447906 - DNA, 606 bp, Homo sapiens
actccttcattttatatatatgtatataatgctgtattctatgaattaaattttattaaagattattcatttatggtattggtggataaaagtttgaagtattgtcttgtattatcttcctagcaatatctgtttctgacatgaatttggataaaataattcctggagattgtttctttgacccatgttttatttcaagatatgaagaataatttccaaatatttaaactgtccctggattactctttgtttttgatttactatttatttatgcattacatattatactgcatataatatcaaacataacacattttctgagcctttgttttttttggcccagcatatctttatcctggtgagtgatccatgtgtaccctagaagatattctgtctttattgtttacagtgccctgtacatataatttaagccaagacggttgataacgttgtttgaatactctataaattatttgactagttgtgcttttaattgctaagtgttaaaattttcactctgatygagcacttatttatttctttcattgtttctgccaactttttgccttttgtaataatgagactctttaattagatgcataaaaa

SEQ ID NO: 447907 - DNA, 594 bp, Homo sapiens
taaaggcacacatatttagagtcagttgttttcaagtggactgctcacaaggttcaaattaatcagctaattacaaacaatattctcctatccacttgggctggtgaatataaccaggcaagaagtttcctgaactgggaagaaaacmtacattacaaagttttgatcctagattcagtattatggtgtgcaatattcagttgtatcaaagccctggatttcttgtgccaaataaaataatcatctaggtggcaaatttatttgccatttatttctaattaatattgaaaataattagagggtatgttttatgccgtctactcttttaggcctgtgtataactttactaattattctagcgatacataagatttaattaaggagaagtcaattacaaatattccactgtgtactgaagagaaaactgcaaatgaatcactaagaggtgaattgggagctgagtctcaataatgttaacctttgtcagtgagttgtcaaggattgataggcatgaaagaataaatatttaatttatattggtccaaaatctgagtttcagtgactgacacctgtattaacttttttggaagcaaa

SEQ ID NO: 447908 - DNA, 619 bp, Homo sapiens
tggtagcactaattgaaaatagcagtgcaagacctatattagtttgagaaaatgaaaacatcgctgagatattattgacttttagactgaatgaaatatattgtgaagatttgtattatattgttcacatgatacatgaaacctgttttgtattatctcagttaaaatcaaacatatgtgtaatataacttgttgaaaatgcaaatgtaattgtccaagacaatgtcatctaaagaacatatctattcattgtattttgaaaatacaatgaataaatctgtcaattatatagtgcctcaaaccataaatgttatttaaatatggattaagaaactaagaggatttccagattaagatccaagagctatttatgtgttgtgaagacatgaggagttacttactttaagtttgtttcaagtttgtcagccagggtccacatgcagagtagaaagcaccctagattttaaatggaattaaatktaattagtattttaaggtagctcaagatgtaatttttagaacaaatttttaatttttatttttctacaagaaataaaacagttattggcaaactaatatgccaattgacaaatccaggaaagaaagaaaataaaaatac

SEQ ID NO: 447909 - DNA, 594 bp, Homo sapiens
taaaggcacacatatttagagtcagttgttttcaagtggactgctcacaaggttcaaattaatcagctaattacaaacaatattctcctatccacttgggctggtgaatataaccaggcaagaagtttcctgaactgggaagaaaacctacattacaaagttttgatcctagattcagtattatggtgtgcaatattcagttgtatcaaagccctggatttcttgtgccaaataaaataatcatctaggtggcaaatttatttgccatttatktctaattaatattgaaaataattagagggtatgttttatgccgtctactcttttaggcctgtgtataactttactaattattctagcgatacataagatttaattaaggagaagtcaattacaaatattccactgtgtactgaagagaaaactgcaaatgaatcactaagaggtgaattgggagctgagtctcaataatgttaacctttgtcagtgagttgtcaaggattgataggcatgaaagaataaatatttaatttatattggtccaaaatctgagtttcagtgactgacacctgtattaacttttttggaagcaaa

SEQ ID NO: 447910 - DNA, 340 bp, Homo sapiens
agcagctactgcggaacagagtgtccaacagtctttgtcatgtcaccaggattaaatgacacaaatggggactagacatctcagccatatgcctggtttctcttggaaaattgtttaattatgaacctatacgaggtaagtaacttagaagttaaaataaaacgtataaaacagtagattttatttctagcctcttaatgctagyggaaggtgcttcaatgagtataataggctgtcagttgaactctacaattaatggtgagctgagaatctacaactcctctttccctagagataatttctcattctaggcaaaagctaaaattaaaaaattctagtg

SEQ ID NO: 447911 - DNA, 340 bp, Homo sapiens
agcagctactgcggaacagagtgtccaacagtctttgtcatgtcaccaggattaaatgacacaaatggggactagacatctcagccatatgcctggtttctcttggaaaattgtttaattatgaacctatacgaggtaagtaacttagaagttaaaataaaacgtataaaacagtagattttatttctagcctcttaatgctagcggaaggtgcttcaatgagtataataggctgtcagttgaactctacaattaatggtgagctgagaatctacaactcctctttccctagmgataatttctcattctaggcaaaagctaaaattaaaaaattctagtg

SEQ ID NO: 447912 - DNA, 594 bp, Homo sapiens
taaaggcacacatatttagagtcagttgttttcaagtggactgctcacaaggttcaaattaatcagctaattacaaacaatattctcctatccacttgggctggtgaatataaccaggcaagaagtttcctgaactgggaagaaaacctacattacaaagttttgatcctagattcagtattatggtgtgcaatattcagttgtatcaaagccctggatttcttgtgccaaataaaataatcatctaggtggcaaatttatttgccatttatttctaattaatattgaaaataattagagggtatgttttatgccgtctactcttttaggcctrtgtataactttactaattattctagcgatacataagatttaattaaggagaagtcaattacaaatattccactgtgtactgaagagaaaactgcaaatgaatcactaagaggtgaattgggagctgagtctcaataatgttaacctttgtcagtgagttgtcaaggattgataggcatgaaagaataaatatttaatttatattggtccaaaatctgagtttcagtgactgacacctgtattaacttttttggaagcaaa

SEQ ID NO: 447913 - DNA, 594 bp, Homo sapiens
taaaggcacacatatttagagtcagttgttttcaagtggactgctcacaaggttcaaattaatcagctaattacaaacaatattctcctatccacttgggctggtgaatataaccaggcaagaagtttcctgaactgggaagaaaacctacattacaaagttttgatcctagattcagtattatggtgtgcaatattcagttgtatcaaagccctggatttcttgtgccaaataaaataatcatctaggtggcaaatttatttgccatttatttctaattaatattgaaaataattagagggtatgttttatgccgtctactcttttaggcctgtgtataactttactaattattctagcgatacataagatttaattaaggagaagtcaattacaaatattccactgtgtactgaagagaaaactgcaaatgaatcacyaagaggtgaattgggagctgagtctcaataatgttaacctttgtcagtgagttgtcaaggattgataggcatgaaagaataaatatttaatttatattggtccaaaatctgagtttcagtgactgacacctgtattaacttttttggaagcaaa

SEQ ID NO: 447914 - DNA, 548 bp, Homo sapiens
gtccttatagacaaatacaacctccccaactatcaacatcccataccacagtggtacacttcttactattgatgagcctaccttgacacatcattattacccaaagtctgtagttcacattaggactcactcttggagatgtacattctgtgggtcttgamaatgacatatatcaccatcacagtatcatacaaaatagttttcttgctctaaaaatcctccatgctcttcttattcaccttttccaccctctacaagcacctgcaacccaacatctgcaaccattgatctttcactgtctcctttgctgtccttttccaggatgtgatatagttggaatcacactatgtactcttttcagactggcttctttcccttagtaatgtacacttaatttccttccatgtcttttcatggcgtttagctcattatttttagcaccaaataatattccactgtccatttgtaccattcatctactaaaaatagaaaaacatattttcttccaagtttggcaattgtgaacaaaggtgctataaacttgtatg

SEQ ID NO: 447915 - DNA, 523 bp, Homo sapiens
acacattccattgcttcctggattgatgcctaattcaataatatattaatcaccacaccccaagccatcagggagtgctaactaatggatgaaggagaagctgaaaagtatagtttccaaaagcataattttatacagtaaagaattcactgtctccttagctttggtgtagaaaatgaaaagcccacattgaagggctgccaaaacatttatacataaaaacaaaacccagacactttgattctgtatctacacagaatctgttataagctaatatggaatatagttatttcttgatacaaaatattraaaaatctattttaatcagaattcttggttatgtgataaataccatgaaacttcatggtactgcatatataaattatatttaatctttttttaatagtgtgacttttactttctcatatttcttttagcatcccctttaaaatatttttatttatattttgtgactgataatgtgtttttgctaaagttgggttcttattaggagactcattca

SEQ ID NO: 447916 - DNA, 448 bp, Homo sapiens
tactttttaaactaaacatttgtcaatattttaaagtctatgatcaaaattaatatttattataaaagggttgtataatagttataatttttgctcttaatatcatctaataattaaaatatctgcatatttttggtgacttagtcattggagatatattgttatttttaaataatagcattctctttctttcccttgttaattaaaacattcctggwttcctctgattaaatccaccttttatatacttaaacatagaaggcatagctctttggggaaacaaataaacaaggttgattaatattgtcttcatctagattttcaagcacattcattctttgcccattaaactgactttttaaagactctaggagaagatacaggatgactttttttgtcttttgcattttgaggcagtatatttatataaacatgagcatatatatgt

SEQ ID NO: 447917 - DNA, 535 bp, Homo sapiens
aatcttttaaaaatatttatgctattggtaaaatatattatttacgttttctatagggtgacctcagtagagggagttttaataatcaaatggatagaatgacctgctctgtggatactggtcatcctctttcaccagccacccctctcatcgcctagtgagctcatgaacatggtgatcatcgtggcaaggatggtagttacgtgtgggctaagcaacatrgacttccactcactaaggctgatgtggtgcagccactgctgagtgccccggttgccagcagcagagaccaacactgagtccctgataaagcactattccatggcaagctgattacattagactaattgatcatggaagtagcaacattttgtttttatcagaatagacacttactctcaatatggacttaccttcccttcatgtaacgcttctgccaaaacaaccataatatattatggtttttcgtaaatactcaggtcgccatattttaggcattgcctctgatcaaggaacataaataatcccatggttg

SEQ ID NO: 447918 - DNA, 471 bp, Homo sapiens
gttccactgcactccagcctgggccacagagcaagactcgatctcaaaaaaaaaaaagaaaaaaagaaaaaaagaaaaaaaaaaagaatgcttaatagctacacacccaaaaatgaagatcactacagttgtataaaaattatcaagatacattgataaagggcatacagatggttgagaacagcatatgttatacactacaaagaggggaggaaataaaaaatatgttttatttgcataaagaaatattggaaaaaaatttccgaaacttacttttttttttctccagggtcagggaagtagatatgggatagacagaaatgtgtataagacggttttcagtttatactattttatattgttttattttgaaccttttaaatgttttaacactatrttaccttttctaaaaaacaactttttcaaaggctccattccatattttgaattacatgattaagggcatatgct

SEQ ID NO: 447919 - DNA, 622 bp, Homo sapiens
gtggtgttagggatgattctagcagaatacacaataatggtttcagcaaactggaagttatgaagattacctgcccagcactgcattggttgaagtaattgattctgattgccaggaggagatatggttgctattacacaatgwaagctgggaggattaaatgtgaaacccgagattcattgtaacattactgctacttccatatgtgataatgactaggtatgccaaactattataatcccaaaaccaagtacaactgagagcacttggagaatgatagtctggattatcctgccaggcaaacaacttatcaggtgaaatatggagagcgaatggcatttaaaggtgcaatagagaaagaagattattagtattaattgcagccttaggaccagctgcagcaatggaggctgtagtttttgttattagctctctcaccttagcctttcagaaaattacacatgaccatcactttgagggaaatcctttaaatttaaaactttttgtttccctttggaagaataaaagacattttatcctcataggaaataattgaggccagattttatagtttgtcacctaattataaagaaggggccaaaaaaaaaggacctaagtagaa

SEQ ID NO: 447920 - DNA, 622 bp, Homo sapiens
gtggtgttagggatgattctagcagaatacacaataatggtttcagcaaactggaagttatgaagattacctgcccagcactgcattggttgaagtaattgattctgattgccaggaggagatatggttgctattacacaatgaaagctgggaggattaaatgtgaaacccgagattcattgtaacattactgctacytccatatgtgataatgactaggtatgccaaactattataatcccaaaaccaagtacaactgagagcacttggagaatgatagtctggattatcctgccaggcaaacaacttatcaggtgaaatatggagagcgaatggcatttaaaggtgcaatagagaaagaagattattagtattaattgcagccttaggaccagctgcagcaatggaggctgtagtttttgttattagctctctcaccttagcctttcagaaaattacacatgaccatcactttgagggaaatcctttaaatttaaaactttttgtttccctttggaagaataaaagacattttatcctcataggaaataattgaggccagattttatagtttgtcacctaattataaagaaggggccaaaaaaaaaggacctaagtagaa

SEQ ID NO: 447921 - DNA, 645 bp, Homo sapiens
ctctctcaccttagcctttcagaaaattacacatgaccatcactttgagggaaatcctttaaatttaaaactttttgtttccctttggaagaataaaagacattttatcctcataggaaataattgaggccagattttatagtttgtcacctaattataaagaaggggccaaaaaaaaaggacctaagtagaacatgggatggatacattggatacagcctgtgctcctcatttttcctaaccattgttgtctttctcttttttaattgattatccacctatgccaggtcaccactctgctttcaaacccagaaaaactataaagcagaaagtgtggtgtaccagacacaccactttcctatcctcttgcatatgtgagagaccagagtgaattactaccctctcccctcmaagcagactttgacaaaacactgatggaaataaacatacctctttgattgggatagctatgagctgtgatatgagttttacattccttcttccaaattctgtcaaggattaaaaaaatcaagtcctgcttaatggtggcttatgacaacatactctttatcagctgatttcacttctctatctgactttacacttctctactgggtctcaaaccttcaacataagccacttgca

SEQ ID NO: 447922 - DNA, 553 bp, Homo sapiens
agctgtcattatgtgagctgcagtaaggagatgcgtaagtggggaggccctgagtcsgtgagaaactcagggcttctgcctaccatcaggtgtggaatcctgtcaacaactgcattccagcctgtagcttatgaaagatcaggaaccagaggcactcagctaagcaacatttggaatcttggtccacagaaatggacaagtagcaaacgtttgcaagtttacaccatgaagctttgggataattgcttacatggcaataaaaagtatttaactatagggataatgctaaatggcttctgttatggaactgaatataatttttatgaatatgaataaagctaaaatggatagtgtagttggaggtgacaaaagaaatagtatagtgtgagtgaagtgctagtataaagaaatatatgtgttctaatttttaaatggatgttatagtggagtaaaaatactatctagatttcaaaaattacaaaatgtaaatgtaagaacatgacctgtcaatgtgcactaagtgaaaccaaataatgcaaaatagtgcacaaat

SEQ ID NO: 447923 - DNA, 553 bp, Homo sapiens
agctgtcattatgtgagctgcagtaaggagatgcgtaagtggggaggccctgagtccgtgagaaactcagggcttctgcctaccatcaggtgtggaatcctgtcaacaactgcattccagcctgtagcttatgaaagatcaggaaccagaggcactcagctaagcaacatttggaatcttggtccacagaaatggacaagtagcaaacgtttgcaagttkacaccatgaagctttgggataattgcttacatggcaataaaaagtatttaactatagggataatgctaaatggcttctgttatggaactgaatataatttttatgaatatgaataaagctaaaatggatagtgtagttggaggtgacaaaagaaatagtatagtgtgagtgaagtgctagtataaagaaatatatgtgttctaatttttaaatggatgttatagtggagtaaaaatactatctagatttcaaaaattacaaaatgtaaatgtaagaacatgacctgtcaatgtgcactaagtgaaaccaaataatgcaaaatagtgcacaaat

SEQ ID NO: 447924 - DNA, 553 bp, Homo sapiens
agctgtcattatgtgagctgcagtaaggagatgcgtaagtggggaggccctgagtccgtgagaaactcagggcttctgcctaccatcaggtgtggaatcctgtcaacaactgcattccagcctgtagcttatgaaagatcaggaaccagaggcactcagctaagcaacatttggaatcttggtccacagaaatggacaagtagcaaacgtttgcaagtttacaccatgaagctttgggataattgcttacatggcaataaaaartatttaactatagggataatgctaaatggcttctgttatggaactgaatataatttttatgaatatgaataaagctaaaatggatagtgtagttggaggtgacaaaagaaatagtatagtgtgagtgaagtgctagtataaagaaatatatgtgttctaatttttaaatggatgttatagtggagtaaaaatactatctagatttcaaaaattacaaaatgtaaatgtaagaacatgacctgtcaatgtgcactaagtgaaaccaaataatgcaaaatagtgcacaaat

SEQ ID NO: 447925 - DNA, 568 bp, Homo sapiens
ctcttcgggaagctcttttgttcataatccctggtaataaacatttcaggtgccaaaagaatgaaatgaagaagcttgaaatctatactttgcacagaaatctatttggggggaaaaaggcaaatttaagtctaaaacaagtagcaatttttaagaagataaaattagaacaaactactgaagtctagaaaccaaaacgttaagtttgtagatgaggaatcagawgcccagtgagattaaatgacttcgttaagggcatgggcagcaaattcattaaaatccaaatttctcagtccaagttcatgtggtttttacttgtccaaagagactgttctatttcaggactagtaaaattaggtagagtcctaaaaaataattctttagggagtagccattaacatgctttgtagtttctaatatacaatgttaaagcaatttcagagtaagtcacatataaaagatagtttataaacttaaggggtaaaaactaacctttgaacaaaaataatttttataaaaaagttgagaagaatttactctctttgtgaataacatcttagctgacata

SEQ ID NO: 447926 - DNA, 407 bp, Homo sapiens
caatgcaatattttgtggagagcaatggctgttaacatttagttgcattaaaattacctgagaggacagtcaaaaatattgcagagctctctctccagaatttctgattcggtaggcataaatctgtctccagaacgtgttgctggaccaatggccacactaaatatcatgggcttggaagagtaacatgacatgttttaatgcaattaatctggtttacttttggcaatagactaaagtgggtcaaggataaaagcaaaggtggcaaacttcttcctctgaagattgtggctgaatttattttcaggtttacatgttttagttgtatcrtgttagtgtgtgtgtgtgggtagtgtgtgtgtgtgcttgtgtgtgtgtgtgcatgattttcaaaagactatagaggc

SEQ ID NO: 447927 - DNA, 656 bp, Homo sapiens
gaagagaatccggcttcttccaataataagacccagtaagatgggcatttttctatactatgagtttggtgaggttccctttaatattaagaatttacagatttcttctgtacacttttaatggttattttacagaagccttttgactttatttttatactagaacagatttctgaagctcttaaaaatctttttggtaacagactatggaagacaaagtacctggaacacaactgtttcttttcattttctttccgtttgcaggtataacttagccagtaaatttagtcacagtgattttgattcgttttaagttttacacctaaaaaaccagaatagattctttttcctcattttcagcaactataaatacatggtagcaatacaaatttcatagacgctttgggtgtctatcatcaagtgttttgagattctgagacgaaatatttgagatttatattacttaggaaatttatgctactataattttatgtatcaatgtggctaggctatatcrgaatattcaatcaagcattagtctaaatgttgttagtgaagttattttttagagaagactaatatttaaatcagtagactcagaataaagcagattattcttcataatagaggtgggcctcaaccaattagtcaaaaga

SEQ ID NO: 447928 - DNA, 571 bp, Homo sapiens
aataatctatatgcctcccaaaaggccctatttcccaacactgtagcrttggggattagtattcaatgtaaatttctggaggggacaaaatattcaagccatgttaatggacatttcagttttggactattttaagtaaaactcccgtggatattcacatacaagtatttgtgtggacatctattttcatttctctcatataaattcataggaatagaatggatagatcatacagtaggggtatgtttaattcagactgacttcattgagataaactaaactttataaaaataactaatcaagtaagaaagtgtgatgttgttataaaaatagataaataaataaggataagagagttctgaaataaataatagacacacatctatatatagacaactaattcttaacaaaggtacaaaggcaatttatgcagaaaagataatattaacaacaaattattcttgacaaattggataatctgttttttagaaagagtttttatgccttatattatattttttaaaatctcaaatatatagtagatttaaatgcaaaacctgaatttattaaa

SEQ ID NO: 447929 - DNA, 564 bp, Homo sapiens
cttataacaagaatgaattcaaatattaatagtttatttgaatgataaaagaatgagtgaatgagaggaaaggaagaaaggaagccaataagtgtgtgctatgagatgaccactgtggggaattggtgattagtaataccgagacctctgaaagaccacatgaaatacactcagggttttatctctcaaagaacaagagttgcagtaaattactcaccaattcctttctatcattgagtgagggcactactgggatcattaactatgcagcccttctgacctggcctgtacttaagctcaactgatccctkcagatgaagacttcacggggaatcacaggttctggaagtagaaactctttagtgtatacaagcaaaactgaatatcactgggttatagacaaggtcccgacaggaactgttacagaaagggagagagatagggtcaagtgctcaaagatcagtatattttatttgtatcacttgtttaacagctttcacatctctctcttgaatatctgtgtatctatgtatatctctatgtagctatttctgtctatctgta

SEQ ID NO: 447930 - DNA, 619 bp, Homo sapiens
catttactgattcttggatgttgaaccagccttgcatctgagggacaaaacctttttgttcatagtgtgtgaacttcttgatatgctgctggatttgatttgctagtattttgttgaggatttttgcttctatgttcatttggtatattagtctgaaattttctttttctgttgagtctctgccagattttggtatcaggctgttgctggctacacagaatgggttagggaagagctcatccttcccaattccttagattagttttagtaggattggtaccagttcttctttgtgtgtctgatagaattcagcagcgaattcatcctccagaacttttttgcttgacaagttctttattagtcattcaatttcagaagtcacagtctggaggtttctcaaagaacttcaaacagggctaacatttaacccagcaatgccattactagatatatacatcccccaaaaaaaatcattttacctaaaagacacatgcatttgtatgttcatcactgtgctattaacaatagcaaagacatggaatcaacccaagtgcccatcartgttagatcggataaagaaaatgtggtacatataaaccatggaataccacacagccat

SEQ ID NO: 447931 - DNA, 544 bp, Homo sapiens
tgttaatgtgcctgaaatctccaaattggatggaagtaaatgggctctttcaatatcacttttccccttgggataatagtttatcacagtcttgtggaaacttatgttaacagtttacttaagtagacacaacaatcagcagttaaagcttggcttattggggagtgggaaagacaaagaagtaggtaatagaaaaatcggattgtttggtttcccttttctcttcctcttagctcctggaatgaatgctcttacagctcagacgtctctttttttaagacgaattgtgactatactgagaccagggcttatcagtttttgtatccaaagaaatctttatatttataaatcgatgctttaggttaaaggcagytttctataactgtgggttagcgctcttaaagtgcttatccaaattcctattctacaggaatgagaatttacatttcatctgtgtctcccaagattgccacaatggtgacctcacttgtgtctaataatttttttattactaaatttagcacattagaaacaggaaattttg

SEQ ID NO: 447932 - DNA, 240 bp, Homo sapiens
acagaaaatgattaaaggcttaatttttttgtgtttggcttgttgcttttatagrctatgctgatatttgccagatcagctctcccccacctcagctgggctcctgacagtcgcctaaactctttactgcattttttgcagcatcatatattttcaccctagttaatataccaagagatatatttgacttgccccaaatgtttactacccactaacagtagttcaaattctgtccacttg

SEQ ID NO: 447933 - DNA, 240 bp, Homo sapiens
acagaaaatgattaaaggcttaatttttttgtgtttggcttgttgcttttatagactatgctgatatttgccagmtcagctctcccccacctcagctgggctcctgacagtcgcctaaactctttactgcattttttgcagcatcatatattttcaccctagttaatataccaagagatatatttgacttgccccaaatgtttactacccactaacagtagttcaaattctgtccacttg

SEQ ID NO: 447934 - DNA, 632 bp, Homo sapiens
caatagaaagaaatgaagaggaactggaaaactttaacatcatcttactagcctctaagtttaaaattgacattaaactattgagcatagagaactataaaataattttgttgttcatttgctcatatggtgaagtggcttttgcacaattccacagsggaatatgtattgaactctctcaattcatttcatatttattacctcttcttttacaagaatgcaaagtattcttttgttactggaaacatgaattatatttgcgcttgcaaagaggaggaggaattttctgcccttaactaagaatcacacatttttaggcacaaatccatgtgttcaataccaatggtaaattagctttggaaagctgtaacttagaggctagaaaaggcatcaatggtggcccattcatttttctacttaaagtattttttattttctctcctctttttatcctatcatattttcttaactcacagttaatttatacaaactaaatgtttatttcccaaaaaacatgtgtaccgtaattgtcatgttactaagtctcaatgatacttttttagatgacagtaaggccacagtttattgtgggaaacaggcacatattaaatatttagaatagaatatagttt

SEQ ID NO: 447935 - DNA, 632 bp, Homo sapiens
caatagaaagaaatgaagaggaactggaaaactttaacatcatcttactagcctctaagtttaaaattgacattaaactattgagcatagagaactataaaataattttgttgttcatttgctcatatggtgaagtggcttttgcacaattccacagcggaatatgtattgaactctctcaattcatttcatatttattacctcttcttttacaagaatrcaaagtattcttttgttactggaaacatgaattatatttgcgcttgcaaagaggaggaggaattttctgcccttaactaagaatcacacatttttaggcacaaatccatgtgttcaataccaatggtaaattagctttggaaagctgtaacttagaggctagaaaaggcatcaatggtggcccattcatttttctacttaaagtattttttattttctctcctctttttatcctatcatattttcttaactcacagttaatttatacaaactaaatgtttatttcccaaaaaacatgtgtaccgtaattgtcatgttactaagtctcaatgatacttttttagatgacagtaaggccacagtttattgtgggaaacaggcacatattaaatatttagaatagaatatagttt

SEQ ID NO: 447936 - DNA, 632 bp, Homo sapiens
caatagaaagaaatgaagaggaactggaaaactttaacatcatcttactagcctctaagtttaaaattgacattaaactattgagcatagagaactataaaataattttgttgttcatttgctcatatggtgaagtggcttttgcacaattccacagcggaatatgtattgaactctctcaattcatttcatatttattacctcttcttttacaagaatgcaaagtattcttttgttactggaaacatgaattatatttgcgcttgcaaagaggaggaggaattttctgcccttaactaagaatcacacatttttaggcacaaatccatgtgttcaataccaatggtaaattagctttggaaagctgtaacttagaggctagaaaaggcatcaatggtggcccattcatttttctacttaaagtattttttattttctctcctctttttatcctatcatattttyttaactcacagttaatttatacaaactaaatgtttatttcccaaaaaacatgtgtaccgtaattgtcatgttactaagtctcaatgatacttttttagatgacagtaaggccacagtttattgtgggaaacaggcacatattaaatatttagaatagaatatagttt

SEQ ID NO: 447937 - DNA, 470 bp, Homo sapiens
tgcttacggtgcagaggagtttctctacaggagtagctattattaatgccctttagccaaagaccaccaagaacacagctgtagtttaaaaaaatggatttattactctttgaagtgagtatgactgcttactatagggaattgttgggtgtcacaataagatggttaaaaaataaataatcttttataggatttggacttagtttgggtgatttggcagaaggtccaaggaagcaaggttttctgctagtttgaatatattttatgtatttcaaaataagaatttcacattgattttaatatgctggttgacgtgaaaggaaagcargggcaattttatgattggttaaaaaagaagtagctgtcactagtttagcaaaagaatggaaatactgttattttgtgggctgaggagcaacctagattttgttctacttagacaaactcatgaagtagccttgctttgtctc

SEQ ID NO: 447938 - DNA, 594 bp, Homo sapiens
tagtcatttcataatgtttttatacatcaaaacatcacatgatacattatatacatatatatacacacacacaatttttagttttatatctcagtaaaaccagaaaaaataaaaagaaaatgaacaacttgattaaaaataaacaaaagagctcaacagacactccattaaaaaagatacacagattgcaagtaagtttataaaaaaacttaatgtcatatattattaggaaattggaaattaaaacagcaataagataccactatgcatgtattagaattgccgtaacctgaaacagagatagtgtcaaatgctactgaagatgtggaatgacagaaactttcaytgattgcttgtggaaatgcaaagtggtacattcccacaactaaacatattctaaccatattatccagaaatcatgatccttaatatttagccaaatgaactgaaagcttgtatccacacagaagcctccacatggacatttgcctcagcaaccaagatgtctttcaacaggtgaatgaataattaaactgtggtacaaccctaatgtaaactatggacttagttgataatgatgtgtcaatgtaggtt

SEQ ID NO: 447939 - DNA, 333 bp, Homo sapiens
tcaccagcagaggatgcagaacagcaaatattgctgcctgatccttcctcttggagcttcatcccagaggggcacccacctgtttgaggttctgttgrcccctactgagagacgtctcccagtcaggctacacggaggtcagggacccacttgaggaggcagtgtgtccattctcagagctcaaacgctgtgttgagagagccactgctctcttcagagctgttagaccgggacatttaagtctgcagaagctgtcagctgcctttttttctgctatgccctgcccccagaggtagaatctagagaggcaatagtccttgctgagctgtggtg

SEQ ID NO: 447940 - DNA, 543 bp, Homo sapiens
tagcaatcaaatgggatttcgatagctttctctgcaaccataaagaaaataatasaacagttaaaatgtaaacatattttaaaatctttcctctctcatacggagcagcagccaagcagagggaggtaatgagaatttaagccagtaaagactattgagtgagagtaaatttaaccacaatcaacagggcatatcaagacagcatgaaactttataggcactagacttcaggaggatattggagaaaatcgtacatatttaagattaagtattcagcaaaagaaactgagtttaggtaatttatatataaagggatactattttaaacatattaggtaaatctttccatttataaaatgtcttggaggatacccagttaggaacaattcactaaatcaaaacaaaactggttttgggaagaaaactcttccagagccagtgggcagaggccacaggtttctgctgcttctgccaatactggacacagagagctacttctagagctaatgccacaactaactgtgggtattggatatagttgct

SEQ ID NO: 447941 - DNA, 543 bp, Homo sapiens
tagcaatcaaatgggatttcgatagctttctctgcaaccataaagaaaataatagaacagttaaaatgtaaacatattttaaaatctttcctctctcatayggagcagcagccaagcagagggaggtaatgagaatttaagccagtaaagactattgagtgagagtaaatttaaccacaatcaacagggcatatcaagacagcatgaaactttataggcactagacttcaggaggatattggagaaaatcgtacatatttaagattaagtattcagcaaaagaaactgagtttaggtaatttatatataaagggatactattttaaacatattaggtaaatctttccatttataaaatgtcttggaggatacccagttaggaacaattcactaaatcaaaacaaaactggttttgggaagaaaactcttccagagccagtgggcagaggccacaggtttctgctgcttctgccaatactggacacagagagctacttctagagctaatgccacaactaactgtgggtattggatatagttgct

SEQ ID NO: 447942 - DNA, 543 bp, Homo sapiens
tagcaatcaaatgggatttcgatagctttctctgcaaccataaagaaaataatagaacagttaaaatgtaaacatattttaaaatctttcctctctcatacggagcagcagccaagcagagggaggtaatgagaatttaagccagtaaagactattgagtgagagtaaatttaaccacaatcaacagggcatatcaagacagcatgaaactttataggcactagacttcaggaggatattggagaaaatcgtacatatttaagattaagtattyagcaaaagaaactgagtttaggtaatttatatataaagggatactattttaaacatattaggtaaatctttccatttataaaatgtcttggaggatacccagttaggaacaattcactaaatcaaaacaaaactggttttgggaagaaaactcttccagagccagtgggcagaggccacaggtttctgctgcttctgccaatactggacacagagagctacttctagagctaatgccacaactaactgtgggtattggatatagttgct

SEQ ID NO: 447943 - DNA, 543 bp, Homo sapiens
tagcaatcaaatgggatttcgatagctttctctgcaaccataaagaaaataatagaacagttaaaatgtaaacatattttaaaatctttcctctctcatacggagcagcagccaagcagagggaggtaatgagaatttaagccagtaaagactattgagtgagagtaaatttaaccacaatcaacagggcatatcaagacagcatgaaactttataggcactagacttcaggaggatattggagaaaatcgtacatatttaagattaagtattcagcaaaagaaactgagtttaggtaatttatatataaagggatactattttaaacatattaggtaaatctttccatttataaaatgtcttggaggatacccagttaggaacaattcacyaaatcaaaacaaaactggttttgggaagaaaactcttccagagccagtgggcagaggccacaggtttctgctgcttctgccaatactggacacagagagctacttctagagctaatgccacaactaactgtgggtattggatatagttgct

SEQ ID NO: 447944 - DNA, 553 bp, Homo sapiens
acaaacaaacaaagttagataaataaggggttcagttccttctaggcagtgaccttaataaaaatttttacatacatgacagtcacttatcagtgaggcttttagaactttattagggttagactggccaccattcagattttctttgcaaactttaaattttgttaacttgtatagattgccatatggttctagcttatctctaaagattaattcagttgtcataaaaatttccaaagtttaattttcactgaatcctctgataatgtaaggaaaactaaaacaggcaaaaagcaaaatctcacttttaggcatattaggcctttaacaatagtgtgtaacattatatttgtaccttgttaggccaacatgttgacatactcgcctagatgaaggaaaagttctaaatgtcatgtgtatctttctctcccccaaatactacttataatgataatttcaaaactgtcaccatattttggagtttactstctctgccctaatactgttgtaggtaaacaaacaacttcaaaaactgtgtagattaaagccttag

SEQ ID NO: 447945 - DNA, 534 bp, Homo sapiens
attatgtgtcttgggatgatctttttatggagaatctttcaggtgttttctatatttcctgaatttgcctataggcttctctagcaaggttagggaaattttcagagacaatattctgaaatatgttttccacgtttttttgccttccgtatgtccttttcagggatgtcaatgatttgtagatttgttgtcttatcataatcctgtatttctcagaggttttgttcattaattttcattcttttatccttatttttgactgtcttatttcagaaagscattcttcaagttctgagattctttcctcagcttggtctattatgctgttaatacttgctatggcattttgaagttcttatagcatgtttttcagctctagcacatcagttagtctcttttttttactgaaaattttgtgtgtcagctcctgtgtcattttgcctaggttgtcttccagtgtttcttatagttttggggtttacatttaagtcttaaaaacattttttttaaataaatttgagacaggctctcact

SEQ ID NO: 447946 - DNA, 534 bp, Homo sapiens
attatgtgtcttgggatgatctttttatggagaatctttcaggtgttttctatatttcctgaatttgcctataggcttctctagcaaggttagggaaattttcagagacaatattctgaaatatgttttccacgtttttttgccttccgtatgtccttttcagggatgtcaatgatttgtagatttgttgtcttatcataatcctgtatttctcagaggttttgttcattaattttcattcttttatccttatttttgactgtcttatttcagaaaggcattcttcaagttctgagattctttcctcagcttggtctattatgctgttaatacttgctatggcattttgaagttcttatagcatgtttttcagctctagcacatcagttagtctcttttttttactgaaaattttgtgtgtcagctcctgtgtcattttgcctaggttgtcttccagtgtttcttatagttttgggktttacatttaagtcttaaaaacattttttttaaataaatttgagacaggctctcact

SEQ ID NO: 447947 - DNA, 535 bp, Homo sapiens
atcttagtttcatgtcccagctctgaaacttactgcctgggcaaatcatttgaatttgctgaatttcagattctcctcagtaaaatcatataatagcagtwccttgcacagctggcattttattgcttcctctcattttttagttctttcctcagttttagcagccacacggtgtggattggattgaccctctctgaccccaacagtgagactgattggtctaatccaatgttgtcaatcactactccctttccacagtgattagtacatgtaatttaagccaataagcgtatggcatcttttggccactgtgtgtgtgtgacatgtgtttagggagggtcacatcagcatgaagcccagcatgatgctgtgcagggtaccagtgtctctttttccccaagtggctaaggagatgagagtgctagctgttgcttaaaggtatcttacaaagctagtgcaaagttgaaatcagcacaaaaatagagtctagagaaccctataaaaacaaggccagggttctttttgacccaactgg

SEQ ID NO: 447948 - DNA, 535 bp, Homo sapiens
atcttagtttcatgtcccagctctgaaacttactgcctgggcaaatcatttgaatttgctgaatttcagattctcctcagtaaaatcatataatagcagtaccttgcacagctggcattttattgcttcctctcattttttagttctttcctcagttttagcagccacacggtgtggattggattgaccctctctgaccccaacagtgagactgattggtctaatccaatgttgtcaatcactactccctttccacagtgattagtacatgtaatttaagccaataagcgtatggcatcttttggccactgtgtgtgtgtgacatgtgtttagggagggtcacatcagcatgaagcccagcatgatgctgygcagggtaccagtgtctctttttccccaagtggctaaggagatgagagtgctagctgttgcttaaaggtatcttacaaagctagtgcaaagttgaaatcagcacaaaaatagagtctagagaaccctataaaaacaaggccagggttctttttgacccaactgg

SEQ ID NO: 447949 - DNA, 552 bp, Homo sapiens
tctatgtttactgcagcaatactaataatagccaagatatgaaatcaacctaagtatccatcaacagatgaataaaaaaatggtatataaaatatgtttggaaatgtaaaggatctaaagttgccaaactttactatmtaatttcaatacttatttgaaaattctaagactctagatcaagcattgccaaaagaccaaaaggacaaagaagtatatattttagcttttttgggtcatacggtctttgttacaactactcaaatttctcattttagtgtgaaaacagtcatagacaatacataaataagtgcgtgtgactatgttccaataaaacattatttacaaaagctttcaatggactagatttgtccagggagccctagttcgctagcaacacatctagacataatggtcttggtgtaggatagatatatagatcaatgcaatggaattgagtactgaaatgtacccttacagttataatcaaatgatttttgacaaagatgccaaggcaatttaataaggaatgcagagtctctttcaacaaactct

SEQ ID NO: 447950 - DNA, 561 bp, Homo sapiens
gtgaaaatataaataaagatgtcatttgtgacattggtggtgacacaatagtggaaacaatataaatattcaaccactaggaaatgcttaaataatttaagctgtaatttatagaataaaatggtactcagcctttaaaaagataaaagaaatgaatattgctgtgtaaatgtcaacatggcatttaatttttaaaaagagcagtttggtgtaagctaatttttgattgaagtcataaacacccaattccatatgataaatttaatagatgtgactgaagttataggcatattaaaagttgttaaagaacataagggttacaaatagagaactatgaagggaaattgattaataaaattctctttgcaaacaaaagctccttttgcggcattagtgttatgaaaataaaacattttcctcacaaattaaaaggggtgaggatagatcatgtgtcccaataattttctgaatccagagtaaacaacctcaatttatttatttatttattcatttatttatttttggtattcagtccrtacttctcaactctttttcatttcc

SEQ ID NO: 447951 - DNA, 386 bp, Homo sapiens
tagaatttataatggaaaatactgttattctctaccagattcaaagttacataagttggtggtataaaaatgataaagagaggcagaacctttacatagacttgcttcactctccttcctatgcttgggaaaaatctactctgccttacgattttatttaaataattcttagattacattttcccccatcataygcaggaatgtttcttatgctaattcccatgcagaggttagaaaacatatagacaagaaaacaaacaaaaacaagaaactcagcgtgtcatgttggggtgacatgaatagtaaaagatacagctaatgagaagcattggccacaagttattatactaaggacagttaccaagctcaggtgtatagatttttct

SEQ ID NO: 447952 - DNA, 561 bp, Homo sapiens
aagatacagctaatgagaagcattggccacaagttattatactaaggacagttaccaagctcaggtgtatagatttttctcatctgaaatgggaaatcaactaaggatttaaagcaaagccatattgagttagagcagtagtagtgcaaaagagaaaggcaaagattaatttggaagacattaggaaaacagaatcaataggagcaagggctgcctgyatgcacagaggaaagttaagacttgttctagattctaaggttgaatgcctggaagaatgtttatcttcttagaaaaaatgtagaaatgaagagtaggtttatttaaaaatatgttgttaggtttttttttcttgttggattttaaatcattagaaatgactaggcttcattcagtagacttttaaaaaaatcacaaagaataatggtttttaaatgacagttgataaatcagaaatctctagggaccacgtgacaaaaatacagagtcctatgccccaactttggagattctagtttagacattaggtgggggccctggaaactggtatcaaaaacaaaacac

SEQ ID NO: 447953 - DNA, 360 bp, Homo sapiens
tttaaattaatcacatttgtaatgttccctttaccatgaaaggtaacgcatttacaggtttcggggattcttacattgacatctttgggaccattattcatcatatcttattacccttgtttttatttaaattggcaagtaaaaactatacatatttatggtgaataatatgatattttcatctatgtatagatgtgaaatgtatgtatagattgtgaaatggctaagttaagctatttaayatacgcattacctcacatacttttttggtgagaacacttaaaatctaccttcttagctattttcaagtatacatttattgttattaactatagtcaccatgatatacaatagagccct

SEQ ID NO: 447954 - DNA, 677 bp, Homo sapiens
ttgctccaaatccattcttgtattacagtagattttttttgggcatatgactactgagacatcttccaacctcccttgcattaagttatgactgattttttttcaatggaatgttaaaatgaatgaccatccaactcattcattaaatgaattttttagactgccttttctctcttcacaggatacaatatggaaaagtgttgacttattttcagtaatgcagatgagaataatgttttggtaatggcaaagcaaaaaatgtaaaatgaacttcgaaccctacttatttcctggagtagggtcatctgacctgccactcatttctagactgtcatgagaaagaaaaaatacattcagtttatttaatccactatattttgggttttacagtttatttatttttaaaatcaaagcctttactgcagctcatatataccagcagtttaacttttgtacaagttctattgttttttttctataataaggagctataaacaggcaaagtttgttatgattaactacataaatagctacagattattgctccataaagtattaattttgccaaraattgttttatctcattgtggcaaaagtattttgacataatatgacataattttcaataaagtacagtagacagttggtgtatacaaatattatcacaagaaaaaata

SEQ ID NO: 447955 - DNA, 617 bp, Homo sapiens
gttatttcaacttgctttatttatttattaataaaaatattagaatcattttccataattatgccaaattgtcagttcaaatagtgtcacaaaatcaagtttcattaccaaayggctttttagcaattccaatgtactatagttcatactgaaaatgtttatttttttcaaaacctacaggcacacacccgattttctcaccctcccagaattatggaatgatacagagatggctaatttaccaagatgtccacctaagcaatttggaaataataaaatttctacattttttttcatttttattttattggcatttgagtcatgcagatacacaggttatattatactgacacgtatttgcgtatctttacatatttcattattatttgacttttcatctcttgctcttcttcatttactggttcaatctcctatgttctttttatacattgttggaataacttttcaattaactacatgtaatctgccattaaatctaaccccttgtacagtaaggacatatttattatttccctatggatctatgctcaagcaagtagcccaaagattttttttttctgagaggcagatttctgtttcatacagggcttgatgtg

SEQ ID NO: 447956 - DNA, 617 bp, Homo sapiens
gttatttcaacttgctttatttatttattaataaaaatattagaatcattttccataattatgccaaattgtcagttcaaatagtgtcacaaaatcaagtttcattaccaaacggctttttagcaattccaatgtactatagttcatactgaaaatgtttatttttttcaaaaccyacaggcacacacccgattttctcaccctcccagaattatggaatgatacagagatggctaatttaccaagatgtccacctaagcaatttggaaataataaaatttctacattttttttcatttttattttattggcatttgagtcatgcagatacacaggttatattatactgacacgtatttgcgtatctttacatatttcattattatttgacttttcatctcttgctcttcttcatttactggttcaatctcctatgttctttttatacattgttggaataacttttcaattaactacatgtaatctgccattaaatctaaccccttgtacagtaaggacatatttattatttccctatggatctatgctcaagcaagtagcccaaagattttttttttctgagaggcagatttctgtttcatacagggcttgatgtg

SEQ ID NO: 447957 - DNA, 262 bp, Homo sapiens
agctatctatcatgaaatattgatcaaaataggctacttttttaatgcctagatatgggatggcaattaggattatttgaaaaaagggtgagcrttaatctgtagtgtgcgaggctatattgattttggagaatgacttggtaaagcaacagatattttctacacatttctaatgaatcaatctgttgaatgctttcatagtatagattttattaactgaaaacataataattaattgattaactgaactttcacttgcata

SEQ ID NO: 447958 - DNA, 608 bp, Homo sapiens
ctatatacacatccttataattactatacaaactaatgtaattataattacaaaacccagtttataatggtttattttgagttttatattaattgaatcatatcatatatttatttatgagttatatttcttcattacatagtaagtttgttaaaaacatctgtgattttatgtgaactatagtttatatattttattattatgtattactttattaaaggaatgaaacctatataattatttgggccacawtaataagtaaaacaaataaatatattatttgcccgttttattaatacaaatttaagatgtttttaatttagtagtattaaaagtaatttgtttatataaaaaataattttgccacaatattcctgtatatggctcctagagtacttgcgatggtgttccacagggtatattccaaggaacagaggactaggtcatagggatgctaaacttttaactttactagataataattgttttccacagtgtttttagaaattaacactgccaccacgacatatgacgatcccattagttcttccaaatcttcaccaaatttgtcagcatcttttttttcatttttccaacacagcaaatca

SEQ ID NO: 447959 - DNA, 491 bp, Homo sapiens
ttctttcaccctctcataagctattccgtaaataatggatacttccaattgtcctaatattatctgaattttttctctttttaaaatttacttgtaaattttaaaacatatattcttaatccttcatcatttttacatctttagtgattgtacatttgacagtgtcagtatgcrttcttaatttgatagagttctagccaaagttaaatgctgggagaacaaatagaaactgcagtgttctcacaaaacaggtaatggaaggttcgctctacaagtgtgatgttatacttctataaatttaatgaataagccgtttctgtgttgatatgctgctcccctttggaagtgtttaaactgcttccgaggttgaaatgagatacagcagtatcttattcattatgtgatttttgctctctgcaataatctgaacctaccaataagaagaggaaattatcccgatgaaagctgtatttctgaaattccagtttttt

SEQ ID NO: 447960 - DNA, 434 bp, Homo sapiens
tttcttccagtatctagtgaaatggtataagaaatacatactggaaatccattgtatattratgattgctccttaaattaactctagagaacatgattttcacttacccattcatttattctttcagtgaaattacattttatgaacccttacgaagtgctaagcagtttgaaaacaaggtttttaatctctcaatgcctcagttttatcaccataaagtagagataataacatattttactcattgagttgtcttaaggattaaatgagttgctctatctatgagacagctcctagtacatagtaagcactcaaaaaatacctgccaatattaataatattatttggccaaagaaataagtgacaaactaaggaatatcaatgaccatgtgagaacatttttttccataaatctcttttctgtcttgccctgt

SEQ ID NO: 447961 - DNA, 349 bp, Homo sapiens
tctagtatgttagccaccagccacatttggctattgaacactagcacaaattgagatgtgctggtaagtccaaaacacacagcaaatttagaagacttagtaccaacaatatgtaaaatacttcataaacattttaaaattgatatgttgtgataatgttatttgttaagactttgttatatataataaaaaatatgttttttttacctttttcagtgtgagtactagaaaaactgaaattacatatgtggttcaaattgcatttctgttggactaagctcatctagaacttaccccactatatgacaaaacaatttggctttcygataattcacaaaataggctccat

SEQ ID NO: 447962 - DNA, 482 bp, Homo sapiens
ttggtttgttcttgtttccctagttcttctagctgtgatgttagtatgttaatttgagatctttccaactctttgatgtgggcatttagtgctataaactttcctcttaacactgccttagctgtrtccagagattctagtactttttgtctttgttttcattagttctaaagtatgtcttgatttcttccttaatttcattatttacccaaaagtcattcaggagcaggttatttaattgtcatgtaattgtacagttttgagtgatcttctcagtattgatttatatttttattgcacagtggtccaagagtgtggttggtataatttgagagttttttgaatttgccaagtattgttttatgtctgattatatggttaattttagagtatttgccatgtagtgatgagaagaatgtttattctattgcttgggaatggagagttctgtagatgtctattaggtacatttgatcaggtgt

SEQ ID NO: 447963 - DNA, 482 bp, Homo sapiens
ttggtttgttcttgtttccctagttcttctagctgtgatgttagtatgttaatttgagatctttccaactctttgatgtgggcatttagtgctataaactttcctcttaacactgccttagctgtgtccagagattctagtactttttgtctttgttttcattagttstaaagtatgtcttgatttcttccttaatttcattatttacccaaaagtcattcaggagcaggttatttaattgtcatgtaattgtacagttttgagtgatcttctcagtattgatttatatttttattgcacagtggtccaagagtgtggttggtataatttgagagttttttgaatttgccaagtattgttttatgtctgattatatggttaattttagagtatttgccatgtagtgatgagaagaatgtttattctattgcttgggaatggagagttctgtagatgtctattaggtacatttgatcaggtgt

SEQ ID NO: 447964 - DNA, 647 bp, Homo sapiens
tctctttgtaggtctctaagcatttgctttatgaatcttggtactactgtgttgggtgtgtgtatgattagggcagtgaggtcttcttgttgaattgaaccctgtatcattatataatgcccttctttgtattttttttttaaattgttggtttgaagtctgtttgtctgaaattaggactgcaacaacctctgctcttatctgtttttcatttgcttgactgatttatctccatttccttattttgagcctatggagtgtaaattagttcagccattgggaaaagcagcacagtgattcctcaaataacttaaaacaggattaccactctaccaattaatgtcattaytgagtatatacccccaaaaatataaatcattctaccatagagacacatgtactattatgttcattgcataactgtttacaatagcaaagatgtggaattaacctaaatgaccatcaacagtagacttggataaagaaaatgtacatattcaccatggaatactatgcagccataaaaaagaatgagatcatgtcctttacagcaacatggatggagctggaggccattatcctaaggaaactaacacaggaacagaaaaccaaatactacatgttctcacttataagtgggagctaaa

SEQ ID NO: 447965 - DNA, 426 bp, Homo sapiens
ttaattatagaaagtatttattgaaactctatacatgattcatgtctcctagtgtctcctgatttatgttgaatatactgttcttttgcattattcaagtttatagtattcacatgcttcaattacaattcagtctttttttttctgtatgttgattgaacaaactaaaaagcaatatacaagattcacaatatcatgcttaagttactactttttacttcaagttcaaattatataattgaactcataaagaaaaaaacaaaattatatcagtaagtgtatgtgtcttgattgcttaaaagttgcactacattttttggcatagatggaataaggctttttgaacagcttttattttagttagagttttagattactttttcaccttatttatagaaartatttgatttgtagtcatcataaaat

SEQ ID NO: 447966 - DNA, 512 bp, Homo sapiens
taacttgtttccagcaagtaaacatacaatgatgcaagtaaaacatatgggaggatgagttgtagcaatttttccagcttgccagttgcttcaaatgtggtcatatggtcactatagtcaatttcaaagaaattagcattcaaattcaccagctaaccccaattttatgcttcattttttccagaattcatacaaaaataagagagttaacagtgtaaaattttaatatcgtaaaaacgggaaagcctcttaggaaaaaaattacatcttaagaaagtagagagtttaggctcatagacaaggacaattaatataagaaactccatagttttytttctttaaattagaataactatggaagatttgtcaggcattctatgaaatcagtggatgggaatgcacccacccctaaaacccaaacaaacaaaaataatgtatctcttaatctgtctgtctctctttctctttctcctttatgtgcatatgtgtgataagatatctaccatcccttt

SEQ ID NO: 447967 - DNA, 596 bp, Homo sapiens
tttacattagagttaaagataatttttggagaagctactgtccaaacttttaataagtttttagctaatgattactaaccaagttcagtactttcgttatcttggtgaaaaaatgttttaaaatgtagcctgaatcatagcaaagtggtcaggagcaaggtctccagagtcaaattatgtgagttatctccaaaatggtcataataatagtgtctctttcacacaattattgtgaggactaaatgaaatcatagttcttaaagattatccatcatctgatggcctgaagaaaatgtaaactaatatcatgacatgaggaagaaatttgagtcattaattataatttatctcagtatgaaagcagaagttgattctaccagcttgtacttcttcatctcattttccaacaaagcagaggagaccatatatattcaatcaagtcttgttatatggaactamaatccaccccgccccctaccacctctctctctcttttgctctctctctctctctctatatatatatataaatttatatatatatcaattttttatctatatcaattttatatgtatcaattatatatatatatatat

SEQ ID NO: 447968 - DNA, 596 bp, Homo sapiens
tttacattagagttaaagataatttttggagaagctactgtccaaacttttaataagtttttagctaatgattactaaccaagttcagtactttcgttatcttggtgaaaaaatgttttaaaatgtagcctgaatcatagcaaagtggtcaggagcaaggtctccagagtcaaattatgtgagttatctccaaaatggtcataataatagtgtctctttcacacaattattgtgaggactaaatgaaatcatagttcttaaagattatccatcatctgatggcctgaagaaaatgtaaactaatatcatgacatgaggaagaaatttgagtcattaattataatttatctcagtatgaaagcagaagttgattctaccagcttgtacttcttcatctcattttccaacaaagcagaggagaccatatatattcaatcaagtcttgttatatggaactacaatccaccccgccccctaccacctctctctctcttttgctctctctctctctctmtatatatatatataaatttatatatatatcaattttttatctatatcaattttatatgtatcaattatatatatatatatat

SEQ ID NO: 447969 - DNA, 562 bp, Homo sapiens
tagttgatagtatccttgggaatggctggacacttcctcagtgtggtcttatttccaacctaaaatagacagcaaaggaaagttctattcagtgatttctcatttgaactaagcaagaaataagaattatatatcttttatcagctgactgtgtgcatgttttcagagccctctacttgtaaaagcagtaactgcatgtatacttggccatgctccaactgtatctaatttaccacctttttgcacagtatgaactttaagccatccaatcaaaaacttttcatttatagcctatgaaatatgaatgcaaattttcataatatattttaaaacttattgttaactgttttttggagttactatttctgaaatgcttatatataccatttaatcctatctatttcttttctgactgtgtgtgcacagatgtgcataactttatgaaatggaaacttctttcttggagagcagatttaaaatatattaagtaattattctaaatcckttaagacattttgataatagagcagacagtataattttgagtactgaaatcagaagc

SEQ ID NO: 447970 - DNA, 546 bp, Homo sapiens
tatgcatcagcatatggctcagtttctactatctgatgactttatgcataatgctstgataaactgattcttttcaactgcccatttttcttgcccctctgatcctggtatggataaagcatatgggaaatcacagtgattaatttaccaaagttctcactctgtcggccaacagcaaattacatttggacaatacaagtctcagaattcaatgtacatctctaattttcctaccaaaatattgtggcctattgttgcatgacaatggcagtttctgagtgggatttgagacaacagtagcagtgtgtttgcctcaaggaaagtaccaatcgttggctgcctaagtgcttgcttactttttacgttgtgcttccaaatcagggaatagaagaaggggattagaaaaatatcctctaaccaatttgtctttattacattattcaatacagttctataggccttgcacttggagaaaatttgtcccagattataacagattgactgccaatcctattctgcattcaaacaatttattggatgtttttg

SEQ ID NO: 447971 - DNA, 519 bp, Homo sapiens
aaatgtttggcttgggtaaagaactgttaaaaccttaaaataaaatggaatgaccccattttttaaaaacttaatttttaatcaggtttttaaacacagtataattccttcagtatggcagctgtgccatagagttcactctatgtaatgtttttgtatttaaaaaaatagtttgtactttaaaaaaatacatagctgtattgacatatagtttatayaatgtacattttatccatctaaaagtaaaattcagcctcccaagtacctgggattacaggcacctaccaccatgcctagctaatttttagctagctaattttttagctagctaatttttagctagtatttttagtagagacagggttttgccatgttggccagacttgtctcgaactcctgacctcaagtgatctgcccatctcagcctcccaaagtgctgggattacaggtgtgagccaccatgcccagcctgttttgtggttttgatttatattgttctaatgacaaataatgttgatc

SEQ ID NO: 447972 - DNA, 629 bp, Homo sapiens
gcacactgaccccacatagtccttatatgccggagccaggctgagatgtgcgggccacataggctcccctgtccagggcagggtccccattccgcagctcttccagttctgccttgaaccctcactctgaaggctcaaaatctagtctcacccaatgtctaatctgaatctaaccccaaggaaacaaccagaaaaatccaaactgaggatttgtgaaataactgtcycagactcttcaaaaatcttaatgttatagaaagaccacaacaaatctgaggattgttctctagactaaaggggactccccaaaactccccactccccaacaggccccagtgtgtaatgttcccctccctgcgtccatgtgttctcattgttcatctcccacttatgagtgagaacatgcggtgtttggttttctgttcctttgttagtttgctgagaatgatagtttccagcttcatccatgtccctgcaaaggatgacaccagagaaatgacaactaaatacagtgaatggtcccgcattagatcctaaaattttcttaaatgccataaaagatattagtgggaacattgaggaaatttgaataggatgcatattagataatattgttgtataaacactca

SEQ ID NO: 447973 - DNA, 569 bp, Homo sapiens
atctgaatggtttttgcagaagcttcctgctggtctaggggatgcttcacaaaatattttcgaaagggtattgagaaagagaagtctttctttgtctgttcccaaaacataaagctttgagtctaccagtggagacattttctatactgcatacctgataaatgtgtaaaactagaatgaataaaataagtagaaatagaggagggcaggaggatgagagcaaatacaggaataggaaaaagcagggtacagatagagagaaagagagagagatagagagagtactttttagctgctgtctgtatgttcttcagtcatttctgaccacagcattcaaagtatcagatgaagacctttatataaattcttctaaattcttttttttaatatactttaagttctcggatacatgtgcagaatgtgcaggtttgttacacaggtatacatgtgccagggtggtttgctgcacccatcaacccgtcatctacattaggtatttctcctgatgttatccctctcytagcccctcaccctgcaacaggccccagtgtgggatgttcccctcgctg

SEQ ID NO: 447974 - DNA, 569 bp, Homo sapiens
atctgaatggtttttgcagaagcttcctgctggtctaggggatgcttcacaaaatattttcgaaagggtattgagaaagagaagtctttctttgtctgttcccaaaacataaagctttgagtctaccagtggagacattttctatactgcatacctgataaatgtgtaaaactagaatgaataaaataagtagaaatagaggagggcaggaggatgagagcaaatacaggaataggaaaaagcagggtacagatagagagaaagagagagagatagagagagtactttttagctgctgtctgtatgttcttcagtcatttctgaccacagcattcaaagtatcagatgaagacctttatataaattcttctaaattcttttttttaatatactttaagttctcggatacatgtgcagaatgtgcaggtttgttacacaggtatacatgtgccagggtggtttgctgcacccatcaacccgtcatctacattaggtatttctcctgatgttatccctctcctagcccctcacccygcaacaggccccagtgtgggatgttcccctcgctg

SEQ ID NO: 447975 - DNA, 540 bp, Homo sapiens
ctcaggcactgacgttgatgtggctcaaacctaattttctagaggacagcacaattctcattgatttggggagatgtattcacatcgtcttgctttgcagaccagctttcccagacgccatgcaaaaacagtctctaaacaccagtgagaagggtgaaagctctctcttaaaaaaaaaaaaaagtgcygaaaggaacttaccaccaaaaaggccatattttgacatgattagtagcacagcacggtcctaccataaggtgctaaataatcagataagtataaaagcattcaattatgtgcatgaaatgatttacctctacactcaactggaaaaatttggcatttcatatatattaagatgaaatctcccaaagaaacgactgaatttattttacatggtataagtatataagcaatttcacaacaactatataggaatctcctttcagacctatttgtatcttgttttctctttccctataacatctctaaaatgcaatgtagtttattcatgtggttgctaaatatttattaagtgca

SEQ ID NO: 447976 - DNA, 574 bp, Homo sapiens
caacaagttatcctgaagatctcactatgatcattgatgaagttggttataccacataaccaattttcaatgtagacaaaacagccttatattggaagaaggtgttatctaggactttcacagctagagaggagaggtcaatgcctgatttcaaagcttcaaaagacagactgactctatcgttaggggtgaatgcagctggctactttactattgtgaaaattctagggcccttaagaattatacgaaatctactctgcctgtactctaaaaatggaacaatgaagcctgaataacagaacatctgtttacascatggtttactgagtattttaagtccactgttgagacctactgctcagaaaaaaagattcctttcaaaatattactgctccttgacaacagacctggtcacccaagagttctaatgaagacatacaaggaaattaatgttgttttcacatctgctaacaaaacatctactctgcagcccatggatcaaggagtaattctgactttcaagtcttattatttaggacatacatttcataaggctatagctgccataaatagt

SEQ ID NO: 447977 - DNA, 606 bp, Homo sapiens
cttatattatgccatatatgaaaatcaactcaaaatggattaacgacagatggaagacttgcaataataaaaatcctaaaagaaaacacagaggaaaagctccttggcattggtcttcacaatgattttttggatatgrcaccaaaagcataggcaacaaaagtgaaagtagacaggtggggctacatcaaactcaaaactttttcatagcaaaggaaaccatcaaaaaaatgaaaaggcaacctacagaatgggagaaaatatttgcaagccatgtatctgataaggggttaatactcaaaatatgtaaggaattcattacaactcaatagtagacaacaaacaaccttatttttaaaacgggcaaaggacctgaatggacttttttttgttaaagaaggcatataaatggccagcaggcatgtaaaaagttgcttaatatcacgaatcatcaaggaaatgcaatgaaaaccataacgagagatcacctcacactcctagcactttggaaggttaggcaggaggatcgcataaagccaaaagttgaaatcagcgtgaaaaacatagggagaccttgtccttacaaaaattcttgaaaattagcct

SEQ ID NO: 447978 - DNA, 584 bp, Homo sapiens
tggtctacattttaggattcttgttctacattccctgaatgaagcaatgatggcaggaaagtctatgcataactcaatttgcctcctcaaaatcatcctggaatgaggcaggcaaataaataaattaataaatagggaacaaattgttcctataacccgtccctraaaacataattgcaaaggatccccactgtatttacgattgcttctgggaaaatgtcaagctgaaggattgtaggcagcctccttgagtcaccctagtgacaatcattaagtattcttagataattaggaatcttgacaaatcctaaatttcccaataacctaatagtttgtagaaatagcacgctatatgtcccaggcagtctaaataggtgcacaagggtacatatgtgaagtattataagtgctcagttgtcatatttttccacacccatttatgaaacatgctttgaaattagattttgaattcatctctgtcctttgtgatgaaataaaatacaaaacattgaaaaagttaaaccagttaagcaacaacacaaactactcttccctactaggcaataatctagttagatggaaaa

SEQ ID NO: 447979 - DNA, 584 bp, Homo sapiens
tggtctacattttaggattcttgttctacattccctgaatgaagcaatgatggcaggaaagtctatgcataactcaatttgcctcctcaaaatcatcctggaatgaggcaggcaaataaataaattaataaatagggaacaaattgttcctataacccgtccctaaaaacataattgcaaaggatccccactgtatttacgattgcttctgggaaaatgtcaagctgaaggattgyaggcagcctccttgagtcaccctagtgacaatcattaagtattcttagataattaggaatcttgacaaatcctaaatttcccaataacctaatagtttgtagaaatagcacgctatatgtcccaggcagtctaaataggtgcacaagggtacatatgtgaagtattataagtgctcagttgtcatatttttccacacccatttatgaaacatgctttgaaattagattttgaattcatctctgtcctttgtgatgaaataaaatacaaaacattgaaaaagttaaaccagttaagcaacaacacaaactactcttccctactaggcaataatctagttagatggaaaa

SEQ ID NO: 447980 - DNA, 556 bp, Homo sapiens
caagggtctaacagcttgatgctgtgttcttagataattaaattcttagaaaatcattccacatttgagggagaagcgaaggacgcaaagagttcagtctttatttaaagtcgcttatacattgttacctgctgtttccggcttttcatgaaatcagcagggaggatttgatattaaaaatcaggttttttctctctttttgcggggagagggtgaaaatccttgtagkgggagtggaattattaactggaactctttctgagctatcactttaccttggcatctcatcatgtgctggaagatccagtctgttttgcaggctaaagctgaggcttgtaccagtaaggttcctttataaccttattacacaaagtgctttataatttacaaagccactttttcattcattattgcacgtgaccctcatagccacctcaggaagtttgaaagacggcatattcttccagagtatcatcccaagagagactgaccagctgtccataggccccatgagatggtacttaccttgaataaatcatcctaagctattatttag

SEQ ID NO: 447981 - DNA, 451 bp, Homo sapiens
gtttctgtgtggcttgctgagactcacttaaaatgacattgacttttattaaaccttaaggtttgtgatgggctttttgcacaaaagcctacttctccaggggacgtccctgctctctcaggttgctatcttgttactctggcctgaaacaagttagcagccactttcccrcagacctgcacaaggcacatcacatcaacggctgttgattagagcataatgacttgttagatcatgtttattgtgcaaatgaacctgaatgttactaggacagcatatccatgtaggcttagaaaacttaatttttaatgccccttctatctttcatcaggctaaagcttttggatttatggttattcattctagctataaatatattaatagtattttgggctggtcagatatggggcatgacctttgacatcctgcttggctatgcctgggaatttga

SEQ ID NO: 447982 - DNA, 491 bp, Homo sapiens
gtgagcatagcaggttcacaaccacaaatgtaagcaggagactcaaatcacmaggagcacctagatctgtgaacagcagcttgtggtggcatcaggttcaactttctgagaccaccggtgtgggcagtgtctttgcaggcacatactcggcagcagtgtatctgaagacagatctcaaggctcttctcttcactaattattaagatgatagatgatggataccctcacgttacaacatccccactaacgctgtggacaagtgaattcagaaacccacacctaaatacacagtgaagagtaggatgagaatactgcaggataggttaggaatgcaggcattcgaccccatagagtctatttaaaataagagaagggccctagtattgtgctgtggtcctcctatatatagttctttatttttccaatttcataaaggccatacagtttttcttcctttcttcacaaatgtgctgatgaacccatgagtattt

SEQ ID NO: 447983 - DNA, 491 bp, Homo sapiens
gtgagcatagcaggttcacaaccacaaatgtaagcaggagactcaaatcaccaggagcacctagatctgtgaacagcagcttgtggtggcatcaggttcaactttctgagaccaccggtgtgggcagtgtctttgcaggcacatactcggcagcagtgtatctgaagacagatctcaaggctcttctcttcaytaattattaagatgatagatgatggataccctcacgttacaacatccccactaacgctgtggacaagtgaattcagaaacccacacctaaatacacagtgaagagtaggatgagaatactgcaggataggttaggaatgcaggcattcgaccccatagagtctatttaaaataagagaagggccctagtattgtgctgtggtcctcctatatatagttctttatttttccaatttcataaaggccatacagtttttcttcctttcttcacaaatgtgctgatgaacccatgagtattt

SEQ ID NO: 447984 - DNA, 491 bp, Homo sapiens
gtgagcatagcaggttcacaaccacaaatgtaagcaggagactcaaatcaccaggagcacctagatctgtgaacagcagcttgtggtggcatcaggttcaactttctgagaccaccggtgtgggcagtgtctttgcaggcacatactcggcagcagtgtatctgaagacagatctcaaggctcttctcttcactaattattaagatgatagatgatggataccctcacgttacaacatccccactaacgctgtggacaagtgaattcagaaacccmcacctaaatacacagtgaagagtaggatgagaatactgcaggataggttaggaatgcaggcattcgaccccatagagtctatttaaaataagagaagggccctagtattgtgctgtggtcctcctatatatagttctttatttttccaatttcataaaggccatacagtttttcttcctttcttcacaaatgtgctgatgaacccatgagtattt

SEQ ID NO: 447985 - DNA, 579 bp, Homo sapiens
aatatcctcagggttaaaaatgttggagtccaagcattctatattcttgatttgtatggtttcaattatgactcagcaytttaggaaaacattggctctataatctgtcaccctcaccccatttaaataaaaacatacttttttggacacaaggatcaggcatacacatctacacagtggatcacatcatttttgggggcaaactgaaaactgtttttatactcaaacatactgttgggaaactgtgaaataaaaatttctgatgtttgttaaaaattgggaagaaagacattaatactattgtagtagattttatggccatcgtaatagggttcagttcagaaattgatcataactctgaacacagacaacgaagaatttatagtcaataagcagaataaatcagtggataagaattattgaaaaacatttgataaaataccaaaggaggaagaggaactttttatagcagaagcctggttacaggttggctaaggacttaaatatcaaagaaagggaatcacgatattagtagacataagggatatgtggatttttactaaacagtattagcaggat

SEQ ID NO: 447986 - DNA, 579 bp, Homo sapiens
aatatcctcagggttaaaaatgttggagtccaagcattctatattcttgatttgtatggtttcaattatgactcagcattttaggaaaacattggctctataatctgtcaccctcaccccatttaaataaaaacatacttttttggacacaaggatcaggcatacacatctacacagtggatcacatcatttttgggggcaaactgaaaactgtttttatactcaaacatactgttgggaaactgtgaaataaaaatttctgatgtttgttaaaaattgggaagaaagacattaatactattgtagtagattttatggccatcgtaatagggttcagttcagaaattgatcataactctgaacacagacaacgaagaatttatagtcaataagcagaataaatcagtggataaraattattgaaaaacatttgataaaataccaaaggaggaagaggaactttttatagcagaagcctggttacaggttggctaaggacttaaatatcaaagaaagggaatcacgatattagtagacataagggatatgtggatttttactaaacagtattagcaggat

SEQ ID NO: 447987 - DNA, 535 bp, Homo sapiens
atagcacagtggatctgccataatgtgatcagattgcttctttaagtgggacctaatatgctctgcatctctgggtggaacttcccaaccagggcctccagcaactcccactgatgttgtctggctggcagaggtttaaaaacttcctgggccagagttcctagagagaggggttggccaccatctttgctgtttcagcctccaggctttggagagcccaatctgatgaagggcagaaatggtaccccgcacagcatggctgatctatgaaagtggggctagatggcttaagtgggtccccaatcctattcctcctagctgggtgagacctaccaactggggtttccagtcacctcctacaggtgtgttcsagccctcaacatgtctgcacccgccctgggatggagctcccagggaagggagtgggctgctatctttcttgtttcacagccttcactggtgatacccccagatactggaaaatccgaggtgacaagagagtggagcagatgcccaacaaactacagcagcccca

SEQ ID NO: 447988 - DNA, 574 bp, Homo sapiens
agacctaccaactggggtttccagtcacctcctacaggtgtgttccagccctcaacatgtctgcacccgccctgggatggagctcccagggaagggagtgggctgctatctttcttgtttcacagccttcactggtgatacccccagatactggaaaatccgaggtgacaagagagtggagcagatgcccaacaaactacagcagccccacacaaaatggccaaacagttaaaaggaagagaaacaaacaaaaatctcattcaaaggccagcaacctcaaagattaaagatagataggcacacaaaggtgagaatcacaacaagaatactaaaaactcaaaaatcagggtgctctccctctcccaaaygaccacactacttctccagcaagagttcagaataagggtgaggctgtgatccctgaaataacagaagtagaccccagaatgtggataaaaatgaacttcactgatctaaaggagcatgctctaactcaatacaagaaagctaaaaattacaatataatattgcaggagctgacaaacaaattagccaggatagagaggagcctaac

SEQ ID NO: 447989 - DNA, 437 bp, Homo sapiens
agggtgctctccctctcccaaacgaccacactacttctccagcaagagttcagaataagggtgaggctgtgatccctgaaataacagaagtagaccccagaatgtggataaaaatgaacttcactgatctaaaggagcatgctctaactcaatacaagaaagctaaaaattacaatataatattgcaggagctgacaaacaaattagccaggatagagaggagcctaaccaacccgatagcactgtaaaacacaatacaaaaatttcrtaatgcaatcacaagtattaatgaggaaagaaactcagagcttgaagtttgtatttctgaaagaagacatgcagagaagaatagaaaaaaagaatgaaaggaataaacaaaacctttgagaaatatgggattatgtaaagagaccaaatctacaactgattggtgtact

SEQ ID NO: 447990 - DNA, 502 bp, Homo sapiens
ttacaatataatattgcaggagctgacaaacaaattagccaggatagagaggagcctaaccaacccgatagcactgtaaaacacaatacaaaaatttcataatgcaatcacaagtattaatgaggaaagaaactcagagcttgaagtttgtatttctgaaagaagacatgcagagaagartagaaaaaaagaatgaaaggaataaacaaaacctttgagaaatatgggattatgtaaagagaccaaatctacaactgattggtgtacttgaaagagctggggagaatggaaccaatcaggaaaacatatttcaggatatcatcaatgagaacttccccaaccttgctacactggccaacaattcagaaaatggagagaagttcagtaagatactccaagaaaaaatcatacccaagacacgtaaacgtcagattccccaaacttgaaatggaagaaaaaaaaagaaaaaaaagctcagccgcagagaaaagccaagtcacct

SEQ ID NO: 447991 - DNA, 519 bp, Homo sapiens
attagccaggatagagaggagcctaaccaacccgatagcactgtaaaacacaatacaaaaatttcataatgcaatcacaagtattaatgaggaaagaaactcagagcttgaagtttgtatttctgaaagaagacatgcagagaagaatagaaaaaaagaatgaaaggaataaacaaaacctttgagaaatatgggattatgtaaagagaccaaatctacaactgattggtgtacttgaaagagctggggagaatggaaccaatcaggaaaacatatttcaggatatcatcaatgagaacttccccaaccttgctacactggccaacaattcagaaaatggagagaagttcagtaagatactccaagaaaaaatcatacccaagacacrtaaacgtcagattccccaaacttgaaatggaagaaaaaaaaagaaaaaaaagctcagccgcagagaaaagccaagtcacctacaaaaagaagttgatcagactaagagcagagctgtcagtgagaacccta

SEQ ID NO: 447992 - DNA, 538 bp, Homo sapiens
aaatggaagaaaaaaaaagaaaaaaaagctcagccgcagagaaaagccaagtcacctacaaaaagaagttgatcagactaagagcagagctgtcagtgagaaccctacaagccaaaagagattgggggccaatatttaacgttcttaaagaaaataaactttaagccagaattttatatctggccaaactaagcttaatctggggagaaataacatccctttcagacaagcaaattccgagttaattcatgaacaccagacatgcttttcaagagctcctgaaggaagcaccaatttggaaagggaaaattattmccagccaccataaaaacacactcaagtacacagaccattgacactataaatcaaccacataaacaagtctgaaaaataaaaataaccagctagcatcaagataacaagataaaatctacgcataacaatacttaacttaaatgtaaatgggataaatgccccagttgaaacacacagggtggcaattgtataaaaaccaagacccattggtatgctcttcaag

SEQ ID NO: 447993 - DNA, 538 bp, Homo sapiens
aaatggaagaaaaaaaaagaaaaaaaagctcagccgcagagaaaagccaagtcacctacaaaaagaagttgatcagactaagagcagagctgtcagtgagaaccctacaagccaaaagagattgggggccaatatttaacgttcttaaagaaaataaactttaagccagaattttatatctggccaaactaagcttaatctggggagaaataacatccctttcagacaagcaaattccgagttaattcatgaacaccagacatgcttttcaagagctcctgaaggaagcaccaatttggaaagggaaaattattaccagccaccayaaaaacacactcaagtacacagaccattgacactataaatcaaccacataaacaagtctgaaaaataaaaataaccagctagcatcaagataacaagataaaatctacgcataacaatacttaacttaaatgtaaatgggataaatgccccagttgaaacacacagggtggcaattgtataaaaaccaagacccattggtatgctcttcaag

SEQ ID NO: 447994 - DNA, 538 bp, Homo sapiens
aaatggaagaaaaaaaaagaaaaaaaagctcagccgcagagaaaagccaagtcacctacaaaaagaagttgatcagactaagagcagagctgtcagtgagaaccctacaagccaaaagagattgggggccaatatttaacgttcttaaagaaaataaactttaagccagaattttatatctggccaaactaagcttaatctggggagaaataacatccctttcagacaagcaaattccgagttaattcatgaacaccagacatgcttttcaagagctcctgaaggaagcaccaatttggaaagggaaaattattaccagccaccataaaaacacactcaagtacacagaccattgacactataaatcaaccacataaacaagtctgaaaaataaaaataaccagctagcatcaagataacaagataaaatctacgcataacaatacttamcttaaatgtaaatgggataaatgccccagttgaaacacacagggtggcaattgtataaaaaccaagacccattggtatgctcttcaag

SEQ ID NO: 447995 - DNA, 565 bp, Homo sapiens
aagagaaaaaggcattcaaattgaaagaaaagaaattaaacaacacctgatgtcagacgacatgattctatatcttgaaaacccctattgtctcaaccccaaagcttcttaagctgataaatatctttaacaaagtcccaagatacaaaataaatgggcmaaaatcactagcactaaatccttatataccaacaacagtcaagccaagagcaaaatcgtgaatgaacactcattcacagttaccacaaaaagaataaaataccaaggaatgtatctaacaagagaagtgaaaggccactacaaggagaactataaaccacttctcaaagaaatcagacatgacataaacaaatagaaaaacatttcatgcttatggatagaaagagttaatattgttaaagtagacacactccacaaagaaatttatagagttaatagtatttccgttaaactaccaatgacatttttcacaaaactagaaaagctattttaaaatttatatggaaccaacaaaggcctgaatagtcaagacaagcccaaacaaaaagaactaagctgaaaacat

SEQ ID NO: 447996 - DNA, 551 bp, Homo sapiens
  misc_feature (1)...(551): n = A,T,C or G
nngtcgcgcgccctcccccccacccccaccaccacgcccgcggtcggcgggagaggccgggagggaggaagacgaacggaaggacggacggcgccggacgcgcacgccccgccgggccccccgcacgcacgcgcgcgcgcgcgcgcggacaaacccttgtgtcgagggctgactttcaatagatcgcagcgagggagctgctctgctacgtacgaaaccccgacccagaagcaggtcgtctacgaatggtttagcgccaggttccccacgaacgtgcggtgcgtgacgggcgagggggcggccgcctttccrgccgcgccccgtttcccaggacgaagggcactccgcaccggaccccggtcccggcgcgcggcggggcacgcgccctcccgcgcgcgcggggcgcgtggaggggggggcggcccgccggcggggacaggcgggggaccggctatccgaggccaaccgaggctccgcggcgctgccgtatcgttccgcctgggcgggattctgacttagaggcgttcagtcataatcccacagatggtagc

SEQ ID NO: 447997 - DNA, 360 bp, Homo sapiens
gtgaggccccgctttcacggtctgtattcgtactgaaaatcaagatcaagcgagcttttgcccttctgctccacgggaggtttctgycctccctgagctcgccttaggacacctgcgttaccgtttgacaggtgtaccgccccagtcaaactccccacctggcactgtccccggagcgggtcgcgcccggccggcgcgcggccgggcgcttggcgccagaagcgagagcccctcggggctcgcccccccgcctcaccgggtcagtgaaaaaacgatcagagtagtggtatttcaccggcggcccgcagggccggcggaccccgccccgggcccctcgcggggacaccgggggggcgccgg

SEQ ID NO: 447998 - DNA, 452 bp, Homo sapiens
acatacaccaaatgtctgaacctgcggttcctctcgtactgagcaggattaccatggcaacaacacatcatcagtagggtaaaactaacctgtctcacgacggtctaaacccagctcacgttccctattagtgggtgaaacaatccaacgcttggtgaattctgcttcacaatgataggaagagccgacatcgaaggatcaaaaagcgacgtcgctatgaacgcttggccgccacaagccagttatccctgtggtaacttttctgacacctcctgcttaaaacccaaaaggtcagaaggatcgtgaggccccgctttcacggtctgtattcgtactgaaaatcaagatcaagcgagcttttgcccttctgctccacgggaggtttctgtcctccctgagctcgccttargacacctgcgttaccgtttgacaggtgtaccgccccagtcaaa

SEQ ID NO: 447999 - DNA, 532 bp, Homo sapiens
acgcttggccgccacaagccagttatccctgtggtaacttttctgacacctcctgcttaaaacccaaaaggtcagaaggatcgtgaggccccgctttcacggtctgtattcgtactgaaaatcaagatcaagcgagcttttgcccttctgctccacgggaggtttctgtcctccctgagctcgccttaggacacctgcgttaccgtttgacaggtgtaccgccccaktcaaactccccacctggcactgtccccggagcgggtcgcgcccggccggcgcgcggccgggcgcttggcgccagaagcgagagcccctcggggctcgcccccccgcctcaccgggtcagtgaaaaaacgatcagagtagtggtatttcaccggcggcccgcagggccggcggaccccgccccgggcccctcgcggggacaccgggggggcgccgggggcctcccacttattctacacctctcatgtctcttcaccgtgccagactagagtcaagctcaacagggtcttctttccccgctgattcc

SEQ ID NO: 448000 - DNA, 586 bp, Homo sapiens
ccccgctttcacggtctgtattcgtactgaaaatcaagatcaagcgagcttttgcccttctgctccacgggaggtttctgtcctccctgagctcgccttaggacacctgcgttaccgtttgacaggtgtaccgccccagtcaaactccccacctggcactgtccccggagcgggtcgcgccckgccggcgcgcggccgggcgcttggcgccagaagcgagagcccctcggggctcgcccccccgcctcaccgggtcagtgaaaaaacgatcagagtagtggtatttcaccggcggcccgcagggccggcggaccccgccccgggcccctcgcggggacaccgggggggcgccgggggcctcccacttattctacacctctcatgtctcttcaccgtgccagactagagtcaagctcaacagggtcttctttccccgctgattccgccaagcccgttcccttggctgtggtttcgctggatagtaggtagggacagtgggaatctcgttcatccattcatgcgcgtcactaattagatgacgaggcatttggctaccttaagagagtcatagttactcccgccgttt

SEQ ID NO: 448001 - DNA, 407 bp, Homo sapiens
cgcatgctggttttgtagttagcaggtcggcgaccaatgggctggaaaccgttaagacaccataactcccagcactcctagctagggacgcgcctccctatccttcgcttccatactacacaccgcccccaaacccagcgcatgctgagattgtagtccgttagcctcgcgaccaatgggctggaaatactgaaaggactatgactcccaggatgctttgcgaggtacccgccgtcccgatccttcctctagggctgcgcaccgcccccaagcccaacgcatrctgggattgtagtcaggtagtcctgggaccaactgactggaaactgttaagagaccataactcccagcacgcctggctaaggacgcacctccctatccttcccttcagtgctacacaccgcctc

SEQ ID NO: 448002 - DNA, 561 bp, Homo sapiens
gctacacaccgcctcgaagcccggtggctgctgggattktagtctgcaggccgggggccatcgctggaaaccgttaagagaccataactcccagcatccctggccagggacgcgcctctctatccttccctccagcgttacacaccgccccaatcccggtgcatgctggcattgtagttcggtagccttgcgatcaacgtgctggaaactgtttaaggactatgactcccaggacgccttgcgagggacccaccctgttgacccttgctccagggctggaaacctcccttaagcccagcgcatgctgggatcatagtccgactgccgcgacagaaaggctgggagtggatctgagactacagttccaacactacggggaaaatttcatcttctctgagactacagttccaacactgaggggataatttcatcttctcctccgcccctccatgtttccagtgcaattccgccctgctgaggggagcctatctgttcccaaacttctgcgtgcgaggagacagcgtggccagggcaggtggtctcacttgtaattgtggcaca

SEQ ID NO: 448003 - DNA, 561 bp, Homo sapiens
gctacacaccgcctcgaagcccggtggctgctgggattgtagtctgcaggccgggggccatcgctggaaaccrttaagagaccataactcccagcatccctggccagggacgcgcctctctatccttccctccagcgttacacaccgccccaatcccggtgcatgctggcattgtagttcggtagccttgcgatcaacgtgctggaaactgtttaaggactatgactcccaggacgccttgcgagggacccaccctgttgacccttgctccagggctggaaacctcccttaagcccagcgcatgctgggatcatagtccgactgccgcgacagaaaggctgggagtggatctgagactacagttccaacactacggggaaaatttcatcttctctgagactacagttccaacactgaggggataatttcatcttctcctccgcccctccatgtttccagtgcaattccgccctgctgaggggagcctatctgttcccaaacttctgcgtgcgaggagacagcgtggccagggcaggtggtctcacttgtaattgtggcaca

SEQ ID NO: 448004 - DNA, 529 bp, Homo sapiens
ccaatcccggtgcatgctggcattgtagttcggtagccttgcgatcaacgtgctggaaactgtttaaggactatgactcccaggacgccttgcgagggacccaccctgttgacccttgctccagggctggaaacctcccytaagcccagcgcatgctgggatcatagtccgactgccgcgacagaaaggctgggagtggatctgagactacagttccaacactacggggaaaatttcatcttctctgagactacagttccaacactgaggggataatttcatcttctcctccgcccctccatgtttccagtgcaattccgccctgctgaggggagcctatctgttcccaaacttctgcgtgcgaggagacagcgtggccagggcaggtggtctcacttgtaattgtggcacagtctccccacgtgccagttgtacgactatttgtgcctgaagtttgatttctctctgacaagacagagcccgggagcctccaacagcctgcccagcgttgctgtaacgcttgctttcg

SEQ ID NO: 448005 - DNA, 529 bp, Homo sapiens
ccaatcccggtgcatgctggcattgtagttcggtagccttgcgatcaacgtgctggaaactgtttaaggactatgactcccaggacgccttgcgagggacccaccctgttgacccttgctccagggctggaaacctcccttaagcccagcgcatgctgggatcatagtccgactgccgcgacagaaaggctgggagtggatctgagactacagttccaacactacggggaaaatttcatcttctctgagactacagttccaacactgmggggataatttcatcttctcctccgcccctccatgtttccagtgcaattccgccctgctgaggggagcctatctgttcccaaacttctgcgtgcgaggagacagcgtggccagggcaggtggtctcacttgtaattgtggcacagtctccccacgtgccagttgtacgactatttgtgcctgaagtttgatttctctctgacaagacagagcccgggagcctccaacagcctgcccagcgttgctgtaacgcttgctttcg

SEQ ID NO: 448006 - DNA, 366 bp, Homo sapiens
cggaagagcgggccgggagaagacgagagaccacgggcgaggccggggcgacggggaaggcgcgagaaaggcggccggcggggaaggggacgccacggggacccckcgagcgcggccgaccgcggccgggacacacgcgcggggcctcaccgccgccggcggcaccgcgcggcacccggggcggccgaccggccctcggcgatccccgcggctccccccaccaccgccgccgccgcagtcgcggccggtcccccggaaccgtctcctcccccgcacgcgccgcaggccgacccccggaaccctccgggaagcccaccgggccccacgcggggcgccaccgacccggtccccaaggcgcgcgccggg

SEQ ID NO: 448007 - DNA, 359 bp, Homo sapiens
ccggggcgacggggaaggcgcgagaaaggcggccggcggggaaggggacgccacggggacccctcgagcgcggccgaccgcrgccgggacacacgcgcggggcctcaccgccgccggcggcaccgcgcggcacccggggcggccgaccggccctcggcgatccccgcggctccccccaccaccgccgccgccgcagtcgcggccggtcccccggaaccgtctcctcccccgcacgcgccgcaggccgacccccggaaccctccgggaagcccaccgggccccacgcggggcgccaccgacccggtccccaaggcgcgcgccgggggacgcggacgccgggccgatcagtggccggcggc

SEQ ID NO: 448008 - DNA, 458 bp, Homo sapiens
cggccgaccgcggccgggacacacgcgcggggcctcaccgccgccggcggcaccgcgcggcacccggggcggccgaccggccctcggcgatccccgcggctccccccaccaccgccgccgccgcrgtcgcggccggtcccccggaaccgtctcctcccccgcacgcgccgcaggccgacccccggaaccctccgggaagcccaccgggccccacgcggggcgccaccgacccggtccccaaggcgcgcgccgggggacgcggacgccgggccgatcagtggccggcggcggcgccccacgaggcggtgccgggttcggtcccaggcggggccaccaacggacgtgaagccggtgagccgctcggggggaagaagaggatcggcgggcggcgggcggggaagagggcacagacgggcgagggccggggaccgcgagggcaagggcacccgggagcccgc

SEQ ID NO: 448009 - DNA, 188 bp, Homo sapiens
gtcccccggaaccgtctcctcccccgcacgcgccgcaggccgacccccggaaccctccgggaagcccaccgggccccacgcggggcgccaccgacccggtccccaaggcgcgcgccgggggacgyggacgccgggccgatcagtggccggcggcggcgccccacgaggcggtgccgggttcggtccca

SEQ ID NO: 448010 - DNA, 326 bp, Homo sapiens
gtcccccggaaccgtctcctcccccgcacgcgccgcaggccgacccccggaaccctccgggaagcccaccgggccccacgcggggcgccaccgacccggtccccaaggcgcgcgccgggggacgcggacgccgggccgatcagyggccggcggcggcgccccacgaggcggtgccgggttcggtcccaggcggggccaccaacggacgtgaagccggtgagccgctcggggggaagaagaggatcggcgggcggcgggcggggaagagggcacagacgggcgagggccggggaccgcgagggcaagggcacccgggagcccgcaga

SEQ ID NO: 448011 - DNA, 429 bp, Homo sapiens
cgccgcagtcgcggccggtcccccggaaccgtctcctcccccgcacgcgccgcaggccgacccccggaaccctccgggaagcccaccgggccccacgcggggcgccaccgacccggtccccaaggcgcgcgccgggggacgcggacgccgggccgatcagtggccggcggcggcgccccacgaggcggtgccgkgttcggtcccaggcggggccaccaacggacgtgaagccggtgagccgctcggggggaagaagaggatcggcgggcggcgggcggggaagagggcacagacgggcgagggccggggaccgcgagggcaagggcacccgggagcccgcagaggcggcggctcggggagaaacctcaggcacggccgggccaccaggaaaacacggccgcgggatcccaccgccacagacacgagggc

SEQ ID NO: 448012 - DNA, 572 bp, Homo sapiens
ccgacccccggaaccctccgggaagcccaccgggccccacgcggggcgccaccgacccggtccccaaggcgcgcgccgggggacgcggacgccgggccgatcagtggccggcggcggcgccccacgaggcggtgccgggttcggtcccaggcggggccaccaacggacgtgaagccggtgagccgctcggggggaagaagaggatcggcgggcggcgggcggggaagagggcacagacgggcgagggccggggaccgcgagggcaagggcacccgggagcccgcagaggcggcggctcggggagaaacctcaggcacggccgggccaccaggaaaacacggccgcgggatcccaccgccacagacacgagggcggtcccgcggcgccccgcctgggacgccggacggccctcggcccccaccgagaaccgcctcgcgagccccggggccccgccaccgggggccccggagcgaccgcagccacgaacccgacacgccmccaccaccgtcgctcgtgattctcgtccatcctccgacccggtcccgctccgggagaccggcgcgcccccaccg

SEQ ID NO: 448013 - DNA, 529 bp, Homo sapiens
ccaatcccggtgcatgctggcattgtagttcggtagccttgcgatcaacgtgctggaaactgtttaaggactatgactcccaggacgccttgcgagggacccaccctgttgacccttgctccagggctggaaacctcccttaagcccagcgcatgctgggatcatagtccgactgccgcgacagaaaggctgggagtggatctgagactacagttccaacactacggggaaaatttcatcttctctgagactacagttccaacactgaggggataatttcatcttctcctccgcccctccatgtttccagtgcaattccgccctgctgaggggagcctatctgttcccaaacttctgcgtgcgaggagacagcgtggccagggcaggtggtctcacttgtaattgtgrcacagtctccccacgtgccagttgtacgactatttgtgcctgaagtttgatttctctctgacaagacagagcccgggagcctccaacagcctgcccagcgttgctgtaacgcttgctttcg

SEQ ID NO: 448014 - DNA, 529 bp, Homo sapiens
ccaatcccggtgcatgctggcattgtagttcggtagccttgcgatcaacgtgctggaaactgtttaaggactatgactcccaggacgccttgcgagggacccaccctgttgacccttgctccagggctggaaacctcccttaagcccagcgcatgctgggatcatagtccgactgccgcgacagaaaggctgggagtggatctgagactacagttccaacactacggggaaaatttcatcttctctgagactacagttccaacactgaggggataatttcatcttctcctccgcccctccatgtttccagtgcaattccgccctgctgaggggagcctatctgttcccaaacttctgcgtgcgaggagacagcgtggccagggcaggtggtctcacttgtaattgtggcacagtctccccacgtgccagttgtacgactatttgtgcctgaagtttgatttctctctgacaagacagagcccgggagcctcyaacagcctgcccagcgttgctgtaacgcttgctttcg

SEQ ID NO: 448015 - DNA, 373 bp, Homo sapiens
cacgacgggccggcgggacggcacccccaccgccgcggaggggggccgcccgcaagtcgacaaccactggaggcgacagcgagggctgtctgccgcgtcagaggaccccgccggcccgcacccgcgamgcagaaggcggcgggcgggacggcgaggtcgggccggggtccgcaccccacgccttcccacacgcaccgccggcgggcggggagaggagagacgaggggacccccgcggggcggagcgagaaggacggtcccgttcgccacgaacgtccgcccctcgcccgtcgcggctcggacccggcccgggagagcacgacgtcaccacatcgatcacgaagagccccccgggagcggaggccggccggccg

SEQ ID NO: 448016 - DNA, 293 bp, Homo sapiens
gaaggggcggcggacaaccccgcggagacgagaacgcctgacacgcacggcacggagccagcggggtggggttgtcgcggccgccccgggcgcccgcagcggagagcgcacgggggcacggtggccctcgccgccttccccgccgcccccgggtgggtcagagacccggacccgggccggcaccgggagtcgggacgctcggacgcgcgagagarcagcaggcccgcgggccccggcaggcggctcaagcaggagcgcggccggctagccgggtcaccggtaggccagagccc

SEQ ID NO: 448017 - DNA, 465 bp, Homo sapiens
ctcggaaacgaattcggccgccgcctcagacggccaggatgagcgcggacccgcgaccgggccgggaagggcgtccccagcctcccgcgccacgcgcggcgggtccccgcgggtcgcggctcgggcctcgggagctacggcgcgctggtcgaccggcccgggcagccccacgcccgcckcgggcccagaagcgcagcgacagcctctcccccacataaacctgcacgccagagctgtgactcacaagcgacgcgccacagctctggcgccaccgggccagccgggctgacgaccgcgggctttccggagctctgcctagctcacagcggggacggtcccctccctcggcagctgccaccgcagctccggaagccgagagcacgatctcaaagcggccgccagatggagcccgacaaccgccgcggacgtcagcgagacagatccggctggcagggcggcccgtgg

SEQ ID NO: 448018 - DNA, 305 bp, Homo sapiens
ctgcagacacacggagaggcagaatgcgtaggctcttccggaatccacgcagagacagacggggggaggggagtggggaaaagagacagatggcgaaagggaaggagggagggaagggagcagggagggagggagggagggagggaggaagaaaatggagaaaagagagacaatttagaaaacgtagatacayaaagtaaacttctgaaacactccattttttaaaagacagacggaaaggaaagaaacacgaaaaagagagaaagaatgaggaaagaaacgaaggaaagaagggaaaaagaaac

SEQ ID NO: 448019 - DNA, 429 bp, Homo sapiens
agtaaacttctgaaacactccattttttaaaagacagacggraaggaaagaaacacgaaaaagagagaaagaatgaggaaagaaacgaaggaaagaagggaaaaagaaacagagaggaaagaaaaaagaaggaaacacagggaacgaaagagaaataaagcacgaaggaaaaaaggacagaaagagagaaagaaggaaaggaagagaggaagaaaaacctaaagaaggagagaaaggaagaaaggaaggaagaaaaacacgaaggagaggaagaaagaaaacagagataactacgtacgctcgttcatttacacacataaatacgacgcttttcatacgtaaaataaacgtctttatcgacgatcccttctttatagagcgatgtgtatttatttgtataacacagacacctacatctatcatacagaa

SEQ ID NO: 448020 - DNA, 567 bp, Homo sapiens
agtaaacttctgaaacactccattttttaaaagacagacggaaaggaaagaaacacgaaaaagagagaaagaatgaggaaagaaacgaaggaaagaagggaaaaagaaacagagaggaaagaaaaaagaaggaaacacagggaacgaaagagaaataaagcacgaaggaaaaaaggacagaaagagagaaagaaggaaaggaagagaggaagaaaaacctaaagaaggagagaaaggaagaaaggaaggaagaaaaacacgaaggagaggaagaaagaaaacagagataactacgtacgctcgttcatttacacacataaatacgacgcttttcatacgtaaaataaacgtctttatcgacgatcccttctttatagagcgatgtgtatttatttgtataacacaracacctacatctatcatacagaagtctatttccatacaaccgatacgtatttaccatacgcaagagtattcaacgcagagatacacgttgtcgttgtttgcatataagcgtacagaaacgtttacattaatacatataagtaaacgcgtggaaacgaaaga

SEQ ID NO: 448021 - DNA, 569 bp, Homo sapiens
tctaaacaggttcaacataaaccaaaaactggtcgaagtttattaggaggaccagcagctgttagtccattaaccccaagtgttggcattttgccattagaaaccccaagtcccggagacggaccctattgacaaaactgcactggtatgagacaccgtctgtcaytgacgtgccatccaccggagccccttcagaaaagcctgttgccagaatcggccaaaccggaacaccgtctgtcttctcgcagaggggaaagagccgaaaggtaactccagtccttgcaaaaacacaaagttctggtccgccgacaagggcaacacctcaggtattgagccccactatggcatctcccccaaatgcaccgcctcgaagaaattcacgactcttgactagtgacagctccacaaccgaggagaataggagaaaattaaaaatgaagtttccacctaaaatcccaaacagaagaaccaaaagtaaaactaataaaggagcaataactccaccgaacataagtgatagcctggaagtgacaaaattggactcttccgtcatttcagaagggaaaata

SEQ ID NO: 448022 - DNA, 587 bp, Homo sapiens
tccccagagagggcatgacttgggaggtgcccacccaagtcctgtccgctgaactcttataaacccctgcctcctggcgccctctacctaggttacccacttggagtagctgagaaccctcagctgccttttcccaattctctatgtcttcccattagctggcctctattgccaccaacctcaccataattacctccttggtgggattttaacaagccacaaggtcatgtggtccctggctccacctgttttaaaagccacacggagcccagctctcccaggccttgctctggtctgtctaatgaaggtgttttaggcactgcagccccaggagaaaagggctggagtagaaaggccctctgcttttttgatttggaggtttccagctgggagaagtaagctctgttctctgaaaccctggagcccttccccatcacagrcacattcaccttctgctgtcacagcctcatctaagctctctgaggctccgctacagggtagacaacttgtacggtgttcacctgctaggatgagggacaaggtcagtgaaaatatgcttctttcagttacgcctcagccacactaac

SEQ ID NO: 448023 - DNA, 459 bp, Homo sapiens
catctaagctctctgaggctccgctacagggtagacaacttgtacggtgttcacctgctaggatgagggacaaggtcagtgaaaatatgcttctttcagttacgcctcagccacactaaccttggacacggataagtggcctgagtcagcttgtccaatgctctgaccatctccagtragctctgactctagactcactcccaggtccaacactccctggatgtgtcattttgggcatgcagtcgggtttccctgagctgtttcctcaactggaaagtgtggtgggaaccaaccacctcacaaggcctcttaccacctcggtttcatgtggttgtcatgattgctgtcaccatcttccctctcaggatgagccagacacaagcaccctcagattctctgtctccctgagccccatcaccaccttgtgaggcctgcccaacaggctcatcattcctacat

SEQ ID NO: 448024 - DNA, 459 bp, Homo sapiens
catctaagctctctgaggctccgctacagggtagacaacttgtacggtgttcacctgctaggatgagggacaaggtcagtgaaaatatgcttctttcagttacgcctcagccacactaaccttggacacggataagtggcctgagtcagcttgtccaatgctctgaccatctccagtaagctctgactctagactcactcccaggtccaacactccctggatgtgtcattttgggcatgcagtcgggtttccctgagctgtttcctcaactggaaagtgtggtgggaaccaaccacctcacaaggcctcttaccacctcggtttcatgtggttgtcatgattgctgtcaccatcwtccctctcaggatgagccagacacaagcaccctcagattctctgtctccctgagccccatcaccaccttgtgaggcctgcccaacaggctcatcattcctacat

SEQ ID NO: 448025 - DNA, 526 bp, Homo sapiens
tttccctgagctgtttcctcaactggaaagtgtggtgggaaccaaccacctcacaaggcctcttaccacctcggtttcatgtggttgtcatgattgctgtcaccatcttccctctcaggatgagccagacacaagcaccctcagattctctgtctccctgagccccatcaccaccttgtgaggcctgcccaacaggctcatcattcctamattttccacataagaaaacagaggcccaaagcggcaatgacatgccaaggaccccacaagagaggccagctcctccctcaacctagagggactgtcccggctgccttcacctaacaccctagcatcatcactgaccagcattccatcttctaaactctatgagtgacaatattcccagccaggccctgtggcagtggacatggttctgagaattgggaatctaatgtggaggaaaagttaaatatttaatatgaactcaattgaacatgggcacaaacaatggtcacgaagtcctggaacaggttgcatgaacccc

SEQ ID NO: 448026 - DNA, 526 bp, Homo sapiens
tttccctgagctgtttcctcaactggaaagtgtggtgggaaccaaccacctcacaaggcctcttaccacctcggtttcatgtggttgtcatgattgctgtcaccatcttccctctcaggatgagccagacacaagcaccctcagattctctgtctccctgagccccatcaccaccttgtgaggcctgcccaacaggctcatcattcctacattttccacataagaaaacagaggcccaaagcggcaatgacatgccaaggaccccacaagagaggccagctcctccctcaacctrgagggactgtcccggctgccttcacctaacaccctagcatcatcactgaccagcattccatcttctaaactctatgagtgacaatattcccagccaggccctgtggcagtggacatggttctgagaattgggaatctaatgtggaggaaaagttaaatatttaatatgaactcaattgaacatgggcacaaacaatggtcacgaagtcctggaacaggttgcatgaacccc

SEQ ID NO: 448027 - DNA, 526 bp, Homo sapiens
agagagacttttttttatgatggagacagtgctcattctgcactgctggctcttctggccatttggaaagggttacccatagataacacaaggccacccatggcaggcctatccaggccaggcctcacctttgatatcatctcggcaggcacacacccctcctcatctccacgtctcgtgggaaagaaagagataatgggtcctttcttgrcaggagcaggtttccaggtattgggaggctaaaagcctgtcaaatttataccgcaggttacagttggcaggaggggaaggtgagtgctgggggtcacctttgtttgttcagacatttattctaaggcttcaagctgtcctcttgttttctccctggctggaggtctgcgcaaatgctcctatgtgcctgatctggggagtagactttctaactggaatttcccctgtggggaaagccaggatgccattgatgcctcttggccaggcttccaggcactctctttgcagaactctattgaggagatccctgaggagc

SEQ ID NO: 448028 - DNA, 614 bp, Homo sapiens
ggcactctctttgcagaactctattgaggagatccctgaggagctgtttgatgagtccaactactccatctcattgaacaaaaggcaggtgcatcatgccaacaaccatggcccgtgctagtctggagtcaaggtgggcacagagaggtctccaaatggaaaagaccagggaagcccaggaccctgacccaaatgtgaggattccccagaaaccgttttagggctttctccattaaggacccacagttccttcccagaggaatttggcctccattagtccataatggcaacttaggtgcacagtcccyggtcatatgcttgcaggaatgtcaaaagaaacacttttgtgttgttattactttacattaagttgtgagtatctttgcattttgctattatttttattgttatatctacctaccccacatacttcctggagcaggcagcttcgctgccttgccagaccttctctaagtcttagaagttcacactgttactagagagaggtttcacccaaaaagtgggagttatgcaaaagggtcttatatgactctttacatatgtgtcccagagcccacctctatagccccatcaggacaggagctgtgtcctca

SEQ ID NO: 448029 - DNA, 482 bp, Homo sapiens
gaaaatgattactcagtgaaacagtaggaaagtgtaaaggtttaataggaraagccggaatatattccaaaagggttgtgaaagccgtactgtaaatagtagtttctgaatttatctgcttttatgtatccagaacctcttggttgtcaacattcttttaatttttttgtcaatctgctatctatgtggcaaaaaaacatgtttctatttcaatttttcaactgatatatttgagttacctttcagttgatttatacttatttgagttttctgttccctcagttaatccgctcaattccttggccctgtgaggggtttctctcaccttggagtccccaagcactgacacctttgtcaggtgtggggttgctgtagttatttctcaacactccctttaaggttttaaaagacccagttcagttgctttaagtcaaaagggttgtcttagggtatcttatcctgtgccctgtctctaaaacaga

SEQ ID NO: 448030 - DNA, 482 bp, Homo sapiens
gaaaatgattactcagtgaaacagtaggaaagtgtaaaggtttaataggagaagccggaatatattccaaaagggttgtgaaagcygtactgtaaatagtagtttctgaatttatctgcttttatgtatccagaacctcttggttgtcaacattcttttaatttttttgtcaatctgctatctatgtggcaaaaaaacatgtttctatttcaatttttcaactgatatatttgagttacctttcagttgatttatacttatttgagttttctgttccctcagttaatccgctcaattccttggccctgtgaggggtttctctcaccttggagtccccaagcactgacacctttgtcaggtgtggggttgctgtagttatttctcaacactccctttaaggttttaaaagacccagttcagttgctttaagtcaaaagggttgtcttagggtatcttatcctgtgccctgtctctaaaacaga

SEQ ID NO: 448031 - DNA, 564 bp, Homo sapiens
accgcagcccacgtaagctggagtggaagtgtgcgatcacagcccacgttaacctctccctcccgggcttaagagatccctgtagtcccagctatttgggaggctgaggtcaccagagcgcagagacagaagaccaggcgggccggccccaaaagaaaagaaaataaataaacgaaaattattaataaataatgaatgaaggaagggaggaaggatatacatacacgtgtatgtaaatgaaatggggcttcgatacatattcatccattaaaagtaacataatataaacgtattaattatggaaatatcatttacatagttttatcactacggggkgtgtgtgtgtgtgtgtgtgtgtgtgtgtgtgtgtgtgtgtgtgtgtatgtgtagatgtatgttcatacacggcagcgttcagaaaataagattgaaaaaaggaaggaatcggccgggcatggtggctcacatctgtactcccagcagtctttgggaggccgaggcgggcggatcactaggtcgggagttcgagaccagcccggccaaaatggtgaaattacgtcttta

SEQ ID NO: 448032 - DNA, 577 bp, Homo sapiens
ccaggaaaataagaactacattgaaagaggataatacaaattcttcaatgggaggctagccatacctgaaatggtgacccccagatttgtaaaacaattccaccaccgaactcagattaaaaaaaaaaataaagacattattaaggcatcatttttatctgccatggctcattgctattactcgggccatttgtaaactgtgtttaacttacactcrgaacaatccacgacaagatcctactcggcccatgggagttcaggaaaaaggagccatgccctgtgaaaaactgctaatggacttcactgaatgaccctgagacgggggctatcagtacatattggtgttcatttgcaccttttcaggatagctcaaggcctttcccaccaggacagagagggcactagacgtgaccaaggcgttaagagacattgttcccagatttgggctgcctctaactctaagatcagagaatggaccaacatttgtggctaaaatagttcaggacttaactcgactattaaaaataaaatggaaataacatacagcctacaggtagcagatctcaggtaaagtgga

SEQ ID NO: 448033 - DNA, 576 bp, Homo sapiens
tgactcctacttaccagatccaaacactttctctggattccttactctaagctgcacttggcatcaggtagatgattcaaatgcttgaaaggcaccctctggcctatattggatctgtggagcatgggcatattggcaactgccagcaaaatgggcaggggcrtgtctgttaaaagcaatcaagccatccttctttctaattcctctaaagcaagggaaattcttagaatatccagtttataataaaaataaaagaagaactagaaaaagcataatcacaaaagtaacaaaaatatcaaaaaagatgtggacacaggagactaaaaaggtaataaatgacctcctgaaagaatcatgacatgctatgggccagctacctaggtgcaagacaggtcatgagggtactgcaccataatctgtatcctcagccgcatcatgaagttgcaggcagtccttcaaatcataaccaatgaaatatcgagggcactagatttattggcaatacaagcaacacaaaaaggaaatgctatatatcaaaataggctggctttaaattatctcttatcctcagaagga

SEQ ID NO: 448034 - DNA, 468 bp, Homo sapiens
ctcctacttaccagatccaaacactttctctggattccttactctaagctgcacttggcatcaggtagatgattcaaatgcttgaaaggcaccctctggcctatattggatctgtggagcatgggcatattggcaactgccagcaaaatgggcaggggcatgtctgttaaaagcaatcaagccatccttctttctaattcctctaaagcaagggaaattcttagaatatccagtttataataaaaataaaagaagaactagaaaaagcataatcacaaaagtaacaaaaatatcaaaaaagatgtggacacaggagactaaaaagrtaataaatgacctcctgaaagaatcatgacatgctatgggccagctacctaggtgcaagacaggtcatgagggtactgcaccataatctgtatcctcagccgcatcatgaagttgcaggcagtccttcaaatcataaccaat

SEQ ID NO: 448035 - DNA, 576 bp, Homo sapiens
tgactcctacttaccagatccaaacactttctctggattccttactctaagctgcacttggcatcaggtagatgattcaaatgcttgaaaggcaccctctggcctatattggatctgtggagcatgggcatattggcaactgccagcaaaatgggcaggggcatgtctgttaaaagcaatcaagccatccttctttctaattcctctaaagcaagggaaattcttagaatatccagtttataataaaaataaaagaagaactagaaaaagcataatcacaaaagtaacaaaaatatcaaaaaagatgtggacacaggagactaaaaaggtaataaatgacctcctgaaagaatcatgacatgctatgggccagctacctaggtgcaagacaggtcatgagggtactgcaccataatctrtatcctcagccgcatcatgaagttgcaggcagtccttcaaatcataaccaatgaaatatcgagggcactagatttattggcaatacaagcaacacaaaaaggaaatgctatatatcaaaataggctggctttaaattatctcttatcctcagaagga

SEQ ID NO: 448036 - DNA, 537 bp, Homo sapiens
tattggcaatacaagcaacacaaaaaggaaatgctatatatcaaaataggctggctttaaattatctcttatcctcmgaaggaggaatatgtagaaaatttaatttaaccaactgttgcctagaaatcaatagccaagaaatcaatattactggtcataaaaattacagctagaatgcacaagttggcccaggttccacttcagacttgatccaggtagtccccggattccttgtttggaggatggttctcagcatttgaaaaattctaaaccctcattagtaggttcttgcttattctttgcatctgccttatcctcccttgccttttgtctctgtttattaggagtattcagtcaactatggaggcaatggtagcccaaaacactactgtacagtctgtacagttgatgcattaaccagatatcagccaccgccagaagaagaaaaagctcagctccatgaagacttggcaaataatggtgctttctattaacacctctgttataaaaagcaccaatggggagaatggaacagga

SEQ ID NO: 448037 - DNA, 537 bp, Homo sapiens
tattggcaatacaagcaacacaaaaaggaaatgctatatatcaaaataggctggctttaaattatctcttatcctcagaaggaggaatatgtagaaaatttaatttaaccaactgttgcctagaaatcaatagccaagaaatcaatattastggtcataaaaattacagctagaatgcacaagttggcccaggttccacttcagacttgatccaggtagtccccggattccttgtttggaggatggttctcagcatttgaaaaattctaaaccctcattagtaggttcttgcttattctttgcatctgccttatcctcccttgccttttgtctctgtttattaggagtattcagtcaactatggaggcaatggtagcccaaaacactactgtacagtctgtacagttgatgcattaaccagatatcagccaccgccagaagaagaaaaagctcagctccatgaagacttggcaaataatggtgctttctattaacacctctgttataaaaagcaccaatggggagaatggaacagga

SEQ ID NO: 448038 - DNA, 494 bp, Homo sapiens
acagctagaatgcacaagttggcccaggttccacttcagacttgatccaggtagtccccggattccttgtttggaggatggttctcagcatttgaaaaattctaaaccctcattagtaggttcttgcttattctttgcatctgccttatcctcccttgccttttgtctctgtttattaggagtattcagtcaactatggaggcaatggtagcccaaaacactactgtacagtctgtacagttgatgcaytaaccagatatcagccaccgccagaagaagaaaaagctcagctccatgaagacttggcaaataatggtgctttctattaacacctctgttataaaaagcaccaatggggagaatggaacaggaattataagagattaaagagtgtgtaagcagaaactcacttgtgtgtaagaaaacccaacttctgttgagaaagagtaagagctggagtcctttaaaaactaactgcctgtttttctgtggct

SEQ ID NO: 448039 - DNA, 494 bp, Homo sapiens
acagctagaatgcacaagttggcccaggttccacttcagacttgatccaggtagtccccggattccttgtttggaggatggttctcagcatttgaaaaattctaaaccctcattagtaggttcttgcttattctttgcatctgccttatcctcccttgccttttgtctctgtttattaggagtattcagtcaactatggaggcaatggtagcccaaaacactactgtacagtctgtacagttgatgcattaaccagatatcagccaccgccagaagaagaaaaagctcasctccatgaagacttggcaaataatggtgctttctattaacacctctgttataaaaagcaccaatggggagaatggaacaggaattataagagattaaagagtgtgtaagcagaaactcacttgtgtgtaagaaaacccaacttctgttgagaaagagtaagagctggagtcctttaaaaactaactgcctgtttttctgtggct

SEQ ID NO: 448040 - DNA, 440 bp, Homo sapiens
ctggacctgattgattgtcatttttgggtccactgcagggctgcatactaagggacagtggtcattctgagttcatagaaaaaacctgacatgagaggggacattttgctagacatgccacctggtgcacagagctgaaaaatgagacctgctggtgacgtgcttatcaagcttagggtcttgagggytttttaaattcagtgctttaaaagctggcctcacatcctgagttcagaaaaaccaaaattttttgttttctatagactttttggttgaaaatcccttttccatggacttttaaactagttatttacagcacaagccccatgtctagtaacaaaggtgtcagccatcttcaaaatgtgtttttattaatactttatttttaagctttattaactaaagatatatttatttatagtcactttgagtctccagga

SEQ ID NO: 448041 - DNA, 440 bp, Homo sapiens
ctggacctgattgattgtcatttttgggtccactgcagggctgcatactaagggacagtggtcattctgagttcatagaaaaaacctgacatgagaggggacattttgctagacatgccacctggtgcacagagctgaaaaatgagacctgctggtgacgtgcttatcaagcttagggtcttgagggctttttaaattcmgtgctttaaaagctggcctcacatcctgagttcagaaaaaccaaaattttttgttttctatagactttttggttgaaaatcccttttccatggacttttaaactagttatttacagcacaagccccatgtctagtaacaaaggtgtcagccatcttcaaaatgtgtttttattaatactttatttttaagctttattaactaaagatatatttatttatagtcactttgagtctccagga

SEQ ID NO: 448042 - DNA, 440 bp, Homo sapiens
ctggacctgattgattgtcatttttgggtccactgcagggctgcatactaagggacagtggtcattctgagttcatagaaaaaacctgacatgagaggggacattttgctagacatgccacctggtgcacagagctgaaaaatgagacctgctggtgacgtgcttatcaagcttagggtcttgagggctttttaaattcagtgctttaaaagctggcctcacatcctgagttcagaaaaaccaaaattttttgttttctatagactttttggttgaaaatcccttttccatggacttttaaastagttatttacagcacaagccccatgtctagtaacaaaggtgtcagccatcttcaaaatgtgtttttattaatactttatttttaagctttattaactaaagatatatttatttatagtcactttgagtctccagga

SEQ ID NO: 448043 - DNA, 528 bp, Homo sapiens
actttttggttgaaaatcccttttccatggacttttaaactagttatttacagcacaagccccatgtctagtaacaaaggtgtcagccatcttcaaaatgtgtttttaytaatactttatttttaagctttattaactaaagatatatttatttatagtcactttgagtctccaggataaatattagtcttaaattgttatttctcataaagtcttggaggttgctaagttctactgttttgcacgtaaagaatcaagaaactctttagtacaatattagaaaatacttgtatttacttagattttatagtactatttttatttttctttttatttcttagatataggtactcaaatttctacaaactgacaacataatatgcttacttgaaaatattaccagaataattgaagttgataattaaaaatgaaagataaaaaatgtgagaattgctgaagccttgtggtgggtatgtatgataaatgttagtttataattctccctatgtttgctaagattttttattt

SEQ ID NO: 448044 - DNA, 528 bp, Homo sapiens
actttttggttgaaaatcccttttccatggacttttaaactagttatttacagcacaagccccatgtctagtaacaaaggtgtcagccatcttcaaaatgtgtttttattaatactttatttttaagctttattaactaaagatatatttatttatagtcactttgagtctccaggataaatatyagtcttaaattgttatttctcataaagtcttggaggttgctaagttctactgttttgcacgtaaagaatcaagaaactctttagtacaatattagaaaatacttgtatttacttagattttatagtactatttttatttttctttttatttcttagatataggtactcaaatttctacaaactgacaacataatatgcttacttgaaaatattaccagaataattgaagttgataattaaaaatgaaagataaaaaatgtgagaattgctgaagccttgtggtgggtatgtatgataaatgttagtttataattctccctatgtttgctaagattttttattt

SEQ ID NO: 448045 - DNA, 528 bp, Homo sapiens
actttttggttgaaaatcccttttccatggacttttaaactagttatttacagcacaagccccatgtctagtaacaaaggtgtcagccatcttcaaaatgtgtttttattaatactttatttttaagctttattaactaaagatatatttatttatagtcactttgagtctccaggataaatattagtcttaaattgttatttctcataaagtcttggaggttgctaagttctactgttttgcacgtaaaraatcaagaaactctttagtacaatattagaaaatacttgtatttacttagattttatagtactatttttatttttctttttatttcttagatataggtactcaaatttctacaaactgacaacataatatgcttacttgaaaatattaccagaataattgaagttgataattaaaaatgaaagataaaaaatgtgagaattgctgaagccttgtggtgggtatgtatgataaatgttagtttataattctccctatgtttgctaagattttttattt

SEQ ID NO: 448046 - DNA, 528 bp, Homo sapiens
actttttggttgaaaatcccttttccatggacttttaaactagttatttacagcacaagccccatgtctagtaacaaaggtgtcagccatcttcaaaatgtgtttttattaatactttatttttaagctttattaactaaagatatatttatttatagtcactttgagtctccaggataaatattagtcttaaattgttatttctcataaagtcttggaggttgctaagttctactgttttgcacgtaaagaatcaagaaactctttagtacaatattagaaaatacttgtatttacttagattttatagtactatttttatttttctytttatttcttagatataggtactcaaatttctacaaactgacaacataatatgcttacttgaaaatattaccagaataattgaagttgataattaaaaatgaaagataaaaaatgtgagaattgctgaagccttgtggtgggtatgtatgataaatgttagtttataattctccctatgtttgctaagattttttattt

SEQ ID NO: 448047 - DNA, 573 bp, Homo sapiens
tctgcccttttgcatttggtttattttacttactttagtgattttgaggttttttcctgacatagcaggtattattacttcattttctttgtttggcacatagtattttattgtatggacacaccacacgttattttttctgttattatttgatggatattttggttttatcccctttgggctattayaaatactgctcctttgatcatttacatctgattctttgtgtagtcataggttttcatttcttttgagtacgtaacagagtaaaatgtctcagtcatatggtgatactatttatagcattttgaataattgccaaattgttctttaaatcggttgttttttacactcccacatacaatgtgtgaggctttcatatttttgatatctttggcaaccttttttattgccttttacaggtcttctagtaagtatgtcattgagcttttgatttgcatttctctaaactaataatgtcacatattttaaatttaatgacaaattttgcttcttatctgtagaaatttttaattcaaattccttgcacatttttcaagtagtcaattgtct

SEQ ID NO: 448048 - DNA, 573 bp, Homo sapiens
tctgcccttttgcatttggtttattttacttactttagtgattttgaggttttttcctgacatagcaggtattattacttcattttctttgtttggcacatagtattttattgtatggacacaccacacgttattttttctgttattatttgatggatattttggttttatcccctttgggctattacaaatactgctsctttgatcatttacatctgattctttgtgtagtcataggttttcatttcttttgagtacgtaacagagtaaaatgtctcagtcatatggtgatactatttatagcattttgaataattgccaaattgttctttaaatcggttgttttttacactcccacatacaatgtgtgaggctttcatatttttgatatctttggcaaccttttttattgccttttacaggtcttctagtaagtatgtcattgagcttttgatttgcatttctctaaactaataatgtcacatattttaaatttaatgacaaattttgcttcttatctgtagaaatttttaattcaaattccttgcacatttttcaagtagtcaattgtct

SEQ ID NO: 448049 - DNA, 462 bp, Homo sapiens
agacgtgatggtgcacgactgcaatcccagctactctggtggctgagactggagaattgcttgaacctgggaagyggagcctgcagtgagcacatctcgcacccctgcccttcagcctgagtgactcactaaaactccatctccaaaaaaaaaaaaaaaaaaaatgttgtcagtactactcatgatgatataaaaatgtaaggtaatttttgtcaaaatcccaatggtattttttttgcagaatttttgtgtataattctaaacgttgcttaggacaggtgactagccaaacaccctttaaaaagaacaaagaggtattacattttctgattcaaaatcatgatacaaagctacaaaaataaaaacaatgtggtattgccacaaaaacagatacatagatgacgaaacagaatagagatcccagaaataaacccttgcatatgtgataaaataatcttccgt

SEQ ID NO: 448050 - DNA, 573 bp, Homo sapiens
tctgcccttttgcatttggtttattttacttactttagtgattttgaggttttttcctgacatagcaggtattattacttcattttctttgtttggcacatagtattttattgtatggacacaccacacgttattttttctgttattatttgatggatattttggttttatcccctttgggctattacaaatactgctcctttgatcatttacatctgattctttgtgtagtcataggttttcatttcttttgagtacgtaacagagtaaaatgtctcagtcatatggtgatactatttatagcattttgaataattgccaaattgttctttaaatcggttgttttttacactcccacatacaatgtgtgaggctttcatatttttgatatctttggcaaccttttttattgccttttacaggtcttctagtaagtatgtcattgagcttttgatttgcatttctctaaactaataatgtcayatattttaaatttaatgacaaattttgcttcttatctgtagaaatttttaattcaaattccttgcacatttttcaagtagtcaattgtct

SEQ ID NO: 448051 - DNA, 527 bp, Homo sapiens
ttttaattcaaattccttgcacatttttcaagtagtcaattgtctatttattattgatttataagactttgtgtrtttgagcaagatggctgaatagacaaaccaaggtggaacagctgacaccaagggaccaggatgactggcacactcttaaccgagggcaggtactgatagtgatggaggaaagacacaacatctgaacttaagattcagaagctgggaaccctgcacagggctaaagcacagtggaactgatttctggcccccagtgactctgagaaaaacaggtgagtttaagtggcaaggagctacctgctttcctgactggcctctggaatcccactggcagagaccctctgaccatcatggaaaatgagttgaaaggaagagctgcttagagaagtgacaggggcagcacaccagccagtgcacagccaagagggtttattgtgggaacatgtgtagtgaagcatgtccagggatgcccacaccaataagcttaacttgctcccataagagacgttagc

SEQ ID NO: 448052 - DNA, 527 bp, Homo sapiens
ttttaattcaaattccttgcacatttttcaagtagtcaattgtctatttattattgatttataagactttgtgtatttgagcaagatggctgaatagacaaaccaaggtggaacagctgacaccmagggaccaggatgactggcacactcttaaccgagggcaggtactgatagtgatggaggaaagacacaacatctgaacttaagattcagaagctgggaaccctgcacagggctaaagcacagtggaactgatttctggcccccagtgactctgagaaaaacaggtgagtttaagtggcaaggagctacctgctttcctgactggcctctggaatcccactggcagagaccctctgaccatcatggaaaatgagttgaaaggaagagctgcttagagaagtgacaggggcagcacaccagccagtgcacagccaagagggtttattgtgggaacatgtgtagtgaagcatgtccagggatgcccacaccaataagcttaacttgctcccataagagacgttagc

SEQ ID NO: 448053 - DNA, 496 bp, Homo sapiens
ccaagagggtttattgtgggaacatgtgtagtgaagcatgtccagggatgcccacaccaataagcttaacttgctcccataagagacgttagccctaggggaaattttggacaaaaagtctgcagggtggtggcccatcagatggggctgttttgacctgagcttgcgttggtgtgctggcctctcctgygaccccaattcggccctgcatgcttgcagtgcagccttgagtaccctgggggcctgcatcatagatcctgaactggcagatcatgtctgactagtagacagctccagtggggtgaccccatccaggcatcagcctgcctgctgcctctcctcactgcagcttccccccaaggcccattgccaccccacacatcactatgctggtgtgtgtgtgtgtgtgtgtgtgtgtgcatggaaggatcttgctttccctgtcctgtcagtgcacatgtgcatatgcattctgccctggcactgctgttggtag

SEQ ID NO: 448054 - DNA, 610 bp, Homo sapiens
  misc_feature (1)...(610): n = A,T,C or G
gctgttttgacctgagcttgcgttggtgtgctggcctctcctgcgaccccaattcggccctgcatgcttgcagtgcagccttgagtaccctgggggcctgcatcatagatcctgaactggcagatcatgtctgactagtagacagctccagtggggtgaccccatccaggcatcagcctgcctgctgcctctcctcactgcagcttccccccaaggcccattgccaccccacacatcactatgctggtgtgtgtgtgtgtgtgtgtgtgtgtgcatggaaggatcttgctttccctgtcctgtcagtgcacatgtgcatatgcattctgccctggcactgctgttggtaggagtktactccaggccccctctcctgctataccaccactgcagacagaatcttgggggaaacagaggccatctgccccacaacaccagcaccctgctcctttgtcaacactgtcatttgagtacaactaagcacaaaaaacagcatactctcntcagccctgagcagccaccttcgcctgcatgaatacacacaaaaccacttgactgagccaaccttataacacaattaaacccttaaggtcatcaagcagaataaaag

SEQ ID NO: 448055 - DNA, 610 bp, Homo sapiens
  misc_feature (1)...(610): n = A,T,C or G
gctgttttgacctgagcttgcgttggtgtgctggcctctcctgcgaccccaattcggccctgcatgcttgcagtgcagccttgagtaccctgggggcctgcatcatagatcctgaactggcagatcatgtctgactagtagacagctccagtggggtgaccccatccaggcatcagcctgcctgctgcctctcctcactgcagcttccccccaaggcccattgccaccccacacatcactatgctggtgtgtgtgtgtgtgtgtgtgtgtgtgcatggaaggatcttgctttccctgtcctgtcagtgcacatgtgcatatgcattctgccctggcactgctgttggtaggagtgtactccaggccccctctcytgctataccaccactgcagacagaatcttgggggaaacagaggccatctgccccacaacaccagcaccctgctcctttgtcaacactgtcatttgagtacaactaagcacaaaaaacagcatactctcntcagccctgagcagccaccttcgcctgcatgaatacacacaaaaccacttgactgagccaaccttataacacaattaaacccttaaggtcatcaagcagaataaaag

SEQ ID NO: 448056 - DNA, 610 bp, Homo sapiens
  misc_feature (1)...(610): n = A,T,C or G
gctgttttgacctgagcttgcgttggtgtgctggcctctcctgcgaccccaattcggccctgcatgcttgcagtgcagccttgagtaccctgggggcctgcatcatagatcctgaactggcagatcatgtctgactagtagacagctccagtggggtgaccccatccaggcatcagcctgcctgctgcctctcctcactgcagcttccccccaaggcccattgccaccccacacatcactatgctggtgtgtgtgtgtgtgtgtgtgtgtgtgcatggaaggatcttgctttccctgtcctgtcagtgcacatgtgcatatgcattctgccctggcactgctgttggtaggagtgtactccaggccccctctcctgctataccaccactgcagacagaatcttgggggaaacagaggccatctgccccacaacaccagcaccctgctcctttgtcaacactgtcatttgagtacaactaagcacaaaaaacagcatactctcntcagccctgagcagccaccttcgcctgcatgaatacacacaaaaccactygactgagccaaccttataacacaattaaacccttaaggtcatcaagcagaataaaag

SEQ ID NO: 448057 - DNA, 580 bp, Homo sapiens
gagacaaaagagccagtattaagagcataactaacctgagagagctaaaaaaatcacactaaatttttttataagaaattcacaactattaatagtagaatagacaaagctaaggaagaatctcagagtttgaagactgtttatgtgaagtmagacatacagacagaaataaaaaagagtaataaaaacccccaagcctctgaaaaatataagattatgtaaagagaccaaaggtatgacccactggtgttcatgaaacaggtggggagaatggaagccatttgaaaaacatattttaggatatcattcatgagaacttccccaacctggggaatgctggctagagaggccagcattcaaatttaggaaatgcagaaaactccagtaagatacttcataatataataatcaccaaaacacatagttatcagattgttcaagcatgaaataaaagaaaaaatgtcaaatgcagctagagaggaaagggaggtcaaccacaaaggaaagattatcagtgtaaaagtacgccttttagcagaaatcctacaagccagaagagaccaataccaatatttaacct

SEQ ID NO: 448058 - DNA, 523 bp, Homo sapiens
ccagcattcaaatttaggaaatgcagaaaactccagtaagatacttcataatataataatcaccaaaacacatagttatcagattgttcaagcatgaaataaaagaaaaaatgtcaaatgcagctagagaggaaagggaggtcaaccacaaaggaaagattatcagtgtaaaagtacgccttttagcagaaatcctacaagccagaagagaccaataccaatatttaacctccttgaagaaaataaattccaatcaacaatctcgtatttggccaaactaagcttcataagtaaaggagaaataaagttctttttaaacaggcaaatgctgaggaaattcattactacaagacatgccttacaagagctcctgaaggaagaactaaatataggtgaaaaaaacctttattagccactaaaaaaacacactgaggtatacagaccagttrcgcacaaacaagtctgcataataagcagctaccattataatggcagcatcaaatgcacacatatcaacactaac

SEQ ID NO: 448059 - DNA, 523 bp, Homo sapiens
ccagcattcaaatttaggaaatgcagaaaactccagtaagatacttcataatataataatcaccaaaacacatagttatcagattgttcaagcatgaaataaaagaaaaaatgtcaaatgcagctagagaggaaagggaggtcaaccacaaaggaaagattatcagtgtaaaagtacgccttttagcagaaatcctacaagccagaagagaccaataccaatatttaacctccttgaagaaaataaattccaatcaacaatctcgtatttggccaaactaagcttcataagtaaaggagaaataaagttctttttaaacaggcaaatgctgaggaaattcattactacaagacatgccttacaagagctcctgaaggaagaactaaatataggtgaaaaaaacctttattagccactaaaaaaacacactgaggtatacagaccagttgcgcacaaacaagtctgcataataagcakctaccattataatggcagcatcaaatgcacacatatcaacactaac

SEQ ID NO: 448060 - DNA, 635 bp, Homo sapiens
atatgctgtcatcaagactcatttcacatgcaatcagtttcayaggctgaaaatgacgggataaaaatctaccaagcaaatggaaaacagcagaaagaatgggttgcaaccctaagtttagacaaacagactttaaaacaacaaagatttaaaaaggcaaaaaggcattacaaaatgctaaagggttaaattcaacaagaatatatgtattcatatttaaatatatacattttaaatatatacacacccaacacaggaacacccaaattcataaagcaagttcttagaggtctttaaaaagacttagattcctacacaattatagtgaaaaacttcaacaacccattgacaatattagattattaaggcagaaaattaacaagatattcaagatctgaatgcagcactggatcaaatggatgtaacagacactttcagaactctccaccaaaaacaacaacatatacgttctcattgccacatggcacatactctaaaatcaaccacttaatcgacataaaactgttctcagaaattataaaagaattcaaattatgacaaccactctccgagaccagagtacagtaaaattggaggtaaaagttgagaaaaccaatactcaataccatatgatt

SEQ ID NO: 448061 - DNA, 635 bp, Homo sapiens
atatgctgtcatcaagactcatttcacatgcaatcagtttcataggctgaaaatgacgggataaaaatctaccaagcaaatggaaaacagcagaaagaatgggttgcaaccctaagtttagacaaacagactttaaaacaacaaagatttaaaaaggcaaaaaggcattacaaaatgctaaagggttaaattcaacaagaatatatgtattcawatttaaatatatacattttaaatatatacacacccaacacaggaacacccaaattcataaagcaagttcttagaggtctttaaaaagacttagattcctacacaattatagtgaaaaacttcaacaacccattgacaatattagattattaaggcagaaaattaacaagatattcaagatctgaatgcagcactggatcaaatggatgtaacagacactttcagaactctccaccaaaaacaacaacatatacgttctcattgccacatggcacatactctaaaatcaaccacttaatcgacataaaactgttctcagaaattataaaagaattcaaattatgacaaccactctccgagaccagagtacagtaaaattggaggtaaaagttgagaaaaccaatactcaataccatatgatt

SEQ ID NO: 448062 - DNA, 635 bp, Homo sapiens
atatgctgtcatcaagactcatttcacatgcaatcagtttcataggctgaaaatgacgggataaaaatctaccaagcaaatggaaaacagcagaaagaatgggttgcaaccctaagtttagacaaacagactttaaaacaacaaagatttaaaaaggcaaaaaggcattacaaaatgctaaagggttaaattcaacaagaatatatgtattcatatttaaatatatacattttaaatatatacacacccaacacaggaayacccaaattcataaagcaagttcttagaggtctttaaaaagacttagattcctacacaattatagtgaaaaacttcaacaacccattgacaatattagattattaaggcagaaaattaacaagatattcaagatctgaatgcagcactggatcaaatggatgtaacagacactttcagaactctccaccaaaaacaacaacatatacgttctcattgccacatggcacatactctaaaatcaaccacttaatcgacataaaactgttctcagaaattataaaagaattcaaattatgacaaccactctccgagaccagagtacagtaaaattggaggtaaaagttgagaaaaccaatactcaataccatatgatt

SEQ ID NO: 448063 - DNA, 606 bp, Homo sapiens
ggacacacacaaagaaactaaaagattaatgaatccaggagtaggttttgttttaaatgtggactactagctagactaatatagaggaaaagagagaagatccaaacaaagacaatcagaaacaacaaaggggatattaccactggctcctcagaaatagaaataaacatcggagaataygatgaacacctttatgcaaaaaaactacaacacctagaacaaatagataaattcctggacatgtacacctttccaagactgaaccaggaagaaattgaatccctgaacagaccaataacatgctccaaaattgaatctgtaataaatagactatcaattttaaaaagcccaggaaaagacgaattcccagccaaattctactggatatgcaaagaagaatttggtatcattcctactgaaactcccaaaaatttgaggaggatcatcttcctcactcatcctatgaggccagcacccttctgatatcaaaacctggaagaaaagcaaaagaaagaaaaatttcatatctttgatgaatattgatgcaaaaattctccataaaatactggcaaaccaaatccagcagcacaccaaaaagcctatcca

SEQ ID NO: 448064 - DNA, 606 bp, Homo sapiens
ggacacacacaaagaaactaaaagattaatgaatccaggagtaggttttgttttaaatgtggactactagctagactaatatagaggaaaagagagaagatccaaacaaagacaatcagaaacaacaaaggggatattaccactggctcctcagaaatagaaataaacatcggagaatatgatgaacacctttatgcaaaaaaactacaacacctagaacaaatagataaattcctggacatgtacacctttccaagactgaaccaggaagaaattgaatccctgaacagaccaataacatgctccaaaattgaatctgtaataaatagactatcaattttaaaaagcccaggaaaagaygaattcccagccaaattctactggatatgcaaagaagaatttggtatcattcctactgaaactcccaaaaatttgaggaggatcatcttcctcactcatcctatgaggccagcacccttctgatatcaaaacctggaagaaaagcaaaagaaagaaaaatttcatatctttgatgaatattgatgcaaaaattctccataaaatactggcaaaccaaatccagcagcacaccaaaaagcctatcca

SEQ ID NO: 448065 - DNA, 606 bp, Homo sapiens
ggacacacacaaagaaactaaaagattaatgaatccaggagtaggttttgttttaaatgtggactactagctagactaatatagaggaaaagagagaagatccaaacaaagacaatcagaaacaacaaaggggatattaccactggctcctcagaaatagaaataaacatcggagaatatgatgaacacctttatgcaaaaaaactacaacacctagaacaaatagataaattcctggacatgtacacctttccaagactgaaccaggaagaaattgaatccctgaacagaccaataacatgctccaaaattgaatctgtaataaatagactatcaattttaaaaagcccaggaaaagacgaattcccmgccaaattctactggatatgcaaagaagaatttggtatcattcctactgaaactcccaaaaatttgaggaggatcatcttcctcactcatcctatgaggccagcacccttctgatatcaaaacctggaagaaaagcaaaagaaagaaaaatttcatatctttgatgaatattgatgcaaaaattctccataaaatactggcaaaccaaatccagcagcacaccaaaaagcctatcca

SEQ ID NO: 448066 - DNA, 432 bp, Homo sapiens
ttgaactctatgaaaaagaccacaggaggccacttggtaaatagaaataacatattctagaaggaaattagactaaaatagaaacggcactaaagtaaaaattaaaattcatattcggtagaaattttatgccaccctcyactatctcaagcaaactttctgactctgtgggactccccaatttactgaatattttctaaatatctgttcctggttcactaatgggccagggaagatgacacctcatggtgttcactgggctggtgtgggtgtttgatctcattgtcagccaatgaggaacctgaatctggggtgattacttcactcaattgtcagaactgagagttccgggttattgccacattctacgtgtttaggcttccatattgaaaatgattaactgtctaattaagaacatcttctttggggctg

SEQ ID NO: 448067 - DNA, 432 bp, Homo sapiens
ttgaactctatgaaaaagaccacaggaggccacttggtaaatagaaataacatattctagaaggaaattagactaaaatagaaacggcactaaagtaaaaattaaaattcatattcggtagaaattttatgccaccctctactatctcaagcaaactttctgactctgtgggactccccaatttactgaatattttctaaatatctgttcctggttcactaatgggccagggaagatgacacctcatggtgttcactgggctggtgtgggtgtttgatctcattgtcagccaatgaggaacctgaatctggggtgattacttcactcaattgtcagaactgagagttcygggttattgccacattctacgtgtttaggcttccatattgaaaatgattaactgtctaattaagaacatcttctttggggctg

SEQ ID NO: 448068 - DNA, 522 bp, Homo sapiens
caggaatagttagaacattgcacttctagagaagatggtgagacagggcaagactcacagtgagaataaaagcttcttctcaatctttcagtgtatctgtttctggtagatgaatccagaaaagattccagarccagggaagagctatttgagagggtagaatcactgtagatcagagtactaggtcatatgtttattagtcaccttctttggtcatattctcagtgctaagcctctgatagggcttcagagcaatgtatgcctgtgaaaatctctaattccatttgaaagatgaagttctggctctgggagaagtctcctatctgacagaacatcatgcttctgtgggcatgagattctgtgcccttcctcagcagacaccactgactcaataattgtttaagaatcatgcataaataggccttccttatcatgaatctcttaaataacaaaacagagaaaacccatttatccacgttcaaattgaataagagtgtaagaaacttcacagaaattgttata

SEQ ID NO: 448069 - DNA, 522 bp, Homo sapiens
caggaatagttagaacattgcacttctagagaagatggtgagacagggcaagactcacagtgagaataaaagcttcttctcaatctttcagtgtatctgtttctggtagatgaatccagaaaagattccagagccagggaagagctatttgagagggtagaatcactgtagatcagagtactaggtcatatgtttattagtcaccttctttggtcatattctcagtgctaagcctctgatagggcttcagagcaatgtatgcctgtgaaaatctctaattccatttgaaagatgaagttctggctctgggagaagtctcctatctgacagaacatcatgcttctgtgggcatgagattctgtgcccttcctcagcagrcaccactgactcaataattgtttaagaatcatgcataaataggccttccttatcatgaatctcttaaataacaaaacagagaaaacccatttatccacgttcaaattgaataagagtgtaagaaacttcacagaaattgttata

SEQ ID NO: 448070 - DNA, 522 bp, Homo sapiens
caggaatagttagaacattgcacttctagagaagatggtgagacagggcaagactcacagtgagaataaaagcttcttctcaatctttcagtgtatctgtttctggtagatgaatccagaaaagattccagagccagggaagagctatttgagagggtagaatcactgtagatcagagtactaggtcatatgtttattagtcaccttctttggtcatattctcagtgctaagcctctgatagggcttcagagcaatgtatgcctgtgaaaatctctaattccatttgaaagatgaagttctggctctgggagaagtctcctatctgacagaacatcatgcttctgtgggcatgagattctgtgcccttcctcagcagayaccactgactcaataattgtttaagaatcatgcataaataggccttccttatcatgaatctcttaaataacaaaacagagaaaacccatttatccacgttcaaattgaataagagtgtaagaaacttcacagaaattgttata

SEQ ID NO: 448071 - DNA, 442 bp, Homo sapiens
atcatgaatctcttaaataacaaaacagagaaaacccatttatccacgttcaaattgaataagagtgtaagaaacttcacagaaattgttatagaaggaaactcttgggctctgtccatcyccagaaatctcaaaattctggcacaatctgttacaattaaccttatcagagcttgaattttttttttgctatatatatttacctttaattggaccttaattttgttatatgttttaatttaattttatttttttgatggagtcttgctgtgtctccgaggctgtagtgcactggtgtgatctcagctcactgaaagctccacctcctgggttcacacctttttcctgcctcagcttccctagtagcggggactacaggcgcccgccaccacacccagcaatgtttttggacttttagtagagacggggtttcaccgtatta

SEQ ID NO: 448072 - DNA, 517 bp, Homo sapiens
gttaaagtctttatgtttaatgtattaattmtgtgatgccaagtatgtcattgtgcctctcaggggctccatagtctcacagcctgcacagtggggattatggtggcatccagctgcaagggatctcatgagatatgtataaaatgatacgcatgactgttgggtttgatattaaacacagctactgcataaacttagagaaagaaactacaagggatgggacattgcttgaatatctctcaaacatgcctgggttttataacttgaatcttgagaaagtcatgtcccctcttgaatttatttttcaaactccaccatgaaaacattgaaattgaataaaatttagatgttgttattctttggccagaacaacaacaataacaacaacacacattgtagtaccttctcgttatatttagaatcaggcccatttgtctcaccttggcatacgtagtgcacagccttcatgatggctcataataatttttatttccaactatacacacccaaatgtaaa

SEQ ID NO: 448073 - DNA, 517 bp, Homo sapiens
gttaaagtctttatgtttaatgtattaattatgtgatgccaagtatgtcattgtgcctctcaggggctccatagtctcacagcctgcacagtggggattatggtggcatccagctgcaagggatctcatgagatatgtataaaatgatacgyatgactgttgggtttgatattaaacacagctactgcataaacttagagaaagaaactacaagggatgggacattgcttgaatatctctcaaacatgcctgggttttataacttgaatcttgagaaagtcatgtcccctcttgaatttatttttcaaactccaccatgaaaacattgaaattgaataaaatttagatgttgttattctttggccagaacaacaacaataacaacaacacacattgtagtaccttctcgttatatttagaatcaggcccatttgtctcaccttggcatacgtagtgcacagccttcatgatggctcataataatttttatttccaactatacacacccaaatgtaaa

SEQ ID NO: 448074 - DNA, 672 bp, Homo sapiens
tgtgtctagctcaaggattgtaaatgcatcaatcagcaccctgtgaaaagggaccaatcagctctctgtaaaacagaccaattggctcyctgtaaaatggaccaatcagcaggatgtgggtggggccagataagagaataaaagcagctgcccgagccagcagtggcaaccctctcgggtccccatccacactgtggaagctttgttctttcgctctttgcaataaatcctgctgctgctcactctttgcgtccacactgcctttatgagctgtaacactcaccacaaaggtctgcagcttcactcctgagccagaaagaccacgaacccaccagaagaaagaaactccaaacacatgctgacattagaagggaaaaactccaggcacgctgcctttaagaactgtaacactcaccgtgagggtccgcggcttcattcttgaagtcagtgagaccaagaaccgaccaattccggacacatgaggacattgtggtagacccattcaactaagctgtgtcagtatttgtagccaacagaaaataagacataatgcatatttggaattttaagccactacacattgagctaatgagtagaattattttttctaattttatttactgattgcccttagttactgtataaaagtgcaatttaatattgtgcatttat

SEQ ID NO: 448075 - DNA, 672 bp, Homo sapiens
tgtgtctagctcaaggattgtaaatgcatcaatcagcaccctgtgaaaagggaccaatcagctctctgtaaaacagaccaattggctccctgtaaaatggaccaatcagcaggatgtgggtggggccagataagagaataaaagcagctgcccgagccagcagtggcaaccctctcgggtccccatccacactgtggaagctttgttctttcgctctttgcaataaatcctgctgctgctcactctttgsgtccacactgcctttatgagctgtaacactcaccacaaaggtctgcagcttcactcctgagccagaaagaccacgaacccaccagaagaaagaaactccaaacacatgctgacattagaagggaaaaactccaggcacgctgcctttaagaactgtaacactcaccgtgagggtccgcggcttcattcttgaagtcagtgagaccaagaaccgaccaattccggacacatgaggacattgtggtagacccattcaactaagctgtgtcagtatttgtagccaacagaaaataagacataatgcatatttggaattttaagccactacacattgagctaatgagtagaattattttttctaattttatttactgattgcccttagttactgtataaaagtgcaatttaatattgtgcatttat

SEQ ID NO: 448076 - DNA, 513 bp, Homo sapiens
gtgatgactcttctgaatttcagactgcacacatcaaattttattctcatttgrtagaaggagacagacatccctctggggtttcctgtgtaaagccagtaatctcaatcatgatggcctcaacctcaggagttaattacaacctatctccttatagcattacactgggggttacaattttaatacaaattattgtaactctcaagtttttttaaagctgtcattattcctcctactgggtttttcctatttgcttcctcagtctttccatttctttatgtctctttgtgtgaaactgtttgcctaattctgtctctcaattgtattcctcaaacagaggaagcaagctccaatgctatgagatgctctatgtacagacgcacataacaaagaacggagggagtgctcaggcagtagacagaagtaaagtcatgctctcagtctaccctgaaccctgccaattttcacaagcatgagcttaaaggttgatgcttttccggtccacattcagtt

SEQ ID NO: 448077 - DNA, 513 bp, Homo sapiens
gtgatgactcttctgaatttcagactgcacacatcaaattttattctcatttggtagaaggagacagacatccctctggggtttcctgtgtaaagccagtaatctcaatcatgatggcctcaacctcaggagttaattacaacctatctccttatagcattacactgggggttacaattttaatacaaattattgtaactctcaagtttttttaaagctgtcattattcctcctactgggtttttcctatttgcttcctcagtctttccatttctttatgtctctttgtgtgaaactgtttgcctaattctgtctctcaattgtattcctcaaacagaggaagcaagctccaatgctatgagatgctctatgtacagacgcacataacaaagaacggagggagtgctcaggcagtagacagaagtaaagtcatgctctcagtctaccctkaaccctgccaattttcacaagcatgagcttaaaggttgatgcttttccggtccacattcagtt

SEQ ID NO: 448078 - DNA, 566 bp, Homo sapiens
tatctagcctcatctcccaagccccaggattctccatgcctctgcttatctcttcctcaggctgtctgtaccaaattggtccctttctaatctctgccaaactcacacctgtaagactcttcaccaagggtggcttctcactgacacattcttgtgcagagatgcctccctgttatcattctcatcatggattaaagatcacctcagtgaggactttgggtccccccattcaatgactttgcagctcttcttctcaacattctactttatataatagtccttgctcttttcttttatatatacttgctttagtgcttttgtcgagctgrcttcagactgttctgtccttggaggggtatgcaggcatgatgtaatcattttctgtgccacatgttggacccaccagggtagctggcaaagggtgagtgcaagggaaaaaagattggctaagtgggcaatgtggaaattgttgataataacatgaggtgtgtgactcttacttgctccagctgctccagcaaagctcaataggcaccagaaacacagcaggctgtaaccacctccag

SEQ ID NO: 448079 - DNA, 566 bp, Homo sapiens
tatctagcctcatctcccaagccccaggattctccatgcctctgcttatctcttcctcaggctgtctgtaccaaattggtccctttctaatctctgccaaactcacacctgtaagactcttcaccaagggtggcttctcactgacacattcttgtgcagagatgcctccctgttatcattctcatcatggattaaagatcacctcagtgaggactttgggtccccccattcaatgactttgcagctcttcttctcaacattctactttatataatagtccttgctcttttcttttatatatacttgctttagtgcttttgtcgagctgacttcagactgttctgtccttggaggggtatgcaggcatgatgtaatcattttctgtgccacatgttggacccaccagggtagctggcaaagggtgagtgcaagggaaaaaagattggctaagtgggcaatgtggaaattgttgataataacwtgaggtgtgtgactcttacttgctccagctgctccagcaaagctcaataggcaccagaaacacagcaggctgtaaccacctccag

SEQ ID NO: 448080 - DNA, 512 bp, Homo sapiens
agactatggaggattcatcaacagaccgggaagcaacagcctgggctacagagttggcccctcatccctgcagagatggggagaggtctcaggaagctctagtgccatctgggaccctagctctttttgtaaggagttctttggcataaggccgggtaacgaggactcttcactactgggctcaaaaaccacaaaaatgtcaaatttttggcgattgtctgttgtttttcaataactaacatacaggaacagattaaaatagaaatttctctgagacactggtggatgaacgcctgaagaaactcacagaacctgttccgggacttggtgaccattgtttgtgtccatgttcaattgagataaaattgaatatttaacttttcttccaaatttggcttcaatttgatactcaattgtaggaaaayacccttacagatacttggggaaagcatagttgatacagattacagactcagggtaagcacaggagaattaaaagcacagttaatgaa

SEQ ID NO: 448081 - DNA, 586 bp, Homo sapiens
tggtgaccattgtttgtgtccatgttcaattgagataaaattgaatatttaacttttcttccaaatttggcttcaatttgatactcaattgtaggaaaatacccttacagatacttggggaaagcatagttgatacagattacagactcagggtaagcacaggagaattaaaagcacagttaatgaaaaccacacccaccatggctgtgcaaggagagtcgtagtgtgagaattgtcagggatatacacacaacattcggtatgcagtaaggtacagggacgattctccaacgtagcccatttttggtggcctctggcaattccacgcatagccaacattgactgcagttggcttctgttgcagtggyggctatgcagatgatgaatttattcttggcatcagacacagagacacaggtactgaccattagtaaacaggttattctctgtaataaccaaaacagaggggaacataatattgtttttcatctttaggaaactgtactatgccttcagtttcttctcccatagctacaagttcaccagccataggagtaggatgtgatggacgctgtactcatatttt

SEQ ID NO: 448082 - DNA, 619 bp, Homo sapiens
ttcttggcatcagacacagagacacaggtactgaccattagtaaacaggttattctctgtaataaccaaaacagaggggaacataatattgtttttcatctttaggaaactgtactatgccttcagtttcttctcccatagctacaagttcaccagccataggagtaggatgtgatggacgctgtactcatattttggctccaggatttaagctacgtgtaccagtgcgtctgaatctcccagttctgtatgtagcctctgttggggcagagacatcctcaggggttaattgttgacaaggtaccactaaaaattgaggaacccacatctgcagttttacagcaaaagattctcgagtgatattgtataaaatgayctttaactctcccctgtaaccactctgaattataccaccatacattatgccgttcattgcaagacttgaatgtgttttaatccattcatccgcattcaaatttgcaagtatggtggaaattttggcctgttgatctgtctgctgattaaatagtctgtcgagaaagcagagacacatgagcatcaacatgaaaaacagtgataatgatagtgtgcaccaggattcaggtatcttcccaggagt

SEQ ID NO: 448083 - DNA, 602 bp, Homo sapiens
tgtactcatattttggctccaggatttaagctacgtgtaccagtgcgtctgaatctcccagttctgtatgtagcctctgttggggcagagacatcctcaggggttaattgttgacaaggtaccactaaaaattgaggaacccacatctgcagttttacagcaaaagattctcgagtgatattgtataaaatgatctttaactctcccctgtaaccactctgaattataccaccatacattatgccgttcattgcaagacttgaatgtgttttaatccattcatccgcattcaaatttgcaastatggtggaaattttggcctgttgatctgtctgctgattaaatagtctgtcgagaaagcagagacacatgagcatcaacatgaaaaacagtgataatgatagtgtgcaccaggattcaggtatcttcccaggagtgttttccctctttatgcctaattaaccatttgtaaagataaaatagagaatgaaggtggtgtcggtgagattggacatcaaaagacacaaaaggaatgtgacatggtgacctgagaaaggaatagagagagaaattaaaatagacaaaaaggggaatcagcaagg

SEQ ID NO: 448084 - DNA, 619 bp, Homo sapiens
ttcttggcatcagacacagagacacaggtactgaccattagtaaacaggttattctctgtaataaccaaaacagaggggaacataatattgtttttcatctttaggaaactgtactatgccttcagtttcttctcccatagctacaagttcaccagccataggagtaggatgtgatggacgctgtactcatattttggctccaggatttaagctacgtgtaccagtgcgtctgaatctcccagttctgtatgtagcctctgttggggcagagacatcctcaggggttaattgttgacaaggtaccactaaaaattgaggaacccacatctgcagttttacagcaaaagattctcgagtgatattgtataaaatgatctttaactctcccctgtaaccactctgaattataccaccatacattatgccgttcattgcaagacttgaatgtgttttaatccattcatccgcattcaaatttgcaagtatggtggaaattttggcctgttgatctgtctrctgattaaatagtctgtcgagaaagcagagacacatgagcatcaacatgaaaaacagtgataatgatagtgtgcaccaggattcaggtatcttcccaggagt

SEQ ID NO: 448085 - DNA, 506 bp, Homo sapiens
aagtactcttattagaaaaaggaacactttggggccagaaatggaccagtgtccaaggcatgcagaaagcaggaaataattaccgggtcatgggatggaactatggagagtgactaaagkttcaagatcataaaccagtctttagttgctcctaatttaatttaatgcaatcctcactctttgtcatcatttggttttaatgtataaagctatggggtctgcttattgtatgttttgtagtataatttggaaattaatctatcagctcttttttctcagcccagttggtgtcttgtcaactcctctgcactaattgcttcttgttttctcacagtccagccctatgttctcatgagctgtgaccctggggtatccaggctccggtttgcctgctgtggaaaaagtgcagctttctaagctggtcacatatctctacattaaatgtacattgtctttttaaagcaatgttcagacattcatatattctttcttcctgaggtttaagc

SEQ ID NO: 448086 - DNA, 506 bp, Homo sapiens
aagtactcttattagaaaaaggaacactttggggccagaaatggaccagtgtccaaggcatgcagaaagcaggaaataattaccgggtcatgggatggaactatggagagtgactaaaggttcaagatcataaaccagtctttagttgctcctaatttaatttaatgcaatcctcactctttgtcatcatttggttttaatgtataaagctatggggtctgcttattgtatgttttgtagtataatttggaaattaatctatcagctcttttttctcagcccagttggtgtcttgtcaactcctctgcactaattgcttcttgttttctcacagtccagccctatgttctcatgagctgtgaccctggggtatccaggctcyggtttgcctgctgtggaaaaagtgcagctttctaagctggtcacatatctctacattaaatgtacattgtctttttaaagcaatgttcagacattcatatattctttcttcctgaggtttaagc

SEQ ID NO: 448087 - DNA, 601 bp, Homo sapiens
aatttcaagtgtgagccactgagcccagctctttatttttataaatatttatctcyttagttttttctgaagcattttcaacaccttcacctgaactttcaggctttcaactcacagttgattttatccattttgctattcatcctatttattctattgcttatatacttttgtaacatatttaatattttgagttttaaattcttgatacttatatgtatgtatttttagttgtctcttttgcaaggctgcgattctctctagagaagagaatgggctctatgctttcttgagaaaagcattttataacatgggagtaaaacagaccctgtggaaaataaaataaaaggcattttaatcatgattttttataaattgctatttgggagacacaaatttagcaagaagctatatcatgttccattcagatgaggttagggagggacttataaagttttactgcaagtttacacaagtgaaagattttagcacagtctatgatggacaatgtttgattgccagcttagactgtatctaggcaatcatcagcttaattcagcacagctttctcttcaggaggtttgtgatcaggctcagtata

SEQ ID NO: 448088 - DNA, 601 bp, Homo sapiens
aatttcaagtgtgagccactgagcccagctctttatttttataaatatttatctctttagttttttctgaagcattttcaacaccttcacctgaactttcaggctttcaactcacagttgattttatccattttgctattcatcctatttattctattgcttrtatacttttgtaacatatttaatattttgagttttaaattcttgatacttatatgtatgtatttttagttgtctcttttgcaaggctgcgattctctctagagaagagaatgggctctatgctttcttgagaaaagcattttataacatgggagtaaaacagaccctgtggaaaataaaataaaaggcattttaatcatgattttttataaattgctatttgggagacacaaatttagcaagaagctatatcatgttccattcagatgaggttagggagggacttataaagttttactgcaagtttacacaagtgaaagattttagcacagtctatgatggacaatgtttgattgccagcttagactgtatctaggcaatcatcagcttaattcagcacagctttctcttcaggaggtttgtgatcaggctcagtata

SEQ ID NO: 448089 - DNA, 601 bp, Homo sapiens
aatttcaagtgtgagccactgagcccagctctttatttttataaatatttatctctttagttttttctgaagcattttcaacaccttcacctgaactttcaggctttcaactcacagttgattttatccattttgctattcatcctatttattctattgcttatatacttttrtaacatatttaatattttgagttttaaattcttgatacttatatgtatgtatttttagttgtctcttttgcaaggctgcgattctctctagagaagagaatgggctctatgctttcttgagaaaagcattttataacatgggagtaaaacagaccctgtggaaaataaaataaaaggcattttaatcatgattttttataaattgctatttgggagacacaaatttagcaagaagctatatcatgttccattcagatgaggttagggagggacttataaagttttactgcaagtttacacaagtgaaagattttagcacagtctatgatggacaatgtttgattgccagcttagactgtatctaggcaatcatcagcttaattcagcacagctttctcttcaggaggtttgtgatcaggctcagtata

SEQ ID NO: 448090 - DNA, 601 bp, Homo sapiens
aatttcaagtgtgagccactgagcccagctctttatttttataaatatttatctctttagttttttctgaagcattttcaacaccttcacctgaactttcaggctttcaactcacagttgattttatccattttgctattcatcctatttattctattgcttatatacttttgtaacatatttaatattttgagttttaaattcttgmtacttatatgtatgtatttttagttgtctcttttgcaaggctgcgattctctctagagaagagaatgggctctatgctttcttgagaaaagcattttataacatgggagtaaaacagaccctgtggaaaataaaataaaaggcattttaatcatgattttttataaattgctatttgggagacacaaatttagcaagaagctatatcatgttccattcagatgaggttagggagggacttataaagttttactgcaagtttacacaagtgaaagattttagcacagtctatgatggacaatgtttgattgccagcttagactgtatctaggcaatcatcagcttaattcagcacagctttctcttcaggaggtttgtgatcaggctcagtata

SEQ ID NO: 448091 - DNA, 461 bp, Homo sapiens
aaataaaataaaaggcattttaatcatgattttttataaattgctatttgggagacacaaatttagcaagaagctatatcatgttccattcagatgaggttagggagggacttataaagttttactgcaagtttacacaagtgaaagattttagcacagtctatgatggacaatgtttgattgccagcttagactgtatctaggcaatcatcagcttaattcagcacagctttctcttcaggaggtttgtgatcaggctcrgtataaacaatccaagtcaaatgcagttgcctttttaggacatctgtaattttcccagttcgaacaggtaaaattccacctgggtgtgtatgagtattaattcaactcctcatgtcctcctagttgtctttagagacctctcaaataactatctccattttggatttcttttaattagaaataaagagcgcaaggattat

SEQ ID NO: 448092 - DNA, 461 bp, Homo sapiens
aaataaaataaaaggcattttaatcatgattttttataaattgctatttgggagacacaaatttagcaagaagctatatcatgttccattcagatgaggttagggagggacttataaagttttactgcaagtttacacaagtgaaagattttagcacagtctatgatggacaatgtttgattgccagcttagactgtatctaggcaatcatcagcttaattcagcacagctttctcttcaggaggtttgtgatcaggctcagtataaacaatccaagtcaaatgcagttgcctttttaggacatctgtaattttcccagttcgracaggtaaaattccacctgggtgtgtatgagtattaattcaactcctcatgtcctcctagttgtctttagagacctctcaaataactatctccattttggatttcttttaattagaaataaagagcgcaaggattat

SEQ ID NO: 448093 - DNA, 578 bp, Homo sapiens
accactcagtcatgtggtgtcctactacccatgggatacagcctaaactttttatcataggaggaataatttctagtgtctgacagcacagtaggataactacagttagcactaatttttaatatattttaaaatagatagaagagatggctttaaattctcccaacacaaaggaaatttttcaaacacaaagaaaataatatccatgtttgaggtgatggatattctaattaccctgatttsatcactgtacattgcatgcatgtatcaaaatatcactcatgcaccacaaatatatactattattatgtatcaacaaagggaaaattgctaaaagtggctcccaactaaaaaaaaaaagtcaatttctaagtcacagaaaaagatgctcactttaaattgtaagttctgtgacagaatgtaaaggtttgcatagtcacttttacagtcccagactatcatgcatagaactgcctggccccgtgtgtatgtacacacagagatacaaccatgcttctctagtggggcatttttttctccctgaaacatttgccaatgtttggaaacctgtcttgctg

SEQ ID NO: 448094 - DNA, 570 bp, Homo sapiens
actgaggccatgtttgaaaatggttcccggcactagaaggatttaaaactcttataatggaaactatagtagtaataggaacctgcttactgatctcttgcttactagctgtactcattcaagtggtaaaagttttcatggcaactctagttcaccagaacgcttcagcacgagtgtactacatgaatcactatcaatctgtgatagaggaagacataggtagtgaggaagaaggtgagaactcccactaataaaatgagtgagagtctcaaagggggaaaataagggaggagaccaaccctcatattgtcttatacccaatttctgcctccaaagaaagaagaagtaaaaactagaaggcagaaatgaaatccacaagcagacagcccagcgccacaccctgggcctggtagttaaaggtcaacccctgacctaatcggttatttgcataaaaaatgcactgtgaagatccctgtcctgttcagtacctttctaattaccagtgtatgcakcccccagtcacatacccactgcttgctcaatagatcgtgaccctctcatgcggacccc

SEQ ID NO: 448095 - DNA, 569 bp, Homo sapiens
accagtgtatgcagcccccagtcacatacccactgcttgctcaatagatcgtgaccctctcatgcggacccccttagagttgtgagcccttaaaagggacaggaattgctcactcggasggttcagctcttgggaaagaagtcttgctgaagctcccaggtgaataaacaccttctttctttaactcagtgtccaaggggttttgtctgccgctcttcctgttacattgggagaggccaatgtgggcagcgacatggggaggcacagatcccttagtggtggctgtgtgctctgaggcgaatgtggggaaaatcagacctaagatgcttcatatggctgatagtaccagctttagagctgcagcagtctgcgacaggggaaggcatggtcctggctaagcagcatctgaaactcccgcaataggaccaggtctggtggactcaagagtgaaagtcagagtgaaagtgaactgcaagagaggaaatgagagtgaaaacatcaaaagtggctcctttgaaaagcataataaagaattttaaaaaaagagttagaggtgattataggatgaa

SEQ ID NO: 448096 - DNA, 569 bp, Homo sapiens
accagtgtatgcagcccccagtcacatacccactgcttgctcaatagatcgtgaccctctcatgcggacccccttagagttgtgagcccttaaaagggacaggaattgctcactcggagggttcagctcttgggaaagaagtcttgctgaagctcccaggtgaataaacaccttctttctttaactcagtgtccaaggggttttgtctgcmgctcttcctgttacattgggagaggccaatgtgggcagcgacatggggaggcacagatcccttagtggtggctgtgtgctctgaggcgaatgtggggaaaatcagacctaagatgcttcatatggctgatagtaccagctttagagctgcagcagtctgcgacaggggaaggcatggtcctggctaagcagcatctgaaactcccgcaataggaccaggtctggtggactcaagagtgaaagtcagagtgaaagtgaactgcaagagaggaaatgagagtgaaaacatcaaaagtggctcctttgaaaagcataataaagaattttaaaaaaagagttagaggtgattataggatgaa

SEQ ID NO: 448097 - DNA, 569 bp, Homo sapiens
accagtgtatgcagcccccagtcacatacccactgcttgctcaatagatcgtgaccctctcatgcggacccccttagagttgtgagcccttaaaagggacaggaattgctcactcggagggttcagctcttgggaaagaagtcttgctgaagctcccaggtgaataaacaccttctttctttaactcagtgtccaaggggttttgtctgccgctcttcctgttacattgggagaggccaatgtgggcagcgacatggggaggcacagatcccttagtggtggctgtgtgctctgaggcgaatgtggggaaaatcagacctaagatgcttcatatggctgatagtaccagctttasagctgcagcagtctgcgacaggggaaggcatggtcctggctaagcagcatctgaaactcccgcaataggaccaggtctggtggactcaagagtgaaagtcagagtgaaagtgaactgcaagagaggaaatgagagtgaaaacatcaaaagtggctcctttgaaaagcataataaagaattttaaaaaaagagttagaggtgattataggatgaa

SEQ ID NO: 448098 - DNA, 569 bp, Homo sapiens
accagtgtatgcagcccccagtcacatacccactgcttgctcaatagatcgtgaccctctcatgcggacccccttagagttgtgagcccttaaaagggacaggaattgctcactcggagggttcagctcttgggaaagaagtcttgctgaagctcccaggtgaataaacaccttctttctttaactcagtgtccaaggggttttgtctgccgctcttcctgttacattgggagaggccaatgtgggcagcgacatggggaggcacagatcccttagtggtggctgtgtgctctgaggcgaatgtggggaaaatcagacctaagatgcttcatatggctgatagtaccagctttagagctgcagcagtctgcgacaggggaaggcatggtcctggytaagcagcatctgaaactcccgcaataggaccaggtctggtggactcaagagtgaaagtcagagtgaaagtgaactgcaagagaggaaatgagagtgaaaacatcaaaagtggctcctttgaaaagcataataaagaattttaaaaaaagagttagaggtgattataggatgaa

SEQ ID NO: 448099 - DNA, 602 bp, Homo sapiens
ggtcctggctaagcagcatctgaaactcccgcaataggaccaggtctggtggactcaagagtgaaagtcagagtgaaagtgaactgcaagagaggaaatgagagtgaaaacatcaaaagtggctcctttgaaaagcataataaagaattttaaaaaaagagttagargtgattataggatgaaactgagtgttcaaaagttaaggacatactgtgaattagaatagccctgttttagtgtcagatggcttgccaaaggcactatagaaaaattggccgtgtgttttaaggtggtgactagggtcagagaacagccaggacattcagacctagtctttatattgactcatggctaaatgaatgcagccctgcctagcagtttactgtagaatgctcgcagctcacggcaagagaaaatcagctgctctggcagctacagagttaaaaggagacacagaggcttgtagcacctcccagccaaaagtgaaagtaaaatcagctgccccagcagctgaagacaaatgaaaaaatctcagaaaaggcagaaaaaccggttttgtcacaaccacagaaaagaatagagaccgctcctccttacattcc

SEQ ID NO: 448100 - DNA, 602 bp, Homo sapiens
ggtcctggctaagcagcatctgaaactcccgcaataggaccaggtctggtggactcaagagtgaaagtcagagtgaaagtgaactgcaagagaggaaatgagagtgaaaacatcaaaagtggctcctttgaaaagcataataaagaattttaaaaaaagagttagaggtgattataggatgaaactgagtgttcaaaagttaaggacatactgtgaattagaatagccctgttttagtgtcagatggcttgccaaaggcactatagaaaaattggccgtgtgttttaaggtggtgactagggtcagagaacagccaggacattcagacctagtctttatattgactcatggctaaatgaatgcagccctgcctagcagtttactgtagaatgctcgcagctcacggcaagagaaaatcagctgctctggcagctacagagttaaaaggagacacagaggcttgtagcacctcccagccaaaagtgaaagtaaaatcagctgccccagcagctgaagacaaatgaaaaaatctcagaaaaggcagaaaaaccggttttgtmacaaccacagaaaagaatagagaccgctcctccttacattcc

SEQ ID NO: 448101 - DNA, 644 bp, Homo sapiens
aggctactcaaaaatcagtgcagggtgaatccagcacttgtaaggcagacccaaggagatatcaggcataaattgcagaagttacaagctccgtaggcgwgaatgctactcagcttattaaagtgacaaccaaggtgttaattaaccgagatgaggaggcaaaggaaaaggctgatcacaggcttaagaaaggctaacttactagcagcagcccttccgggaagaggagctggctttacaaggaggcatggacgcgggcgtgaacgtagtcatgaaaaaggctagtctggacaggagtgtgaaggccagccgaggctagagagagattaatgtgcatggtgcaaaaggaaagacactggaagcataaatgtcaaagaaataatgaaaatgatcagggcaatagtaaaagaaacaaaaaacaaacaaaaaaaacccaaaaaaacagaaccaaaaaatcacacacacacaccagccaagggctactacacgcagaagaaacccaagaaccactgcacctgctgtagaaggcagaataaaaagtgtcagaaaaaagctcaaatctcctctaaaagtgtcaatatttaagcttttatataagccaagaggaaagatggcttagtcctgaaaaaatgcaggctgtttgt

SEQ ID NO: 448102 - DNA, 644 bp, Homo sapiens
aggctactcaaaaatcagtgcagggtgaatccagcacttgtaaggcagacccaaggagatatcaggcataaattgcagaagttacaagctccgtaggcgtgaatgctactcagcttattaaagtgacaaccaaggtgttaattaaccgagatgaggaggcaaaggaaaaggctgatcacaggcttaagaaaggctaacttactagcagcagcccttccgggaagaggagctggctttacaaggaggcatggacgcgggcgtgaacgtagtcatgaaaaaggctagtctggacaggagtgtgaaggccagccgaggctagagagagattaatgtgcatggtgcaaaaggaaagacactggaagcataaatgtcaaagaaataatgaaaatgatcagggcaatagtaaaagaaacaaaaaacaaacmaaaaaaacccaaaaaaacagaaccaaaaaatcacacacacacaccagccaagggctactacacgcagaagaaacccaagaaccactgcacctgctgtagaaggcagaataaaaagtgtcagaaaaaagctcaaatctcctctaaaagtgtcaatatttaagcttttatataagccaagaggaaagatggcttagtcctgaaaaaatgcaggctgtttgt

SEQ ID NO: 448103 - DNA, 516 bp, Homo sapiens
gactggagtggagtggcatgatctcggctcactgcaacctccacctcccgggttcaagtgattcactgcaacctccacctcccaggttcaagtgattctcctgcctcagcctcctgagtagctgggamtataagggcgtgccaccaagcctggctaatttttgtattattagtagagacggggtttcgccatgttgtccaggatggtctcgatctcttcacctcgtgatctgcttgcatcagcctctgaaaaaaactgagattataggtgtgagccaccacacaaagcctacagtttatttttctttgcttgttaaaatgttttagtcagctaaaatttacacaatatagagttctacatactatctaatataaagtgtaaaattcagtgcttttcagtttatttacaatgctatgcaactgtcacccttatcaaattccaaaatagtttcatcaccctttcaccaaaaaaactccatatccattaagcagtaatttatcattcatccaccgaatt

SEQ ID NO: 448104 - DNA, 516 bp, Homo sapiens
gactggagtggagtggcatgatctcggctcactgcaacctccacctcccgggttcaagtgattcactgcaacctccacctcccaggttcaagtgattctcctgcctcagcctcctgagtagctgggaatataagggcgtgccaccaagcctggctaatttttgtattattagtagagacggggtttcgccatgttgtccaggatggtctcgatctcttcacctcgtgatctgcttgcatcagcctctgaaaaaaactgagattataggtgtgagccaccacacaaagcctacagtttatttttctttgcttgttaaaatgttttagtcagctaaaatttasacaatatagagttctacatactatctaatataaagtgtaaaattcagtgcttttcagtttatttacaatgctatgcaactgtcacccttatcaaattccaaaatagtttcatcaccctttcaccaaaaaaactccatatccattaagcagtaatttatcattcatccaccgaatt

SEQ ID NO: 448105 - DNA, 516 bp, Homo sapiens
gactggagtggagtggcatgatctcggctcactgcaacctccacctcccgggttcaagtgattcactgcaacctccacctcccaggttcaagtgattctcctgcctcagcctcctgagtagctgggaatataagggcgtgccaccaagcctggctaatttttgtattattagtagagacggggtttcgccatgttgtccaggatggtctcgatctcttcacctcgtgatctgcttgcatcagcctctgaaaaaaactgagattataggtgtgagccaccacacaaagcctacagtttatttttctttgcttgttaaaatgttttagtcagctaaaatttacacaatatagagttctacatactatctaatataaagtgtaaaattcagtgcttttcagtttatttacaatgctatgcaactgtcacccytatcaaattccaaaatagtttcatcaccctttcaccaaaaaaactccatatccattaagcagtaatttatcattcatccaccgaatt

SEQ ID NO: 448106 - DNA, 516 bp, Homo sapiens
gactggagtggagtggcatgatctcggctcactgcaacctccacctcccgggttcaagtgattcactgcaacctccacctcccaggttcaagtgattctcctgcctcagcctcctgagtagctgggaatataagggcgtgccaccaagcctggctaatttttgtattattagtagagacggggtttcgccatgttgtccaggatggtctcgatctcttcacctcgtgatctgcttgcatcagcctctgaaaaaaactgagattataggtgtgagccaccacacaaagcctacagtttatttttctttgcttgttaaaatgttttagtcagctaaaatttacacaatatagagttctacatactatctaatataaagtgtaaaattcagtgcttttcagtttatttacaatgctatgcaactgtcacccttatcaaattccaaaatagtttcatcaccctttcacmaaaaaaactccatatccattaagcagtaatttatcattcatccaccgaatt

SEQ ID NO: 448107 - DNA, 551 bp, Homo sapiens
atcacagagttgttcggtggccaaattgaaaaggcacctcctctccatgtggtcattcagaaactcaaagttctttcattatttgtcttcatcatccatgagtcgtggttgccgtttgtgttcagtcccctgaaaataaagtactttaagaaatgcatgcgagaagacttgatggactcatcttaatgtgactcacatccatctcactctacaaccattaacaataactggtcacgtttccacatctmatgcaaatgaggctaagaaatgtaattctgctgtgtccctaataaatgggagaatagaatttgttgaatgaccagagttttccgtaacattgtgtcactcatatggatttactgtgtttctcaaatatttattaaacatctgtcatagccaagcactgtgataaggagtacagggaggacagagagctgactcagcagagtcctagtctgaaagaaactcacaatctaagaaaataagaaaagtcatgttaggtgctgctataaaggcacatgcacacgtatgtttattgtggcactactcac

SEQ ID NO: 448108 - DNA, 540 bp, Homo sapiens
  misc_feature (1)...(540): n = A,T,C or G
tggctatcgttggtgtagaaaaatgttagtgatctttgcacattgatttagtatcttgaaactttgctgaagctgtttgttaactaaagaagctttgtrgatgaaactacagggttttctagatagagaattatgttatctgcaaacagaaatagtttggctttctctcttcctatttggatgttcttcggatttctttctctagcctgattgctctggtcagtactgtcaatactaagttgaatagaaatggcaagagagggcattcttgccttctactggttttaaaaaataatgttcccggcttttgcccattcaacacatgttggctgtgggtttcttatagacggctnttattattttggtgcgtctactgagaaanatcatcttttattagtgtttagttccgtttatgaaatgaagtgcatttatgagtttgcacatgatggaccacccttgcgtctaaggaggaagcttacttgatcatgacgaattacctgtctgatgtgctgctggatttccctcccaaatatttgttga

SEQ ID NO: 448109 - DNA, 545 bp, Homo sapiens
  misc_feature (1)...(545): n = A,T,C or G
gctccggcggggcggcgcgggggygccgtcggccgcgcgctctctctcccgtcgcctctccccctcgccgggcccgtctcccgacggagcgtcgggcgggcggtcgggccggcgcgattccgtccgtccgtccgccgagcggcccgtccccctccgagacgcgacctcagatcagacgtggcgacccgctgaatttaagcatattagtcagcggaggagaagaaactaaccaggattccctcagtaacggcgagtgaacagggaagagcccagcgccgaatccccgccccgcggcggggcgcgggacatgtggcgtacggaagacccgctccccggcgccgctcgtggggggcccaagtccttctgatcgaggcccagcccgtggacggtgtgaggccggtagcggcccccggcgcgccgggcccgggtcttcccggagtcgggttgcttgggaatgcagnccaaagcgggtggtaaactccatctaaggctaaataccggcacgagaccgatagtcaacaagtaccgtaagggaaagttgaaaa

SEQ ID NO: 448110 - DNA, 231 bp, Homo sapiens
gcgggcggtcgggccggcgcgattccgtccgtccgtccgccgagcggcccgtccccctccgagacgcgacctcagatcmgacgtggcgacccgctgaatttaagcatattagtcagcggaggagaagaaactaaccaggattccctcagtaacggcgagtgaacagggaagagcccagcgccgaatccccgccccgcggcggggcgcgggacatgtggcgtacggaagacc

SEQ ID NO: 448111 - DNA, 599 bp, Homo sapiens
aggtaagcccatatattgtggagaaagagatccaacttaagattcaaaatgcaccagaaagctgtgtaaagttaataaaattactcaaaatcttggaacatttgtttcctcacctgtaaaatggggatcatgtgcctacttcataagttgttttgacagttaaattcacagagatatttaatagagcctgctatggcaagtgttcacattaacaaagtagtatcaaacttcaaaatatgggaaaggtattttgaataatgtctatgaggccaaggacaacatgcccagcttcayaatcaatcccagccacattacactgaggagatctacaggcaactatatttcttcaacaaattccattagagaggaagagtgtgtagtctgaaaacatgacacaaatgtgaccagtgtacagtgacttaggtagtcgggggtggaatccctacatattctctgaattgcagctacacagtgagttcccaggaaacaaatggaatagaaaaggtgacacaaaatatactaccataaatggggtgagcatagcaggttcacaaccacaaatgtaagcaggagactcaaatcaccaggagcacctagat

SEQ ID NO: 448112 - DNA, 599 bp, Homo sapiens
aggtaagcccatatattgtggagaaagagatccaacttaagattcaaaatgcaccagaaagctgtgtaaagttaataaaattactcaaaatcttggaacatttgtttcctcacctgtaaaatggggatcatgtgcctacttcataagttgttttgacagttaaattcacagagatatttaatagagcctgctatggcaagtgttcacattaacaaagtagtatcaaacttcaaaatatgggaaaggtattttgaataatgtctatgaggccaaggacaacatgcccagcttcacaatcaatcccagccacattacactgaggagatctacaggcaactatatttcttcaacaaattccattagagaggaagagtgtgtagtctgaaaacatgacacaaatgtgaccagtgtacagtgacttaggtagtcgggggtggaatccctacatattctctgaattgcagytacacagtgagttcccaggaaacaaatggaatagaaaaggtgacacaaaatatactaccataaatggggtgagcatagcaggttcacaaccacaaatgtaagcaggagactcaaatcaccaggagcacctagat

SEQ ID NO: 448113 - DNA, 393 bp, Homo sapiens
tttatacagtagtattatattttaatattaaactaaacttatagcagtggtaaatgaatgttttctgaaatgggccaaatgttaaatattttaggttcttctagccatatgttttttctgaaaaatagttaacttggcaatagtagcatgaaagcagtcatagacagtacataaatgcatgactgcacggtaataatactttatttatgaaaaaaaggtgatgggctaaatttgatgcaaggtccatagtttgctgctcagatattcataccctactcttcaatattacccccccaacattttttttaggaattctttttgtccttgggatggagatcgttaattttttggctttrtgctgtatcgaagttatgaaaatctatagcagaatgg

SEQ ID NO: 448114 - DNA, 537 bp, Homo sapiens
gtttttgactgtttcaccttgcttctaaggtgtgatgcattctagatacaattttttttagtaattttaattatgaagatggatgctacacttgctttgataaaattactctgaaatctacagtaacaaaaatgcataactgaagagattacttatcccacaaaggaattaaaaaaactttaaaaatgcatttcctgrcattatttgaaaatacagaagaaattctaagatattctggaccacatctgccccattatgccaaacgcttcatggagagtccattagaataatcatttaacacctgtatcactgtcttctcatagtgcaacctgtaatcaaagtgtgaagcaatcaccacagaagttataatttagattatgacttaatagcactggttctaaaggactagatttgagtatttggaatttcactaaccactgattgcagtaagtgggcacaattgaatcaatatcaaaaaggctatcccttcccttctgaggcagtggtgatgtctgagcttgactgaactggttttta

SEQ ID NO: 448115 - DNA, 586 bp, Homo sapiens
gagagtggctgtaaatacagawgaagctcacctgctgctcatctactgttgtgcagctcagttcctaacaggccacagaccagtattagtccatggcctgggggttggggacccctgctataaagcaaccacataatagaaactacaaagaatccagctaataacttcaaaatgggatcaaaaatctcacatatcaatattaatcttgaatataaataacctaaatgtcccacttaagtggtatagagtgacaagttagataaataaacaagacccttctatctactgtcttcaaaagaccactctcacatgcaacagcactcataggctcaaagtaatgggttggagaaagattcatcatgcaaatggagaacaaagaagagcaggggttgctacttttatatcagataaaacagactttaaaccaacaacagtaaaaaaggacaaagaagggaattacatgatgataaagggttcaattcaacaaagagacttgactattttaaatatatatgctcccaatattggaacacccagattcataaaacaagtacttctagacctacaaaaaatcatagacaacaac

SEQ ID NO: 448116 - DNA, 595 bp, Homo sapiens
tagatccaggttaaaggggtggaaataggagtggcatcactcactattgcccccagtgacccactaacaaaatttttttttctttttctacaacagaaacagaaaggcctagaagtcttagttctaaacagagaaatacttccaccaggagacacaacaatgattccactgaactgaagactgccacctggccactttgggctcctcatgcctctgagtcaacagacaaagaaaggagttattgcgcaaagaaaggagttacagtgcaaagaaaggagttgcggtgttagcttgagtgattcatctggggtactaaagggaaattggactactactggaaattggactactaattggaaattggaccacaaaagaggtaaggaagactatggctaaaatacagaagatcctttagggcctctattaatattaccgtgttctgtcattaagatcaatggaaaactacaacaacccaagccttgcagaatgacaagtggctcagaccctttagaaatgaatcattgggttatattgtcagggaaagaactatgamcagctgaggtgtttgtgaaggcagagaattcagaatgagtag

SEQ ID NO: 448117 - DNA, 522 bp, Homo sapiens
aagcaaatcaccaagtgaattctgattagaagtttgtcatggttgtctccatggtcactaaaactcagtactggataataggatgcataatagataggcaagactaacaaatattcactacttgagaattgtgatactatgaggatttacaccattctgaactctgacccmtggtaggctaaaaattaaaaataaacaacaaatattgttttcttaaccttttataagtaaaaaataatcttaaaaagatttatgctatattttttatagatagtctcagtgtttgcttgcccagtattaaaacattatttaggcagaaattcacaggagttactgtgctctagttttcttctttgcaggctcccactttggtggttgccacttcaacttttcaacatctgtccaattgtgtatactactttatccatttgttcagccactgtttatattgggcctactcaatgccaaatagtgttcacaatcctgaggataaaattgtgaacaacatggaaaatccctccc

SEQ ID NO: 448118 - DNA, 595 bp, Homo sapiens
cttttgggactactgttgtatatgtggtcggttgtttatggaaatgccattatgcagtgcatgactgagtaatttttaattgtctagaagccacattcaaaaaaggatacattacctttaataatgttttatttaacacactaataaaagtattatttcarcttattaacttgaaaagtaataatgagatattttacattccattttaattcatactgtcttcaaaaatccgtgtatatatttacacaaatgccacatttcaagtcctcaaaagccacagatgttaactggaaattcttctggtcagtgccattccaaaaatcaattaaaaggctcttaatagaaatgaagggacacttactgctaaaagtgctacaaagtgattgtatttcaataatcttattgaaagtatttttatattttgatccagaaaggcagataaattatgcaaatgaattttatgaagataaaagttatatgaattaaatccatttatatccaataattctacctatctctttcagtccctcttactcttgctgtctccttctagtataattttgatgtcaactaaaaaatgtaaccttggggccag

SEQ ID NO: 448119 - DNA, 595 bp, Homo sapiens
cttttgggactactgttgtatatgtggtcggttgtttatggaaatgccattatgcagtgcatgactgagtaatttttaattgtctagaagccacattcaaaaaaggatacattacctttaataatgttttatttaacacactaataaaagtattatttcagcttattaacttgaaaagtaataatgagatattttacattccattttaattcatactgtcttcaaaaatccgtgtatatatttacacaaatgccacatttcaagtcctcaaaagccacagatgttaactggaaattcttctggtcagtgccattccaaaaatcaattaaaaggcycttaatagaaatgaagggacacttactgctaaaagtgctacaaagtgattgtatttcaataatcttattgaaagtatttttatattttgatccagaaaggcagataaattatgcaaatgaattttatgaagataaaagttatatgaattaaatccatttatatccaataattctacctatctctttcagtccctcttactcttgctgtctccttctagtataattttgatgtcaactaaaaaatgtaaccttggggccag

SEQ ID NO: 448120 - DNA, 566 bp, Homo sapiens
aattcttagttttctttattgcttattgctgggattattgcaaacatcttctaattggttttaatttaaaaattttactcatacttctgcttagaagcctcaatgatagcacagatccttcagataaaaattttaactcctcagtttgcctgtcacacaaatatggccctttattattatttacctgctttcatcttcaggttcattcacaatttcacccacacaagcaacacaagattwgctaactgcaatgaacttcctcaaatttcccataaggaccatacattttaatactttggtggttacatatagtctgttggctttgctaaaaattttgctttccttattctatatttcttcttcctttgttctcaagaccagctcctctgagactttccattcaactcccttctatagccatgtctactggtgcccctttataaaacttaaataacatccttctgttatggtagtaggtggaatagtgactacatagtgaaatttgggtgtactgaggaatattagagtaactgtatttatttctacataaaaattactctgaaaca

SEQ ID NO: 448121 - DNA, 513 bp, Homo sapiens
tcatggtcatgagagaagaaaactgctacccgaggataatgtatccagcaaacctaaacttatccttcataaataaaggagaataaagtttttccaagataagcaaacactgagagaattaatcacccctatatagccctgtgagaaatgctcaagagttctaaacttggaagcaaaagggtgacacttatgatcatgaaaacacacaatggtattaaacccactggtaagccaaatacacaaatgagcaagaaaaaggattcaaacagtgccactatagtgaaatagtgaaacaccaagccacaatgacaaacaattaaagaaaaaaaaagaatttacaaaactaccagaaacaattaacaatatggcgttaacaaaccctcacatattaatgataaccttgaatgtaaatggaytaaattctctagatatagatatagaatggctgaataaagaaatgcaatccaaccacatgctgccaacaagaagcacacttttctggaaaagacacat

SEQ ID NO: 448122 - DNA, 624 bp, Homo sapiens
aaaagaaaaacaaaattgacaaacctctatctggctatattaatcaagaaaaaaaaaagagagaagatccacatacacaaaatcaacatgaaaaaggagagattacacgtgatgccacagaaaagcaaaagatcattagagagtattatgaacaactacatgctaacactggaaaacatagtggaaatggataaatttctggaaacagacaacctgccgagattgaatcaggaaaaaatggaaaacctgaacagcccagtaatgagtagtgagactgaatcagtawtaaaaatgtcttctgaaaaagaaaagcccaggtctgacttctaaattcactgctaaattatagcaaacatataaagaagaactaataccaatcctcctcaaactatcctaaaaaacgaaagaagagaaaactttccctaactccacaaggctggcactaccctgatacaaaaactagataaggatatgacatgaaaaaactacaggccaataatcctaataaaaattgatgcaaaaattctcaacaaaatactagcacactgaatccaacagcacatcaaaaagatagtaaaccatgaccaagtgggatttacaccagaggtacaaggatgattcaac

SEQ ID NO: 448123 - DNA, 539 bp, Homo sapiens
tatgtttatattctatgtatttacgtaacaaatttatgcacttatattttacatagttatatggggtaagtatttttaaaagctactagagttggtgatatttactcaaacatgtaaaattgaycatataaagaattataaaaccaatattctggtgaaacacacacacacacacacacacacacacacacacacacacacaatctattggttgatttgaagtttcagccataaatacagtgcttgtcattctttatggcctgtgtctccttgcctaaacctgattgaaaaaggaacagttaggctttccctaatttgctataatccatggcatttataggtgctcttctagctgttaatagtgaaaaattcagtaaatttgatattttgtttttttttttaccttttttatttagttgcctagttctttgactctgcaatttagtcaaataaaataataattactatttatatagctatgatgaaaaatgccaataaatatttttagataattttcactgagctggtaatatgtgttg

SEQ ID NO: 448124 - DNA, 648 bp, Homo sapiens
aactgaaaaaaaatgagtactctttttttttttaattctgcattagagcatggtaaaatggtatacctaagatttaccctgtgccttatattattttagaacatgatcttttagcctcacttgtataatgtgatattacaaaagtaattcaactgttagaatgtgcaatctggggtattatttatttttatttcaacaacttaaacaactctagtcaatagaattacttttaccatctctgcactagttagaaaacttaaaaaaggatttaagccatcatggtagaatgtggtatagaaaccaatttaaaaagccaaatggtttctaacatttgccaacaatatataatatttgttgagccaatgcaactgaagcagactrtaataacctattggggttagaaagttcatgccaaaagtggatgatttccctagagccaatcaaaatgatggaaacattggtgcaaaatcacagctgagcaggttcagtcctctcttcactagctacagatggcatgcaatttaggaatgcccatttggtgaaatttaccagttcctctagatatcacacatatgggtttgcatttaaaaagcaattgcaccacgaatagctttttaaacaacagatgtaagtattgacagtgaaagg

SEQ ID NO: 448125 - DNA, 648 bp, Homo sapiens
aactgaaaaaaaatgagtactctttttttttttaattctgcattagagcatggtaaaatggtatacctaagatttaccctgtgccttatattattttagaacatgatcttttagcctcacttgtataatgtgatattacaaaagtaattcaactgttagaatgtgcaatctggggtattatttatttttatttcaacaacttaaacaactctagtcaatagaattacttttaccatctctgcactagttagaaaacttaaaaaaggatttaagccatcatggtagaatgtggtatagaaaccaatttaaaaagccaaatggtttctaacatttgccaacaatatataatatttgttgagccaatgcaactgaagcagactgtaataacctattggggttagaaagttcatgccaaaagtggatgatttccctagagccaatcaaaatgatggaaacattggtgcaaaatcayagctgagcaggttcagtcctctcttcactagctacagatggcatgcaatttaggaatgcccatttggtgaaatttaccagttcctctagatatcacacatatgggtttgcatttaaaaagcaattgcaccacgaatagctttttaaacaacagatgtaagtattgacagtgaaagg

SEQ ID NO: 448126 - DNA, 567 bp, Homo sapiens
ctccccattcaactccactcagcacaaaatattgttaattcaacattaaaatgatcttatacttcatataaatactaggctttgtattgatccttggtgatctaaggctaattttactttctatattactaaaaaatttttaggttacatgaagctaatatttagtatttagaatactaaatattaagttttggttgcttttctacaaccaaaatgtctgactttctctaaaattttggccagctattgtaaaaatgtacagaaaatgtcaaaatcaaaaatggatactagctaatggtagaaatgaatctattttcacaaggatagtataaaaatttgacttaattcttcagtattgtaatgctgatgcytctgttatttgaattgagcttccttagttgagcataaactgaactgtttctacatgatttgtattattctatatatttaacataatattaacataaaatataaacatatatgtacaaaatagctatatattatttgtatgtataattttcttattttgtcgctttaagagacacttttttatttttcttagttaac

SEQ ID NO: 448127 - DNA, 557 bp, Homo sapiens
cattctttttaaggagttttctagcttcaaggtaaaatagagtgaaagtatctaaaggtggaattagagaaaagcaaactgttttggtcaacactcctctacacatgttaactctccttcagatgcaggtatcagaggactrtcttaaagcaaggcaatatgcaatttcttatacttaactgaacatttttaatgacaagaaaagatcaatagaaactaaaataaaaactttgctatgcacagtgtggccagtggatcaacatcagcattatatactggagggcagcttcaaaatgcagaatcttaagcctcaccactggcccactaaatcagaatttacattttaacaagacatttaggtgttttgtatgcatagtaaagtttaataatgtattttctaaaatgcccttagtttgccataagttaagtacttttaattagaatccaacaatactggtttctagaggtgccaagaagaataaggaacatatcagcaagatgcctaactagagttgtctggcattcattccccttgtcccctctaaaaaaaggagacc

SEQ ID NO: 448128 - DNA, 557 bp, Homo sapiens
cattctttttaaggagttttctagcttcaaggtaaaatagagtgaaagtatctaaaggtggaattagagaaaagcaaactgttttggtcaacactcctctacacatgttaactctccttcagatgcaggtatcagaggactgtcttaaagcaaggcaatatgcaatttcttatacttaactgaacatttttaatgacaagaaaagatcaatagaaactaaaataaaaactttgctatgcacagtgtggccagtggatcaacatcagcattatatactggagggcagcttcaaaatgcagaatcttaagcctcaccactggcccactaaatcagaatttacattttaacaagacatttaggtgttttgtatgcatagtaaagtttaataatgtattttytaaaatgcccttagtttgccataagttaagtacttttaattagaatccaacaatactggtttctagaggtgccaagaagaataaggaacatatcagcaagatgcctaactagagttgtctggcattcattccccttgtcccctctaaaaaaaggagacc

SEQ ID NO: 448129 - DNA, 557 bp, Homo sapiens
cattctttttaaggagttttctagcttcaaggtaaaatagagtgaaagtatctaaaggtggaattagagaaaagcaaactgttttggtcaacactcctctacacatgttaactctccttcagatgcaggtatcagaggactgtcttaaagcaaggcaatatgcaatttcttatacttaactgaacatttttaatgacaagaaaagatcaatagaaactaaaataaaaactttgctatgcacagtgtggccagtggatcaacatcagcattatatactggagggcagcttcaaaatgcagaatcttaagcctcaccactggcccactaaatcagaatttacattttaacaagacatttaggtgttttgtatgcatagtaaagtttaataatgtattttctaaaatgccyttagtttgccataagttaagtacttttaattagaatccaacaatactggtttctagaggtgccaagaagaataaggaacatatcagcaagatgcctaactagagttgtctggcattcattccccttgtcccctctaaaaaaaggagacc

SEQ ID NO: 448130 - DNA, 644 bp, Homo sapiens
cttgaagacaggtcttttgaaataactgaatcagagaaaaaatatataaaaataaaacaagaataattagagcctatgggatttagaggacaccattaagcaaacaaatatttacatgataagttttcacagacacaagagatggaaaaagatacagaaaacctatttaattaaaaataatagaaaacttytgaagtattgagagagagatgaaatccagatgcagaaagctaaaatgtttcaaattaaattcaacccctaaaaaggtcatcttcaaggaatattataatcaaatggtcaaaaatcaaaggcaaagagaaatttaaaagcctcaggggaaaagttaagtcacatataaggtattcccattagagtatcaacagatttatcagcagaaatcatgcaggccaggagagaataggataatatattcaaggtgctgaaagaagaaaagcctaccagcaaagaatgcttcatctagcaaagctatcattctgaaataaaggagaaataaagatctttcctgacaagcaaaaactaaggaaattcatcaccaccattctagccttataaaaaattattaaggaaatgctaaaactgaaaatggaagaacaatcattattgtcatgaaaacacacaaacct

SEQ ID NO: 448131 - DNA, 656 bp, Homo sapiens
taaaaaattgaaaacattatgtctaatgatagtcactactggcaatgactaaattagactttaactctaacatatatttagagttggccacacgaatgtgtgcrtgacaacaatggaatgattccctattagtttcttcttattttctgtccatggttgctttctgtcttatggtgacacataggtcttggtggtacatatatacaaattgatttaatttgaattaatgaagatttaaggaatgatctgaaatattgctcaatagtgctaagtgaaataaagtgaatacagagatcctcttttaggttttgctctgcaaaaacatcttttccttttgaccgtatgactcctgcatcctctgaactaccaaccaaatggtctcaataagttcaacttagacatgaatatgagctcagtgttagccatcaaaaccttttccatagataaatggttgatcataggtaagcacattatcaaaggaggaccaaagttcagttggagtgatttctaccaacatttagagttacgatcttcctccttttgagattgtgactactctttcttaagctttaggtggtcatactttctgttaagcagagacagtctacctaaaaataaagcaaatattaagaatagcagagatgacagagaaacta

SEQ ID NO: 448132 - DNA, 565 bp, Homo sapiens
tttttctatttttagtagagatggggtttcactatgttggccaggctggtcgcaaactcctgtccgcaagtgatctgcctgccttggccccccaaattgctgggattacaagtgtgagccactgcacctggcttaaaaaaagaatttgtagagacgggatctcactatattgcccaggctggtctcaaactcctgggctcaagtgatcctcccaccttggcctcccaaattgttgggattatggacatgagccaccrcacctggccagttttttcttgatatgaataaacaatgttgatgaccctcccgggccctattccccattcccttcttccccagtctgtccctgtctccccgttgagaaaatctgtcacttgggttaatacttctgactcaacagacttcatggcatcgctctggcgcacttccacattaaaatttataataattcaagattccagaaaaatgagcaaaaaattagtcagaaaaagactagtgaagaaactgatgtatcttaaaacatccatttgagaaaaggcttcatcagatctttgcaagctggctt

SEQ ID NO: 448133 - DNA, 588 bp, Homo sapiens
tttggtgtcattttatagccctaaacattagctaattatctttcatcaaaatttatgttttagtgtatttattattatgtataaacgataatactgctcagaaccaaaatataaacatgcctaccagcaaaggacctgccaggctttaggtttgacttccatgatacttctctatttatgcttcagtttaggcataagagcacacggagctttaattttctttcttttttttttttgagacagagtcttgctctgtcacccaggctggagtgcagtggcgcgatcctggctcactacaagctcygcctcccaggttcaagcgattctcctgtctcagcctcccaagtagctgggattacaggtgcacatcacaatgtccagctaattttttttttttgtatttttagtagagatggggttttgccatgttggccaagctggactcgaactcctgaccccaggtgatccgccctcctcggcctcccaaagtgctgggattacaggcgtgagccaccgcgcctggccacatctttaatggaataaaatagacaggcttgtagtattcaaaattagtggtgatttgtgggt

SEQ ID NO: 448134 - DNA, 588 bp, Homo sapiens
tttggtgtcattttatagccctaaacattagctaattatctttcatcaaaatttatgttttagtgtatttattattatgtataaacgataatactgctcagaaccaaaatataaacatgcctaccagcaaaggacctgccaggctttaggtttgacttccatgatacttctctatttatgcttcagtttaggcataagagcacacggagctttaattttctttcttttttttttttgagacagagtcttgctctgtcacccaggctggagtgcagtggcgcgatcctggctcactacaagctccgcctcccaggttcaagcgattctcctgtctcagcctcccaagtagctgggattacaggtgcacatcacaatgtccagctaattttttttttttktatttttagtagagatggggttttgccatgttggccaagctggactcgaactcctgaccccaggtgatccgccctcctcggcctcccaaagtgctgggattacaggcgtgagccaccgcgcctggccacatctttaatggaataaaatagacaggcttgtagtattcaaaattagtggtgatttgtgggt

SEQ ID NO: 448135 - DNA, 588 bp, Homo sapiens
tttggtgtcattttatagccctaaacattagctaattatctttcatcaaaatttatgttttagtgtatttattattatgtataaacgataatactgctcagaaccaaaatataaacatgcctaccagcaaaggacctgccaggctttaggtttgacttccatgatacttctctatttatgcttcagtttaggcataagagcacacggagctttaattttctttcttttttttttttgagacagagtcttgctctgtcacccaggctggagtgcagtggcgcgatcctggctcactacaagctccgcctcccaggttcaagcgattctcctgtctcagcctcccaagtagctgggattacaggtgcacatcacaatgtccagctaattttttttttttgtwtttttagtagagatggggttttgccatgttggccaagctggactcgaactcctgaccccaggtgatccgccctcctcggcctcccaaagtgctgggattacaggcgtgagccaccgcgcctggccacatctttaatggaataaaatagacaggcttgtagtattcaaaattagtggtgatttgtgggt

SEQ ID NO: 448136 - DNA, 584 bp, Homo sapiens
tagacctccccccaagaatgcattcctttaattaatattaatattaatattaatattccttgctaggaaaagaatttagcgatatcttccctacttgcacgtctgtttataggctctctgcaagaagaaaaacatggctctttttgcccgaccccgcaggtagtcagaccttatggttgtcttctcttgttccctaaaaatccctgttattctgttctttttcaaggtgcactgayttcatattgttcaaacacacaggtttcacaatcagtttgtacagttaacacaattatcacagtggtcctgaggtgatgtacatcctcagcttacgaagataacaggattaagagattagagtaaagacaggcataagaaattatagaagtattatttggaactgataaatgtccatgaaatcttcacaatttatgttcctctgctgtggctccagccagtccctccatttggggtccctgacttcccacaataaggtgaaggtgtgagaggtattttggaagactgggaaggaaaaataccaagtatatatattagggttgatctctgaggttgcttccagtttggat

SEQ ID NO: 448137 - DNA, 550 bp, Homo sapiens
gagaaacagcattagagtaacatccactttagaaagcagtgagtgttgggaataatttccttcttacaaaacagtctgtccatcttttggaggggagctaaccgagggaatgcctgaagagcagggtttaattggtagaagacaaataacttttacagaattctaatcaaagtaattaccaaacatcacagaaatttctcacactgaagggaattgatggcacaggtctttttctttcttatgaatctaagtaattctggccgaaatgtcacgggggaaataaaaagtcatggtgccctaagttattttatccattccattagtaacactctttcatcagcagggcgggccttcagaaaaggggtcatgcaccaattatcatctgttgcacacacaacttgcaggacattcctgacgttccacatttccaggacacaactgagatactgcaaaaaacaaaccagttactttccctctgcccgcagaagaccccttgaacagcatcttactcttcagcagctcctayagaaaaccaagttatcaatgagct

SEQ ID NO: 448138 - DNA, 581 bp, Homo sapiens
tttgaaatcaatggtgcttttgcatcattagagggcagacttcccttggagtaggaaatgaaggagagttttgagaaattaaaatatttgatatgaagcattggattcctcttctgatgggcgagcacgagagagaggaggaatagaagagcgaatgaagatgatgaagcaattacccactaaccctagagcaaatgtcctctactgatcaaattcttatagtatagtgtgttgagctacaagtcccattggaaggtcgtgaaatcagcattaaaaaatgaaagaaattaaasagaatagaaaataggctacattttacatgagaagaagagatactgtttcatgaaattctttttcttatccactatatgtgtgggggtgtgtttactaaatcacactacaaaatttatttttcaatgattgtaaaggtaacacactttaaaaatattgagctaagggattaaatgttacttttaggttaaatgttcaaaatatttatacgttaatatgtaaatgggagtttttgatcttcttgaagcaaagcaagaatgcatagataaaccagagtaataagtattgaa

SEQ ID NO: 448139 - DNA, 581 bp, Homo sapiens
tttgaaatcaatggtgcttttgcatcattagagggcagacttcccttggagtaggaaatgaaggagagttttgagaaattaaaatatttgatatgaagcattggattcctcttctgatgggcgagcacgagagagaggaggaatagaagagcgaatgaagatgatgaagcaattacccactaaccctagagcaaatgtcctctactgatcaaattcttatagtatagtgtgttgagctacaagtcccattggaaggtcgtgaaatcagcattaaaaaatgaaagaaattaaagagaatagaaaataggctacattttacatgagaagaagagatactgtttcatgaaattctttttcttatccactatatgtgtgggggtgtgtttactaaatcacactayaaaatttatttttcaatgattgtaaaggtaacacactttaaaaatattgagctaagggattaaatgttacttttaggttaaatgttcaaaatatttatacgttaatatgtaaatgggagtttttgatcttcttgaagcaaagcaagaatgcatagataaaccagagtaataagtattgaa

SEQ ID NO: 448140 - DNA, 567 bp, Homo sapiens
tgcatttcctgaattttaagtttggcctctgtagctaggttggggaagttctcatggacgacatcctgaaacatgttttccaagtttcttccattctccccatctctttcagggacatcagtaagcacagattcagtctctttacataattccataattcttgaaattctcgaaggttttgttcattctttttcattcttttcttgaaaattcttgtctgactgccttattccagaaagccagtcttcaagctctgagattctttcctcagcttggtctattctgctgttaatatttgcaattgtattwtgaaattcttgtagagtgtttttcagctctttaaggggtcagttacatatttttctatgttggctattttgtctgttagcttctgtgtggttttactgtgattctttttttttttttttttttgagatggagtctctctcccatcacacaggctggagtgcagtggcatgatctcggctcagtgcaacttccacctcccagattcaagtgattctccttcctcagtctcccgagtagctgagattacaggcgtgcacc

SEQ ID NO: 448141 - DNA, 534 bp, Homo sapiens
gcaatgcagctcaaaggacaagaaaacattaaagacaacagccattttactgggaaaaaaatcctacacatttcttcccttcagttctcatgtttacaatgtggaacattccttccactgctaacattctaattttcatatcacaattagcttgtcttgtccacaggtgctgatattctgaagccgataaagtccatcttgctcttgctcatcttacatgycatttctagaatcttgggccctgacctttcttccagggagcccctgtcttgataactggctcagtaatacaatgtttctgggagtagggtcttccctggacctcatgaaaactgcctgaacactgccaagcccacaatatgggtctgggtccttttcacagctccacatcccaggcacaacaccctgatggccaggctggaactctctccctcaacatcattcccttttgcagaagtgtactgccagctggctgggactccttcacatcacctatggccgtctctgcccacctgacacttgggcttacccagg

SEQ ID NO: 448142 - DNA, 534 bp, Homo sapiens
gcaatgcagctcaaaggacaagaaaacattaaagacaacagccattttactgggaaaaaaatcctacacatttcttcccttcagttctcatgtttacaatgtggaacattccttccactgctaacattctaattttcatatcacaattagcttgtcttgtccacaggtgctgatattctgaagccgataaagtccatcttgctcttgctcatcttacatgtcatttctagaatcttgggccctgacctttcttccagggagcccctgtcttgataactggctcagtaatacaatgtttctgggagtagggtcttccctggacctcatgaaaactgcctgaayactgccaagcccacaatatgggtctgggtccttttcacagctccacatcccaggcacaacaccctgatggccaggctggaactctctccctcaacatcattcccttttgcagaagtgtactgccagctggctgggactccttcacatcacctatggccgtctctgcccacctgacacttgggcttacccagg

SEQ ID NO: 448143 - DNA, 550 bp, Homo sapiens
attcggctcggtaccctgtctctaaaccactgagacctcttgagttgcctatgtcgaggccctctaagtaaggccctttgccgtacagtgtggttgaagacatggagggcattgcactggtaggtggcaaccgcttttgagcagaaatgggctcattatgttttaggaaattgtgtgcttgtgggttgaaggagaaatcctagaatgctttctgaagcgaatattcgttgccaaaacaatttataactgtgttgccatggaagccaatatgtcacgtttcactcagcctaagaatatctaaactctaatgattctgagaatagccgaagtggaacagccaggtgtgatctctacgagaggcccaaggttaacatccattttccagtttctaatccactgtctatgaatctctcaaaatycccaacttcttactctgaatgtcattttgggagcgtgggctttccaactggagtatctgtgaggcaactcctcctcttctcttatccaggtagtcaccaggccagaccctgcttagcttccaagatctgac

SEQ ID NO: 448144 - DNA, 586 bp, Homo sapiens
aagtacacgtgtgagaagcaaagtctctgtaggttcacatggagaggggaaggactcaaaggtttctcctacttaaactgtacagtatgacatggatcccagagaaccctccccatctggtgcatctgggagttccttgccactttgtatatgtcttccctgatacatcagagagagcatcttgcctttcacaggctgccacagcttaaatacctccctggctgcactaggtgcagacacttactacaagckgagagcctggttgtgggacataatggaaaaagaaacaggagactttcctcttccagaacaataaaaaataaaaaataaaatgggggaaatgtaatcttaattgtgggaaaattacaaagaaattatcagagttttcttctttttatcattcgtccgaatcagaaaaactcccaaccaagtcacatccatgctttctgtgaaatgtacacactaacttagagtcaaagaagctgaagtattatcttaaaagcaatatgtcaactctaaaactgtatattcagctaaggctgagtagggtcatcaaccatgaaggcaattcaaaatcatgcctaag

SEQ ID NO: 448145 - DNA, 571 bp, Homo sapiens
atttaaaaaatcttgcatgtaaattgcaaaaaaaaaaagtaaaaatatttttatcctattcaaacttgatcaacatttttagctaagtataggattccaaaattggaattctctctcaaaattttgaaggcatggctccatagaattttggctttccagtgaaaaatctttcagcctttagctgtggttgagattttcttctgggtccaaagctgtggtcagaaaaaggaatcaggagttctaagtgacttttttttaaaaagggataatttgtatatggtaccatgcacaratcttaaatgtataaattgctgaatttttatacatgtatacacatgtataatcattatccagatcaagatacagaaattttccagtgttctgtaaagtttccttatgcctcttctcagttgattcctctgtctccctgcaggagtaaccactgttctgatttttttctaccataggttatttttatgtgttctagaactctttttaatatggaatcatacagcacatgcccttttgtgtctggcttctttcagttaatataaggtttctgagattcatc

SEQ ID NO: 448146 - DNA, 589 bp, Homo sapiens
gttaatttttgttttcttttaacattgatttttaaaaaatagatggaagacttttaaaagttcatatcccagatgagatcgttcttcttcatatctggttggcaataatgattatgtttccataacactataaatgcatcaccaggaacttatcatagaagaactgacaatcttttactttatataaagtgtaatgtggattcaracctgttcatatattattttgtatgcttccctgctatacaactgaaactgtatatcatatatagcccgaatccatctcacatctataaaagattcagagcgggcccctgtggctgttgagtagagtgtgaattactggtgtggagtggaggcagatttgtctgtgtaccactcacagtgttagcttcaaagtcttgcttataaaaatggagaataagacaaataacaggcttccttatttaattactacatagatgctttgtgaaagcctttcctaaaacacttttaatttctctgtttcaagcaccaccttagttttagaaaaatgagtagattattttacatctttactctgataagtagttcagcacaggaagcagctgtg

SEQ ID NO: 448147 - DNA, 576 bp, Homo sapiens
tatattaattgccaacaattgggcacaatgcttggaactaggactttagagagacaagacaggagttcacagttagtaggtaattcagagacacatccctcaattattacaatagagtttttggaaaaaaagaaatgtgtgcagagggcttccatgagtgtggagcggtggaatcagtgagggcttctcagggcaggtgactgctaaatggggccttgcaggatggataaaagttctcaggcagctaggagggaagctgggaggacacagcacttcagcaaagagaaagaagcaaatagcccagggatgtcaggagcctggttggcctgagggagggcaggtacttggtaggaaggtatgtggtggaggggccagggtatgtaaaaaccaggcttgagagcrggtaagagaagatcttgaagggccttgtttcccatttcgaagactttacctgtcccataatggatgggtacctgacgaagggaaggatgccaccagacatgcatctgatgaggctgaccctggcaacagattgggtgatgctaggaacagggagcttgactgagaaatagtgat

SEQ ID NO: 448148 - DNA, 516 bp, Homo sapiens
tccatgtatgaggagtctacatgcttatcatttaaaactgtaagtaggctgctgccttatttctgtatcatcatcartttttaccctattgttggacatttgagcttctgtattttggctgctatgagttatgtacttagaaggtcgcatagagattgtcttgaaatgttaattagcatcaatttataaagaagataaattaatttgtagggattctacaagggaaaactttgtatctattaataattggagacttagtcagtatcataaatgagaaatccgcagttcatatgtatcttttgtttttttttgagagagggtctttctctgttgcccaggctggagtgtggtggcgtgatcactgctcattgcagcctcaaactcctgggctcaagggatcctcccagcttagtctcctgagtagctgggactacaggcgtgtgccaccacacccagctaatatttaaattttttgcagagatgggagtctcgcaacattacccaggcttgtctcga

SEQ ID NO: 448149 - DNA, 549 bp, Homo sapiens
tttttctctccaacaaatgacatctgtatttcttygctgctgtgtcccctgcctggaaagtttctatccccgttgcctgtttgttacgtgtccagagagaggagagggcttgctgagggccaagaggtcagagtaacaggctctgttttagatcctaaactattgtagaatttcttcccgaagaacaactggggaaagagggggcatactttatccaagctgaccacagaataaacagcttctatggtagttttgataatgcccataaaagcctcactttgaaggaagatgctgctagagatgacatagaatgaaagttcctttcctattaagcaatttcttattttacctcatttgcgttaacaagggtctgtggagggaaatggatctgctacatactggctcattggttgcttggttttgaacctaactctaatgacaaacacttgatttttctcacagtaccacctgggtcctcagtcctggcaaggtaggtagaatcaccttgggaggttctgaaactctggatggcccaggcctcacttttag

SEQ ID NO: 448150 - DNA, 549 bp, Homo sapiens
tttttctctccaacaaatgacatctgtatttcttcgctgctgtgtcccctgcctggaaagtttctatccccgttgcctgtttgttaygtgtccagagagaggagagggcttgctgagggccaagaggtcagagtaacaggctctgttttagatcctaaactattgtagaatttcttcccgaagaacaactggggaaagagggggcatactttatccaagctgaccacagaataaacagcttctatggtagttttgataatgcccataaaagcctcactttgaaggaagatgctgctagagatgacatagaatgaaagttcctttcctattaagcaatttcttattttacctcatttgcgttaacaagggtctgtggagggaaatggatctgctacatactggctcattggttgcttggttttgaacctaactctaatgacaaacacttgatttttctcacagtaccacctgggtcctcagtcctggcaaggtaggtagaatcaccttgggaggttctgaaactctggatggcccaggcctcacttttag

SEQ ID NO: 448151 - DNA, 571 bp, Homo sapiens
atttaaaaaatcttgcatgtaaattgcaaaaaaaaaaagtaaaaatatttttatcctattcaaacttgatcaacatttttagctaagtatargattccaaaattggaattctctctcaaaattttgaaggcatggctccatagaattttggctttccagtgaaaaatctttcagcctttagctgtggttgagattttcttctgggtccaaagctgtggtcagaaaaaggaatcaggagttctaagtgacttttttttaaaaagggataatttgtatatggtaccatgcacagatcttaaatgtataaattgctgaatttttatacatgtatacacatgtataatcattatccagatcaagatacagaaattttccagtgttctgtaaagtttccttatgcctcttctcagttgattcctctgtctccctgcaggagtaaccactgttctgatttttttctaccataggttatttttatgtgttctagaactctttttaatatggaatcatacagcacatgcccttttgtgtctggcttctttcagttaatataaggtttctgagattcatc

SEQ ID NO: 448152 - DNA, 533 bp, Homo sapiens
ctgtgtctcatatatgccacagttgtctgtgctagagtaattcaggtgaccatttggctaagtttgaccagagttttaataacataatagtaaagtcatatgccggaataaagttgaagaacagtgaatggcgattttgtatacagtctatgtgtacaaatgawaccccaggccttccttctggttattgcaggagtggcattctaatgatttgactttgacttgtacttggcagcccctccagtataggagggaaatgaagcctaccatgcagtgactccctggagcattctttcagcttgtctgtcagtcacacatttagaaagtagccacattcatagtatgatctcagaatcctgcattgactgctggatttaggattttctttttaaaaataaggtcaggagtgttaatatacagtcctgtccagatagcaagtgttcagttagttagaatttgaccatttgaataatgcatgttactaccacccaaaacaaaaggtagaacattatcaccccagaacattctgccgt

SEQ ID NO: 448153 - DNA, 573 bp, Homo sapiens
ctgttttccaccctgggcaggccaggtgttccttgccctcattctggtaaacccactaccttccagcgtggacattagggccattatgaacatgttacagtgctgcagagattttgtttatggccagttttggggccagtttatggtcagattttggggggcttgctcccagcatatatcttaaggtaataaaagccaactatgagaagcccacagcaaacattataccaaatggggaaaagttgaaagcattccccctgagaactggaaaaagacaaggatgcccactttcaccacttctattcaacatagtactgtaagtcctagccagagcaatcaaacaagagaaagaaaacaagggcatccaaatccataaagaggaaatcaaactgtcgctgtttgctgatgatatgattgaatacctagaaaaccctaaagactcatccaaaaagctccaagaactgataaatgaattcagcaaagttccaggatacaaaattaagtcgataaattagtagctccgctatacrccaacagcaaccaagctgagaatcaaatcaagaagtcaacccc

SEQ ID NO: 448154 - DNA, 605 bp, Homo sapiens
ttgtcatgtcaaaacacagaatcgcctcaacccaacctctttacccgtactttctgctcctgtggatggctcagcttcttctaagygagctgtttcttccacttcgctgcaggccttagttcacagtgtcctggtgggctactgatgatggccaggatggacttatggaatatgaatatgtaattgtatttcaattttaaacatgagtaaaagctcaaagaagtagacagtagaatggtggcctccagggcctggggtggggaaggaggatttcggttcgacaggaagaataagttctagagatctgttgatctgttgatcacagggttgtgcaacactgtgactatagttaataatatattgtattcttgaaaattcctaagaaagtggtgttatcaccataataagtaaagcttatgttaattcattcaattcagccattccacaatgtatacatatttttaaatattatgttgtacacaacaaatatgtacaattttatggcaattaaaagtaaataaatcagaaaaaagaataacaaattaaaagcaaatgagactgtttccctggcaacttagaaaatgatgtctatatcaaccagtaaa

SEQ ID NO: 448155 - DNA, 585 bp, Homo sapiens
gagatttgaagggtgggaaattggccctctgccactagatgagcactgagtggtatgttcactctgcctagggcttgtcagccatctggtatacccctctcagttacccctgagttataccatgctgctgggatctctccacaaatgcttcttctttctaaacacagattttacctttgtgttttggcaagtaaggggatattttgtacccaaatggcccctagctggagtcattcttcaagatttcctgaactgaaaggatcctgagaraaatggaaatcagaaaatcaagttatctgctcagtggactagagtccatgaggttaggctgcagccctagcaagggtgggcatggaggaatcacactcacttatctgcagtgtatgctccagaggccttcactgaacatgtgctgtaaaagaaaaagggttgcaggaaggttgagaaggcaagctcatcaactgtgcatgggaagggagcaaagctgacaggcaggactgatggggtgacattccctttttaccaaaaaagaaatctgtgcacatagccatagtccaacagtattaaagtgacacaatatcatct

SEQ ID NO: 448156 - DNA, 563 bp, Homo sapiens
tcatttttttaagattgaccctgacggagggaagccaccgygggccaccaaggcagtggtggatgcgctgaggagttcctccttgggcccatccatcagcaccagagccagacggacgctcgtcccgatggggacatgccatgcggggctgacgcctagtcttgttttcttaataagcagtgaggtcgcaataataagtctcggataaacattggggtcagatgtcctaggggtcattactgttaaaatatgaaaggaaaactggggagtgcaaccaacatatggacctcttctttagcactacagaagctgggctctacttcatggtgactttgatggcatagaggactttgaggtctaaatgagttcccaaagcataatctttctcactgtcctatatgcaatatgcatgttgagggttgttgtgtcctggtcattatggggcacatgtgggagagagcagggcagggtcaggggtgggagaaaaatttagagatatagggaggttcacttgtcaccccagctcctcatcagaaggcagaagccaaagccaaggtacaaaa

SEQ ID NO: 448157 - DNA, 563 bp, Homo sapiens
tcatttttttaagattgaccctgacggagggaagccaccgcgggccaccaaggcagtggtggatgcgctgaggagttcctccttgggcccatccatcagcaccagagccagacggacgctcgtcccgatggggacatgccatgcggggctgacgcctagtcttgttttcttaataagcagtgaggtcgcaataataagtctcggrtaaacattggggtcagatgtcctaggggtcattactgttaaaatatgaaaggaaaactggggagtgcaaccaacatatggacctcttctttagcactacagaagctgggctctacttcatggtgactttgatggcatagaggactttgaggtctaaatgagttcccaaagcataatctttctcactgtcctatatgcaatatgcatgttgagggttgttgtgtcctggtcattatggggcacatgtgggagagagcagggcagggtcaggggtgggagaaaaatttagagatatagggaggttcacttgtcaccccagctcctcatcagaaggcagaagccaaagccaaggtacaaaa

SEQ ID NO: 448158 - DNA, 519 bp, Homo sapiens
ctgggtttgtgtctctttccttctgcatgtaacgacactagtcatattgaatttcagtcatatcaaatttcatattgaatgtctgttccarcatgacatcatcctaacctgatcacattgcaaagaccttatttctaataaggtcacactcacaggtaccaggggttaggacatgaacagatctttttgggagacacaactcagctaacaacagagaccaattagaggacatttgcaattggccagctgagaaaatgaggtgctgaccagcagcacagacgtggcgaaaaggaggtgatgaggaggaagaaccagccaagcccagcaagaggaggtgaggtgtgtgcggtggagctccagttccccgcttagggctgggggctgtaaaggagaggatttgtgtgggaaagaatggatgaggggtggcgggatgtgataactttgtcaagtctttctttcatacttggagaaaaagtgttgatagggatgatgttgattctccactgttttaaatgacag

SEQ ID NO: 448159 - DNA, 586 bp, Homo sapiens
ttgatgctcaaaatcgttcaagtcttattcacagctctgttccagcctcatcactcgcacttctcctttccctgcattgtgcagacaaacacacacacacacacacgtgaacacggcaagcattcactctatttgtttgtttctgcactgcatgtctcagggaccacgtgatgcctgaggatgagaaatgttttatccctgtctgggcccacctggtgcagagtacacagcraacgaagatggatagtgagacaaagcatggtgctgcccctgcccaaggtgtgccctttcctgttgctctcctatgtgcctccattcctctgcctacgtggcacccttgaggaaagagaatgaactcctcctatccctcaacttacacagtgtgttgaggagatggcatgctgcctttaaccatccatgtccgttccaccgttctggagtaaccacagaaggcaaggtcaatgttctattcatcttcacacctccaaggcctcatacaacctattgcagtgtaggtgcttaggaaatcctttgcctaaaaaaccaaactcggccaggagcagtagctcatgcttgtaataccagc

SEQ ID NO: 448160 - DNA, 572 bp, Homo sapiens
accattgtctcatgaggctgttgtgagaattggaaataataaataaatgtgtcaaataacccagtgggtgacacatagtaactattcaaaaacagtacctccatgctcttctgtcattactaggatggttgcagggatagagagagacatcagaagtgttcagtgacyagtgttcagtgcccagtcaaccccctataaccttagcctccctctaagctgaccctaagggtgagcctgatagcttcggagagagctctgtgacttgcctctgtttggaaagcagtgctcccttagaaatcagaggcaactctcctggatccccacagagcagaaccccactccttggtcctactggttcgtcaggtgtcccaggctctgtccagggacagcaagctgaggctacgaactccagagtcatcttggactggggactggggagagagcatgaggctgggaccaagctcaaaaaggacttgggaggacaactaatgggtgggtggggtgaagaggtttggagcaaaggagagtttggagaatgagaaagcaagtcagcccaaccaacagagtgatga

SEQ ID NO: 448161 - DNA, 438 bp, Homo sapiens
gggggcaactgtggccctgccccagggacatctgggagtgtctggaggcactgtgggttgtcacagctcagggggttgacactggtgcccagtgtactggagcccrgctgctgctaacattctaggatgcacagcacaggcccccacagctcctcacagccaagtaggggctggccctgaatgctcacagtgccgggtatgagaaacccagccatagaggtttgcttttgcaaggccctttagaatctgttctttcaatggtatttcccaaatgccctgtgaggtaagacaggtagttatcattgtgcccatttcacagggggccaaggctcagagctggcaagtgacctgcttaggcccatggagcaaaggacaggggaacagctctctctccaccaccagctcctttagggtcacctggccaggcctgggaacttt

SEQ ID NO: 448162 - DNA, 438 bp, Homo sapiens
gggggcaactgtggccctgccccagggacatctgggagtgtctggaggcactgtgggttgtcacagctcagggggttgacactggtgcccagtgtactggagcccggctgctgctaacattctaggatgcacagcacaggccyccacagctcctcacagccaagtaggggctggccctgaatgctcacagtgccgggtatgagaaacccagccatagaggtttgcttttgcaaggccctttagaatctgttctttcaatggtatttcccaaatgccctgtgaggtaagacaggtagttatcattgtgcccatttcacagggggccaaggctcagagctggcaagtgacctgcttaggcccatggagcaaaggacaggggaacagctctctctccaccaccagctcctttagggtcacctggccaggcctgggaacttt

SEQ ID NO: 448163 - DNA, 530 bp, Homo sapiens
ttttaactctgtgagtaatatgccctttctctctcactactttcaagatttttttttttttgtatttagttttctgaagtttgcttgtgatgtgtcctggcatgaatttctctgggtcagtcctatttaggattcattcatcttcttgaatctatagatttttgtactttgaaatattaggaaaactttcagctattatttctttgaatactttctcagcccttctctcttcctcttatccttctgtgacatgttagattacatatgttgtaacaaaatatggtttattatagttccacagttcataagggtttgttctaaaaagcaaacaaacacaacacctctgttttcgctctgtttttcacaataggtaatatatcttgttctctctttaagttcactgcttcttttctctgttctattttgctgttgagctcatccattttttwaaaaaaaagtttagttattgtatttttgagttctgacatttctttttattctttatgtcctctattctttgctaagacttt

SEQ ID NO: 448164 - DNA, 666 bp, Homo sapiens
gtacttgattaattgcctttcttttgctgccttcaagattttttctgtctttgattttcatcaatttgactatgatatgtccatgtgtggatcctttggagtttactccacttggagttcactgagcttcgtgaaggtacagattaatgtttttcatcaaacttttcagacattattttatcacatattttttctacctctttcttttctcattccctctgaagcagtatggcagcattatatgtatgttggtatggttgctgaggttctcttcacttttcctcattattttttctttctgctcctcagagtggatttatcattaagttaactgattattttgccagctcaaatctgttgttgaatttctctaatgacttcttgtcaactccaaaattttggaggccaaagcaggaggatcacttgaggccaggagttagagaccagactgggcaacrtaacaagaccttgtctccaccaaataaataaacaatttaaaattaaaaattagtcaggcatagtagcacatgcctgcagtcccagctactcaggaggctgaggtggaaggattgtttgatcccaggagtttgaggctgcagtgagccatcatcacactgctgcactccagcctaggcaaccaagtgaaagctgggggaaaaaaagaaa

SEQ ID NO: 448165 - DNA, 584 bp, Homo sapiens
taacttcccaacaccacaggaaccagcagtgcagctgaggctctgaccagggctcatgctatggccctgcatgttcccctcatgctccctggtctggctgcagaagtgtttggtttttggttgctttgggtgcagaagtgcagactctcccctgaccttctggcctacttcagggttcattcactggtatggtgtagggatctgttgcatcacagctaggctctgcctgagakcttggaggagtttaataaacttacagaacagctgaccacaaagaccagaataaggcttggatccctttggtgtgtgcccacagccagtcatggggtctgcacagcctcagaggcccaggctggctggaggctgcagcatgcaatgggctggtcacccaggtgtgccacagcacctgctcccacttttacatgccagccagcaccttcctggggggcactaggcatggctctcagtcctcctgaagaggggctccttcagccttgcccttgaagacccgaaatgctcatgggtaaggtcatgtgcagacaccagttcttagaatggaataattcaaagagcctttgggtggt

SEQ ID NO: 448166 - DNA, 184 bp, Homo sapiens
caggaatataaaaattccaccggcttgttggaacagagtgtctacaaaccttttgcgagggcttttgtatcagtcaaacggttttacagtcacaggtractaaaatccaacagaattaacttaggccaaggtggaggaatgggcggggatgggatggtacaggaagggaagggaaagaggggag

SEQ ID NO: 448167 - DNA, 535 bp, Homo sapiens
cgaattaatattttgttgcactccattttgtttcattctattccattctcctccgccaccaaagacatacctttcatgtcatggtcaattgtatgaggcttttctgttgtcactgtgattctatttttaatattctttttagtgaccttaatcaaaagaattattatgtaaaatacctagttcatttgtttttattggttcatatttttactgaaaatattaatggctatatatttttctatgaacacagctttaatagtattccaaagattatgaaaaggaatattgattttaaggaaattccatgagggactttcagtttttctctcactgaagtattgtttagggaagagcttttaaaakttcagaattgttctgtgttattattgcaattagtaaattttgttttgcatttttagttttcctttattgatgttaaagaaggtggtttttgttatttttctttttcttttgagtttgaggttttctttgtgaacaatagaaaaggatacacattttctgtacacaaggcatg

SEQ ID NO: 448168 - DNA, 547 bp, Homo sapiens
aaccttgtcatcaccttgattttaccccagtgagactcattttggatttctgaccttcagaactatatataaaataacaatttgatttgtgttaagtcactaaatttgtggtaatgcagaaataggaaattaatacaaggaccacagtccatttgagttaattcttgtgtaaagtgtgtctctagtttcattctttgcatacagctatccaattattctagcatcatttgtggaaaagactactctttctccattgaattgccattgtgctgttgtcaaagatcagttgattatatttctttgggtttatttctgggctctctactatgttatattgttttatgcatctattagtttgcygatactccattatcgtgattgctatagctttatagtaaggcttgaaatcatatagtgtggtcttccaactttattattctactgcaatactgcagtggctagtctaagtcctttgtctttatatataacttttaggactagtttgttaatatataaaaacagattgctggaattttgaataggatta

SEQ ID NO: 448169 - DNA, 547 bp, Homo sapiens
aaccttgtcatcaccttgattttaccccagtgagactcattttggatttctgaccttcagaactatatataaaataacaatttgatttgtgttaagtcactaaatttgtggtaatgcagaaataggaaattaatacaaggaccacagtccatttgagttaattcttgtgtaaagtgtgtctctagtttcattctttgcatacagctatccaattattctagcatcatttgtggaaaagactactctttctccattgaattgccattgtgctgttgtcaaagatcagttgattatatttctttgggtttatttctgggctctctactatgttatattgttttatgcatctattagtttgccgatactccattatcktgattgctatagctttatagtaaggcttgaaatcatatagtgtggtcttccaactttattattctactgcaatactgcagtggctagtctaagtcctttgtctttatatataacttttaggactagtttgttaatatataaaaacagattgctggaattttgaataggatta

SEQ ID NO: 448170 - DNA, 586 bp, Homo sapiens
cccccaaatgagggctggcctttgagactcactggtaaaaaatggaatgccgtggaagtgacactctgtgtttctgaggtgaagtcataagaggctacacagcttctgctagaccctcttgggatgttcttgcttggagccaagcagccacctggagaccccacacagcctttccagctgacagtcccagctgaggtcccagcagatggcacatccacagtgagtgggtgagcctggagagaacttctgccctcattgccctctgaccacagctgagggagagcccagacgagcctattctaccccaggaccacragggtacatgatgaaatgactgttagagtgatttgttctacaatagattcctgagacactactctacatgcttatttcaaaggttaaatgagaccatgaaagaatttattgtactacctggtgcactgggagtagagggaggaccttgtcgcccatgtgttcagccgcccaacaacctaatccacaaaatgttaggttttgcctctacaccctcttccaagttgcctactgtgtcatccagatattcagatcccatggcctgtgccacagg

SEQ ID NO: 448171 - DNA, 469 bp, Homo sapiens
ttatttgcacaatgctgtgttaactgaaacttgtgcatattgtaaacatattcttgccttgcacagttccatggtagctgagtattgagaacgggaagagaaacgagaggggagagggaagaaaggaaaaaaaagaaataacttcattgtcttcctcttccctctgttgcatctacaatggtcttcctcacaattcactcatctgctcaattcacaagcatcccagctcttcgtgagcacaacttccatgaccactatgagcacacaaagccctttcttgttttattaaaaataatccaaatggatgtagaaatataaaggctggtttaatacatactattacttattcatgatccactygttttttaaaaaacattgaatctgtgagaggacttcaaatagttcatggaaaatacacattatttaaaaactaagcatgtgtttaaaaattttttacactgaaataaac

SEQ ID NO: 448172 - DNA, 665 bp, Homo sapiens
gaaaaaggagttttaaattaatgagttgcactgaatttaaagatgaaagaaaaccaattatatatttacctcttggagagtacagttgtaatctttcagaaaataaagttgtttacaaatggaatagacaatttgatttgataagaaatgttatacttgagaatggagaaaatcttttatttgcatgtgatawccagtaaccgccatttaacaaacgaaaaatatggaaaggagcacaaaaaaactagtatacatcacagtttttaaaatgaaagttagacattttgtattgaaagtcccaactaagcagtgttaaattgacatttttgtttatcacttggtgtttgattataccatttggtggtattatgaaactattgaaatttggctttatttttcctgaaactttaaaaatacagaaagaatagaaacaagcatttctttcacatttatcatggcacctgaattatcaaattctccacaatagtttggtgaaattcataaccatctttaatcaactgaaaagctttctgtgtaagttcaaatcttttgtatggaaatgttttgcagctacttctgatctaaatagaaaagatattcctcatcattttcaccccagactgagacatctttctaggaacagttcacaaaatatcacaaaaaag

SEQ ID NO: 448173 - DNA, 630 bp, Homo sapiens
taaacaacatagagaaaaataaacttaagcttacttgctaagctttttagagaaatagtcaagtcagtgtttttctgttctgttttctcaaactgcttatatgcagtgagtcattgacagcatagaatgtatcttctgaggccattaatacccaaatgtgcttctgtgagtgtccattcagattgcagtggtgtgcttagatggaaccaggctgtagtttcttcccttgataatcttttgagagttcaaccccaagatgtcaaccatggtctctgatacggtttggctgtgtcccgacccaaatctcatcttgaattcccacttgtggtgggagggactcagggggaggtaactgaatcatggagcagatctttcccgtgctcttctcatgatagtgaataagtctcacaagatctgatggttttaaaaagaggagtttccctgcataaactctcttctcttgtctgccaccatgtgagatgtgcctttcaccttctgccatgattgtgaggcctccccagccacgtggaacttgtaagtccaataaaycactttcttttgtaaattgcccagtcttgagcatgtctttatcagagtgtgaaaatgtaataatacagtaaattggtacca

SEQ ID NO: 448174 - DNA, 605 bp, Homo sapiens
atgcttgataactagtctataaatatgaagattttcatatgatagtgattaggtggttttctggaaggcaaatctatttgaataaaaatatccagcatggagaatggattaaatggaaaccccatttaccacgatgtttttagtattcattgcatgccagtatcaaaacatctcatgtaccctgtaaatatataygcctactatgcacccacaaaaataaaaacgttaataaagtaaataaaactggaagtttggtggtgatatagaagacagtaagaaatataagaaagaaacatacatgtgacatcttaacaaatttaattgtgtttttttcactctcattttattcatttgacattaactttatcattttggaaatgacttcttctgtcagctccagctgctgggtaactatagttcttaactcttgaatcagtgtccattttctctgtctgctttgttgactcaacgtttatctctattactgtgtgtgtgggtgtgtctgcgtgggaggtggatgagcagtaaagaagaaggaaaaaggacatatttgtctttgggcttctatttatttttcagttcacactatatcccagaaagccccc

SEQ ID NO: 448175 - DNA, 523 bp, Homo sapiens
tacataatttttcttctctctgaagaacttttaagatttcttgcaaggcaggtatactgttgacaaattttctcaatttttgcttctctgagaaagttattttttctttacttttgaagggtaattttagagattaaataatctaggttaatgattttttttctttcaacacatcaaatatttcatttcactcttttcttgcttgcatgatttctgaagattaatctgaatgtcattcttatgtttattcctttacagattaggtaattttcttcttygggttcttttctaacatgtttcttgatctttggttgttgaatgtgaatgtaatatgctgaggtgtagatatttttgtatttatcctgcttagtgttctccgagctttctggatctttagttttttgcttgccgcaaatttcagaaaattattagccatttttaaacgggagaatatcaatgacagaaaaatatcttaaaatcaacaaaagagaaaagatagcttatatacaaatagtgacaacta

SEQ ID NO: 448176 - DNA, 523 bp, Homo sapiens
tacataatttttcttctctctgaagaacttttaagatttcttgcaaggcaggtatactgttgacaaattttctcaatttttgcttctctgagaaagttattttttctttacttttgaagggtaattttagagattaaataatctaggttaatgattttttttctttcaacacatcaaatatttcatttcactcttttcttgcttgcatgatttctgaagattaatctgaatgtcattcttatgtttattcctttacagattaggtaattttcttctttrggttcttttctaacatgtttcttgatctttggttgttgaatgtgaatgtaatatgctgaggtgtagatatttttgtatttatcctgcttagtgttctccgagctttctggatctttagttttttgcttgccgcaaatttcagaaaattattagccatttttaaacgggagaatatcaatgacagaaaaatatcttaaaatcaacaaaagagaaaagatagcttatatacaaatagtgacaacta

SEQ ID NO: 448177 - DNA, 605 bp, Homo sapiens
atgcttgataactagtctataaatatgaagattttcatatgatagtgattaggtggttttctggaaggcaaatctatttgaataaaaatatccagcatggagaatggattaaatggaaaccccatttaccacgatgtttttagtattcattgcatgccagtatcaaaacatctcatgtaccctgtaaatatatatgcctactatgcacccacaaaaataaaaacgttaataaartaaataaaactggaagtttggtggtgatatagaagacagtaagaaatataagaaagaaacatacatgtgacatcttaacaaatttaattgtgtttttttcactctcattttattcatttgacattaactttatcattttggaaatgacttcttctgtcagctccagctgctgggtaactatagttcttaactcttgaatcagtgtccattttctctgtctgctttgttgactcaacgtttatctctattactgtgtgtgtgggtgtgtctgcgtgggaggtggatgagcagtaaagaagaaggaaaaaggacatatttgtctttgggcttctatttatttttcagttcacactatatcccagaaagccccc

SEQ ID NO: 448178 - DNA, 606 bp, Homo sapiens
catctaatctacattgaactacaggactgagtcaaaagaccccaagaccactctcaggcttgatgattcactagaaagaatcacagaactcaaaaaaactgtggtgtttacagccacattgtactacagacaaaggatacaggttaaaattagcaaagggaaaaagtagaaggggtgaagtccacgagaaactcartttctccctggtagttcagttcaatcatttcagccattagggtaattcccctttttgtttattgcttcagtggcataagacatgccaaatggccaggtaaaagtctcagctttgacatcagtggattcatttttgtgttcccagtggaaccattcccctcagacctgcagttctgatgttctgtggcatattagtgagaaggtttactctactttcactcgttgattcttggaccatatattttgaatatagggtagaaaacaccatgtatttgtctcctgtaagacaaagagggtgtggtcttccacatgaagctatttttaataagccaattcatctttctctgagtccaaccacttctggaagatgaagtatgttgtatgaccagttaattctttgttcataaaccc

SEQ ID NO: 448179 - DNA, 606 bp, Homo sapiens
catctaatctacattgaactacaggactgagtcaaaagaccccaagaccactctcaggcttgatgattcactagaaagaatcacagaactcaaaaaaactgtggtgtttacagccacattgtactacagacaaaggatacaggttaaaattagcaaagggaaaaagtagaaggggtgaagtccacgagaaactcaatttctccctggtagttcagttcaatcatttcagccattagggtaattcccctttttgtttattgcttcagtggcataagacatgccaaatggccaggtaaaagtctcagctttgacatcagtggattcatttttgtgttcccagtggaaccattcccctcagacctgcagttctgatgttctgtggcatattagtgagaaggtttactctactttcactcgttgattcttggaccatatattttgaatatagggkagaaaacaccatgtatttgtctcctgtaagacaaagagggtgtggtcttccacatgaagctatttttaataagccaattcatctttctctgagtccaaccacttctggaagatgaagtatgttgtatgaccagttaattctttgttcataaaccc

SEQ ID NO: 448180 - DNA, 642 bp, Homo sapiens
aggacttaaggagaggttgattaagtaaagtcaattttgaaaaaatatttagccacaagmttgctgtttttttattgggcaagtgtactgactccttgagctcttggttgtcttatcaacaaaagttttaaggtctagtaactttataacttcacacctatgaaagtacctcataggattgtccccactttatactggaaatagaagaggtatctgtcagaataatataatcagaaccacatttccagttacttgttttatcagtcaagtggtaaagaagagaataacaaaattgtcttttaagtaacccttattacaaacttttaattctgagaatatgtagatgcaccagtgtttgtgggttttatagtaatgggccaggttatcatttgtagagatttttcaactgtcatttttaaatgtatgagaaatgtcacaatagaagatttggagagtattaagctcattaaaaggcatagaagaattggacagtatttagctcattaaaaggcagaaacagtaaaatactaaatatctttttaaaagatttagctgtagcacttgtgaatttctaagttttcaaactcaattattttcacatccatattcatgatgatgtagtttatctgtaaatgctaccca

SEQ ID NO: 448181 - DNA, 642 bp, Homo sapiens
aggacttaaggagaggttgattaagtaaagtcaattttgaaaaaatatttagccacaagattgctgtttttttattgggcaagtgtactgactccttgagctcttggttgtcttatcaacaaaagttttaaggtctagtaactttataacttcacacctatgaaagtacctcataggattgtccycactttatactggaaatagaagaggtatctgtcagaataatataatcagaaccacatttccagttacttgttttatcagtcaagtggtaaagaagagaataacaaaattgtcttttaagtaacccttattacaaacttttaattctgagaatatgtagatgcaccagtgtttgtgggttttatagtaatgggccaggttatcatttgtagagatttttcaactgtcatttttaaatgtatgagaaatgtcacaatagaagatttggagagtattaagctcattaaaaggcatagaagaattggacagtatttagctcattaaaaggcagaaacagtaaaatactaaatatctttttaaaagatttagctgtagcacttgtgaatttctaagttttcaaactcaattattttcacatccatattcatgatgatgtagtttatctgtaaatgctaccca

SEQ ID NO: 448182 - DNA, 602 bp, Homo sapiens
ttagatacaacttaattcaatcaacaggagggcatagggaaacctactccgcttattaatttaattttctatttctcatgtcaccattttttcagctttttcttttcaaaatgctgacatttgggatagatgtttgtgtacgtgaaagaaagaatagaaagaaagaatttgtctaatgtttaaaactgatcataatctgtamaatagtttctttttgcaatcaataacattagtaacattttaaaaagtacattcaaatatgtctaaaagtaacaatatcagttaacaattatatcaccaatttgttcattaaattggggaagtgagaagtttggattattcttccattttatattacacttaacagaatagatgacatgtgtaaactctttctgtgtttaatttttttaagaagaaaagtgaatttttaaaatgattaagaaacagttatcacaccaatgttcatcatgaaactggtccaatttttccatagaactgaaatttgagaaacttaaatttgtcttatctgagttcctttgactgccaggtctcctgggtggtagtggggaactaaggctttccagatcaccacaccagacagt

SEQ ID NO: 448183 - DNA, 620 bp, Homo sapiens
atgtgaggccaaagtagagagtggcatagatttctccaaatactgtgatgtttcatgtcattcggaatttcattcatgaaaaataggaratagtggaggagctacgcttggatataagcttagcttagctaagctcttgtccacaaatgcttaaaactctatccctcatataatctcaagttggctctggattttttaattgcataagttctgaaatggcttaaaaatggtgtaagacacaagttgtagctgaattcacagaagagtggtttatttcaccaaaaaaataaaaataaaaataaatagggcctttagtatagaaacaaatgctaacttcttaggctcaactgaaatattgcagaacctagaaaaaaggtaatttaaaaggcctgtgcttgaaacattctgcctctaggaatcaagtttgctcagaagtcaaggaagacttgacagtggctttttaaaaaattggttcagccttcatctcggaacagaagcagtagaaacatgaaaataaatcaagaaagacagactaattaaactggaggaagaaaaataatcctcaggggaaaggttaagctctgaggaaatgggttatgtggatattaaaggaaacataa

SEQ ID NO: 448184 - DNA, 620 bp, Homo sapiens
atgtgaggccaaagtagagagtggcatagatttctccaaatactgtgatgtttcatgtcattcggaatttcattcatgaaaaataggaaatagtggaggagctacgcttggatataagcttagcttagctaagctcttgtccacaaatgcttaaaactctatccctcatataatctcaagttggctctggattttttaattgcataagttctgaaatggcttaaaaatggtgtaagacacaagttgtagctgaattcacagaagagtggtttatttcaccaaaaaaataaaaataaaaataaatagggcctttagtatagaaacaaatgctaacttcttaggctcaactgaaatattgcagaaccwagaaaaaaggtaatttaaaaggcctgtgcttgaaacattctgcctctaggaatcaagtttgctcagaagtcaaggaagacttgacagtggctttttaaaaaattggttcagccttcatctcggaacagaagcagtagaaacatgaaaataaatcaagaaagacagactaattaaactggaggaagaaaaataatcctcaggggaaaggttaagctctgaggaaatgggttatgtggatattaaaggaaacataa

SEQ ID NO: 448185 - DNA, 526 bp, Homo sapiens
aactaaagcccataatatgaataatcaaatgatccactttcaaacaatggtgaatgactgagcaagcaatatttaacctattgggaaattttaaagtttagtaattaattaatcatccttcaaaaagcacttattgaacacctattatgtactagttcctgggataagctctaggatagtagtttctaacagaagcagtactcaactcccactcccatccccagttgtgttttgcaatttatttgatttttctttttgctgtctatcatgatatttggtggccaggagccaaacattctagatatcttacaatttgtaggatagtccttcacaatgaagaactattccaagttccacaggattttgaaatattttgcaagacatttaagtgccatatttcactcaatgtaagataccattgattttaagatgtactataattgtatatataactgagaaggaggaacactkcaaattatactctgacacaattccttcagtatagttctgcacaacacacacatca

SEQ ID NO: 448186 - DNA, 512 bp, Homo sapiens
aaatgtgagctactattattactacaggtcgcttcatccattggaggaagctcaggagaatgcacagcctgggcagtaggaagatactaaactcyattctggaatgtggcgtttgagctactggctagatctaagaggatttgtctgataaagaagattgacaggacagaagttgtgctacaaataggattcactgggacccacgtggaacttgaagctatgggaatgaattcgttctacatctaagaggagtatgtagagtgaggagagagagggaaaaaaatagaaacaccaatatttaaggaaaagggaggcctccaaagaaattaagaataacaaaccagagatttgggagaagggcaagtggggaacattgggaagtaacaatttgcaggagtgtttcggcatgcccaaactggaactggatgtagacaggtcccttggctttagcaactaagtgggtgatcaccatgttggtggtccgaggagctcaggagtcagagggcagaaag

SEQ ID NO: 448187 - DNA, 607 bp, Homo sapiens
caaatcctctgccttttctctacttgttagtgaagaacaatatagcaaaactgctatgtacagaattaataatcatgtgcattcagcaaggctctctgctgggaatttcatcactagaataaggcaaaacgcatgagaataagagttcaaatgtagtcagtacaaactagtatcaaaaactctgttgtattatcgttaattgctcctctgattttgctaaaattaaaagaaaaattatgtggggggagaattagaaaatattcaaagctcctaatatattccagtaaaccctgagatgacaaatctcattttccaaggaaaagcagtgctaatttttttttgtaacaacaaagaattcatgttcaaygcctaattaaaacctggaaatctatatgcgttgtttctttttttttttttttttttttttttttttttttttttttgagacggagtctggctctgtcgcccaggctggagtgcagtggcacaatctcggctcactgcaagctccgcctcccgggttcacgccattcttctgcctcagcctcccgagtagctgggactacaggctgtgcattgtttcttaatggctttccaaatttacaaa

SEQ ID NO: 448188 - DNA, 607 bp, Homo sapiens
caaatcctctgccttttctctacttgttagtgaagaacaatatagcaaaactgctatgtacagaattaataatcatgtgcattcagcaaggctctctgctgggaatttcatcactagaataaggcaaaacgcatgagaataagagttcaaatgtagtcagtacaaactagtatcaaaaactctgttgtattatcgttaattgctcctctgattttgctaaaattaaaagaaaaattatgtggggggagaattagaaaatattcaaagctcctaatatattccagtaaaccctgagatgacaaatctcattttccaaggaaaagcagtgctaatttttttttgtaacaacaaagaattcatgttcaatgcctaattaaaacctggaaatctatatgcgttgtttcttyttttttttttttttttttttttttttttttttttttgagacggagtctggctctgtcgcccaggctggagtgcagtggcacaatctcggctcactgcaagctccgcctcccgggttcacgccattcttctgcctcagcctcccgagtagctgggactacaggctgtgcattgtttcttaatggctttccaaatttacaaa

SEQ ID NO: 448189 - DNA, 611 bp, Homo sapiens
  misc_feature (1)...(611): n = A,T,C or G
ttatttgatagagtgctcctcagtttgcgtttgtttgatgttaactcataattagaaattagattatgcctttttaccaagaatgccaaacaaatgttgctgtgtccttcttggtggtttatagcaggtggtttgagattgagtttgctgccttactgatgatcnnnnnnnnnnnnnnnnnnnnnnnnnnnnnnnnnnnnnnnnnnnnnnnnnnnnnnnnnnnnnnnnnnnnnnnnnnnnnnnnnnnnnnnnnnnnnnnnnnnntctgtgggacattcactgttgactcttgcctggatcaattattactatgatgttgcaaaatgayaattttctctcgttctttctgtagctattaattaacattccattgcaaagaagaacttgcttttctccctgattatgcatgtttgtatgtattatgtgtctatatcagttaagactcatgaatttttttattcaataggttgtaatattttaccatcattacttattttgatgccaaattgccccctttgtgtttgagttttaaaaaatggcattaaccagctttgtcacatactttattcacatgacctgcatttgataacttctggctcatttcaacaaat

SEQ ID NO: 448190 - DNA, 535 bp, Homo sapiens
acatcagctctgcagtagagcacttcaatatgaggatgcattgctcaccgtaattttgttgaaaaggtctgtatactattgctgtcatccttttttcttcagaagaatttaagtatttactcacaattgtttagtcaggaataaaacatcaggtaagaagaggctgttttatattataaaccacaagtcaattatttcttcatttttaatgaacaatkgatcactagtttcaagttagaagcaaatgctgattgacaataaagtccgttaaatacttgcaaatgctaaatgcagtataaaatacattaaagccacatttcctgtcctcaaatggctcataatttaagatgataaagtagtcatatattcacccttctgctttacttaaaaattagactcaaaggagaggggcaattaagctgccaataaaacaatgccttgcctagtccttcttaattaagtcagctttttgttaagtaggttatatctgagaatgttttgggaaggggcaattattaccagtgggcacaaggga

SEQ ID NO: 448191 - DNA, 622 bp, Homo sapiens
acacacacacatatatgtatatatatttgtctattttttatgaagagtatactatgtatgcatatttatatatgtttacatgtatatatgtatgtagagatatttatttatttcatatgaagagtgcactgttcatcagccttttttgctttctgtctttttattttttcttccccatggtaagactatctccacaaagcagtttgggaaattagccactgtggcagaacttggggtgacctgagagagcctttaagagacaagcaaggcacrgggcagcttcttggccacctccacacagcatgggggagcaggcagagtgctgaagcgtctggcatgcccaatgctaccacagtgcctagtatatagaaggtgcttaccaaatatctgttaaataaatgtatgcatgaaataatgaaatgggctataggactcttctcgctctctctccacctctgtcaccaacttatagggctgattcagtagctaccactctcagggactgcaagatatctgaccctttcccctgagtggccctgtaggggagaaaaaatatcttttcttctacccttctaggttctcagttataaaacagattaacaaaagaaaatcatatacattt

SEQ ID NO: 448192 - DNA, 622 bp, Homo sapiens
acacacacacatatatgtatatatatttgtctattttttatgaagagtatactatgtatgcatatttatatatgtttacatgtatatatgtatgtagagatatttatttatttcatatgaagagtgcactgttcatcagccttttttgctttctgtctttttattttttcttccccatggtaagactatctccacaaagcagtttgggaaattagccactgtggcagaacttggggtgacctgagagagcctttaagagacaagcaaggcacggggcagcttcttggccacctccacacagcatgggggagcaggcagagtgctgaagcgtctggcatgcccaatgctaccacagtgcctagtatatagaaggtgcttaccaaatatctgttaaataaatgtatgcatgaaataatgaaatgggctataggactcttctcgctctctctccacctctgtcaccaamttatagggctgattcagtagctaccactctcagggactgcaagatatctgaccctttcccctgagtggccctgtaggggagaaaaaatatcttttcttctacccttctaggttctcagttataaaacagattaacaaaagaaaatcatatacattt

SEQ ID NO: 448193 - DNA, 412 bp, Homo sapiens
aaaacataaaaagacacaggtgaaattaattttaatatgtgctgtaacccaacacaccaaaatatttaacatatagatatcacaaaaatttactgagattttttttttattttttgtcatataaagtctttgaagtcgttttgtattttaaacttccagcacatcttaatttggaccagccacacttcgaatgctcactggtcactgtggttaccaagttaagcagtgtagcctgaaactctcaaaatctctaattcttcagggagttgagctgactccatcattccctttattagcttgggtgtatctgtatctcagcactaccattttcctatccactgcatctgctttgraacctcgcatgtcctatatgatctgagtaaacccaggtgtctatcttgtaacaacagac

SEQ ID NO: 448194 - DNA, 478 bp, Homo sapiens
atatttataaatttggtaagcgttaaaataaccaaaggtggaagtaccaaaaagtgtcatatgtgtgagtatatgtgtgcataaattgtacacacacacacacacatgcacacataatggaagcaggtattaaaatcagatgctcagtctgtttgggaatcctacacagaggactacagtctaagcacsattattcacctggtgacaggtactcaagttgtagatgtggtatctgaaaggaaataaacaaccttacacatgcaaaccttgcaaacaaaacctaaaagtgatggctgttgtcacttccccagcaactttaacaaaattctttcattccactgaattaaacagaaagagcaccaggatcctagattctaagcccacctttgcctctgaacatctctgtggccttgggctggttccttcacctttctcagcctcagtttcctcacaaggacatttgaccagatgatttata

SEQ ID NO: 448195 - DNA, 615 bp, Homo sapiens
gtattagtttatattgctatttatttatattctctcaccaccagaagtagtattgacatgaccagtgatttacttataatttatttagaatttagaattttcagatgtttgtaaatttacctaagctgttaatatgtatcaatagagagaatactgtcagaatgtaagagtaaggacctccaaaattattttcctccatataaaaatgagaatattggcaacaatgctcaaaataaacttttcaaaagtgtggatactaatcaaggcttgcaaaaactctagcagtctttattgaagaacaactgttagatcacagyaagaacagtaagctctgtggtattataacctaaactattcccattgccctctcccttgctgcatgttagccttgaaaaccatcagtcttgtaaccatgataaccatgaaaaccagtagctgagcagccacaggaggtgacccacaagccccatctgcagagaattttgattgttagacctgtctagaagttccttggaaatacccactcacaggacttgcttttatttgtcctgactcagcttttactcactgagaacagactttttctaaagacatatgtggaaaataatcaatggc

SEQ ID NO: 448196 - DNA, 582 bp, Homo sapiens
atgtgttagacctgagttcaaaccttctatttggcacttactttgttatatgacctggggctagtttctgactcctctgacagttcattatctaatcaacatcatcagagtaataacaacaacctctgagctagtgaaaggataatatggcaagtacataatataagcttgacaygcagaataacaatttcaaaaaaataacaaccaccccttatgactattaccttcaacactggaaccaaaattattatgctggaaattatgtaacatacaaatatgaaaacatacattcagcacaatgtagtgactaagagaataagctttggacttagaccacggccattggcgtgttcactctatcacctgcttcagcagagatcttgagctagttacttctctgtgcaccggatttcttcatctgtaaaatttatctcatagaggtttaatgagaaaaaaaatgatgatgcatgtgtagcactgagaacagggtcttgtgccttataagcactcaatatatgttatctattattattatccccttaataaatattacaaatttatttgacgaatgtttattaaata

SEQ ID NO: 448197 - DNA, 582 bp, Homo sapiens
atgtgttagacctgagttcaaaccttctatttggcacttactttgttatatgacctggggctagtttctgactcctctgacagttcattatctaatcaacatcatcagagtaataacaacaacctctgagctagtgaaaggataatatggcaagtacataatataagcttgacatgcagaataacaatttcaaaaaaataacaaccaccccttatgactattaccttcaacactggaaccaaaattattatgctggaaattatgtaacatacaaatatgaaaacatacattcagcacaatgtagtgactaagagaataagctttggacttagaccacggccattggcgtgttcactctatcacctgcttcagcagagatcttgagctagttacttctctgtgcaccggatttcttcatctgtaaaatttatctcatagaggtttaatgagaaaaaaaatgaygatgcatgtgtagcactgagaacagggtcttgtgccttataagcactcaatatatgttatctattattattatccccttaataaatattacaaatttatttgacgaatgtttattaaata

SEQ ID NO: 448198 - DNA, 582 bp, Homo sapiens
atgtgttagacctgagttcaaaccttctatttggcacttactttgttatatgacctggggctagtttctgactcctctgacagttcattatctaatcaacatcatcagagtaataacaacaacctctgagctagtgaaaggataatatggcaagtacataatataagcttgacatgcagaataacaatttcaaaaaaataacaaccaccccttatgactattaccttcaacactggaaccaaaattattatgctggaaattatgtaacatacaaatatgaaaacatacattcagcacaatgtagtgactaagagaataagctttggacttagaccacggccattggcgtgttcactctatcacctgcttcagcagagatcttgagctagttacttctctgtgcaccggatttcttcatctgtaaaatttatctcatagaggtttaatgagaaaaaaaatgatgatgcatgtgtagcactgagaacagggtcttgtgccttataagcactcaatatatgttatctattattattatccccttaataaatattacwaatttatttgacgaatgtttattaaata

SEQ ID NO: 448199 - DNA, 597 bp, Homo sapiens
tagttctttgcttctgacacaacctaatcagcaggggacccttcatctgaatttttcagctctcatttagcctcgaaaactggtcacatgactttgtttggctgggtagaagttggtctcattggcaccagtttccaaggcccatcatcgtttggactatcttttttatagagcactttcaactcagtccaagcatcttgcatttgtacatggcttgcactggaaaagttcgttatgattattaaaagaacaaagtaacacattcctagggtttgaggtcaatggcttcaccttccaaatgagggcaataaaatgtcttccaagtcctctggggacttatcagcttgagyttaacatcacaaaaatctgtatgactaggtcccagaaaatgattcttcctaacaacatttagccattagccaaagcaagtttttttgttgttttgttttgtttttttaaatatctgtctgctcctagaggactatccaaataatccgtctgagtttctttcacctaattgctgtaacttcctgatggcctctcaaacttttgactccactgacttaagttattctctaccttgctctttttttattc

SEQ ID NO: 448200 - DNA, 568 bp, Homo sapiens
cagaaacttctattttaggagacaaaggcatttttttaaacacatctgaagctctgaagctgtgaatatatctttgcaatttaaattctcaaggagaatgaaacatgggtacacagactcaaatcaatagtcatctttcttccattagagaatttttagagtctttyataggattccatttcttattattagcccactcctaaagttactttcggtctgacttggtatttgtcaaactgcagatcatgacctgttggtagcctatgaaatcaatttaatggttataggcagtattttaaaaaatgaaatagaagaaagagaaagtatccaagtgggttgtatattgcacaggtattactttaagaagcttttgtcccagccataaacacatgtgcttgtctactgggtcacaaaagaagatatttttcttaacgtaggtcactatcaaaaaaagaagtttcaaacacactggtctattgaattcagaaaaaaagctagtgtctttattcttttataagctggacttattcaagtcttagcttgatttcaggatgaggagatgctaccc

SEQ ID NO: 448201 - DNA, 595 bp, Homo sapiens
tagtacttcttcctcactccctcacccatctcatttcaaaaagggaaatatttaaacatgagttttaaaagattcattttgagatggaaataatacaagaataactattgctgtcttcactttttctctcttattttctttccggagacacgatgtcccatttatgatgcttttatgtctataaacgatttggggaaagcactgaaaccaaatctgtaaacgtgcaagccttctgcattggtggggaggggatagggtgagggggagacacaaattgcaaagagcagaataatcagatacagagggactttgatcttctggagacctaagctaatagatgttaagtgcagttcagtggaagtaataacccatgaagaaaacaaaatctgcaaaatgayaaaatgctgcagtccactgatcaaggaagacattggaaaattactatgaaagcatccttagcccagcagatccaaggtgaaaaaagggctgcgtctgccaaccagcagccagacattccaggcagacttagccgtctcccattttgtggccagattaacactctgtgtaacctgaatgccttctcactgaaaaggca

SEQ ID NO: 448202 - DNA, 573 bp, Homo sapiens
gatgtcccatttatgatgcttttatgtctataaacgatttggggaaagcactgaaaccaaatctgtaaacgtgcaagccttctgcattggtggggaggggatagggtgagggggagacacaaattgcaaagagcagaataatcagatacagagggactttgatcttctggagacctaagctaatagatgttaagtgcagttcagtggaagtaataacccatgaagaaaacaaaatctgcaaaatgacaaaatgctgcagtccactgatcaaggaagacattggaaaattactatgaaagcatccttagcccagcagatccaaggtgaaaaaagggctgcgtctgccaaccagcagccagacattccaggcagacttagccgtctcccattytgtggccagattaacactctgtgtaacctgaatgccttctcactgaaaaggcatgaactggcaccactgcagccctgggcttcatctctcccagtgacgccatagtgaatcactgtgaggctagctacagactcggtgggggcattccaggggccgttattaccgttaatcaattaggaaga

SEQ ID NO: 448203 - DNA, 581 bp, Homo sapiens
ccaagctaggaagcactgagatgttatttagccccaggtctccagaagcttctggtcaaggccaagggcactgctggagtgctacaggagcaccacgagaatgcaggctctcctcccttgaaccaccatgactcatgcacctgagggagcaagccaaaggatttgctggcatatttctccatcccccatgtgtcagcactcctcataagcacaacatttctaacagcagcttgagtcctagggaacaaaagtgacccacactgaaaatgccactgtgttcttcacaacttgtcatccaaattagcatttggaaagtggttggacctaaaactctatcagtgaatctgcttacttaatgacctcatcaagaaatatctggccaaggagaggaggataaggaatgtggctgctctaactccagcaataagccacctactatagacgaaggccacccaccagagcagctaaacgctgcacagcctccttgctgcagaaggcaatttagacatccttayacaccagtaaagccctaaagctgctttttcctttgctagaaaacaaaattcttattaaccaaccca

SEQ ID NO: 448204 - DNA, 594 bp, Homo sapiens
atcaaataaaataagaatccatcagcccatactcatgggctaagtataagtttgttaattaatatgttaattaattataagttaatatgttagctgctaattaatataagttagtatattatatgttaatataagctaattaattgaaagttcgatgagagatgggacatttacataatctcagaatacatccccattattcttycattccaaagggaaaagtaatagctttccagtggagaatcctggcaggcactactttaaacaagtaatcaacattaatattaccagtaataggacaattcaaatcaggtactgggtgataaatgcaatgaggaaaatgcaatataacttttacggtactcctgtaagaaatataatgcatatatggaatttaattatgaggaaacacacaaaaaaaactaaaattgagggacattctacaaaatagctgacctttttacttcaaaagtgtcgagatcatgaagtcaaggaaagatttaggatctgttccaaattgaaggagaataaagagacatgacaactaaatgcaacatttgattctgaactggatccttttgttatttgaataat

SEQ ID NO: 448205 - DNA, 503 bp, Homo sapiens
aaatcaccaaactagatacctaaggacaaatctttttagattgagagtgaaggtctcatgttcaggcaggtgtccctcatttctcttggtaactcttttactacttattttgagggatgggttgaggtggtgagggaatgaggcttgaaatgggtagattgtctaaaaaagattttaatgtggtagggccagagctaggttaaggctagtgagaggccaaatacagaaaatttaaggagtcactcactctcagggtcttgcaagagagtaggatggcatttgcagactctgagagtgagtgccaccttaaattctgtactaaatgcttctcgctgttctcatgctagcccatawcccataatgtggaggaatgtttaacttgtagaagctgtccttgtcagagtttattccttcaaccttagcttgagctatcatattaccacctttctcattgctagtgaaaatctgtagttaatatttctagcaatctttgagccaagctt

SEQ ID NO: 448206 - DNA, 519 bp, Homo sapiens
tgcctgtaatcccagctactcaggaagctgaggcatgagaattgcctggacctgggaggaagaggttgccgtgagctgagatcgtgccactgcactctagcctaggcgagagagggagactctatctcaaaaaaagaaaacaacaaaatatctaattgtcatcttcagggaccatgaagaaaatgtatccacaaaacaaaaataggaagctacaaaaggaaaaaccagagaattcaaaggagctcttgcatatgaaatgtattgctaccaaaaaatacrgaaaaagaaacccacaaaggaactgaagatgtaatagaaaatattagaatagagaaacaattcaagaggttcaaacgtctaactaacagaatagaatttctaaagatcaagtatgtaaaaatagatgagagaaattatcaaataactaattgaaggtaaatctccagggttaaaagatttgactctttaaattgaaagaggctactgaatctcaagaacaattaattaaaataggtcaca

SEQ ID NO: 448207 - DNA, 616 bp, Homo sapiens
aatcatagctcaatatacagccccccgtggtaataaacagaagaggaggaagaagtatctgattttatttgcgattccctacagaccaagaaaacagaaccaatctaaatggttttaggcttccatggcagcttgagatatttactggcatcacagtacaaatcaaatgagcaaataaaactgccaytgctgtggaaggagacgcagagctctgagggagtcatctgctgtcctccgacatgtcacagagcctcacttcggctcccagagcccggcagacctaccaatttgagtatattttaatatacatcactaggattcatattttcccttttaagtcaaaggactggttctttacatcaggactcagccccccagatgtctgtacaatgtctctgtgcaatacagctggcattacagaatcagaacacacagctttcagggacaactgtgactttggggccagcgtcatatttttgcttggcttccttggcatagcccttggctgtttcactacctcagccttgtggctctatcagttttgatttgatcgcttaatttattccttcagttcattgaattggagcagctgcaccaagactcactcagacttttc

SEQ ID NO: 448208 - DNA, 594 bp, Homo sapiens
gctgttctgaggtattggagtatgagaagatggtcccatagaacccatccatagggagccaaagtggaaaagccatccagagactgtagcagtttatgcaaaaaccacctgctcatgtgtgctcaaatggaactgctttgcataagcagatcttttcagttccccaggcttgcatagtctccattattcttatatcccagggaacatcctcaatgctgagaaatatgttcttatactgagagctgtagctatttggttcctttctttctcaatgtccttctttttttctttcttggcccaatgattgtagtattttctcatcaagtcaaagcggctatgtacaaggttaatagtgcccaacagatgtacagtgtacagtctgacaactctcagcttcccaatagaacgcttcccataatctagttcagaagagcctttttggtttccatttgtagctttgatcagttccagcactactcagtctcgaatgtttaggaaatttaatttaactaaagaaactccygatgcctttcaaaatcacacaacacataatattcactaagaatagtaaccatttctcttttgcactatcgc

SEQ ID NO: 448209 - DNA, 567 bp, Homo sapiens
aatgtctaaagccagctgcccctctttttttacatcataggagcctttaagttccttgagttgaatgcactaccatgctagttaaatacgctattttcttattcatctttccattacaagtacttataatgcctggcttacacataacagatactcaataggtgtatgggtaaaataataggtgtaattactttaattttaatttttatgggtacgtcaacatatgaatgggtaaagaaaatgtggtatttatacacagtggagtgctattcagccacaaaagattgagatcctctcatttgcaacaacatggatgaaactggaggtcattatgtgaagtgaaattagccaggcacagaaagacaaacatcgcatgttctcacttatttgtgggatctaaaaatcaaaacgattgaacaaatggagatagagaataaaggatggttatcacctgctgggaagggtagaggggattggggagaatgttagggtggttaataggttcaataggtgtatgttaatacagcmgttgttgttaatcttatatcttctactttgtagttacat

SEQ ID NO: 448210 - DNA, 597 bp, Homo sapiens
accaaagcaacagggagaattattagaaaggtcaactatcactagtgtttaccagaacagtgtttattctgtccaggaagaacccttgaacttgtcttgcgcaaaaaaggagccacaaaaggacagttgtgttacagactcagaaccagttgtaaatgtaatcccaccaagtgccaaccccataaatatcgctayacctacagtcactgcccagttacccacaatcgtggccattgctgaccagaacagtgttccatgcttaagagcgctagctgccaataagcaaacgattctgattccccaggtggcatacacctactcaactacggtcagccctgcagtccaagaaccacccttgaaagtgatccagccaaatggaaatcaggtaaaaaataacctccatcctgaacctggctagtaatatgctatttgactaatttcaattaactttgtctaataaatatcagtcccgtagagccaactagattattacaaactgtcatttttaaaaggatcaatgtttgctttaacttttctggcatgatgtcttcagttggttgtttgctaatccagggtattgttaccagcttaaagttt

SEQ ID NO: 448211 - DNA, 601 bp, Homo sapiens
atagtgctattcacagagataggaaatactaaagacggagctggcttgcaggagggaaattaagagtttggtgttaatcatgttaagtttcagatctctatcaccttccaactggcaatatcaaataagcagttggttgtaaaagtctggagttaaggggagaggtttagagatacaaatgtgggagtcgccaccatatatttggtattttaagtcatgggttttagtgaagtaggacctgattcagagtaagtactaattctctttccttcctgtataaaaggcaaaggaagggagattccagctggaagagcatgaagcagtagttgagttaagccgttaaaggctgggtagaatcttagtagtcaaaattatgggaaaacacagtgaaggagtaagraattatgtaaaccaaagccaaaagataaagaggagcaatatgtgtgcagaaaaccatggctcgctaaatgactgaggcatagacttgtcataaaaaactggtgaagaatcatcttggaaactcagggactataatcttggaatctgtagacttggaatctttattgaggggttaatggggatccttcagaagtttatgagg

SEQ ID NO: 448212 - DNA, 469 bp, Homo sapiens
tcatgacctcaaatgattcacctgtcttggcctcccaaatcacagattctttttaaagcaagagttgttcaaatttatctatcagtcgtgtttcatgtatagatgcctctaaacatttaatgtccatgttatctggtgatataagtccgtattgcagcaacactcttagaaaatggaccaatttttggagatttttttggggaaaaaattttgtttaactttgactcaggcagggaatatggcattatggtgtacacgtagagggagmttttggcctgtgggtctggaaagcagggtcatctaattctcaccaaagttaatctagggcaccctagaatattcctgtcagaatccttattcttgcactgagaatagttatgtccttgtgctatgactggacagtgatttggtcatatgtgaagtatgaattgcttaatgtgacctgcttctctgaatttatttacagaaa

SEQ ID NO: 448213 - DNA, 501 bp, Homo sapiens
tttggcaatgatgaataaaattgctgtaagtacttctgtgcaggattttgagtgaacttaagttttccaaagtgactgtacccttttgatttccactagcgatggaaagttctggttgctcctcatctttgacagcatttggtgtgttcacctttttgaattttagccattctaaacagcttatctgcccctactgtggaatgatgtgacagacatagaataacacttacagtgattctagttcaaaatgaggcaacatggaagggataaagaagtcactgacccaaaatagtttggaaatggagctgggcaaaatccagcagaagtttcttaattaggatcgacagcctgggaccggcccgccgtcctgtgggtctttgcctctgggctgtctgctgkgcatttcttggaaccattattatttatctttttttctcgcacttttttgggtatggcttctatcgcactccaaatgtttttgagattcatccttgttgttct

SEQ ID NO: 448214 - DNA, 601 bp, Homo sapiens
ttcttctcagggcctcacaggctgaaattaggctgggtttctttctggaggttctggggaagaacttcctctcaagtttcctcaggttgtcagctgagttcagttccttgtgactgtaggactgagatctctgttttcttgctggctgtcagccaggggcctctcgctgctcstagaggcctcccatgttcccactgcatgcttcctccagccagcagaggaggatcgccctgcatggaaaccctcctgcacttcacatctctccaggaagtcctcagtccctccaaggaactcaccttcactaggtcaagctcatcagataatctgtctatcttaaatttgaccgatttgggatctcgattacatctgttaacttgtttttgccataaattgtagcacaatcacaggagtgacatctcctcagtagctttgtctacactcaggaggaagtgattatataagagcaaagatcactgggggtcatcttaggattctgtctaccataatattataaagacacagtaattaaaagagtataacagatttctgcttctgtctgttagaataaatcatatcagactaaccctgcctccataaacaa

SEQ ID NO: 448215 - DNA, 611 bp, Homo sapiens
gtgagtccaacccctgcagtcccctctgtctggaatagatgaaggaagtttgctccagccttagaagagcatgggctggcaagcgttctcagagaggtctcgacttcaactctaaagggcctgaggaatatgtgcaacggggtcgggtaaagccaagctgaatcacatgaccagggctctcaccagcgccaaagycagtggaaggatatcagtcccagagctctgtcacaggccatggatgctccatggaggggtggtgagcatatgaataacaatcaggagaaacatcggtaatggacaggaggcatcaataaacaatgtccaccctcctctaaaacccaggaaagttctcattcaaaagacgatgtcttgaaggaaacctaggtacaaatctttgtgattttggattagacattttttaagtaggcacaaacaaccgaaaaatagataaatggacttcattaaaataaaaaacttgtatgcttcaaaggacactgtcaaggaagtgaaaagataatccacataatgggagaactatttccaaattgtatgtttgacacaggtctagtacctagagtatataaggaattcatataactgagcaataaacg

SEQ ID NO: 448216 - DNA, 625 bp, Homo sapiens
ctagagtatataaggaattcatataactgagcaataaacgacaaccacatttaacaatggggaaaaaaagctgtgagtagaggtttctctaaaggaaacacacaaatggccaagaagcacatgcaaagatgttcaatgtttttcgtcattaggaaaatgtaaatttaaaccaaaatgagataccacttcacacccagcagtatgacttaagaaaaaaataaagacaacacatgtttcaaaagtgatggagaatatggaattctcatatattactattgggaatctaaaatgatgtagctactgaagttagtaaacagtgtgtgagttcctcaaaaagtgaaacataaagtgacatatgatgcagcaattgcactcctaggtttataaccaagaaaatgaaaaacagwtgttcactcaaaaacctgtacaaagctgttcacagcagcattattcctaatagttaaaaagtggaaacatcttaaaccaccatgagttgatgaataaacaaaatgtggtataaccatatagtggaatattatctggccataaaaagttgaagtactgacgcaggctagaaaggatgaaacttgagaacaatattctaagaagcagatagaaaatacca

SEQ ID NO: 448217 - DNA, 469 bp, Homo sapiens
  misc_feature (1)...(469): n = A,T,C or G
ggaagtgcccagaacaagtacatcaatatatagagaaggtngatttatggttgtcagagagcgcaagaggggggaattggagagtgtctgcccayaggtacaggcatgctttttggattatgaaaatattctggaattaggtagtggcgatggttgcgaaagttttggaatatggtaaaagacactgaaatgtatgcttaaaaatggtgaattttgtgatgtataaattctactgtagaaataataataacaacaaaagtaataaagcaaggtgtctttccacatctccatgtccagtattttcatttaaaaaaaaagaaagaaagtaaaagcatttcagggccaggttcagtggctaacttctgtaatcccagcacttttggaggcctaggtgggaggatcgcttgaggccagaagttcaaaaccagcctgagcaacatagcaagaccttgtctctatgaaaaatata

SEQ ID NO: 448218 - DNA, 543 bp, Homo sapiens
tgaggtataggggagagaagcactggtccacctgagatctggctccaggacttacaacaaggggaacttgggcaagttacagactctgtgtgcctcagtttcttcatcagcaaaacagaaagaatcatcccataaactgtaaggtcaatgctgtcagtgagtccccaaattgactgcacatctgagtcatgttaacaaacacattccaggccccacctgagccctctgaatcagaatccctgcaaggaggacaatgaacttgtatttgcactgactttcccagctgtttcttactttgatcaasttgggggtgggacccattgagctgcatcacatcattccaaagccaaaacacaacagcagaacaagaatattttcaatgcggtctctaaagcggaggagaaactgttgagggaacctagaagtaaaggacatctggcttgctgggctccatttaaactttgagtatagcagagacacgagcccttcgggacacatgcctgtcgcagtgacactccaacttcggaagagtggaagccctga

SEQ ID NO: 448219 - DNA, 543 bp, Homo sapiens
tgaggtataggggagagaagcactggtccacctgagatctggctccaggacttacaacaaggggaacttgggcaagttacagactctgtgtgcctcagtttcttcatcagcaaaacagaaagaatcatcccataaactgtaaggtcaatgctgtcagtgagtccccaaattgactgcacatctgagtcatgttaacaaacacattccaggccccacctgagccctctgaatcagaatccctgcaaggaggacaatgaacttgtatttgcactgactttcccagctgtttcttactttgatcaacttgggggtgggacccattgagctgcatcacatcattccaaagccaaaacacaacagcagaacaagaatattttcaatgcggkctctaaagcggaggagaaactgttgagggaacctagaagtaaaggacatctggcttgctgggctccatttaaactttgagtatagcagagacacgagcccttcgggacacatgcctgtcgcagtgacactccaacttcggaagagtggaagccctga

SEQ ID NO: 448220 - DNA, 554 bp, Homo sapiens
gttgttgtcattgatggtggtgacatggacttgtttatagaggacaggtcagctstctggctcaatgatctacattctgaagttgtctgaaaatgtcttcatgattaaattcagcctaaacgttttgccgggaacactgcagagacaatgctgtgagtttccaaccttagcccatctgcgggcagagaaggtctagtttgtccatcagcattatcatgatatcaggactggttacttggttaaggaggggtctaggagatctgtcccttttagagacaccttacttataatgaagtatttgggagggtggttttcaaaattagaaatgtcctgtattccaatgatcatcctgtaaacattttatcatttattaatcatccctgcctgtgtctattattatattcatatctctacgctggaaactttctgcctcaatgtttactgtgcctttgtttttgctagtgtgtgttgttgaaaaaaaaacattctctgcctgagtttaatttttgtccaaagttattttatctatacaattaaaagcttttgcctatcac

SEQ ID NO: 448221 - DNA, 554 bp, Homo sapiens
gttgttgtcattgatggtggtgacatggacttgtttatagaggacaggtcagctctctggctcaatgatctacattctgaagttgtctgaaaatgtcttcatgattaaattcagcctaaacgttttgccgggaacactgcagagacaatgctgtgagtttccaaccttagcccatctgcgggcagagaaggtctagtttgtccatcagcattatcatgatatcaggactggttacttggttaaggaggggtctaggagatctgtcccttttagagacaccttacttataatgaagtatttgggagggtggttttcaaaattagaaatgtcctgtattccratgatcatcctgtaaacattttatcatttattaatcatccctgcctgtgtctattattatattcatatctctacgctggaaactttctgcctcaatgtttactgtgcctttgtttttgctagtgtgtgttgttgaaaaaaaaacattctctgcctgagtttaatttttgtccaaagttattttatctatacaattaaaagcttttgcctatcac

SEQ ID NO: 448222 - DNA, 522 bp, Homo sapiens
ctaaaaaacagcaagtgtccccccaaaacaaaagcaatcttgaaatgcaagaaggaacgttctctattccaaaggtctttaactgctctcagtaatacatggtaatcttcaatatataggctttcacacctttttttttttcttcttttgtttctagacacgatctcactctttcactcaggctggagtacagtggcaagatcacacagctcactgcagcatggaattctcaggccgatgacatcctagggcctcatccactgagtacctgggactacaggctcacaccaccacagccggataatttttctgattttcagtagagatgaggtctcactatgttgcctaagctagtttcaagcttctgagctcaagcgaccctcctgccacggccttcctaagcgctaggatttgaagctgmgcctggctggctttcacatctttgctatgtagtttatatttcttggtgttattgtaaatgtttatgaaaggaatcttttaaaaattttgtattaaaattat

SEQ ID NO: 448223 - DNA, 518 bp, Homo sapiens
ctgcatctggaagtcatagagtcaatattcctaaatcacatgaattatgtrtatacatttgcatgcataccccttccccaaataatcctcagaaaaccggttaagttttagcatctgtgactctgagatgcatatgaggcctttgtaaatttagaagttgagagtagaaagtacaggtttgtattttagaaggagatttgggaataaatatagctctggtggatatagatcatatgttaaggtttgttggccagagctggtgtgtgtcttgggtgttgggcaaagaacagagaacagccaaaactctgcgaggtcaatgtgaagggtgatttccttggtgggctcaagtttatgacgcagcctggacctagcttggcttctcagctagagaagaagcatgattccatgtcacagctcctgtctttgaaaaagtcataatgactcccatacccaacatatggagaaaactctggatttgcctcttcagttgaatgtttccagagaaaattgaggaaaga

SEQ ID NO: 448224 - DNA, 518 bp, Homo sapiens
ctgcatctggaagtcatagagtcaatattcctaaatcacatgaattatgtatatacatttgcatgcataccccttccccaaataatcctcagaaaaccggttaagttttagcatctgtgactctgagatgcatatgaggcctttgtaaatttagaagttragagtagaaagtacaggtttgtattttagaaggagatttgggaataaatatagctctggtggatatagatcatatgttaaggtttgttggccagagctggtgtgtgtcttgggtgttgggcaaagaacagagaacagccaaaactctgcgaggtcaatgtgaagggtgatttccttggtgggctcaagtttatgacgcagcctggacctagcttggcttctcagctagagaagaagcatgattccatgtcacagctcctgtctttgaaaaagtcataatgactcccatacccaacatatggagaaaactctggatttgcctcttcagttgaatgtttccagagaaaattgaggaaaga

SEQ ID NO: 448225 - DNA, 518 bp, Homo sapiens
ctgcatctggaagtcatagagtcaatattcctaaatcacatgaattatgtatatacatttgcatgcataccccttccccaaataatcctcagaaaaccggttaagttttagcatctgtgactctgagatgcatatgaggcctttgtaaatttagaagttgagagtagaaagtacaggtttgtattttagaaggagatttgggaataaatatagctctggtggatatagatcatatgttaaggtttgttggccagagctggtktgtgtcttgggtgttgggcaaagaacagagaacagccaaaactctgcgaggtcaatgtgaagggtgatttccttggtgggctcaagtttatgacgcagcctggacctagcttggcttctcagctagagaagaagcatgattccatgtcacagctcctgtctttgaaaaagtcataatgactcccatacccaacatatggagaaaactctggatttgcctcttcagttgaatgtttccagagaaaattgaggaaaga

SEQ ID NO: 448226 - DNA, 518 bp, Homo sapiens
ctgcatctggaagtcatagagtcaatattcctaaatcacatgaattatgtatatacatttgcatgcataccccttccccaaataatcctcagaaaaccggttaagttttagcatctgtgactctgagatgcatatgaggcctttgtaaatttagaagttgagagtagaaagtacaggtttgtattttagaaggagatttgggaataaatatagctctggtggatatagatcatatgttaaggtttgttggccagagctggtgtgtgtcttgggtgttgggcaaagaacagagaacagccaaarctctgcgaggtcaatgtgaagggtgatttccttggtgggctcaagtttatgacgcagcctggacctagcttggcttctcagctagagaagaagcatgattccatgtcacagctcctgtctttgaaaaagtcataatgactcccatacccaacatatggagaaaactctggatttgcctcttcagttgaatgtttccagagaaaattgaggaaaga

SEQ ID NO: 448227 - DNA, 600 bp, Homo sapiens
tatttaagacttctctggggtctccttggcaaagaagccatctgtccagctagttgggtggcttcagattttaatcttagttctgaaagcatttaatttgatgaaattttgccatattttttctttatttttaaagcccgtcatgttctataaaaatctttctactcaggatgtgaatggattctcttaattttatctctctatgagttccagmgtttcagttttaatttttaaattgatgacatctaaaattctactcctaaccaaaacatttttgggggtgactaaggacaactccaaaaatcttccataaatggaagtaagacttactccttaaagaactttctgggatcctgagctgcggggcacagtggctttagtgcacctctgctcttaagactattcagaaattgtctttgtgaacccatcaggctgtttcaaaatcagcaatttagggcttgcttgcaacacgcagttaagcagcagctgttttttggatctcatgagtgcctgcatgcatacttccctgggaattttctaaatttgaattctcatggtatttcaagtggcttagttgtctctttcttttgcctacagcca

SEQ ID NO: 448228 - DNA, 566 bp, Homo sapiens
agttgcccaccaagtttcccagggcaaaactcacactaagagatcaataggattaagagatattgaaagcctccacagagagatcatgagcaacctacaaaggatcactaatcagaaatttattaaaataccaaatgtattaaaakcaactctggatactataagacagtaaagtaataccttcagatttctagaaaaacaaagtatttccatcttagaattcaacacctagccaaactgtcaagtgttaggttagaatgatgcgtctttacatagacaaagattcaagttatctctctcatgcatcctgttttaggaagctatcaagttgttcttcaacaaaatgagaaaatgaaacaagaagaaagagattttaaaatcatgggatctaacacaatagatgggctaatggaaatatcaaccatccaccagaccaagagagcaaccaacatggattagagcaacagggcagagaaatagaaactaaaatgaaagactttattctatacccaactgcacactgccaaaaattagagagctgaataatggcaatggctggtggagag

SEQ ID NO: 448229 - DNA, 607 bp, Homo sapiens
gtgggaactctcagccctacccccaacctccaggaagggagaagagctggagattgggttataaaaactcttcaacaaggttcagagaccttccaggttggtgaacagatggaggtgctgctagcagggtggcacacatggagagagcatggaggtgctgcacctctctgcctctaggcttcatcctatgcatgtattccatttgcctattcctgagctgcattctttacaataactggtaaagaatgcagttcaggagtagaaagtgttctgtgagctgttatagcaaattatagaacttgaagggaggttataggagccctgaatttatagtcaaccaggcaggagtgtgggtagattactgtaccacctgaagttggggcagccttgtaggagtttaaattgagggatctgatgctaactccagtagataatatcagtgtcagaattggacaattggkgttggaaatgtaaaatcaaaggaaatgactgaggtgagtctccatcaatttaggggtttattttgcaaatgtgcctagggaaaagaatcacaagccacagtaggatatgtggcccatacttttttccaaagaggatttcgtaggct

SEQ ID NO: 448230 - DNA, 607 bp, Homo sapiens
gtgggaactctcagccctacccccaacctccaggaagggagaagagctggagattgggttataaaaactcttcaacaaggttcagagaccttccaggttggtgaacagatggaggtgctgctagcagggtggcacacatggagagagcatggaggtgctgcacctctctgcctctaggcttcatcctatgcatgtattccatttgcctattcctgagctgcattctttacaataactggtaaagaatgcagttcaggagtagaaagtgttctgtgagctgttatagcaaattatagaacttgaagggaggttataggagccctgaatttatagtcaaccaggcaggagtgtgggtagattactgtaccacctgaagttggggcagccttgtaggagtttaaattgagggatctgatgctaactccagtagataatatcagtgtcagaattggacaattggtgttggaaatgtaaaatcaaaggaaatgactgaggtgagtctccatcaatttaggggtttattttgcaratgtgcctagggaaaagaatcacaagccacagtaggatatgtggcccatacttttttccaaagaggatttcgtaggct

SEQ ID NO: 448231 - DNA, 607 bp, Homo sapiens
gtgggaactctcagccctacccccaacctccaggaagggagaagagctggagattgggttataaaaactcttcaacaaggttcagagaccttccaggttggtgaacagatggaggtgctgctagcagggtggcacacatggagagagcatggaggtgctgcacctctctgcctctaggcttcatcctatgcatgtattccatttgcctattcctgagctgcattctttacaataactggtaaagaatgcagttcaggagtagaaagtgttctgtgagctgttatagcaaattatagaacttgaagggaggttataggagccctgaatttatagtcaaccaggcaggagtgtgggtagattactgtaccacctgaagttggggcagccttgtaggagtttaaattgagggatctgatgctaactccagtagataatatcagtgtcagaattggacaattggtgttggaaatgtaaaatcaaaggaaatgactgaggtgagtctccatcaatttaggggtttattttgcaaatgtgccyagggaaaagaatcacaagccacagtaggatatgtggcccatacttttttccaaagaggatttcgtaggct

SEQ ID NO: 448232 - DNA, 559 bp, Homo sapiens
tggtccctttacatagttccatatatctcaaaggctttgttcactattattaagttattttttctttatttttgtctggctgggttaattcaaaagacctgtcttccaggtctaaaagtcttttttctgctgggtaaagtctattgttgaaactttcaactgyattttgtaatttctccaacaagtactttatttccagaagttctgtttggtttttgttaataatatctatctcttatttcatgtcctaaatttttttttccaatttctttgtattggtttttacctttctcttggatatcattgagcttttttaaattcaatattttgaattcttcatttggtctttcaactatttcattttgattaggatctgttgcaggagaattattgtggtcctttgagagtattgtaacactctgtttttttttttcatactttcagaattgtttctctggttccttctcatctgaataagcattttctccttcttatttctgaattacttttgcttgaatgggacttctcccccctcaagctgtcatgtgtgttttgtagc

SEQ ID NO: 448233 - DNA, 589 bp, Homo sapiens
ctaactccagtagataatatcagtgtcagaattggacaattggtgttggaaatgtaaaatcaaaggaaatgactgaggtgagtctccatcaatttaggggtttattttgcaaatgtgcctagggaaaagaatcacaagccacagtaggatatgtggcccatacttttttccaaagaggatttcgtaggctttaatattcaatagggaaaaattggacagaaagagaaagagggagaaaaagggagggtatgttcatgttctagtgaggctttgattagagctcactgaatccatatgttgcatgaaaaggagggcgtatagggaacagtcagttgtgtatttgtgtcgcactcagtaaatctgctcttcacataagatgaagtaaacatagagtagagaaacaaatcaaatatgcatgtatttcagggkgggtggggggacaattaccagtcccctcttatcctgtaccgtgatgataagctgttgattgtcagggtgagggagaccagctatggagatatatcaccatctatctgtagctattctgtttagaaacaaaagcaaaggcagtttttttttgtatgactca

SEQ ID NO: 448234 - DNA, 562 bp, Homo sapiens
tttttttcttaactttaaagccatatttttacatttccaccaacaggtatgatattaactgtagacttaaaaatatatattctcagtgggcatggtggctcatgcctgtaatcccagcactttgggaggctgcggccagtggatcacttgaggcaaggagtttgagaccagcttggccaacacagtgaaatcctgtctctactaaaaatacaaaaaattagctgggcatggtggcatgagcctgtagttccagctactcaggaggctgaggcatgagaatcccttcaatccgggaggtrgaggttgcagtgagtgtgagatcatgccactgcactccagcttgggtgacagagtgagattctgtctcaaaaaaaaaaaaaaccacaaaaatatatattctttactaatttaagaaagtccccttctatctataaaaagattgctaaaacatttcatcatcattggaaattaaattttctctagtgcttttttcctgcacgtacttagattttttcttcaatctattattgtgatgacttacattaatggatgtgttacagta

SEQ ID NO: 448235 - DNA, 495 bp, Homo sapiens
tggggaatctacaactttatagtaagcctrctctttgggagagatgttaccttgtccctcaagggtactccttcaaacaatcttgtgaatggcctggtcaaagagcagtgcaggtcttgtattcttggaatacccagtaagaatgtacatgaatactcagagcttgtagcagaattatctgtctgcaaaggtgggagttggcaaactatagactgtgaaatatggcctgtgacctgttattgaatgacccatgagcgtagaatattttttacatttgaactccattaagaaagttattatcctcctaagagaattctgttcttctcattagtagagctgcattaccaaaatattgcactcagttattatgaatatgttttgaatttatcaataaaaatattttcagttatgtaagtacctacataatatccttgattgcctcttggcctgcaaactggatctacactatctggatcttgacagaaaaagtttgtt

SEQ ID NO: 448236 - DNA, 495 bp, Homo sapiens
tggggaatctacaactttatagtaagcctactctttgggagagatgttaccttgtccctcaagggtactccttcaaacaatcttgtgaatggcctggtcaaagagcagtgcaggtcttgtattcttggaatacccagtaagaatgtacatgaatactcagagcttgtagcagaattatctgtctgcaaaggtgggagttggcaaactatagactgtgaaatatggcctgtgacctgttattgaatgacccatgagcgtagaatattttttacatttgaactccattaagaaagttattatcctcctaagagaattctgttyttctcattagtagagctgcattaccaaaatattgcactcagttattatgaatatgttttgaatttatcaataaaaatattttcagttatgtaagtacctacataatatccttgattgcctcttggcctgcaaactggatctacactatctggatcttgacagaaaaagtttgtt

SEQ ID NO: 448237 - DNA, 495 bp, Homo sapiens
tggggaatctacaactttatagtaagcctactctttgggagagatgttaccttgtccctcaagggtactccttcaaacaatcttgtgaatggcctggtcaaagagcagtgcaggtcttgtattcttggaatacccagtaagaatgtacatgaatactcagagcttgtagcagaattatctgtctgcaaaggtgggagttggcaaactatagactgtgaaatatggcctgtgacctgttattgaatgacccatgagcgtagaatattttttacatttgaactccattaagaaagttattatcctcctaagagaattctgttcttctcattagtagagctgcattaccaaaatattgcactcagttattatgaatatrttttgaatttatcaataaaaatattttcagttatgtaagtacctacataatatccttgattgcctcttggcctgcaaactggatctacactatctggatcttgacagaaaaagtttgtt

SEQ ID NO: 448238 - DNA, 495 bp, Homo sapiens
tggggaatctacaactttatagtaagcctactctttgggagagatgttaccttgtccctcaagggtactccttcaaacaatcttgtgaatggcctggtcaaagagcagtgcaggtcttgtattcttggaatacccagtaagaatgtacatgaatactcagagcttgtagcagaattatctgtctgcaaaggtgggagttggcaaactatagactgtgaaatatggcctgtgacctgttattgaatgacccatgagcgtagaatattttttacatttgaactccattaagaaagttattatcctcctaagagaattctgttcttctcattagtagagctgcattaccaaaatattgcactcagttattatgaatatgttttgaatttatcaataaaaatattttcwgttatgtaagtacctacataatatccttgattgcctcttggcctgcaaactggatctacactatctggatcttgacagaaaaagtttgtt

SEQ ID NO: 448239 - DNA, 553 bp, Homo sapiens
caggtccccttgtatggcaagaggggctttgcaaatgtggctaagtgagggacctggagatggggaggccaccctggattatccaggtgggccctggtgatcttcagggtccttttaagagggaggcaggagggtcagagcctgaggaggggatgcagtgatggacgcggagcttggagggatggggtttggaaacggaggaaagggccacacatgtacccaggaacacwggtagaaggaatgcagccctgccgacaccgatctcggcccggtgtgacccattttagacttccggtctacagagatgggagagaacacacctgtgttgtttgtggtaatctgttacagcagccacaggcaactaactcgggtgccaaagccattgagttaagggctgttggggaacaggatattcacgctcctaggaccaccagttacaaaggggagggggacttacgcaggagcagctggcgacagtccttcccccatgactggatgtagcatcacctgggagggacagctgacatgtcccctgctgtgacgggcagaggac

SEQ ID NO: 448240 - DNA, 553 bp, Homo sapiens
caggtccccttgtatggcaagaggggctttgcaaatgtggctaagtgagggacctggagatggggaggccaccctggattatccaggtgggccctggtgatcttcagggtccttttaagagggaggcaggagggtcagagcctgaggaggggatgcagtgatggacgcggagcttggagggatggggtttggaaacggaggaaagggccacacatgtacccaggaacactggtagaaggaatgcagccctgccgacaccgatctcggcccggtgtgacccattttagacttccggtctacagagatgggagagaacacacctgtgttgtttgtggtaatctgttacagcagccacaggcaactaactcgggtgccaaagccattgagttaagggctgttggggaacaggatattcacgctcctaggaccaccagttacaaaggggagggggrcttacgcaggagcagctggcgacagtccttcccccatgactggatgtagcatcacctgggagggacagctgacatgtcccctgctgtgacgggcagaggac

SEQ ID NO: 448241 - DNA, 567 bp, Homo sapiens
ttatagtggaatatgccataaaaaaaagaaaggcctctcggcagggcgcggtgtctcatgcctgtaatcccagcactttgggaggctgaggtgggcggatcacaagttcaggagattgagaccatcctggctaacacgacgaaaccccgtctctactaaaaacacaaaatattagcctggcatggtggcrggtgcctggagttccagctacaggaggctgaggcaggagtatggtgtgaacccgggaggcagagcttgcagtgacctgagatggcaccactgcactccagcctgggcaacagagtgagactccgtctcaaaaaaaagaaaagaaaggtctcaaatcaacaagttaattttatacacaaaggaaccagtaaaagagaacaaactaaatccaaagttagcagaaggaagaatataaagattagagtaagaataaatggaataaagaataacttttataaaagttagatttaaaaaataacaacaaaattgaaaatcctttagctagattaagaaaaagagagaatactcaaataactaaaatcagaaatgaatgcctca

SEQ ID NO: 448242 - DNA, 567 bp, Homo sapiens
ttatagtggaatatgccataaaaaaaagaaaggcctctcggcagggcgcggtgtctcatgcctgtaatcccagcactttgggaggctgaggtgggcggatcacaagttcaggagattgagaccatcctggctaacacgacgaaaccccgtctctactaaaaacacaaaatattagcctggcatggtggcaggtgcctggagttccmgctacaggaggctgaggcaggagtatggtgtgaacccgggaggcagagcttgcagtgacctgagatggcaccactgcactccagcctgggcaacagagtgagactccgtctcaaaaaaaagaaaagaaaggtctcaaatcaacaagttaattttatacacaaaggaaccagtaaaagagaacaaactaaatccaaagttagcagaaggaagaatataaagattagagtaagaataaatggaataaagaataacttttataaaagttagatttaaaaaataacaacaaaattgaaaatcctttagctagattaagaaaaagagagaatactcaaataactaaaatcagaaatgaatgcctca

SEQ ID NO: 448243 - DNA, 567 bp, Homo sapiens
ttatagtggaatatgccataaaaaaaagaaaggcctctcggcagggcgcggtgtctcatgcctgtaatcccagcactttgggaggctgaggtgggcggatcacaagttcaggagattgagaccatcctggctaacacgacgaaaccccgtctctactaaaaacacaaaatattagcctggcatggtggcaggtgcctggagttccagctacaggaggctgaggcaggagtatggtgtgaacccgggaggcagagcttgcagtgasctgagatggcaccactgcactccagcctgggcaacagagtgagactccgtctcaaaaaaaagaaaagaaaggtctcaaatcaacaagttaattttatacacaaaggaaccagtaaaagagaacaaactaaatccaaagttagcagaaggaagaatataaagattagagtaagaataaatggaataaagaataacttttataaaagttagatttaaaaaataacaacaaaattgaaaatcctttagctagattaagaaaaagagagaatactcaaataactaaaatcagaaatgaatgcctca

SEQ ID NO: 448244 - DNA, 613 bp, Homo sapiens
tatatattgtgaccaggttttattcctcctaatgcaaggatagttcaatatatgaaaatcagtgtaatacattgcattaacagaataaaagacaaaaagcacacaatcatcttaattgattcagaaaaagcatgtgacaaaattgaacaccctttcatgacaaaattaagaaacgaagagtagaaaaaaattacctcaacataataaatgttatgtgtgggtttgaataagtatgtatgtatatgtatagatatacacataaatgttatataaatataatatgtgtgcacacatacagggctaacaccatactcaatgatgaaaacctgaaaactttccctaagatcaagaacaaggcggggcggttccaagatggccgaataggaacagctccagtctaagctcccagcrtaagtgatggagaagatgggtgatttctgcatttccaactgaggtactggcttcatctcactggggcttgtcagatagtgggggcaggacagtgggtgcagcccactgagcatgagctgaagcagggcaaggcgtcgcctcacctgggaagcacaaggggtcagggaattccctttcctagccaagggaagcagtgacagaa

SEQ ID NO: 448245 - DNA, 601 bp, Homo sapiens
aacaatcccatcaggaacttataaaagcataaacaatagtaacaagaagaataagatactttggaataaacttaaccaaggatgggaaaaccttgcacacttgaaaactacgaaacaggctgggtgcagtggctcacacctgtaatcccagcactttgggaggccaaggtgggtggattgcttgagtccaggagttcaagaccaagttgggcaacatggcgaaaccccctctctactaaaaatacaaaaaatagccaggcatggtggcacatgcctgtagtcccagttacttgggaggctgaggtgggagaatcacctgagctcaggaggtcgaggctgcagtgagccgagatcatgccactgcactccagcctggrcaaacagagtgagaccctgtctcaacaaaacaaaacaaaacacagcaaaacacaaaaaacctacaagacattgctgaaagaaattaaagagacataaataaatagaaagacatcctgtactcatgaattgaaagacttagtgttaagatatccatgtacccaaagtgatttactgattcaatgcaattcttaacaaaatgcaaatgacttttttgcagaaatgg

SEQ ID NO: 448246 - DNA, 378 bp, Homo sapiens
tattccactatggtctgagaaaatacttgatatgatttcaatttcgttaaatttgttgggacttgttttgtaacctatcataggttatcttggagaacgttccatgtgctgatgaaaaaaaatgtatatcctgcagttgttgggaagaatgttttgcaattwtctgttaagtacatttcttctagggtatagtttaagtccattatttctttgttgactttctgtcttgatgacctgtctagtgctgtcagtggagtattgaagtcccccactatatttgtactgctgtttatctcatttcttaggtctagtagtaattgttttataaatttggaagctccagtgctaggtgcatataaatttaggatcataatatct

SEQ ID NO: 448247 - DNA, 378 bp, Homo sapiens
tattccactatggtctgagaaaatacttgatatgatttcaatttcgttaaatttgttgggacttgttttgtaacctatcataggttatcttggagaacgttccatgtgctgatgaaaaaaaatgtatatcctgcagttgttgggaagaatgttttgcaattttctgttaagtmcatttcttctagggtatagtttaagtccattatttctttgttgactttctgtcttgatgacctgtctagtgctgtcagtggagtattgaagtcccccactatatttgtactgctgtttatctcatttcttaggtctagtagtaattgttttataaatttggaagctccagtgctaggtgcatataaatttaggatcataatatct

SEQ ID NO: 448248 - DNA, 378 bp, Homo sapiens
tattccactatggtctgagaaaatacttgatatgatttcaatttcgttaaatttgttgggacttgttttgtaacctatcataggttatcttggagaacgttccatgtgctgatgaaaaaaaatgtatatcctgcagttgttgggaagaatgttttgcaattttctgttaagtacatttcttctagggtwtagtttaagtccattatttctttgttgactttctgtcttgatgacctgtctagtgctgtcagtggagtattgaagtcccccactatatttgtactgctgtttatctcatttcttaggtctagtagtaattgttttataaatttggaagctccagtgctaggtgcatataaatttaggatcataatatct

SEQ ID NO: 448249 - DNA, 475 bp, Homo sapiens
ctgcatctgttgagatggtcatacracttgtgtcttttcctgtgtttgtgtgtgaactctctgggtgtctgagagttcttgtgactttcacagaagaacacaatttaccctccggtgtgggaaggggaaggaagcagaggaagaaagaccccaagtccccctcatccccactgaccttcctgctggcttcgtccttgatctgtgcctccttagatcctgcgtttgagtacttgcggtcatgatgacagggccaacctcctgaccagggctgttagcatctcccctgctgcccagagtccctgctccaaaccacttccttcatcttctgtacccccagccaatatttccctgcccagtgtcaacccaggcccagaaccagaccacaagggacagccccggaacccagaatcagacaaatcagcccgtcccaagctgtctcccctgctctgcccggctttcacagggaagccaacac

SEQ ID NO: 448250 - DNA, 475 bp, Homo sapiens
ctgcatctgttgagatggtcatacaacttgtgtcttttcctgtgtttgtgtgtgaactctctgggtgtctgagagttcttgtgactttcacagaagaacacaatttaccctccggtgtgggaaggggaaggaagcagaggaagaaagaccccaagtccccctcatccccactgaccttcctgctggcttcgtccttgatctgtgcctccttagatcctgcgtttgagtacttgcggtcatgatgacagggccaacctcctgaccagggctgttagcayctcccctgctgcccagagtccctgctccaaaccacttccttcatcttctgtacccccagccaatatttccctgcccagtgtcaacccaggcccagaaccagaccacaagggacagccccggaacccagaatcagacaaatcagcccgtcccaagctgtctcccctgctctgcccggctttcacagggaagccaacac

SEQ ID NO: 448251 - DNA, 475 bp, Homo sapiens
ctgcatctgttgagatggtcatacaacttgtgtcttttcctgtgtttgtgtgtgaactctctgggtgtctgagagttcttgtgactttcacagaagaacacaatttaccctccggtgtgggaaggggaaggaagcagaggaagaaagaccccaagtccccctcatccccactgaccttcctgctggcttcgtccttgatctgtgcctccttagatcctgcgtttgagtacttgcggtcatgatgacagggccaacctcctgaccagggctgttagcatctcccctgctgcccagagtccctgctccaaaccacttccttcatcttcygtacccccagccaatatttccctgcccagtgtcaacccaggcccagaaccagaccacaagggacagccccggaacccagaatcagacaaatcagcccgtcccaagctgtctcccctgctctgcccggctttcacagggaagccaacac

SEQ ID NO: 448252 - DNA, 493 bp, Homo sapiens
gagcttgcagtgaggtgagatcatgccactgcactccagcctggctaacacagygagactctgtctcaaaaaaaaaaaaaagaaaaaaagaaaagattacagaaatcattgtaaaaccccatagtgctttgtacttgctgaaactgtcacaagactcacatgagagacggtaacttcaatagtgatgtaacacattaccactatttcacaatcactcctattgagcaataattcaattcaaagatgcattaatgagatgtcaggtaataccaaagagtagctgattaatcaagtaagtttcctattcagatcaatgaaatcagttactgagagtaaggcctgacaataggacatgtttgttatttcaataatgctgcaaactaaaagaagagatattgtttgtaaaatctttagacgctgaccataccagagtatctattcttgctgctataaaaacttggtttggggctgggtgcagtggctcacgcctgta

SEQ ID NO: 448253 - DNA, 485 bp, Homo sapiens
attcatattatttttgcaatcatacaatggcatatacagctcaggtgcggtggctcaygcaagtaatcccagtactttgggagactgaactgggtggatcatttgaggtcaggagttcaagactagcctggccaacatagtgaatccccatcactacaaaaaacacaaaaattatctgggcgtggtggcagacgcttgtattcccagctacttgggaggtggaggcatgagaatcacttgaacctgggagatgaaggttacagggagccgaaatcgcattacttcactcccacctgggcgacagagtgagattccatctcaataaataaataaataaacagaaagaaagaaagaaaaaaagatgaaagaaacaaagaaaaaaggaagaaagagagaaaaaagacagagaaaggaagcaagcaagcaagcaagcaagcaaccaagaaagaaagaaagaaaaaaaaatagaaagaaaaagaagtcat

SEQ ID NO: 448254 - DNA, 485 bp, Homo sapiens
attcatattatttttgcaatcatacaatggcatatacagctcaggtgcggtggctcacgcaagtaatcccagtactttgggagactgaactgggtggatcatttgaggtcaggagttcaagactagcctggccaacatagtgaatccccatcactacaaaaaacacaaaaattatctgggcgtggtggcagacgcttgtattcccagctacttgggaggtggaggcatgagaatcacttgaacctgggagatgaaggttacarggagccgaaatcgcattacttcactcccacctgggcgacagagtgagattccatctcaataaataaataaataaacagaaagaaagaaagaaaaaaagatgaaagaaacaaagaaaaaaggaagaaagagagaaaaaagacagagaaaggaagcaagcaagcaagcaagcaagcaaccaagaaagaaagaaagaaaaaaaaatagaaagaaaaagaagtcat

SEQ ID NO: 448255 - DNA, 633 bp, Homo sapiens
caagtcctcctgttcccccgcatttgtagtcattcttggtgactgggaacgaagggctagagcgtgagctgaaactgagacagggagtggcaggcaggcagtggggacagaaacttttctcaaatccacccatgtgaagaagatggacagaagggtggtctttctggagagaggcttccaagccactttcccaagaaagacagctgatcttgggatraatggcagggacctgattgggtaggggatgggtggtcacattgttttgtgggctgtagactttatttcccttcctttgggaagagaagaggaagaggacagctcaggtgtgggtttgagccctggattaagactgcccattgtccactaaaatctcttctttccttgctgcacgagggtggagggacacccagctggacactccatttcccagctgctcttattgccaggtgtagacacaggggaatgtgaggtgagcatgtcctcaaagcctgacggattgggtaaattctcctttgtgttctctctttcatgagctgggcagatgtgcctgagacaggtttgaccaggcaactgaaaagacatccctaagagaagacaaagcaaaggtatgaaaggaacacacgtccctgactg

SEQ ID NO: 448256 - DNA, 633 bp, Homo sapiens
caagtcctcctgttcccccgcatttgtagtcattcttggtgactgggaacgaagggctagagcgtgagctgaaactgagacagggagtggcaggcaggcagtggggacagaaacttttctcaaatccacccatgtgaagaagatggacagaagggtggtctttctggagagaggcttccaagccactttcccaagaaagacagctgatcttgggataaatggcagggacctgattgggtaggggatggstggtcacattgttttgtgggctgtagactttatttcccttcctttgggaagagaagaggaagaggacagctcaggtgtgggtttgagccctggattaagactgcccattgtccactaaaatctcttctttccttgctgcacgagggtggagggacacccagctggacactccatttcccagctgctcttattgccaggtgtagacacaggggaatgtgaggtgagcatgtcctcaaagcctgacggattgggtaaattctcctttgtgttctctctttcatgagctgggcagatgtgcctgagacaggtttgaccaggcaactgaaaagacatccctaagagaagacaaagcaaaggtatgaaaggaacacacgtccctgactg

SEQ ID NO: 448257 - DNA, 633 bp, Homo sapiens
caagtcctcctgttcccccgcatttgtagtcattcttggtgactgggaacgaagggctagagcgtgagctgaaactgagacagggagtggcaggcaggcagtggggacagaaacttttctcaaatccacccatgtgaagaagatggacagaagggtggtctttctggagagaggcttccaagccactttcccaagaaagacagctgatcttgggataaatggcagggacctgattgggtaggggatgggtggtcacattgttttgtgggctgtagactttatttcccttcctttgggaagagaagaggaagaggacagctcaggtgtgggtttgagccctggattaagactgcccattgtccactaaaatctcttctttccttgctgcacgagggtggagggacacccagctggacactccatttcccagctgctcttattgccaggtgtagacacaggggaatgtgaggtgagcatgtcctcaaagcctgacrgattgggtaaattctcctttgtgttctctctttcatgagctgggcagatgtgcctgagacaggtttgaccaggcaactgaaaagacatccctaagagaagacaaagcaaaggtatgaaaggaacacacgtccctgactg

SEQ ID NO: 448258 - DNA, 633 bp, Homo sapiens
caagtcctcctgttcccccgcatttgtagtcattcttggtgactgggaacgaagggctagagcgtgagctgaaactgagacagggagtggcaggcaggcagtggggacagaaacttttctcaaatccacccatgtgaagaagatggacagaagggtggtctttctggagagaggcttccaagccactttcccaagaaagacagctgatcttgggataaatggcagggacctgattgggtaggggatgggtggtcacattgttttgtgggctgtagactttatttcccttcctttgggaagagaagaggaagaggacagctcaggtgtgggtttgagccctggattaagactgcccattgtccactaaaatctcttctttccttgctgcacgagggtggagggacacccagctggacactccatttcccagctgctcttattgccaggtgtagacacaggggaatgtgaggtgagcatgtcctcaaagcctgacggattgggtaaattctcctttgtgttctctctttcatgagctgggcagatgtgcctgasacaggtttgaccaggcaactgaaaagacatccctaagagaagacaaagcaaaggtatgaaaggaacacacgtccctgactg

SEQ ID NO: 448259 - DNA, 508 bp, Homo sapiens
ccctcctgcccaaaggcaaagcagccacagtggaagtgcctgagtcctccctcacagccttctgtctagtggttattcccgcttcraggctaaggaagggaaggacccgttttgccttcaaaggctttttccttccagcccttgctgtgcagcccgttgtgtgtgggaggaaccatgagaggcctggatattgtcaacaaaagacttgaacaagccaaagagctgattatgttgacaagaaggggaccttaacaaggcagataatcaaaagttgatgactgacagcccctttcgcatcccttcaccctctactaaatcaggtctcttacatgatcttgatgacaaataataaaaattataaacacattacagttttcacatgcatttgttcacttctcacagcaaatatgagatttatctaaggctgagcagcttattacagaaaaaagtttatgggactagaaccttaattttatgtaacaaaatttatatagagcttaccatggat

SEQ ID NO: 448260 - DNA, 536 bp, Homo sapiens
gctcccggtctagagaggggaggaggaagggagatccacagtgatttgtatcatatgctgaggaaagagagtcatttactatcaccgtttgacatcctcacccccagtgcggtccttctctttgtctctccatgctgggagtgggcagtccctgctctgctgcccttcagacacagccctcttccctcaagctgccctctgcctggatcccaccttccttgtgagctggagtatttgcttgtgggagtcttgactctccttccctgtcagtcactgtttggctgcaggcagtgacagtggtggcaataaagcagcagagaggaggctttggtatcagagcagggactcacgggtgggatgrgacggggatggttttatgtttgtcccactgtgttctctgtgctgctctgcccagggaggctgacctctgcagactgtgtcacatgggccccctgatctctcggccaatagagttcccggctgagaagggggagagaggagtcagggtatttgtttcctccattccctgtcagccc

SEQ ID NO: 448261 - DNA, 536 bp, Homo sapiens
gctcccggtctagagaggggaggaggaagggagatccacagtgatttgtatcatatgctgaggaaagagagtcatttactatcaccgtttgacatcctcacccccagtgcggtccttctctttgtctctccatgctgggagtgggcagtccctgctctgctgcccttcagacacagccctcttccctcaagctgccctctgcctggatcccaccttccttgtgagctggagtatttgcttgtgggagtcttgactctccttccctgtcagtcactgtttggctgcaggcagtgacagtggtggcaataaagcagcagagaggaggctttggtatcagagcagggactcacgggtgggatgagacggggatggttttatgtttgycccactgtgttctctgtgctgctctgcccagggaggctgacctctgcagactgtgtcacatgggccccctgatctctcggccaatagagttcccggctgagaagggggagagaggagtcagggtatttgtttcctccattccctgtcagccc

SEQ ID NO: 448262 - DNA, 521 bp, Homo sapiens
aacgggcatgttggtcccaggccctttgtgagcatgcttttccctgccctgccccctgtcatcaccattctggatggagcagcaaggacggagacacttagttgggctgtccactccaggtccaatgccagtgggatcagctttgatgggatgcacacagactgacctcttctccccagccccttcaacttcccagagctgcagggggcctgggagttcttggtaacagcacattaaacctctgtttgtgggaactttaatttaaacacaaatcagagayggcaaatgactctggcagccagataagccatcccgggagagcaaggagaaagccaagagaatcagcccagatgagtcctgactttaaactactggtgatacccagaagcctgggacagatgaaatctaggggtcctgaatgaagaaccccagaagctccacaccccagttgtccttgctctgggctctatgccagctccctctcctgtgttctctatatttctatctttttgcaaaattct

SEQ ID NO: 448263 - DNA, 576 bp, Homo sapiens
gggccaatcttatctggatacccttgccttcccactttccttgagtcacctttcttaagtccttcacacaatgttcttttcctccaattttccttcctccaagatactttctcagattacctacagcctcagtcctggattcagatactctttcagataatcttttatttttttatttttatttttattttttatttttcttgagacagaggctccctctgtcacccaggtggaagtgcagtggcagtcttggatcactgccacctgtgtctcccaggttcaartgattctcctgcctcagcctccagagtagctgggattacaggcttgtgccaccatgcccagctaatttttgtatttttagtagagacgaggtttcatcacattggccaggctggtctcgaactcccgacctcaaatgatctgcccccctcagcctcccaaagtggtgggattacaggcatgagccactgtgactggcctatccagcaatatttactgagtatctactatgcactgggcacaggttgccaagaattcatgaataaatggaacaggcataatccctgaactcaa

SEQ ID NO: 448264 - DNA, 372 bp, Homo sapiens
tgtggtgtggcaggggtaggagcccctagaggtagcatgggctctggaatccttaatcatcctatgtgaaaaagttggtggggccgtgattttttttttttttttttttttttttgagacagaatttcrctcttgttgcccaggctggagtgcaatgacactatctcagctcactgcaacctccacctcccaagttcaagtgattctcctgcctcagcctcccaagtagctgggattagaagcatgtgccaccacacccagctaatttttttgtatttagtagagatggggtttcaccacgtttgtcaggctggtcttgaactcctgacctcaggtgatccacctgcctcagcctcctaaaatgctgggatt

SEQ ID NO: 448265 - DNA, 372 bp, Homo sapiens
tgtggtgtggcaggggtaggagcccctagaggtagcatgggctctggaatccttaatcatcctatgtgaaaaagttggtggggccgtgattttttttttttttttttttttttttgagacagaatttcgctsttgttgcccaggctggagtgcaatgacactatctcagctcactgcaacctccacctcccaagttcaagtgattctcctgcctcagcctcccaagtagctgggattagaagcatgtgccaccacacccagctaatttttttgtatttagtagagatggggtttcaccacgtttgtcaggctggtcttgaactcctgacctcaggtgatccacctgcctcagcctcctaaaatgctgggatt

SEQ ID NO: 448266 - DNA, 372 bp, Homo sapiens
tgtggtgtggcaggggtaggagcccctagaggtagcatgggctctggaatccttaatcatcctatgtgaaaaagttggtggggccgtgattttttttttttttttttttttttttgagacagaatttcgctcttgttgcccaggctggagtgyaatgacactatctcagctcactgcaacctccacctcccaagttcaagtgattctcctgcctcagcctcccaagtagctgggattagaagcatgtgccaccacacccagctaatttttttgtatttagtagagatggggtttcaccacgtttgtcaggctggtcttgaactcctgacctcaggtgatccacctgcctcagcctcctaaaatgctgggatt

SEQ ID NO: 448267 - DNA, 566 bp, Homo sapiens
gtggcttcagggccaatgtgcgcttaggggggctgagtcagaacagccccctcttcctcgatagtgccatcctgtragtataacccctgtatgggtgttggacacagtgttggggaagactgtgcaacaggggtaagtaggaaaggccctgtggtagggggttagctgggtatccatggaaatgcctgaactactcatgccttttgcacaagtaggtcttcaaataatctcttctgcttccctctttcccactctttccctgtctaaggtgtgtggtggtggtggtggtggtggtggtggtgtgtgtgtgtgtgtgtgtgtgtgtgtgtgtctaacctgattgggagagtaagccaaatggagtgaagtggagaaacatccccaaaagtcccaggtagagacctaaggattcctaaatcacagtgcagaacagggtcctctacccttttcccattctgggaacatcctgaagccagtcattgtgggagagagacatgatccccaacccagcctcacagaccccacccttcttccacgctttgccctaccctcctttcttgtgcttg

SEQ ID NO: 448268 - DNA, 372 bp, Homo sapiens
tgtggtgtggcaggggtaggagcccctagaggtagcatgggctctggaatccttaatcatcctatgtgaaaaagttggtggggccgtgattttttttttttttttttttttttttgagacagaatttcgctcttgttgcccaggctggagtgcaatgamactatctcagctcactgcaacctccacctcccaagttcaagtgattctcctgcctcagcctcccaagtagctgggattagaagcatgtgccaccacacccagctaatttttttgtatttagtagagatggggtttcaccacgtttgtcaggctggtcttgaactcctgacctcaggtgatccacctgcctcagcctcctaaaatgctgggatt

SEQ ID NO: 448269 - DNA, 555 bp, Homo sapiens
gagtgaataaaactgtcccagaaagcgggagactttacacagtggctacaatgtccctagtacactgccacagtccagaagggagagaaggggctgtgcacaccaggaagccagaagcccacatgcacctgcccagggtctgtgcatggagctccggcaggtccaatctcttggccttcagaataatgatgtaaatacagggacaaagatggagcaggtgccactcaatgtgcaaaccctcccccttcttctggtgaggccagaagtacctaggtaggagcagcccctacctccgaccacctccctccctgcagtgggaatagcagcccaatccccaggctgcagggatccacaggccatgcaagtgtggctctacccccagcatgccctggtgcgaagctrtgcccagagagatgttatctgcaccccagactgcctgtggtgctgcagagtggtgctgaggagagagcagggcacacctggagtctgtatcacctgccttccctagggagtcttgggccctctccacattcaaggcgaggggagcagaggatc

SEQ ID NO: 448270 - DNA, 351 bp, Homo sapiens
cggccacgagagtgacctctgattgtcctcacggmtcattatatgccaattagaatgtatttgctgctaaaagacacccccaccagcaccatgacagtttacagatgccatggcaatgtctggaggttaccttataaggtctcaaaagggaggggaggagacctcagttcctcttcatccctttactttcctgataaacttgctctcactttactctgtgaactcgctccaaattctttctcgcatgagatcaaagagacctctcttggggtctggatcagagctcccccttttccagtaacaccagcactttgtgggaaagacagaggcgggaggattgagtgaggccag

SEQ ID NO: 448271 - DNA, 351 bp, Homo sapiens
cggccacgagagtgacctctgattgtcctcacggatcattatatgccaattagaatgyatttgctgctaaaagacacccccaccagcaccatgacagtttacagatgccatggcaatgtctggaggttaccttataaggtctcaaaagggaggggaggagacctcagttcctcttcatccctttactttcctgataaacttgctctcactttactctgtgaactcgctccaaattctttctcgcatgagatcaaagagacctctcttggggtctggatcagagctcccccttttccagtaacaccagcactttgtgggaaagacagaggcgggaggattgagtgaggccag

SEQ ID NO: 448272 - DNA, 514 bp, Homo sapiens
ctctctctctttctttatttgttatatctgttaaaatttatatttgttaatcactttggtttcttctttttagtcagtttagataatttgtgtgttttaagaaatttatgcayttattttaggttatttgtttggcatacaattgctcacagtactcttaattctttatttctataacatcactagtattgtccccattctcatgtctaatttttgtcatttgcatgttttcccttttcttcttagtctttctaggtaagtttgtcaattttgttgatctttacaaaaaaccaacttttgattttattgatttttctctattgtttttctagtccccgttttgtttttctgtgctctaatctttattgtttatttccttctagttttgagtttaatttgttctttatatcctcattctttaaggtggaaagttaagttactgatttggaatgtccttttcaatatagttatttatagctatacatttccctgtgagcacagctttcagtgcatc

SEQ ID NO: 448273 - DNA, 514 bp, Homo sapiens
ctctctctctttctttatttgttatatctgttaaaatttatatttgttaatcactttggtttcttctttttagtcagtttagataatttgtgtgttttaagaaatttatgcacttattttaggttatttgtttggcatacaattgctcacagtactcttaattctttatttctataacatcactagtattgtccccattctcatgtctaatttttgtcatttgcatgttttcccttttcttcttagtctttctaggtaagtttgtcaattttgttgatctttacaaaaaaccaacttttgattttattgatttttctctattgtttttctagtccccrttttgtttttctgtgctctaatctttattgtttatttccttctagttttgagtttaatttgttctttatatcctcattctttaaggtggaaagttaagttactgatttggaatgtccttttcaatatagttatttatagctatacatttccctgtgagcacagctttcagtgcatc

SEQ ID NO: 448274 - DNA, 551 bp, Homo sapiens
gctttttgggagtcctttaggtattaaattatacacacgtaacagcatattctgctggtatcaatattttaccagttcagttaaagtatagaaattatatccccttttgtgtctctttccctctccatttataatataatggtcttggccgggcgcagtggctcamgcctgtaatcccaacactttgggaggccaaggcggatcaccaggtcaggaggtcgagaccatcctggctaacacagtgaaaccccgtctctactaaaaaatacaaaaaattagctgggcgtagtggcaggcacctgcagtcccagctactcgggaggctgaggcaggggaatggcgtgaacccaggaggcagagcttgcagtgagccgatatcgtgccactgcctccagcctgggtgacagaaggagactctgtttcaaaaataataataataataataatataatggtcttaaatattttttctacatacatcgagaatcacatcagacattattataatttttacttcaatagtcaaacataatttggaaattcaagagtaga

SEQ ID NO: 448275 - DNA, 386 bp, Homo sapiens
gtgggggcttacaaatcggtgcagcttggactaacaggctctggtgaccactttccttttctggacatgctttggactgtgagccgagcctctrtgaatcatcacttcagcccctgattggtcctgggccaaactttcacttcagcccctgattggtcttgggccaaaatttcacttcagcctctggttggtcccaagctaaggtcccgggccaagcgaagttgtgctttctccaagacagctcacagactagtgagcacattcttccccttcccagttcacaaaacccccagattcagcctcctagttggcaaccctctttcgggtcccctctccgctggggagagctttcttcttttgcatattaaacttctgttccaacctca

SEQ ID NO: 448276 - DNA, 386 bp, Homo sapiens
gtgggggcttacaaatcggtgcagcttggactaacaggctctggtgaccactttccttttctggacatgctttggactgtgagccgagcctctgtgaatcatcacttcagcccctgattggtcctgggccaaactttcacttcagcccctgmttggtcttgggccaaaatttcacttcagcctctggttggtcccaagctaaggtcccgggccaagcgaagttgtgctttctccaagacagctcacagactagtgagcacattcttccccttcccagttcacaaaacccccagattcagcctcctagttggcaaccctctttcgggtcccctctccgctggggagagctttcttcttttgcatattaaacttctgttccaacctca

SEQ ID NO: 448277 - DNA, 386 bp, Homo sapiens
gtgggggcttacaaatcggtgcagcttggactaacaggctctggtgaccactttccttttctggacatgctttggactgtgagccgagcctctgtgaatcatcacttcagcccctgattggtcctgggccaaactttcacttcagcccctgattggtcttgggccaaaatttcacttcagcctctggttggtcccaagctaaggtcccgggccaagcgaagttgtgctttctccaagacagctcacagactagtgagcacattcttccccttcccagttcacaaaacccccagattcagcctyctagttggcaaccctctttcgggtcccctctccgctggggagagctttcttcttttgcatattaaacttctgttccaacctca

SEQ ID NO: 448278 - DNA, 557 bp, Homo sapiens
cctgtgtttattgaacacctaatattccacttacccaaatgtcatttattctatattctagttttttgttgagacagggtctttcttgctctgttacccatcctagagtgcagtggggttgtcacagctcacagatgtataccaccatgcctggcttattattttattttattttattttattattttattttattttattttattttattttatattttattttattttatattttattttattttattttatattttaattttattttattttattttattttatttttgcagagatgatgtctccctatatttcccaggcttgacttgaacttctgggctcaagygatcctcctgccttggcatcccaaagtgctgggattataggcataagccactgtgctcaggcaatattaaagtcttgataatagaagtgtctcagtgtactggaatgctttgtctaaattttgaaaaaatattaaaaaacacgttggttttatttggccaatactgatttctttgctccctcattatttattgtcattattagcctgtt

SEQ ID NO: 448279 - DNA, 336 bp, Homo sapiens
catgaaatgttttgtgtaaattygtgattcttatttctggttcctttctgtttaataattactagctgaatcattaatcatcaaccaagtgaatggtcacactttatagaaggctacaaggtggaacacaagattagttggattcttaagaaagaaactaaaagctgcttgcgacttagatgctcttaagttttatgactgtggtgggaatttgagcatccgggccttgcttctgatggtcctctcattccagtgccccagttctaatcctctgtgggtgccctcggtagtcacagccttggggctgcccagggctcaaggcgtccatgtttttaa

SEQ ID NO: 448280 - DNA, 336 bp, Homo sapiens
catgaaatgttttgtgtaaattcgtgattcttatttctggttcctttctgtttaataattactagctgaatcattaatcatcaaccaagtgaatggtcacactttatagaaggctacaaggtggaacacaagattagttggattcttaagaaagaaactaaaagctgcttgcgacttagatgctcttaagttttatgactgtggtgggaatttgagcatccrggccttgcttctgatggtcctctcattccagtgccccagttctaatcctctgtgggtgccctcggtagtcacagccttggggctgcccagggctcaaggcgtccatgtttttaa

SEQ ID NO: 448281 - DNA, 598 bp, Homo sapiens
cataattggaaacttttgcaaaaagagattggaaaggtgtcacatcttgtggcatgaggagctgtgggcatacacttgaactttgtgctgtgagatatccacagaacttcagtagctgaagagaacagtttagatgtcatcttattcatctaccatagaacttcctcttcttctctgagatttctagacaataacttttacagctctaataatgcagttgtctcmcaattgtttggactattctaatagatacaaagcagtatttcaccagcagatgctactgcagtttgtatgatgatttcaaactgagaatctatttaaagttatgcaatacttttttttggaaatagggtgaaagtagtttaagtttaaaatcctataaaataggtttacagtaaataattacttgttgcaatatctatcatactatcttatattcacacatgtgttggtgtcctaatacatatgtatgagagtgaaagttacctgaggtcagacactgtgccatatgttccctgcaccactggtgcctatttcagcacatgatatacagtagatgctcaataaatactttcacttaaaaaatgcactgagaata

SEQ ID NO: 448282 - DNA, 586 bp, Homo sapiens
aggggctgggtgtgtgggtgttggcctggagtctaggaccattagggttgacctttgtctgggggctccaggtgctggcctgaaacctgagtctacaggggtcatcttggagcctgggtccatgggggctaatccagtgctggagtctgccaggaagaaactgggctgtgggtctgctgtaatgtgtggctgcaggggaaaatatgaagagtgggtctgtgggtgcctgtttggagatgagagctgtagcrgttggcctggttcttgggtaggtctgaatcctgtgaccatggggaccagcctggtgctgcaagcagtccagagcctttggctgcctggccctggggtgggcctagagcctgagtctgtgggggatagcctggagttggggtttgtccaaagtctggggctactgatcagctacagtcaggctactactccaactgtcctttctatctctttagtgcatcctttctgaaatctcctacctggtttccttagttcttgtgaaggtggttttatgcatggatagttgttccaattgatgtttctgcaggggagcaagagctagaaagtcctattcacc

SEQ ID NO: 448283 - DNA, 586 bp, Homo sapiens
aggggctgggtgtgtgggtgttggcctggagtctaggaccattagggttgacctttgtctgggggctccaggtgctggcctgaaacctgagtctacaggggtcatcttggagcctgggtccatgggggctaatccagtgctggagtctgccaggaagaaactgggctgtgggtctgctgtaatgtgtggctgcaggggaaaatatgaagagtgggtctgtgggtgcctgtttggagatgagagctgtagcggttggcctggttcttgggtaggtctgaatcctgtgaccatggggaccagcctggtgctgcaagcagtccagagcctttggctgcctggccctggggtgggcctagagcctgagtctgtgggggatagcctggagttggggtttgtccaaagtctggggctactgatcagctacagtcrggctactactccaactgtcctttctatctctttagtgcatcctttctgaaatctcctacctggtttccttagttcttgtgaaggtggttttatgcatggatagttgttccaattgatgtttctgcaggggagcaagagctagaaagtcctattcacc

SEQ ID NO: 448284 - DNA, 562 bp, Homo sapiens
accagcaggctgggtacttacattaatgataaacctattatgctctttccccatgaaaacagatctggaccctcacctcccccmctaccgctgtcacaggctcctggaatttccctctctcacccctacccttcaccacttttgtgaatgttcctcaatctgactccatcttccatcagtcttctcctcttcaaaccctttctctgtgctctgtggaattcctgatcagtatagttttcatatagacatcctttacttaaaccttctctcccatttcttgccttaattgaaaattggcctctctctagtcatcatcccccctccaattccataggcctcattacgacttccaaatcatttcttctttttctacccttgaaaagcctggcacctctgatgtttgtaccacttaccagtgtcacaatattaccatattaccctctttgtgttagagcttcccagagaaacaaagccaataggacacacacacacacgcacacacccgcacacacatacacacacacacaagtgtatttataattaaataagaaatatatagata

SEQ ID NO: 448285 - DNA, 562 bp, Homo sapiens
accagcaggctgggtacttacattaatgataaacctattatgctctttccccatgaaaacagatctggaccctcacctcccccactaccgctgtcacaggctcctggaatttccctctctcacccytacccttcaccacttttgtgaatgttcctcaatctgactccatcttccatcagtcttctcctcttcaaaccctttctctgtgctctgtggaattcctgatcagtatagttttcatatagacatcctttacttaaaccttctctcccatttcttgccttaattgaaaattggcctctctctagtcatcatcccccctccaattccataggcctcattacgacttccaaatcatttcttctttttctacccttgaaaagcctggcacctctgatgtttgtaccacttaccagtgtcacaatattaccatattaccctctttgtgttagagcttcccagagaaacaaagccaataggacacacacacacacgcacacacccgcacacacatacacacacacacaagtgtatttataattaaataagaaatatatagata

SEQ ID NO: 448286 - DNA, 562 bp, Homo sapiens
accagcaggctgggtacttacattaatgataaacctattatgctctttccccatgaaaacagatctggaccctcacctcccccactaccgctgtcacaggctcctggaatttccctctctcacccctacccttcaccacttttgtgaatgttcctcaatctgactccatcttccatcagtcttctcctcttcaaaccctttctctgtgctctgtggaattcctgatcagtatagtttycatatagacatcctttacttaaaccttctctcccatttcttgccttaattgaaaattggcctctctctagtcatcatcccccctccaattccataggcctcattacgacttccaaatcatttcttctttttctacccttgaaaagcctggcacctctgatgtttgtaccacttaccagtgtcacaatattaccatattaccctctttgtgttagagcttcccagagaaacaaagccaataggacacacacacacacgcacacacccgcacacacatacacacacacacaagtgtatttataattaaataagaaatatatagata

SEQ ID NO: 448287 - DNA, 562 bp, Homo sapiens
accagcaggctgggtacttacattaatgataaacctattatgctctttccccatgaaaacagatctggaccctcacctcccccactaccgctgtcacaggctcctggaatttccctctctcacccctacccttcaccacttttgtgaatgttcctcaatctgactccatcttccatcagtcttctcctcttcaaaccctttctctgtgctctgtggaattcctgatcagtatagttttcatatagacatcctttacttaaaccttctctcccatttcttgccttaattgaaaattggcctctctctagtcatcatcccccctccaattccataggcctcattacgacttccaaatcatttcttctttttctacccttgaaaagcctggcacctctgatgtttgtaccacttaccagtgtcacaatattaccatattaccctctttgtgttagagcttcccagagaaacaaagccaataggacacacacacacacgcacacacmcgcacacacatacacacacacacaagtgtatttataattaaataagaaatatatagata

SEQ ID NO: 448288 - DNA, 491 bp, Homo sapiens
cgtattcatttgtgggacatggggtgatgggtgattttagacataatgggcagagatcatggactttggaaacagaaaaaagacacaaataaatcagaagaatttgaagtataaggaaggctggggaaaatgattatttgtctagtatgtctataaagaaaacatctcgcctcagtataggtcttatagtttaaaaagatgaacattttaaagaaccttttctagaatcaaattctactcaggttttatataaaaatgtcagtagtattaagatgggttaggaagcttagattattaattgatatggtcctttttggtaggattttcrtatcctttgtatgtgagaagagagaaagaagttggacatccatggtttgtatgtctggctggtgtttgagggatcgatcacttatttgttgataagtgaaaggtaggtagataggtaattagaattctgctgtctggtgtcagacaggctgtgtcttaaattt

SEQ ID NO: 448289 - DNA, 579 bp, Homo sapiens
ctgtaaccaatataaatgtcattttttcctgccaggccaacacataccctccccgctttttttctttctttcaggtctcaacttaaatgccacttccttaaagagggactatgattctaaaataaaaaagagctcctattctttaagtctgttttattatcataacacttttattattctatactgttatttttatgtagcacttgtcactcagtactttctcagtattttatatatgcatgttgtctttctctccacttcctccctttgtctcccaacagtggatataagtttattaagtgcaggggacctgtcaattacgtttattgctctatccacagtccctagaatagaacttktacttagcaggcaacggtctctggttagactgagcaggactcgtcttatctttgtagccttaagattttgtagtgcttgttgaatttaattaatttggctattattattgagaagaaatgcgttaatattaatgaaaagtataattttataaattaacacattaaaattctttttttttttctaaataaaaaacagttccagttttagcaatggctcggc

SEQ ID NO: 448290 - DNA, 578 bp, Homo sapiens
taaaatacaatacttttggcaacacaaggaaattacgtattaacagaggcaaggcaatcgtttttaacatgctccactgtaaaggaaaccaaatactccactacattcagaatttcctcctccattgttgttgaaagtgagatctcaagggaaaaatcagcgctgagacctaggagcaagtaggtcagtagatggcactcctcgccaactcagatactgggctgggcatgcagagacaatccgctgagatttcaggcaagaaaaaaagaaaaaaaaagtgcctgcctgcttgacttgtgcattacagaactgaattttgttcccatcatatcccgctgcctcccacgatcccctcctccaactcctgtactctgggtgttgaagtgacttgaggacgctgtatttgcaatagaactttgctaactaggtttagagagttctgycaccttttcttcaaagcagaaaatagaacatttggacgctgaagtcccaccccacacattccgtaagtgctacagcacagaaggccaaaatacattgaaatcctagtttctttcttctgaagttgcagtggcagg

SEQ ID NO: 448291 - DNA, 374 bp, Homo sapiens
ctaagtcttcccgtactcctttttccttcagataccatccttacacctcccactttctgcctacatagctcggagtgtataaataaacaaaaataaaaatgtccttccaagaggcattttttagcttagtgcttgccttatctggaggacatataaatacttttcattttgaagtatttgagtacctactgtgggccacacttaatgccagattttgggtatatagtsaaagatcactgagttgttttgctttctatcaagccttaacccttggtcaacttttaagggataataaattctcatcttttaataggattggaataatctacctcagtttcttcttttttttaaaaaacactgggtgtggtggtgag

SEQ ID NO: 448292 - DNA, 568 bp, Homo sapiens
tcttcattgagacttaaatttaagactcaaaactatgaaagtacccaaagaaaacctaaggraaatacttcatgacattgtactagcaagaattttttgcatatgactataaaagcacaggcaataaaataaaaaatagacaaatgtgatcacatcaaactacaaagcttctgcatagcaaaagaaacaacagagtgaagacattgtgcagaatgacagaaaatatttgcaagctacatgtctgacaaggagttaatatcaataatacataagggactcaaatcagtagcaattgtatagtggttactagagcctaggacagttgggggagtcaagaatggggagataatagtcaataggtaccaagatacaattagataggaagaataacctatgatgttctattgcacagtagcgtgactatagataataatatattgtatatttcaaaacagctacaagataatttaaatattgactacaaataaataataaatgtttgcaatgatgaataatgctgattacactaatttgatcattgcacaatgtgtacatgtatagaaacatc

SEQ ID NO: 448293 - DNA, 568 bp, Homo sapiens
tcttcattgagacttaaatttaagactcaaaactatgaaagtacccaaagaaaacctaagggaaatacttcatgacattgtactagcaagaattttttgcatatgactataaaagcacaggcaataaaataaaaaatagacaaatgtgatcacatcaaactacaaagcttctgcatagcaaaagaaacaacagagtgaagacattgtgcagaatgacagaaaatatttgcaagctacatgtctgacaaggagttaatatcaataatacataagggactcaaatcagtagcaattgtatagtggttactagagcctaggacagttgggggagtcaagaatggggagataatagtcaataggtaccaagatacaattagataggaagaataacctatgatgttctattgcacagtagcgtgactatagataataatatattgtatatttcaaaacagctacaagataatttaaatattgactacaaataaataataaatgtttgcaatgatgaataatgctgrttacactaatttgatcattgcacaatgtgtacatgtatagaaacatc

SEQ ID NO: 448294 - DNA, 589 bp, Homo sapiens
ttgtatagtggttactagagcctaggacagttgggggagtcaagaatggggagataatagtcaataggtaccaagatacaattagataggaagaataacctatgatgttctattgcacagtagcgtgactatagataataatatattgtatatttcaaaacagctacaagataatttaaatattgactacaaataaataataaatgtttgcaatgatgaataatgctgattacactaatttgatcattgcacaatgtgtacatgtatagaaacatcacaatataaatatgtacaattgttatgtgacaattttaaaaatgacaataaaataatttaaaactctcttgcaaagttttttcttcaacttgtrttcagaatattaatctatctcttttttgtgttgaaaataacatcttctcattccactcttcctctaggcctaaaagcttactcaagctcacttattataaaatagccattccttaaagttgaaagtaaaataaacagctaagagcaaagggatagacagtgaagaaaactaattaatgtttatgattaggatctaagtcttcctgaaatgtttaatgga

SEQ ID NO: 448295 - DNA, 513 bp, Homo sapiens
gaacaatggtagcctataagcagtagaagagtagagcagcacctaaggaagccaagtggagttcctgaagtctatctctgcagtggccattaggcatcaacaaagaagggaaagggttgtattagtccattctcacacttctataaagaactaactgagactggstaatttatttatttttttaaaaagctgtgtagctgactcacagttctgcaggcttaacaaaaagcatggctaaggaggcctcagaaaacttgtaatcatggcagaagaggaaaaggaagcaaacacatcttacaagtggcaggagaaacagtgagaggggggaagtgccacacttttaaaccatcggatctcatgagaactcactatcatgagaacagcatggaggaaactgtgtccccagtccgatcacctccaccacagccctccctcaacacatgggtattacaattcagggtgaagtttaagtgggaatacatagccaaaccatatcatattacccctggccca

SEQ ID NO: 448296 - DNA, 491 bp, Homo sapiens
gtgaaagaggaagcaaccttaaatttactgagacttaatttctaatccttcagaaaagtgttgactgggtagtcacctctaaaactatggttttttcaagccttcgtagtcttctcattgaaacaagactggtctttctattggttccttttaawagtttatatattttatttgctcacatattgttctcctggtttcttttatctctttgaggtctttgtccatgctttccttcagctctttaaactctgtgtcgtactaacaatgtctgtgcttccacaggggcagttttttaaatttcttctttgaatgggatatattttgttattcctttgcatgcttcatatattttgtttgtaacttggatgtcgaatattttaatatggttctgaaattcagattgttctcttcagccttgttttttgatttgtctgttgtgggctgtagctatttgcttcgtgacttttccaaacagtttttaaaaaactgtg

SEQ ID NO: 448297 - DNA, 569 bp, Homo sapiens
atgttaggtgaaataaagacaaatgcctgagtaagtaatttttggctagcaccaggctggttagaacagataaatacaattatttgtccttgaggtctcctctcctctctttgaaaccagataccagagtttacactgggaacattggctgccatcttcaagaccatcatcaaactgtcaagaagaacaagggaaaataaaagtgccacatagctttcttatcatttttatgttgcctttttatttattaagcatttacttgttggcggtaatcctttgtttttcagaattccgataaarttgattctgatcatttttgcttgatttttttgaagtttctgtggagtgatgggccattgaagctgcccactctaccacttttgctggcatcctctaagctaatagttattcagcaatagatacataatgttctgactcaaactaaaattaagttgcatgtattaggcatctcttatgtgtttcttgattctctcagcgctgccatcttccctacctgcttcacttccctccttactcctaagacttctatcttcggtattgctacaata

SEQ ID NO: 448298 - DNA, 586 bp, Homo sapiens
aaatacaatattatttatttaaataagacagtgtgtcatttaaataaaattgatattgaaaaacagtataattgttttacaaaagtaaagcatacatttacctgtttacaagaatgaaattgcttttgagctatagtggtagcactattagatacaaaagaaagcgctttgcaaattaaaatgcattataaagttgaagcatattattactcaggaggttgattgtacatgtacccagaattaagcccatcaaattttgctttagagtccatgctatagatcccaaatattaatgataattagcaatatcgtctataacaaaaacattggatatttcaggagtttatcccccatgaagatccaaacatatcttttttattgaaatgtcttgagtgtcaaagtaagaatttaatgtatttaggtartaggttattactatttataaacagtcaccaaatattaaatacatggaacaacttaaataaatatattagttttacaatatttgtatttcctttgtaactctcttcccatttctgcttctttcaaagtgtatgaatacatatactgacagtttatttcagaa

SEQ ID NO: 448299 - DNA, 547 bp, Homo sapiens
ccaaagtgacttacgaagagtcaggatgtcctcttggtaaagccagtccatgtttatcttcctgtctttatcctttcgtgagacatgagggcacaagtctgtaagcgctgatccaaactgctttatttaagctcacgccttaatcttataartgccataaataagcacacagagctggaggtttatttcagagaattactacctaataaatactaccccagatatggttatgtaatgctattagaaaacaggcactgaaacttgagtttaggccatcttacaaacggacctcgtggcatctgtaataaactactctaaataagatctagtgatttatatcttattctgaaattcacttcaagaaaaattattcttatgaggctgctagtaaatctctcaacactttttaaatttactaaacagttctttttattttcagtcagtgttctaagcatttaccatgccatttatgtcaataagagctgaattaaaaattaacagtttgatcttagtttatggagactatattttcttctctgactatgct

SEQ ID NO: 448300 - DNA, 568 bp, Homo sapiens
ctggcttatttttaattataaacagtgttatccttgttgtttccacattcattaaatgtatattataaaattgygggataacttattttttgttactaattgtaattcccaataaaattgaaggaaaacctaacaatgttcattcatcacttggaatttgaatatcctggccatcatatgcagtgtttaacatgtaaactgccacctagaattgagtctggctcatagtttagcaagacttttaaagggtttgatacaccgtcaattgttcttgtttgctaaataggtttgtgaagcaacagaatctgatctgtgtttcctgtgtctcaataaaagatgctagaaatatgccactttagaaataagttatttgcttgaaattgttctcctgaccatcacaaacatttctatagttcctttcctgattcatttatcggttctaaccttctctttcactgtactttcatgtgattctctgatcaacatgatatcttcctccctccttccctcctttcctatgtatctttcttttcctcattccattccgcatagtaacacttaatatagc

SEQ ID NO: 448301 - DNA, 614 bp, Homo sapiens
tgtatgaataaaccagattttgtttattcatcctttgatggatattcggattgtctctatattttggaaattatgaataatactacaaacattcttgtgtaagttttttctgtgacatatatttttatgtatcttgggcatgtaattaatagttgctaggtcatatagttactctatgtttaattgtttgaggacaagcctaactgttttccaaagtggttgcaccatttcacattcccaccagcagtgtatgacaattttaatgttttcacaccctcatcaaaccttgttattatatgccttttcaattctagccatcctagtgggtatgaaatggcatctcattgtgttattttcatttacttgataatttatgatgttgagcatcttttcatctgcttattggccatttgtttttcttctttggggaaatatttattcggatwctttgtctttaaaaaaatggattgtcttttcattgttatacatgttctttatgcattctaaatacaaatcatcagatatgtgatttgaaaatattttctcccaatctgtgattttgcctttcactttctgtatgttgccctttgaaacacaaagttcaattattttat

SEQ ID NO: 448302 - DNA, 531 bp, Homo sapiens
gggcatcttgtctcattccagttctcagagggaatgcttttaactttcccctttcagtatgatgtgggctgtgggtttgtcatacatggcttttattattttgaggtatgtttcatctatgcctagtttgttgaggattttttatcataacaggatgctggattttatctaatgatttttctgcatctattgagatgatcatatggtttttaattccatttatttgataaatgacatttattgatgtgcatatgytgaacctttcatctctggaatgaaactggcatgatcatgatgaattatttttttgataggttgtggaatttagttttctggtattttgcttaggatttctgcatctaacgttcatcagatatattggtctgtagttttggagtgatactggcattgtagtatgagctagggagcattctctctcaatctgatggaataatttcagtagaatttgtatcaattctctgaatgtctgacagaatttggctatttgtttgttggcagtgttttttttaa

SEQ ID NO: 448303 - DNA, 373 bp, Homo sapiens
tcttcaatgaatttcatatccaggggaggggatatgtagatacacccagacatacaataaattgaaatagattttgaagagttaaaaacagattttgaagagctaagaataactttggagcttattaaattacatcyttcattttacagattaataagtaaacaacaaaaagtcagagtttggtttagttctaagtagcagaatcagaactctagtttttagtgtattttcacaagcttaactgaaaatatgatattaatgtcatatttttacatcaattcaatataatttagttacacatgagtggaaaaattatatgacttttctttataacttctcttattgaagtatgtttatatttacttaattttta

SEQ ID NO: 448304 - DNA, 581 bp, Homo sapiens
aataaataaataacctgatttaaaatgagcaaagggccaggcgcagtggctcacgcctgtaatccagcactttgggaggccaacgcaggcagatcacaaggtcaggagatcgagaccatcctggctaacatggtgaaacccagtctctaccaaataaataaataaatacatacataaaataaaataaaataaaaattatccgggcgtggtggcgggcgcctgtagtcccagctatttgggaggctgaggcaggagaatggtgtgaacccgggagatggagcttgcagtgagccgagatcgcgcccctacactccagcctaggcgacacagagagactccgtctcaaaaagaaaaaaagagcaaaggacatgaataaacttttttttccagagaaaacatacaaagggccaacacaggtatatgaaaatgttctcaacatgastaatattcagaaaaatgcagattgaatgggatagatagatatcacctcaaatttgttaggatagctattgtttaaaataagaaagaaagataagtattggtgagaatgtgaaggaaagagaaccttacacattattagg

SEQ ID NO: 448305 - DNA, 567 bp, Homo sapiens
acatacattctgttttaaaatactaaaaagaagaaagctgggcgtggtggctcacgcctgtaatcccagcacttcgggaggctgaggtgggaggatcacaaggtaaggggttcaagaccagcctgatcaacatggtgaaaccctgtgtctactaaaaatacaaaaattagccaggcatggtggtgcacacctgtaatcccagctactcaggaggctgaggcaggagaactgcttgaacccaggaagcagaggttgcagtgaaccgagactgcaccactgcactccagcctgggcaacagagtgagactctgcctcagaaaaaaaaaaaaaaaaaaaaaaaagaagaaggaaaaaagaaataagttggttgtaatacctcctacttaggattaactttattyttaggttgtacattctaattacatgaaggcttcaaagatgaatccatcacttcttatcttattttgtattggcagacatattcaactcctaggactatttccttctcacatcaattgaactaaatcaattaagtcatccttacctaacctaattaatgtgatagca

SEQ ID NO: 448306 - DNA, 644 bp, Homo sapiens
tctcattgtgtagattttccagatcatataaatatttcttaagccacataaaattcagtgcatgagattaggttctaaagcatatcgaatatgtataagccatcaaccaacttttaaaatagcttacttattttaaaaagagtttatactasaatcagactattgaagaatgaaaatactgcatcacagagagcatataattgaattaaatttgtttcctaggttgtatgatacccagtgtaaacgttatgctgatcaagaacaacagaaatcaatgttggatagtattatcttgggaagtatactagaaccatggagacatagattagcctaaaaggtcaatataattcagacactattgaaaagatatttaacaacatgtctgtcctgtattagtggtgagcagggactttgaggacagtaaatagtcaagtttctattcaataatttgtctttagttacttgtccatccttgggcaagtcgcctagcactttacagtccacttcctctcctctaaatgtgaggagtaacttacaaatattttaagttctaatattttctgctttttaaaatagaatttatttttatagatattttaggttcaaagcaagattgaatagaaagtataaggagttcccatata

SEQ ID NO: 448307 - DNA, 644 bp, Homo sapiens
tctcattgtgtagattttccagatcatataaatatttcttaagccacataaaattcagtgcatgagattaggttctaaagcatatcgaatatgtataagccatcaaccaacttttaaaatagcttacttattttaaaaagagtttatactacaatcagactattgaagaatgaaaatactgcatcacagagagcatataattgaattaaatttgtttcctagrttgtatgatacccagtgtaaacgttatgctgatcaagaacaacagaaatcaatgttggatagtattatcttgggaagtatactagaaccatggagacatagattagcctaaaaggtcaatataattcagacactattgaaaagatatttaacaacatgtctgtcctgtattagtggtgagcagggactttgaggacagtaaatagtcaagtttctattcaataatttgtctttagttacttgtccatccttgggcaagtcgcctagcactttacagtccacttcctctcctctaaatgtgaggagtaacttacaaatattttaagttctaatattttctgctttttaaaatagaatttatttttatagatattttaggttcaaagcaagattgaatagaaagtataaggagttcccatata

SEQ ID NO: 448308 - DNA, 644 bp, Homo sapiens
tctcattgtgtagattttccagatcatataaatatttcttaagccacataaaattcagtgcatgagattaggttctaaagcatatcgaatatgtataagccatcaaccaacttttaaaatagcttacttattttaaaaagagtttatactacaatcagactattgaagaatgaaaatactgcatcacagagagcatataattgaattaaatttgtttcctaggttgtatgatacccagtgtaaacgttatgctgatcaagaacaacagaaatcaatgttggatagtattatcttgggaagtatactagaaccatggagacatagattagcctaaaaggtcaatataattcagacactattgaaaagatatttaacaacatgtctgtcctgtattagtggtgagcagggactttgaggacagtaaatagtmaagtttctattcaataatttgtctttagttacttgtccatccttgggcaagtcgcctagcactttacagtccacttcctctcctctaaatgtgaggagtaacttacaaatattttaagttctaatattttctgctttttaaaatagaatttatttttatagatattttaggttcaaagcaagattgaatagaaagtataaggagttcccatata

SEQ ID NO: 448309 - DNA, 572 bp, Homo sapiens
taatgtagaaaaaaattagaaaacataaaatatgttcctgcattaaaaatgtatgtaataaaaatctcaaacacataaaaaattgggagaatttaaattaactcacatttttctactcctatcttttaaaattacaaaaaaattaacaagcaattttgtttaattcttttcagaactactgattcacttattytaaatttcaaagaacgttgaaacttagagaaaattactagagtgggaaaaagagggagaatactcgttttatgctgagtaaaataaacaacacactctctttgaggactaagttcctctgtgatagtgtgctagagatgatgataactcccttatattactaagttactgtgtatgctatactgagctaaatgaaattttaccaacctgagatagtctgtgtctctttgcataactatactgagaataactttgccacatggcgccataacttacatgagctccttcaaaagcaaaatctgagacagccttttacaagtcactcctagacttaacctattctaagttcattccatgtgcccctgaaattgaaatggtaa

SEQ ID NO: 448310 - DNA, 610 bp, Homo sapiens
cttgtagtttttacaatggagtctttcccgttgcttctcttggcataatttgcttcatatgcctggaactcagtactttaaataattcctttctcttggtatctgcctttcatccactgaagtgtctccacatcaatcaaaacagaagattcttaagcatctarccttactaattgctagccttacctaatggactcttgacatatgaccttctttcctttgtatatgcttctatttaatgattgtccacggtattgaaattttacatgtatttacatgtttttctcctcctactacatctctaagctccttgaggacaaaaattatttccaatttatcttttgtctctccagaaaaaaaaaagaaattactttacccagaacgtatattcagaaaatatttgactacattaatttagaaaatgttcatcagaaaaatgcagaagggaaagaaaaggaatattagaagccctgttaaaacagaatctaaaagaaaggtaaactcagttcgttctttaggtttctcttagtgtaattttaatgctgatgccagggtttttcattttattctcttttaaagaaattcagaaaattaaattcacaccagtgat

SEQ ID NO: 448311 - DNA, 557 bp, Homo sapiens
tatttgcttaatgaaatatgtttggataattgtgacaagtagatcttaatggcacaggggtttccctgggaagctgaatctgacacggagattgasgtaaatggaatgtattgaagagtgctctcaggatcaatacatgaggatgagaaagaaacagaggtgagcagagaaaatgttgaactgaagttcaggttcaatgaaggtctgagctaattctctggtgattctggatcttaatcctttacagttggactttacgccaacctattcagcagtgttcagttggggaatgtcctaggaagagatgggtgactttcttgaggtgactctttagctgaggtcatggagaggaattaactgagagctgttagctgccagtattctctgttagatagaaaactgaggacttgggttctgcaggccaaccataggcaactcatgacatagtccactatagtgcacctttatttcatacaactttagaagtctcagcagttactgtatcacaatctaattctccctctgctgaattctgttttcttgagtttcccagagtc

SEQ ID NO: 448312 - DNA, 499 bp, Homo sapiens
catttttttccaatagcatrtgctgactttgtgtctgtcacatattggtaattcttgcactatttcaaacctttttattattattatcatatctgttatagtgatctgtgatcaataatttttgatattactactgtaattgttttagggtgccacaaactgtgccaatataagacagcgaacctaatgaataaatatgtttgctctgactactccatcgactggcccttctcccatttctcttcctttcctcaggcctcactattctctaagacacacaataataagattaggcaaattaataaacttataatggcttctaagtattcaagtggagtcacaagtctctcatattgaatcaaaaatgaaaaatgattaagctcagtgaggaggcatgttgaaagccaagataggctgaaaactaggcctcttgtgccatacaataagccaggttgtgaatgcaaagaaaaagttcttgaagaaaattaaaagtgctacc

SEQ ID NO: 448313 - DNA, 585 bp, Homo sapiens
gcacagtcacagattttaaccmgcacaacaatttctttatctagaaaaatgtaattgcttttgacctaccttgagctttctcaatgacagcacacactccaacatacactcataatctaatttaaactgtattctgatgcaataatttaaactttaatttctatttgtcctagagaaaattctcagtcctccgtgaggaagcacgatccctgcttctttgttcaagaaggtgcctatatgtttgaaagaaggaaggtggaaggttttgggcataatgacctccatcttctgggatgctatcttttttccatgtgaaagctatttgtcctctaaatctctcttgtctaaaacatgagcatatggtgctctttgctccctggcttagtgtccatctcttgttcctgccaatcctatgttccctctggggtctgggtaccattttggcacagctctgaaagtctgctctgcaggcacattatagaaccagctttctaaggcaaactccttaggcacagtgtcagcaatatctggatcatgtcattggtacacaagaaggaaaggcaaaattaaaacctcaaaaactgt

SEQ ID NO: 448314 - DNA, 585 bp, Homo sapiens
gcacagtcacagattttaacccgcacaacaatttctttatctagaaaawtgtaattgcttttgacctaccttgagctttctcaatgacagcacacactccaacatacactcataatctaatttaaactgtattctgatgcaataatttaaactttaatttctatttgtcctagagaaaattctcagtcctccgtgaggaagcacgatccctgcttctttgttcaagaaggtgcctatatgtttgaaagaaggaaggtggaaggttttgggcataatgacctccatcttctgggatgctatcttttttccatgtgaaagctatttgtcctctaaatctctcttgtctaaaacatgagcatatggtgctctttgctccctggcttagtgtccatctcttgttcctgccaatcctatgttccctctggggtctgggtaccattttggcacagctctgaaagtctgctctgcaggcacattatagaaccagctttctaaggcaaactccttaggcacagtgtcagcaatatctggatcatgtcattggtacacaagaaggaaaggcaaaattaaaacctcaaaaactgt

SEQ ID NO: 448315 - DNA, 550 bp, Homo sapiens
aacttcaaatattaatggtttgaattcatcaattaaaagaggatgtcagagtagataaaaaagcaagataaaattacatgttgtttacaaaatcctactttacctataaagccaaacatatactttatgattattatattagaagtagacagattcaagcagtcaaaaaaatcactaaggacatgattgactgtaatgtatattcagaatacctcattaaaaacagtacatttcatatttttctcaagctcacatggaatattcagcaagataaaccacattctgggccatgaaacatacctyaacaaatttaatttaatagaaaacatacatgtctgctctcaaagcacagtgaaattaaaatacaaatcaagaaccaagagacagctgagaaattcccaaatacctggagaataaacagcacgttataagtaacacataggtcaaagaagaaattgcaagagaaattttaaaatattttaaatgaaaatacaacttattaaaatttatggaatatagcaaaagcaatgcttagaaggtaatttatagc

SEQ ID NO: 448316 - DNA, 550 bp, Homo sapiens
aacttcaaatattaatggtttgaattcatcaattaaaagaggatgtcagagtagataaaaaagcaagataaaattacatgttgtttacaaaatcctactttacctataaagccaaacatatactttatgattattatattagaagtagacagattcaagcagtcaaaaaaatcactaaggacatgattgactgtaatgtatattcagaatacctcattaaaaacagtacatttcatatttttctcaagctcacatggaatattcagcaagataaaccacattctgggccatgaaacataccttaacaaatttaatttaatagaaaacatacatgtctgctctcaaascacagtgaaattaaaatacaaatcaagaaccaagagacagctgagaaattcccaaatacctggagaataaacagcacgttataagtaacacataggtcaaagaagaaattgcaagagaaattttaaaatattttaaatgaaaatacaacttattaaaatttatggaatatagcaaaagcaatgcttagaaggtaatttatagc

SEQ ID NO: 448317 - DNA, 357 bp, Homo sapiens
cagaacttgccatgggtgacaaagagccatgcaccatcacttgcatttggcagtagttcaaacacaggcaggtaggtgtaaaagctttacagagaaaaaagaggaaagttttagtatgacctgataggaggttgttagcaaggggaagctgtagatggactaactagaagtggggcatcctatctgattggttgggggcacacacttggctttctstggttgatccaaagttggaagtgggagtaaaaaggcgagaaaaaataacaaagctggcaggtatcaatttagtcgtgaccatttcaagtgctgcagtgctacagagtttgaggtttggctttccggtctgcagactgttgg

SEQ ID NO: 448318 - DNA, 595 bp, Homo sapiens
gaatttaacattttcttgataagctttaatcattggtagaaattacatgtgcactgatttttgcggtcctcagatggtctcaaartactatattgccagttgaaaagtcatgtagtatgtatctttttgttcctcttcatgttgtaatgtgttggttactattaatgtcctctcttctttctttcattgtttttataagcaattattttgaataataaaatcaagaataattacaaatgtataatgctttttacattttacaaagtgttttctggaacactaaaaatattcctaaagataaactgaaattttaaaaagatcattagtcttttgacctaacttaatcaagccacatttagagtacaaagaacattattgggaagagacacatgaaaatttataagaactccctctgaatttagtaatttacagtgacacataagatctcacttgaggaaggcacaagattgaacaagtaccaggtactgaataacaagccattgaacaaaccagcaggaaagaacaaatggatacttcattcctcagctgttgaacaaatatttattaacttccaatattatgcatatgccacaaa

SEQ ID NO: 448319 - DNA, 534 bp, Homo sapiens
ttctaacaactctaatgtaagaagtaggcaatatgcaagaacagataagtaatgtaagatgggaaatgtattaaaaaatgaatgaattttttaaatgctaggaaatgaaaattgcaataaaaaaagttgaaataaccttgtatacttggaataaatgtggcatggacatggtgtataattattctaaatttttatgagaatttttgcatctttgtgttttggtctgtaatttttctttcttatatttttctggctttggtgttataataatgtttggttcgtagaatgagttgggctggaagttaggctatgtttgctgtttgctgtagctgtatatgtcagaacctgcaattttgtattgagttctatttttgtcttctttgttgtcttgtatttccctagaaactccttcttaaacaatgtctgaaacattcagctctttcagctgtaatttctgttgttrtatctaaccctgatttaaatggcaggatggtgcggggtgacccaagtgttctataacctcataattaggtt

SEQ ID NO: 448320 - DNA, 534 bp, Homo sapiens
ttctaacaactctaatgtaagaagtaggcaatatgcaagaacagataagtaatgtaagatgggaaatgtattaaaaaatgaatgaattttttaaatgctaggaaatgaaaattgcaataaaaaaagttgaaataaccttgtatacttggaataaatgtggcatggacatggtgtataattattctaaatttttatgagaatttttgcatctttgtgttttggtctgtaatttttctttcttatatttttctggctttggtgttataataatgtttggttcgtagaatgagttgggctggaagttaggctatgtttgctgtttgctgtagctgtatatgtcagaacctgcaattttgtattgagttctatttttgtcttctttgttgtcttgtatttccctagaaactccttcttaaacaatgtctgaaacattcagctctttcagctgtaatttctgttgttgtmtctaaccctgatttaaatggcaggatggtgcggggtgacccaagtgttctataacctcataattaggtt

SEQ ID NO: 448321 - DNA, 606 bp, Homo sapiens
actttttggtctgattacttttataatgtcctctcatagacccttacagatcctttttcatatccttcttaattctttaaactatctcatcaatatcagcctttcccacctttccttacttcccatgataattaggayaatatattgctcatcagctaatgctctgataattacaattatctcctataattacactagagcatcatgtaattatagaccaagtatagtggaagcatataattaacacaggaaacatgctaagatttgaaggattaaagtcagttgtgtacagactattatggactagtttaaataaatattcaaaaagagtaaagactgcgtttgcagttttattttcttgtcttatgataggctttttaatttttgctgactgattgatagacatgttgtgtcttgtaatagaatttgaggtatataggcttagcgtgtgagaatttatggtaagttgaataggatttggactgttttgatgttggttgtaggtagaggtgccagagcttccaattcctctgcttacttttgtccctcctcctgtctttggatttcctataaactgctgctcagaaagattctatgtcttgtctt

SEQ ID NO: 448322 - DNA, 545 bp, Homo sapiens
tatatttactggttgaaaaaagttaaatagcaacattgtttaatttaagggaaataaacatttcactttacgcaagcatgcttatttcaagcatctatagattcactkttaagaatatatcatatgccagttgttaaacatctctttttatattaaatcagtatatttaactcttaaaagtgcagatatttcacatatagacatatactggcttatgaaaacctaaatttcaaaaagaatttcaccatttgtattagttatctattgccatgaaaaagttactcacaaactcagtagcttaaagtaacaaacatttattaactcacacttcctgtgggtttggtatctgggcacggctttgctgggctttctggctcgcgttttctcacaaagtgtcagcctggtagcagtctcattctaaggttcaactgagataggatccacttccaaggtcactcaacaggctgttggcatgattcagtccctcatgggtggttggcctggagcctcatttcctcacctgctcttggttgaaagcctccctc

SEQ ID NO: 448323 - DNA, 574 bp, Homo sapiens
ttttcctttgtcataccttctttaaaagcacttttatcttttattctagatgctttgttctcttgttttctttagaacctctgtaatattatggtctttgtaatatcacacactgaacgataaatagaaaacgtaaatcattgtagcttcacagaaatcagcaccatgtgtawgatattttcaattctggttaattttcctttcaatcacccaggcttgaaactcaatcattcataattctctttcttacccctatatatgatctgggtataaatgtaataatttgtgttcaatcatttcctacatatttacatgatatactgcaatatttacaagacatatattttttcctcctatacattactcataccagtgacttttgtaaattaaacttccaaaaaaaacccacctctgactatgaaaaactatgaagggtttttctcattggttcataatttctacagaatgaagcctagaattccaagatgacattaactatctatgggatctagctctgagatacaattttttaatttttcccaactctactgtcttatgtgtccacatacccatt

SEQ ID NO: 448324 - DNA, 308 bp, Homo sapiens
gacgccatgactccctcccacaaacctctgatctgtcttgataaaattgaaagagggagaggggagactgtagcctggaaggaatcccacctcacaacttggtcctgattgaatagaagaccccagaggttcacagagatcccaaggtggggaggatctgcccagggttcaggaggcgaatctctctcaggaagctccgtgaccccctctytagtgtcactcctgtgcctcagtgggatttggagaggatgccttagattagagggtattgttcagtgggatttggagaggatgccttagattagagg

SEQ ID NO: 448325 - DNA, 308 bp, Homo sapiens
gacgccatgactccctcccacaaacctctgatctgtcttgataaaattgaaagagggagaggggagactgtagcctggaaggaatcccacctcacaacttggtcctgattgaatagaagaccccagaggttcacagagatcccaaggtggggaggatctgcccagggttcaggaggcgaatctctctcaggaagctccgtgaccccctctctagtgtcrctcctgtgcctcagtgggatttggagaggatgccttagattagagggtattgttcagtgggatttggagaggatgccttagattagagg

SEQ ID NO: 448326 - DNA, 563 bp, Homo sapiens
acatatgtttagttaatttaccaaaatattatcagaacatatttctgtaacaccagagatgttttccatagccagcattgtcaagaaggaacctagtatcttttaattaatcacaataatatttaagtttgttgtgagatagaaagtccacctttgaaaattgaacatatggcaactatgaaacacatctatcatgaaaagaaaaaacaataacaagcttcatctagattttgagaaattataatttcctgctatttttagtaacttcttaaagttagaaatagcacaatttaaaacaaaaaagacccttaaatttgttttttagtaaaaagatttaaaatataaatatttaaaattagtaagttaaagcatattttatttttgtgtgatagatttcttaatcccaatttaattaatttgaattaaaaaatttaattaaaaaatttaagataactactataatgcaaaattattttcaactgttcatatagttaatatgattaagtaggcagctatacccttaacttwgtattactaaatattttcttttaagtaaaataatc

SEQ ID NO: 448327 - DNA, 561 bp, Homo sapiens
ctattttcttctcgtcatggaaatgcaactcccattgacatcaaggggagctttgtgctcacatggagaggagaatggtctccccaagcatcatggagaaagctgtatgttaagcttcaaagcataagtgccctctattactgcatcaccaattttaatcaactgttcttatatctacaatttggctcattgtccaaatggggaagcacctcttaatttgacaaacaagaatccctrataacagatatgaaacaaattacttataacgccaaggtcgtgccatgtagtagtacttcattagtcttcccctttccccaggaaaagctgactgtgtgttttaaatgtcaactctctgtagttcacggttttacagtgcactcttttataacacagagtgatgaagaaaaataacataaggtattaaatataaatattcagttaatagtagtttaatagtatcattcaataagccactgctcctttaagccacatgcaaagggtaacttcttatttctctatggtatttggttctttaattatttttaatgacattattgctga

SEQ ID NO: 448328 - DNA, 500 bp, Homo sapiens
tagctttccctaaggttgtcttctctctgcataccctatgtgaccacattcatgccaatggttcagttataagtgtcccaaatctacaaatagagtgcagctttttcyactacacagcagatccatgtaaacaattggccagtgaaataccccagaaagacctcaaacgaattccactcaactcctctctgcagcttctaaagaagtcagatcttatgctttcaggttatgtagccaaagcctttgtgtgtctggtcaggtggtgcctgaacaccagagctgtggtggatgctgctgtagctactaggatgaggtgtgttagaacaatcctcaaagaggcagccccgaatatctgattgggccaggggacacagagtagtgtgacagacctttccactgcctaaaccaccaaagccactgagggcccattagttaattggtgctgagcaaattttggtcattggaactgcctaaattggaactgaaacagggaccacgga

SEQ ID NO: 448329 - DNA, 500 bp, Homo sapiens
tagctttccctaaggttgtcttctctctgcataccctatgtgaccacattcatgccaatggttcagttataagtgtcccaaatctacaaatagagtgcagctttttccactacacagcagatccatgtaaacaattggccagtgaaataccccagaaagacctcaaacgaattccactcaactcctctctgcagcttctaaagaagtcagatcttatgctttcaggttatgtagccaaagcctttgtgtgtctggtcaggtggtgcctgaacaccagagctgtggtggatgctgctgtagctactaggatgaggtgtgttagaacaatcctcaaagaggcagccccgaatatctgattgggccaggggacacagagtagtgtgacagacctttccactgcctaaaccaccaaagccactgagggcccattagttaattggtgctgagcaaattttggtcattggaactgyctaaattggaactgaaacagggaccacgga

SEQ ID NO: 448330 - DNA, 588 bp, Homo sapiens
gcaaatccaactcaactgattttcaagtagtgaaaaaatatgaggtaatgacattatatctgagttctttcagtttggagaacaagaagaagaaaaaatcctacctcyttctcattgtgtgaacctcactgttgtcatttatgccttaatcatttagttatcacactgtaattagttcctaattgggtaatatttggctgaataggttcctttcttttctctctttatccaataaagaaaaaaaatgctggtgggaaatttagttattggctctttaggaagcaatttctcagtccaaaacagacacaaattcaagtcccagaaaatggtgtgcttgaaatgagaaaatctcatcgtgtagtattttctgatgacctaatattggaaattttgtatttttgatggctcagaaccacagtacccgacatacatccccagagaaatagctgtttgctacctgcagtggacgtgtgaagtgcacgtggatgtgtgcagtaaactgagtgaatgccatgttttacattttaagggccaggccctaattagagtactgtgttagttcttttcactacatagcaaaaagacatt

SEQ ID NO: 448331 - DNA, 583 bp, Homo sapiens
gaaagcaaaagacattctgtatcaatactattgcttctttttaaaaataaggattctgtattataaaattgactattgtttgcctttttgtacaggtttttctgttcagctttttctattttctacatgctaaaggataaaatttaatgtggttcacaattcaaaagaaaatgatttttaaggtgagataaatgtgtattgtgatagtagcatttataattcayctgtacaaataattactaatctaaatatgtagttcattttaatgtacttcaaaagtatgtctattgtttttgctaagatacattaaccatcttggatttgtaatgttgcataaaggctgttagttactatcaaaaaaatcagaatagaaccaaaaccacatttctgatgtctcagctttcattctattttcttttagccagatcatactgtcttcccaatctctcacttgacagcaagtgaaattgccctaggctaggaacatcacagtatgaaagtgagatgtcatgataaagacacctaattttcattgcacccatatggcatattcatttttcctagtctctttttgggttggaaa

SEQ ID NO: 448332 - DNA, 593 bp, Homo sapiens
caattaaatgtaaagctggtaatgaaaaagtagggtaaatctcttgtaaggaaattggattcacaaggaggctgataatccacaactatgagtaaataaataaaatttaaaaagaatgaatcaagcaagaagagaggaagggagggaaggaatgaaaagacaataaatgcaattatgattcaaggtgtgaatcattcagtttaaatatgccactgaaattcayaatgtagttgtaaaccttataatttacgtatgctgttttagtgcatttttggagggagagtagaactaaataatatttcaatatttttactcacatctttaccttcatgcctttttcccccctttctactttaggttaagtttctatcacattaagatatacttacttacttcacttatgtgttttgtgtgatttttaatgggaattgtagaaacattcctgcttataacatactgtaaaaccagattcataatccatcctctttccatttttttattccttgtatgctatttagatgttatgtctatacagtaaaattgtttttaaagaaataaatgatatttgtttgcatcacagacacctgataaag

SEQ ID NO: 448333 - DNA, 593 bp, Homo sapiens
caattaaatgtaaagctggtaatgaaaaagtagggtaaatctcttgtaaggaaattggattcacaaggaggctgataatccacaactatgagtaaataaataaaatttaaaaagaatgaatcaagcaagaagagaggaagggagggaaggaatgaaaagacaataaatgcaattatgattcaaggtgtgaatcattcagtttaaatatgccactgaaattcataatgtagttgtaaaccttataatttacgtatgctgttttagtgcatttttggagggagagtagaactaaataatatttcaatatttttactcacatctttaccttcatgcctttttcccccctttctactttaggttaagtttctatcacattaagatatacttacttacttcacttatgtgttttgtgtgatttttaatgggaattgtwgaaacattcctgcttataacatactgtaaaaccagattcataatccatcctctttccatttttttattccttgtatgctatttagatgttatgtctatacagtaaaattgtttttaaagaaataaatgatatttgtttgcatcacagacacctgataaag

SEQ ID NO: 448334 - DNA, 550 bp, Homo sapiens
ttagatgttatgtctatacagtaaaattgtttttaaagaaataaatgatatttgtttgcatcacagacacctgataaagatgggctgacatttgcatttaagcaaatttactgatcctagatggataaatctcagtaaaatatgaggcaaacacataacacagatagytactttttgtccatttccatttgctctatttttttctttcttctcctccatctcccctcatcttgattcaatcatcttattaaacactctgcttatcacttcttcatttctctttattattctcatataaaagatttaacctagcaccagttttcaagatgttgtttgcaataagaaactgttgcaaataactggtggttgctgtgatagcaaaatttgcatttgcacagtttacaaatgcatcttcctttgcagagatacttagctatgattgaacaaaccatttttcatagcacatttccttctaaatacataggttgtgtatatgggcaccgaccaaaggatttcaaggagaacataaagtgtttttatccatagatca

SEQ ID NO: 448335 - DNA, 315 bp, Homo sapiens
tgttctgacaagtagcagctgtgagacttgggcaagttttaattagactcttgccctaagccccagattcttcagcgatgaaacaarataactatatggacaccttccagaattgctgggaagtttgcagacaatatttgtgatgcacacagtcaatgtaaaaactgctcctgttactactagactataagcacacatcaagcattactgacaactaatatttactgtaacgcttcccattaaggtttgacttaggctccttactttcattatgtaacataaacttcaaaaaagtgattatgatctgttatttac

SEQ ID NO: 448336 - DNA, 370 bp, Homo sapiens
tcaaacagccaaacagaattaccatatgaccccagcattccatttcaaagtatatgtctgcaaattagaggaattcacaaacaaaaactcaaagaggtacttatacacggatgttcattgcagcattgttcacaatcatctaaaggtattaataaygcatgtccattaacagatgaatgaataaacaaaatatgattatgattatatatgtatatattatatttatatattatatatttatattatatattatatatataattcagccataaaaagaaataaatttctgatacatgacataatacagatgaaccttgagaacaagcattatgttaagcaaataaactgaactcaaaatggcaaatattgt

SEQ ID NO: 448337 - DNA, 593 bp, Homo sapiens
tttgttaacactcctattgcccgtttctagcccaatcttgtgttttcaaatcaggaaatgcctcaattcacttcttttaattcggctgagttttatctgagatggccrcttctcatctgcgtgaacttcagaagaaaatttaatgtattttggcatttgttatctcatctataaaatacagttaacaagacaatggttttttttagctgattaaaaaataaagtacatcctgaagattttaacggttaagaatactgtattgtatactggacattttctaagagtagatttcagatgttctctccacagaaataaaataggtaactattcaagatgatggatatgttaattggcttaactgtattcaatcaattcactctgtatacatatatcaatatgtcatgtacacaaatgcatacaaataaataaataaatgcttgtaaattatgctgcttgttgcatggtgagcatccaataaatggtagctgccacagtttgttttgttagtgtttttattattgacagatcctagttaggttttatcctttcaaatagcttattgtttcatataatttatttatggtgttaggctt

SEQ ID NO: 448338 - DNA, 539 bp, Homo sapiens
ttttttggctggacatttcaagtgtgtaaaaaatctgtaatgaatattatatttataaatactctactaataacaaaatgttgaaactatgttaattttataataaatataatttttatagtctgcaatatgatttataaaaagcaggtatcattaggtytaatttgtagatgatgagaaaataagttcagaaaggtgtgaaatctcaaggcaaatagctaatgaatagaaggaattgggactcagacagggtcttctacaacctgagtaataaaccctgttgcatttcttcttcctttaatgcaactcttcagcaaatatttccaacagaacagtatttttattttatttttttctctaaggaaccctcatattcttattcctattttctgtcttttttcttctagtttttctccttgccagcatgctattctaatgcatccaacacagagactgtacctgtcttgttttcaaaatatggcttcaccgcaacacacagattctgcattgcatatatcagctacacagccacaagatca

SEQ ID NO: 448339 - DNA, 478 bp, Homo sapiens
aaatactaaaaattaaatgctttttatctgatggttatgcattacaaaacaaaagttaatataattttctaggaaaattcaaatacaaattttaaaatccatattctgctaataaagaactggataaatttataacttgaattgtctattgtttttcwttttagaggctgggtctgaggtctggctgtattgtcccagccaggagtccggcagtgcaatcatagctcactataacctcgaactcataacctcttgggatccttctgcctcaatctcctgagcggctaggactacagaggtataccaccacacctagctaattttcaaattttttgtagagatgggctctcattatgtcaccaggctggtatcaaacttctggcctcaagcaatcttcccacctcaacccctaaattgcagggattacaggcctgaattaccacgctcagccttcaaattttctttatgagttccctct

SEQ ID NO: 448340 - DNA, 599 bp, Homo sapiens
ttgtatatgaccagtattgttttgtgaggacatacccttgagccttgcaacttttggaatttctctcttgagagaccagcagaattacttaaaatatatatactcccatcttatcattaatatacatcacaataatttgttttcattcagtatagaatattctcttcatttttagttgtcaagcagctgcatttattaactatactctgtcatctcctgtgcatagttgtacttttaattcattttaaaaaatagcttgtgttcactcaagaaatatcatcatctaacccactcctttttatcttgtttgttccttaaaattgtatattaattacattttgtctttaactaaacaccaaattagaaagagggcagttgacattgtaaaggtgatagccacttaatatatatttaaatgagatggaagttggaaatttttcagtccttttttatagtttggaaagaacattaarttgaaatatgcctatatcacccataaataagcatacttaattgtgttatggacacatagttatgttgtagatttttatgtaattgataaacagtaaagaaaagggccataaaacattgaaatagta

SEQ ID NO: 448341 - DNA, 611 bp, Homo sapiens
aaattaattattcctcttccagtgggtttttaaagtgttaccttcagaaaaaaaaaaaaaaaagcaaatgcccatrtttttaccctactctgctcctttgaaaataaaagcaatatgctgcttgcagagatagggaacttctttttagctcagtcatggtggggcaattcagaaatataaagatgctacctttgtagcattttttttatgcagtgtaacctaaagtggtgctggctacttttacctatataagaaatgagagtgcaattcaagccacgaaatgtagactgcccaggaaaatatatttaacccactgattgatctctgcttcactttgtgctctgcagactttagagtttacagttcctgtggcaaacaacactgttttaaatttaaagaataactgaattgcactgcaaacaaattgaggagcagcttaaggaataaagatttcattctggggagaatggtagtattatgacttttaattcaatgagtggtggaatgaattttggatttgttattacattttccaggatgaatttaataaatattttgaaaattatgagagctatataatttttaaaatgccatgaataacaattcttttg

SEQ ID NO: 448342 - DNA, 617 bp, Homo sapiens
aagagtaaggtgaaacatagaacacagttgacattgagttatataattttatatttcactcacataattgactacgattttgttacctaaagttttaattcaatatctaaaaacactagaaagtcattacattccttattgaattatttttttgatctgaaagacattggagacatactaaaggcttcttagtttgaaaagaatatcagcattccgcaggggctgttgatatccttcattagctataacatagttaaaaygtagcacctgcaataaatcaaagtattgggagattgtattaaaacttatgacagttacagagtttggtgggtgccggttgttttttcctccccaggattctagggtcatcactcataatagtggaaagtatagcataaaggggaaaaaaattcagaatgttcctaaaaataaaatagaaagccctcaggagccctttcagaacaacaataaaaagtattgctagctgtaaaatttgtaagcaggttccatcctgtcggcacagaaacaatgaagatgaattacattctaggagaaacattgagactgtctagtaacatagtggcaaatctactacagtgaggacaaagcaaaactat

SEQ ID NO: 448343 - DNA, 419 bp, Homo sapiens
caaaaaagtgagtaatcattggaggtaygtgagaggaaaagttttaagtaatgaatatgtgtttaaacaaaataaaactgtttgctcttgaggggatgggaatatggttcagatgggaagtaattttaaggatattctaaaaggaagacttttagatataaaaaaaatcgctaaactttgagtttatatgaaatagtgcatttcagccccttttttcacatctagtatctgttctgtttttaaacaatttttttatatcaatagtttttggggtacaagtggtttttggttacgtggatgattgtatagtggtgaggtctgagattttagtgcacccatcacccaagcagtatacattgtacccaggaaaactacattctgtatctattttgatgttgcctgtggtttgctgtctctgg

SEQ ID NO: 448344 - DNA, 639 bp, Homo sapiens
ttcaacttttctatgcttattttatacaatttttttttcatagttgtaaaatgtaatacaatgcttctgtttgttaaacaatgcatttctgtttgactttgagtctcagatacttatgtacactcttctggagatagaactatttgctgctgtatttttatctaactgtctccagcaaccagtaaagagaraattgtaaatatcgcatgcttggaaaaattccacctggcactagtcagtcactaggtggctaaatattgtgaatgaaaacaaccggtaagaaggaaaatcctcttattagaatctaacagcacattagagctccacattaatgtgaaaataaaaatttgcttttaggagctttgataatattttaaaggcagcaaaactcttccttttttctacttctctcttatcactttattcgtaaccacatgctttataagcttggttgaagagggttgtttttctttttctctctctttttttaactttacccaaagaggagttggaaacaataagattaaatacagactccctctgattttccaggaaatttactctgcaactggaagtttctttgatatatttaaagagagatattctttcaatcacttttaaaaggcagaaataaaagtt

SEQ ID NO: 448345 - DNA, 611 bp, Homo sapiens
aatccctgcagcaccttcatggaagtcttgtattttaaaggatagtttgaaacccactctctaaataaatctgcctttttaggtatttgacaaaatcatcagcttctataaatatactttcttttccaacatctatctttgatgaacaaaatctgatttcttcaaatcttttctatataccctctctgcaggttcayaattcttgttctacaattctaatagccttcatttgtctttctcactagtattttcttttttctttgtcggtgtttttcactccaaaaaaaatgaagggtttttaaacgtctgtcattatatcaacaacattaatgtagcttttacacaaaaggcaagtgaaacaaagtgcaaaaacaaagatgatacagtaggaccatcacaacaactgcatcagattcagagtaaacaaatgactacttcttaaaaggaagaagacatcttgtagttacagtaagctgaattacttaactattgaataaatatatgctacatccttactagatatgataaagctttttgcatgaattaatatcttatctaattattacaacattcttatgatgacagtactgtcattatgtaccatttacaca

SEQ ID NO: 448346 - DNA, 620 bp, Homo sapiens
cttccttttgcatctgagagaataccttaggggtcctgctatataacaatcctactccactatcctgccatctgctccccttcacgagacaaaaaaggtagatctattggtgaatattgtagacaaaaccaggtgtttttgaactgtccaagagaaacgttagagagcattccccttaaccccattatttccattaggaaaaatgggttagagagataaagtgacttgctaaaggtcacaagttacttcgacctaggatgaaattagagcttctaattccaaaacaaggccacatgctgctgccagttattgatagagaatattaattttagatgaataatggtaattacaacaagcatgaccaaaataaaataaaactatatgtgccaattacaatagcctaaagtgaaaatgcagccattggccattctatgtaataaaacatttgaaaaggtagaataggcactgtgagagtggcacagaaaagctaattgcaaggggaagtgtaaaagaaagtttagtttcytaagcaagcagagcaattaattttataaacacagaaagacatcatctataatctggaaatattcaaaacatgtagattaatataattcaccaag

SEQ ID NO: 448347 - DNA, 547 bp, Homo sapiens
gcaggactaccaaagaggcaacatacagaatcctaccttcagtaccctctctccattttcatttaatcattctgtagcctatctcctaaataaacatagaagttaaataaatacattgtgcttcaggtaaagtctcatagctttcttgccaaggaactygttgttcctaagttctgagacagagcaagtatgaatggtctactcatttattgccactaaagtgtaaccctcaaggggatactctgtcttgttcctagttgtattccttatacctagcagagtaactgaaacaaccagaggatcaataaagatttgcagaaaaataaaccttctgctaattcatttgggttgatcagtttcaataatttttctcattaagtcataaaacattttgggccattttatattacttaaaaatttatttcaccaaatcctcagagaagttttgatcacttatatgataattccttaatgcacgtggataggcccaatgagaaatttcagcaagtgttaattcaaataaagagatgtattgtaaccatttact

SEQ ID NO: 448348 - DNA, 547 bp, Homo sapiens
gcaggactaccaaagaggcaacatacagaatcctaccttcagtaccctctctccattttcatttaatcattctgtagcctatctcctaaataaacatagaagttaaataaatacattgtgcttcaggtaaagtctcatagctttcttgccaaggaacttgttgttcctaagttctgagacagagcaagtatgaatggtctactcatttattgccactaaagtgtaaccctcaaggggatactctgtcttgttcctagttgtattccttatacctagcagagtaactgaaacaaccagaggatcaataaagatttgcagaaaaataaaccttctgctaattcatttgggttgatcagtttcaataatttttctcattaagtcataaaacattttgggccattttataytacttaaaaatttatttcaccaaatcctcagagaagttttgatcacttatatgataattccttaatgcacgtggataggcccaatgagaaatttcagcaagtgttaattcaaataaagagatgtattgtaaccatttact

SEQ ID NO: 448349 - DNA, 620 bp, Homo sapiens
ataaacaagaagtgcagaggacagaggaacactcaaactacaccagggagatgcaatctgcgaaatccagagagaggaagatgctacaggatacacagcctgatttcttcaacaaattataagtcaaagaatgagatgggtgaggtataggttaaaagctatttaagacacaagtctatcattcaaaatgcatacactttatttgaattctaattaaaataaacatattgccaaaaatacgacattatgagagaaatgcaaatttgaatactttctggatatttcacagtattaagatgttttcaaagatacgataatgataatgtgtttatattaaaacaaagaatccttttaatttagtgctacaatatatattaatttatatgaatgtgaaatttgtttaaacatagtaggaatgaggaggaaaataagtgaggtgtagataaaacaagattggccatgagttaataatcrttaaacgtgaatgacgagtacataagggctcttcatataattttgtttatttttgcatatgtttaaaagtttccatactaaaagtttaagagtaaggaataacttctgatctcaaaacaatgcaacaaatgaatatgtaaaaaata

SEQ ID NO: 448350 - DNA, 402 bp, Homo sapiens
ccacattttctccaaaaaaaaaaaaaaaattctgggcacaggaaatatactagagaaaatatatgaataaagggtaaaaaaatcaaaaatttctcatttggctaattttttctaatgactttccgtaagaccacagaataacatacaaataaaacagtaagatggcttcagaaaaattccaagtatagtacaggatctgcaaacacaaatttttaaaaatgcagtctctttatgacagttaaaattttaacaaagccacacactaaaaattctacaaatagttatctayaattttcactaaatggcttattttaaacaaatagttgctattctaaggtgaattaattaggaactatatttgttgtctttggatgtacaactgcagtcaagtcatgagtaaag

SEQ ID NO: 448351 - DNA, 526 bp, Homo sapiens
ctgtttaaactttaactggtataagtattaatataataatataatggaaacaaaatatctttcatgcttatttagtagcaagttaacttttagggaaattagctaaagagccttcatctcaattattattcatctaattaaaaattctaaaacgattactataattctgcttaaaaccaagcatgaaactttggtagtaaaaaacacaattgttgaatgtcttaagaagaaaatgacaaagtgaagattattccataattaaagctaacctttaattactgggcttttaaaatcaagttattctgaagaggtaaaataaatcatcaaaagggtcttggcagtgcatcactgcatgtaatactcttctacatgttattggtggtggctcaatttttttttctctttattaactcaagagacataatagaagcagggaatgcttaggcagaataccaaatacacagataaayaggtaccatgcatctaaaggagttttcccataatttataaacaataagaagacaat

SEQ ID NO: 448352 - DNA, 602 bp, Homo sapiens
ctattatggtgattgatttacatagtgcagaacattccataggtatcatattgctatacaatgtacatatcccatacaactataaatctaaaaataactagcaaaaggagatgtttaagtggaaagttaaaagtgctaacagggtcaactggtacagtcattgtgtggatggtggtttcactaccttagagamaaatgggcaagagccagtggagctgggcactcatgatgaaatcggtaataaatcagacacagagtataagcatgaatcaaattactgtactcaaaataagatctaggcacagacttgaaaggaaaatatgtcatttccttccctttcctaccatctcgctcccatccatcttctgtctctcttacttgatgcctgtctttctcattcccatttctaagctccccttattctagaattttctaaacaagtaagatttatatcctaatcctgagatgcttattcttattaaatatagtatgatgtgttaagaccagatctcagctctctaaagaatcaggcttgtaatgatgaataacacctgtatctcttaagaagtaaaagcccattcacaattcagaaatgaacagac

SEQ ID NO: 448353 - DNA, 602 bp, Homo sapiens
ctattatggtgattgatttacatagtgcagaacattccataggtatcatattgctatacaatgtacatatcccatacaactataaatctaaaaataactagcaaaaggagatgtttaagtggaaagttaaaagtgctaacagggtcaactggtacagtcattgtgtggatggtggtttcactaccttagagaaaaatgggcaagagccagtggagctgggcactcatgatgaaatcrgtaataaatcagacacagagtataagcatgaatcaaattactgtactcaaaataagatctaggcacagacttgaaaggaaaatatgtcatttccttccctttcctaccatctcgctcccatccatcttctgtctctcttacttgatgcctgtctttctcattcccatttctaagctccccttattctagaattttctaaacaagtaagatttatatcctaatcctgagatgcttattcttattaaatatagtatgatgtgttaagaccagatctcagctctctaaagaatcaggcttgtaatgatgaataacacctgtatctcttaagaagtaaaagcccattcacaattcagaaatgaacagac

SEQ ID NO: 448354 - DNA, 545 bp, Homo sapiens
acaataaataggaacacactgtattcctattgaaaaaaggattctagtgaggttgatgcattttaaaatcctaggttctggacacctacaatagggtcctggttcaccacacaaaagtgaatttggcaattgactcatgttggcaaatcaattagaatgaggtgttgctcaaaatcacttctgactgttgtttcttttgtgactgaggtgtctaaaatgtatctgtgctttaatggcatagaatttgggggtattagttcattgcaagtatctacttcagaataaagaggttctttgagaaaaattatgagccctttccagacatacactgctataccacctacagtgaacttcccatttcctgagcaaggatacctgtgaaattcttaaattttcaaagcattatctaatttgctacttgtacagttggtacgtaagrgacgtgcacctttatttaatcaatagctcagaagatgggcacttcaggccctgatgagcaaattcagctttaatttgactgtgacaaaccatttaccaaaagctca

SEQ ID NO: 448355 - DNA, 579 bp, Homo sapiens
gatgggactaaaactataaaggagtaagtaaggcaaagattttggtttggtaggtaggctaagataaaatgattaaagcatcgggttcaagctagagagaaactgtgggaaaaaaaaggagaccacacaaagcatgactagtttttattgatgagacattctttcaattctcccttcctcctgatttttctctttgtcttgttttcctcagataaaattcctttgttgaaatctccacattttctattccatttcctctttctttaacactctactcagtattaaaactactctcaaatatggacatactcatgtctaaatcacaaacatgtagataatgcaaataaaactccatggaagctacacatataaattctgattcctcattgaaatacrtgccttgatgcaacagtgatgatagaacacctagccaagccaaactcattttactcttaagatggtagtctcaaaatcacacatggggaggtgagtataggcataaagctcacagaacccgaatataacaaggatgtattttagtgtggacctgagcaaattaaaaagaaatgttaatgagaa

SEQ ID NO: 448356 - DNA, 530 bp, Homo sapiens
aaatagacttttattataacacagagtatccacctaaacattgtccttttagcttcttcgagttaaatgtatgcacagttttacagtctataaacagatctggaataaaagttaataaatgtcaaaatttgcatttcaaaaaattcttgctgcattttagggaagatcaatctatgaacctttcaacattatgtcaaatgaaatgctaattgtacctttaggaatttcagagacagtgacaagaaactaaatgctctgttcctttgcatcagcaagtcgaggataattgtatatctactcttgtgaacttcgaagaaaaaaaaactragaaaaagggttttctattctttaactcaggagggtaaactccttcagccaccctccatcaatctaccttcaaataaagtgtgttaacatgttgacagtggacaaatcacacagtgctgcatttattcattttataataggtttgtcaaatgagcttcagttaaagagatttaagagtaagaaaaattttcagccagaaataa

SEQ ID NO: 448357 - DNA, 563 bp, Homo sapiens
ggtttctaaagatttgctgagtgaataaatatatatatctgtacctaataaaactataacatatacatacctatacttaatatatacacacacacacatatatatacacatagataaaacacatatattttagtaattttcaaaaatcaaggctcaagaccaaggaagaacggcatacaagacaaacaaactcagagtttaagagaaaaataatctggattgtgggttaatttagatgactcacaattttttgtgccccattttcctctcctgtaaataaaatagtyggattaaatgtcctctaagctgtattctatccagaaagttctgtaattttaatatccatgaggagttcaccaaaataatttagaaatgcatgaatttaaatgtgcatgttttcacatatgtctggatttataagcatagtagttaaaggggtaattaattaataacagctattggcccaaagtattctgtttttttttttcgtttgtagtagccaatggtctacatcatttaggcccacattcttacctattatactatattgcattgcccactca

SEQ ID NO: 448358 - DNA, 563 bp, Homo sapiens
ggtttctaaagatttgctgagtgaataaatatatatatctgtacctaataaaactataacatatacatacctatacttaatatatacacacacacacatatatatacacatagataaaacacatatattttagtaattttcaaaaatcaaggctcaagaccaaggaagaacggcatacaagacaaacaaactcagagtttaagagaaaaataatctggattgtgggttaatttagatgactcacaattttttgtgccccattttcctctcctgtaaataaaatagtcggattaaatgtcctctaagctgtattctatccagaaagttctgtaattttaatatccatgaggagttcaccaaaataatttagaaatgcatgaatttaaatgtgcatgttttcacatatgtctggatttataagcatagtagttaaaggggtaattaattaataacagctattggcccaaagtattctgtttttttttttcgtttgtagtagccaatggtctacatcatttaggcccacattcttacctattatamtatattgcattgcccactca

SEQ ID NO: 448359 - DNA, 611 bp, Homo sapiens
ataaacgtcactttgggaatgccaacttttaggaactcttcattttgtcttccctccctctttcactgacattttgcctcctgaccctataacaggttggccccttagcccagcctctaaaatgctgaggaatggctgactcccttaaggtcaaaacaggctctactactcaattacctctccagattcatgctttttcacaatatctgtaccaattatttctttgactttgttaatacctcagttatattttaaaaatatttaaaaagtattttcagtgagttttctctgaatatwtaatgtaccatattgccaaaatacatgtctctagaacttgaactccttcatatgaatatctcatacagagatttaaaacttcatgtctaaaactacactcatccctttgctcaacaaacctgctccactacctatattatcttcatcaatgttaaccccacctacttagtcacacatgaattttagaagctattatattgctttctttccatcatactaccacattaatttttaccacttacatatcttgagcttcccacactctactttacactagcatgccactgctcttttaattcagcttccttaatatt

SEQ ID NO: 448360 - DNA, 582 bp, Homo sapiens
cattattaatttataaaaatactaatgatttttgtatggtgattttgtatcctgcaactttattgtattcatttatcaaatatagaaggtttttggtggataatttaagtttttctagatatgagatcacatcatcaacaaagagggacaatttgacttcttcttttccaatctggatacgtttcatttccttcttttggctgattgctctgtctgggactttcagtaatatgttgagtaggagtagtgaaagtgagcagccttgtcttgttcgagatcttagagaaaaagctttcagtttcttctcattcartatgatgtaagctgtgggtttgttacaaatgtctttattatcttatgataaattccttctattcctagtttattgaaagtttttattatgaagggatattaaattttgttaaatgccttttctgtttctattgagatgatcatacagtttttgtacttcattctggtgattagatgtatcatgttgattgacctgcatttgttgaaacatccttgcatccctggtatcaacctcacttggttatggtgtattatctttttgatgtgctg

SEQ ID NO: 448361 - DNA, 582 bp, Homo sapiens
cattattaatttataaaaatactaatgatttttgtatggtgattttgtatcctgcaactttattgtattcatttatcaaatatagaaggtttttggtggataatttaagtttttctagatatgagatcacatcatcaacaaagagggacaatttgacttcttcttttccaatctggatacgtttcatttccttcttttggctgattgctctgtctgggactttcagtaatatgttgagtaggagtagtgaaagtgagcagccttgtcttgttcgagatcttagagaaaaagctttcagtttcttctcattcagtatgatgtaagctgtgggtttgttacaaatgyctttattatcttatgataaattccttctattcctagtttattgaaagtttttattatgaagggatattaaattttgttaaatgccttttctgtttctattgagatgatcatacagtttttgtacttcattctggtgattagatgtatcatgttgattgacctgcatttgttgaaacatccttgcatccctggtatcaacctcacttggttatggtgtattatctttttgatgtgctg

SEQ ID NO: 448362 - DNA, 590 bp, Homo sapiens
agatgtcttttgttagatagggcactttggctttcactttggatgcatgcagtagtataacctctgtgtaatttcttcagctataaacagtgtcagtagtgtctgtgatttcctcagttgcttagggtgagttattagtagaggctatggtgaagttttttgggggscccagtgctggcagaagtgagttaagcatgcctgtcctggggacccagggaagagtacactggcacaagtgttggtgtgtctcggagggccaattcttgggcctccaggtggcttgctcagagcaggtagtgataacagtgggccaggcacgtgagcaggttctccggtctctgggcagtgggtgtgatgtgagtgaaggtagtagcagccatggagcaacccactggaacccaggcagacaatgctggtgttgacagtggctgcaataggttggtcaggcaggtcccctggcctactcataggatgtatatccagttgtgttcatatccataggtcccaccagcctaatctcaccctctagggggtgtgtataggtgccaacagtgctggggaaagtagggtgatcctccagtacctgacaa

SEQ ID NO: 448363 - DNA, 558 bp, Homo sapiens
gactaaccaacattcactgacaagtcacctggtcagctggctagctgataattttctctgcagtagagtctttctggtgggtattaacatgaaacccagagatctgcaccctttgtacccactcgtgtgggttcatcctcatacttctttctcaaactcccatgtcttcaatcttctactgttgttccttccaaacctctgctaatcagtcaagcatctgccactgaccaggagtcaacttttatctgtaattcaggctatgttttcttcatctaaagcaaatttccaaacgcactatttactgttctttctactggggggattcattttcaccactttccttcaggtacgatgggatagkgacacagtagcactgcagtagactgacaggccactgacactggtgtcaacatatcagaccaattcactttttaaccaagactgagtttttccctctctgtcagttggtcatgtggaatgcctcccctactcacatgaagatataggtgtaaaatgaaggagaggcactgatacagcagaagtgggtagcagaggagt

SEQ ID NO: 448364 - DNA, 558 bp, Homo sapiens
gactaaccaacattcactgacaagtcacctggtcagctggctagctgataattttctctgcagtagagtctttctggtgggtattaacatgaaacccagagatctgcaccctttgtacccactcgtgtgggttcatcctcatacttctttctcaaactcccatgtcttcaatcttctactgttgttccttccaaacctctgctaatcagtcaagcatctgccactgaccaggagtcaacttttatctgtaattcaggctatgttttcttcatctaaagcaaatttccaaacgcactatttactgttctttctactggggggattcattttcaccactttccttcaggtacgatgggatagtgacacagtagcactgcagtmgactgacaggccactgacactggtgtcaacatatcagaccaattcactttttaaccaagactgagtttttccctctctgtcagttggtcatgtggaatgcctcccctactcacatgaagatataggtgtaaaatgaaggagaggcactgatacagcagaagtgggtagcagaggagt

SEQ ID NO: 448365 - DNA, 621 bp, Homo sapiens
atctattgtgaggaaaaatcagttaaaaagaaggatttcatttttggcagggwaagcaatacaactggaagtgcaatttcatcacattcctggagagattatatggtggccatttcccaatcagcaatacagaggggaatttattttctattcaaagctttcctttctaatgcatatattacaaacattctaaattaagaacaggatcctcttttgaaaccaagagagtttagaaccaatgtcttgcatcatttctcctgaaacagaacctcttctgaatgtgtatattgtactgcgagcctcgatgtctgcttgccctcatctgcacctggactgtagctactgtgaatgatgatccttcgaacactgtgatcctggggagcccttagaagtgggctcctgcttctaagtttacagcagcttctttgcactaagaatttattccctgggccatcctttattctgcatttgggcttagtctctagtaagtacatagtagttacctagtaatttagattggtgattgacttatcccaatataatatggatctgtacattgcggctgcaagtttatgggggaaaaatgaatcactgattttttttttcatttctcccaactct

SEQ ID NO: 448366 - DNA, 686 bp, Homo sapiens
ttttccaactacaaacctgtgtgaggctaggttttctttggttggatggcaaccacagctacatatcacaacagattgaatgcagatgcaaggcaagaaamcagctgtcttctaataagccagatattaaagatattcgcaaaaaataacgaagcatacttctcaataagtgtcttagttttggaaaatagttatttttcacgaaagtattatttatgttaacatacaggtggttatattgttattttaaattcaataatgatttctaaaatcccttttttatttctgatatggtagattatgtgattgatagaactcacataaacaaaaactctttggagtcctcaattattttccagagtgtaaaaaaaaggcatgagactaaaataattgagaagcactatctgaaagaaacatttaggtggcagttccctcaaggaaacacaggggcacgtttatggaaaagaatttgagacataaagcaggtgagctaaaatttcctcaccatcgggtgacaaaacgcagtttcatttcaattcattaagccaaatacgtattcactgaggtttctctttagggtcagacaatgattaaactatttaaacatttggatctccattaatcttccatcaatttcccaaatgactagtcttgtgtaacactacggtaacacagtatgtaaattc

SEQ ID NO: 448367 - DNA, 686 bp, Homo sapiens
ttttccaactacaaacctgtgtgaggctaggttttctttggttggatggcaaccacagctacatatcacaacagattgaatgcagatgcaaggcaagaaaacagctgtcttctaataagccagatattaaagatattygcaaaaaataacgaagcatacttctcaataagtgtcttagttttggaaaatagttatttttcacgaaagtattatttatgttaacatacaggtggttatattgttattttaaattcaataatgatttctaaaatcccttttttatttctgatatggtagattatgtgattgatagaactcacataaacaaaaactctttggagtcctcaattattttccagagtgtaaaaaaaaggcatgagactaaaataattgagaagcactatctgaaagaaacatttaggtggcagttccctcaaggaaacacaggggcacgtttatggaaaagaatttgagacataaagcaggtgagctaaaatttcctcaccatcgggtgacaaaacgcagtttcatttcaattcattaagccaaatacgtattcactgaggtttctctttagggtcagacaatgattaaactatttaaacatttggatctccattaatcttccatcaatttcccaaatgactagtcttgtgtaacactacggtaacacagtatgtaaattc

SEQ ID NO: 448368 - DNA, 686 bp, Homo sapiens
ttttccaactacaaacctgtgtgaggctaggttttctttggttggatggcaaccacagctacatatcacaacagattgaatgcagatgcaaggcaagaaaacagctgtcttctaataagccagatattaaagatattcgcaaaaaataacgaagcatacttctcaataagtgtcttagttttggaaaatagttatttttcacgaaagtattatttatgttaacatacaggtggttatattgttattttaaattcaataatgatttctaaaatcccttttttatttctgatatggtagattatgtgattgatagaactcacataaacaaaaactctttggagtcctcaattattttccagagtgtaaaaaaaaggcatgagactaaaataattgagaagcactatctgaaagaaacatttaggtggcagttcccwcaaggaaacacaggggcacgtttatggaaaagaatttgagacataaagcaggtgagctaaaatttcctcaccatcgggtgacaaaacgcagtttcatttcaattcattaagccaaatacgtattcactgaggtttctctttagggtcagacaatgattaaactatttaaacatttggatctccattaatcttccatcaatttcccaaatgactagtcttgtgtaacactacggtaacacagtatgtaaattc

SEQ ID NO: 448369 - DNA, 592 bp, Homo sapiens
ttaaacatatagatgcagatcttatgcagaattgctaaacagaatgtaaattatgtacagaccaagaagtttctttcttcccttctctttctggtgtcactgacgtargcacaatcagcaaccatgttgtcattacattgtgttaggaatgtgcagatcacagaaaagcatcattttaatcttctagtacacctggagtcctgtctaaatcttcaggctaaagaaagctagagtgatttggatagataaattgtaatagactgaagacaagaaaagtgcactctgcatttcctaggcagccagccagttacacagcataaccgtacttttgcacgtaaagacgtcccttcaccttcttctcttctctagataaaggatttttctactagcctccataagagagaggaaagaaaaccctaaaaggccaccatgacgccaagacttcacctttattgacttaccatttttcatctactttcacaaaagggatttatggcccactcctctttagtaagagtcaatacactttacgaacctcccattctgtctagtaaaagatttaacaggaagactgcccagccgggcaaccaat

SEQ ID NO: 448370 - DNA, 592 bp, Homo sapiens
ttaaacatatagatgcagatcttatgcagaattgctaaacagaatgtaaattatgtacagaccaagaagtttctttcttcccttctctttctggtgtcactgacgtaggcacaatcagcaaccatgttgtcattacattgtgttaggaatgtgcagatcacagaaaagcatcattttaatcttctagtacacctggagtcctgtctaaatcttcargctaaagaaagctagagtgatttggatagataaattgtaatagactgaagacaagaaaagtgcactctgcatttcctaggcagccagccagttacacagcataaccgtacttttgcacgtaaagacgtcccttcaccttcttctcttctctagataaaggatttttctactagcctccataagagagaggaaagaaaaccctaaaaggccaccatgacgccaagacttcacctttattgacttaccatttttcatctactttcacaaaagggatttatggcccactcctctttagtaagagtcaatacactttacgaacctcccattctgtctagtaaaagatttaacaggaagactgcccagccgggcaaccaat

SEQ ID NO: 448371 - DNA, 592 bp, Homo sapiens
ttaaacatatagatgcagatcttatgcagaattgctaaacagaatgtaaattatgtacagaccaagaagtttctttcttcccttctctttctggtgtcactgacgtaggcacaatcagcaaccatgttgtcattacattgtgttaggaatgtgcagatcacagaaaagcatcattttaatcttctagtacacctggagtcctgtctaaatcttcaggctaaagaaagctagagtgatttggatagataaattgtaatagactgaagacaagaaaagtgcactctgcatttcctaggcagccagccagttacacagcataaccgtacttttgcacgtaaagacgtcccttcaccttcttctcttctctagataaaggatttttctactagcctccataagagagaggaaagaaaaccctaaaaggccaccatgacgccaagacttcacctttattgacttaccatttttcatctactttcacaraagggatttatggcccactcctctttagtaagagtcaatacactttacgaacctcccattctgtctagtaaaagatttaacaggaagactgcccagccgggcaaccaat

SEQ ID NO: 448372 - DNA, 600 bp, Homo sapiens
gcgtttctatgtctgttttctcatctgtaaagagttaatgaagcaaacagtagggctggtaggaagattagatgagatagcagaatgcatgtgtttgggacctaataggcactccaaaaccaaaaaacaaaaaccacaaaacactggtgtagtcccttctgtcatgtccccctaaaatcagttgtttttattatatgacccagaaccagctctttctccatctgtaagagaaaaggggtagacctgaaatactacytaagagaggagccctcacaacttcaacatccagtatctaaggaacattggctgccagcagatttactgctccatgctcactggggaggcctaataacaaactagtttaacaacaagctaactgaggatgagccacgagaatttgaaaaatttttaaaaaatgaaggacaatatgtcaaactgacaaagcagtagtactcccaagaagagcggtgggaatttccaggaaggagagaggccccagtgggggaggtgagaagaaggcctggaaagaccctccagcctccgcagacagagcgctccaggctgcccacagccccagagagcaggagggcggaagggttg

SEQ ID NO: 448373 - DNA, 585 bp, Homo sapiens
tgatagtttagctgatgagttgagccttaaaagccaggccaaggaattttaacttttccatgagaacaataaggttattttttatttatttattttccccatgagaagaagtctcgctcttgtaccccaggctggagtgcaatggtgcgatctcggctcactgcaacctctgcctcctgggtttaagcgattctcctgcctcagcctcctaagtagctgagattacaggcgcccgcccccacgcctggctaatttttgtatttttagtagagacagggtttcaccatgttggccaggctggtctcgaattcctgacctcaggcgatccacccacctcggcctcccaaagtgctgggattacaggcgtgagccaccacacccggctgagaatagtaagtttttaagccagagagggttagatttatatcaaatatttagtgtccagtgcctcacaaagagcaascggtgattaaatatcaccttttattaatactgataacaatatgcttatatactgcctttacctggcattacagaattttcttaattcttaggtaaaaggttgaaatcaggagattggtagct

SEQ ID NO: 448374 - DNA, 608 bp, Homo sapiens
actgggtggatcacatgatatttaagaatttaaggaggatggaaaattatgcccatgtcgcatagatgggcttatgtggtactcagagattcagaatttttaacatttcctcatatctgttaactgaatttkattttcttgctcacccttgcagccagaatgtaaaaatgaaggaaatgataaaaaataaagaaaaagaagaaacttagcaaagcaagaatttaaggtaaaaagtccagcttaaaatcttaggtagcacatgtatacttaggtatacatttattttatcaggaaactttatcttaaagaataaataaccctttttgcattgtctctaaactggaaactatttcaccatatttggttcaaaaacaaccttaatacactataactttgtgctaaggccaatgaaaaagttgttaagatacaggaaaatattgcttttatcagacttagctgcagagtgtgaagaggtggggaatgggtaaaaattagagaaaagtaatggctacaaagtacctgggaaaggcattttaatccaatccaaactaaacctctttcccactggtcaatgtctggcattctttggggctgaccttagcatcgta

SEQ ID NO: 448375 - DNA, 608 bp, Homo sapiens
actgggtggatcacatgatatttaagaatttaaggaggatggaaaattatgcccatgtcgcatagatgggcttatgtggtactcagagattcagaatttttaacatttcctcatatctgttaactgaatttgattttcttgctcacccttgcagccagaatgtaaaaatgaaggaaatgataaaaaataaagaaaaagaagaaacttagcaaagcaagaatttaaggtaaaaagtccagcttaaaatcttaggtagcacatgtatacttaggtatacatttattttatcaggaaactttatcttaaagaataaataaccctttttgcattgtctctaaactggraactatttcaccatatttggttcaaaaacaaccttaatacactataactttgtgctaaggccaatgaaaaagttgttaagatacaggaaaatattgcttttatcagacttagctgcagagtgtgaagaggtggggaatgggtaaaaattagagaaaagtaatggctacaaagtacctgggaaaggcattttaatccaatccaaactaaacctctttcccactggtcaatgtctggcattctttggggctgaccttagcatcgta

SEQ ID NO: 448376 - DNA, 493 bp, Homo sapiens
ttttgcagtgttgacatctgatacatatctatatctatatctacatctatctatatctatatcgatctatctgcatgcttaggttcctgggagctgaatatacattcctaggctgtccatattggttcatgggtcccagcacaaggattgtaattgtaaacattggaaaagatgagatttgtcaggaaacaggtgaagggtaggagaaatcctgaggtgcatcagatgtgaaggtggtaggaagaggagtttcagaggcagggaggtgtcagagaggaaggaggggttccaggagaaggtagcacamtggggcaaaggaaggtgaatgttccatgaaggagaaagtgttctgcagtggtcaatactgctgagagttccatccaggaaactaaggttggaggcagtctatggaatgtgtaaatgttacgaaggtgaggagaactttgatgttattcagtatgcaatgggaagcccagaagaattgtgaactgga

SEQ ID NO: 448377 - DNA, 617 bp, Homo sapiens
aaaaaaaaaaaaaatggcccatgggcactatcagcttcaggacaggtgctactcccctacagcactcagggtgttgatgccattcgcacagggcttgggcatgggctcagaggaagggtaagctggtggtagtcagagttgagctaatgctgcccttgagccatggctgctgctgctgagttgagtcacagccctggaagragtgtggggcttacatgtactgtcgtcagaaccagcttctgcccagcactgcattctcagtcagccctggctctgggacaggtggtccccagggaagcctgaaacatcgggactgcagttctctctttgttctgaattagttcagatgcattttactgagtgtgtgtttcaggggtgttggaatatcatcagcaagcctaccagggagggtgcagacgggctccaccaggcttcctaaggaaggaagtcaggactggaagagaacatgggccccaagagtcggcactcaacttgccagccaagagaagtattccgtatctctggggtcagcttttcctgagggtttgtactctatttagaaatgtgttttagtcatgtcccaaccgagagatatgatcatcaaaaagccttgcagt

SEQ ID NO: 448378 - DNA, 617 bp, Homo sapiens
aaaaaaaaaaaaaatggcccatgggcactatcagcttcaggacaggtgctactcccctacagcactcagggtgttgatgccattcgcacagggcttgggcatgggctcagaggaagggtaagctggtggtagtcagagttgagctaatgctgcccttgagccatggctgctgctgctgagttgagtcacagccctggaaggagtgtggggcttacatgtactgtcgtcagaaccagcttctgcccagcactgcattctcagtcagccctggctctgggacaggtggtccccagggaagcctgaaacatcrggactgcagttctctctttgttctgaattagttcagatgcattttactgagtgtgtgtttcaggggtgttggaatatcatcagcaagcctaccagggagggtgcagacgggctccaccaggcttcctaaggaaggaagtcaggactggaagagaacatgggccccaagagtcggcactcaacttgccagccaagagaagtattccgtatctctggggtcagcttttcctgagggtttgtactctatttagaaatgtgttttagtcatgtcccaaccgagagatatgatcatcaaaaagccttgcagt

SEQ ID NO: 448379 - DNA, 617 bp, Homo sapiens
aaaaaaaaaaaaaatggcccatgggcactatcagcttcaggacaggtgctactcccctacagcactcagggtgttgatgccattcgcacagggcttgggcatgggctcagaggaagggtaagctggtggtagtcagagttgagctaatgctgcccttgagccatggctgctgctgctgagttgagtcacagccctggaaggagtgtggggcttacatgtactgtcgtcagaaccagcttctgcccagcactgcattctcagtcagccctggctctgggacaggtggtccccagggaagcctgaaacatcgggactgcagttctctctttgttctgaattagttcagatgcattttactgagtgtgtgtttcaggggtgttggaatatcatcagcaagcctaccagggagggtgcagacrggctccaccaggcttcctaaggaaggaagtcaggactggaagagaacatgggccccaagagtcggcactcaacttgccagccaagagaagtattccgtatctctggggtcagcttttcctgagggtttgtactctatttagaaatgtgttttagtcatgtcccaaccgagagatatgatcatcaaaaagccttgcagt

SEQ ID NO: 448380 - DNA, 467 bp, Homo sapiens
gtcaaaagcctccactccatgaccttgcctaaccatgtgcctttgagaaaatggtgtcatttctcagggtgtcagtttctttactgggaactgcagtgagtatcagaagaacattctcattttaaaagtgcacttatgagttctgattttgaatctaaaacatttctgcatactagacctcactcctgtatcaactctgtaaactttggcagccaatcactattgtcccaaattatcatctaagagaacttaaaaagtatgcctcatgtgacttgatgccatcattcatatgacaaaagtcacacacagacacacagatgatggttgtgttygttttcccattcatgcactattttcctcatccagtaaattatgactgtgtttttttaagtcatcagatttcttttttaatacagccagcattgaactgaaagctattaagaaaagtaaatgcctgagagcattag

SEQ ID NO: 448381 - DNA, 529 bp, Homo sapiens
ctaaactgtgtggtacaggcaagtgcaaaaggaattagcagtatgcggatgcacaccatggttgtactgccttgactatgctgtgttatttagaggattattcagacttgagccaaaagatgattaagagctgggcaccttggttagatgttctactggtgaatgtttttgtattatttaaawcttccagctagaagaagattggaattaccacttgtttctgatttaacttaatagtctctgcgatgtttacagggagatcagatacacacacatctgaccaaatttgatagtagtgcataaaaaatgattcataatcattttggggggaaatggggaaaaattatataaattaaggataagaaattatacaaaatttgaaaacctttcatgtagggtttaagaaaaaagcccaggatacctaaatacaaaataaattttaattaaatatttacaaactaatcactgttttgcatctcttacacctctgtcaaacactcagaaatttttgccagaatttcagttgcac

SEQ ID NO: 448382 - DNA, 489 bp, Homo sapiens
aggcaaccgtgggagaacacagaggttcaccatgttatttttacatcttaaaaaaatatgtacacctagatactaatcggatctctccaggattaggtataataagtaaggaaaatcttgaaggctgtattttatgtactttgtttaaatacctgtagaaacttttccctttaatactgaaaaatactatgacgttttcatgtattgaagttcaattgctttgtgaattcaaagtctttaatatgcatagaggctaacattggatatagctaatgagtcctgtgctattttgaaaaaaaaaaaaaaaaaacttgaggagaagagttgtaaagagtttgcatggtgagtggaggaattggaacctctacttagscaaatgagatacttcaagtataatgagtatttttctggagccaaaacaaccagcccaggtaaattttaacaaacttgaaggacctgcaaatttgtttagagtaatatgtttgaata

SEQ ID NO: 448383 - DNA, 578 bp, Homo sapiens
acatgaacacattcaaaccataaccaaaagacacaaagtgataagcagagttggtrccatgggcttgctgggctctgggttggaagatggccataaggctttgggctcctacaggggaataagactaaaagtcctgagctgggctcacttactgaaaggcttttctggggctctcatgcctacaaggagagtgaaatgattgctgttgacttgctgccctgactatatctttattaaagcttttgccctgaacaagcaggaggaaaaagccatagactcatgatcaagaactgggctagatggtcctctgactttgtactgggatttgcattatctctgctatcatagcagagcaggagctctgaaatacacacataagaacaggtagtggattgagacatgtgcatgtggtgatgggaggggcaggtgcaaatggaaaagtgttagcagggaagataagggagtaattgcttatatactaaaagacattattattatttagtaataataatggaagtaaggatacctcccaaaacaagtatatgtcaaatcagggttctctcaacaagaaagaaggg

SEQ ID NO: 448384 - DNA, 597 bp, Homo sapiens
agatgtctactatagttacttctcacaaacattattttgttggtcctagccaatctaacaagacaaaaggggagaaaagggcaygagcatttgaaaggaagaagccaaatatacttatttgttagcagtatgattatatacttagaaaccttaaaagaatttgtagatatagtaataaaactactaacagagatcagcaagattgctagactcaagagatcaacttaaaaaattagtaaccttaatatacctaagtaataataaattagaaaatgtaataggaaaagatcctaatcaaatactacaatgtatgtagaaataaatataataaaatatgttcaagattatgaaagcaaattatgaaatattatatagggccacataaatgacctgaataagtgtaaacagatatcacattatggatggaaacagttaatattataaaaatagcaattttccatcaataatttaaaaatccaatttcattcaatcaacataccaacaagaggtttttcatcagacttgacaagctgattctaaaatttctttagtagagcaaaggcttaagaataattaagacaattaagaagcatgaaa

SEQ ID NO: 448385 - DNA, 597 bp, Homo sapiens
agatgtctactatagttacttctcacaaacattattttgttggtcctagccaatctaacaagacaaaaggggagaaaagggcacgagcatttgaaaggaagaagccaaatatacttatttgttagcagtatgattatatacttagaaaccttaaaagaatttgtagatatagtaataaaactactaacagagatcagcaagattgctagactcaagagatcaacttaaaaaattagtaaccttaatatacctaagtaataataaattagaaaatgtaataggaaaagatcctaatcaaatactacaakgtatgtagaaataaatataataaaatatgttcaagattatgaaagcaaattatgaaatattatatagggccacataaatgacctgaataagtgtaaacagatatcacattatggatggaaacagttaatattataaaaatagcaattttccatcaataatttaaaaatccaatttcattcaatcaacataccaacaagaggtttttcatcagacttgacaagctgattctaaaatttctttagtagagcaaaggcttaagaataattaagacaattaagaagcatgaaa

SEQ ID NO: 448386 - DNA, 597 bp, Homo sapiens
agatgtctactatagttacttctcacaaacattattttgttggtcctagccaatctaacaagacaaaaggggagaaaagggcacgagcatttgaaaggaagaagccaaatatacttatttgttagcagtatgattatatacttagaaaccttaaaagaatttgtagatatagtaataaaactactaacagagatcagcaagattgctagactcaagagatcaacttaaaaaattagtaaccttaatatacctaagtaataataaattagaaaatgtaataggaaaagatcctaatcaaatactacaatgtatgtagaaataaatataataaaatatgttcaagattatgaaagcaaattatgaaatattatatagggccacataaatgacctgaataagtgtaaacagatatcacattatggatggaaacagttaatattataaaaatagcaattttccatcaataatttaaaaatccaatttcattcmatcaacataccaacaagaggtttttcatcagacttgacaagctgattctaaaatttctttagtagagcaaaggcttaagaataattaagacaattaagaagcatgaaa

SEQ ID NO: 448387 - DNA, 422 bp, Homo sapiens
tgttgaagccagatcaccctcacaggagaccttcaccttgagtagttgagtgttgagtagatattttcccaccatctacttatccatctatttatttggaataataactgttaaawtaatgtcagcttttcaaaagaaaggtgttatctaataaacgtagtaatgttaaaagccactcttaaataagaaatcaaagcctttgttttgattcacttatattaattaaggaaaactggcaataactcagattctttcctttctaaaatgaccctacctgggttatcagtaattatatccaattgctatttactttcccatctttccccatatatttaggtggaatttaatgacccagtgctgggctcaagaacccgaccaaagacctacttttcatagaattcagaaccaacttcagttattca

SEQ ID NO: 448388 - DNA, 590 bp, Homo sapiens
ttttcaatgtaagccattttaacttgactgagatgatatctcaatgtagttttggtttkcatttctgtgatgatcaatgatgttgagcactttttcacatgtctgtttgccatttgtatttctttttattagaaatgtctattcaaatcttttgcccattttttgatcagactattagcttttttcctatcgagttatttgagctccctatgtattctggttattaaccccttgtcagatgggtagtttgcaaatattttcttccattctgtggattgtcccttcactttgttgattgtttcctttgctgtgaagaagctttttaaatttgatgtgatcccatttgtccatttttgctttgactgcctgtgcttgtggggtgttgctcaagaaatttttgccccaaccaatgtcctggagattttccccagtattttcttgtagtagtttcatggtttgaagtcttagatttaaatcttcaatccatttttatttgatttttgtatatgtagagagataggggtctagttttattcttctacatatggatatccagttttcacagcagcatttattgaagagactgtctt

SEQ ID NO: 448389 - DNA, 477 bp, Homo sapiens
ttagtttcttctcactgctgtgaagaaatacctgagactgggtaatttataaaggaaagaggtttaattgactcacagttctgcagagctggggaggcctcaggaaacttaacaatcatggcagaagtggaaacaaacatgtccttcttcacacaatggcaggaaggagaagcgctgagcaaaggggaaaagccccttataaaaccatcagatctcgtgagaactcactcactatcacgagaacagcattagggtaaccatycccatgactcaattacttcccaccaagtccctcccatgacacatggggattatgggaactacaattcaagatgagatctgggtgggggatacagccaaaccatatcaaagcatgtatccctagggcaaaataaatggacagccagtccttaacatccaaaatcagtagaaggctttattaatcagggttcttaagagaaataaaactgataggat

SEQ ID NO: 448390 - DNA, 597 bp, Homo sapiens
aaaccttctttcaaatatttttctccaaaaactcaagcaaaagagtaaactagtcgcattaaagggcagctctattatttgcacagaaggacacgaatagacaggtcttttatcctaagttttcattaacttttgtatcaaaacgaggacgccagggataataataattattattactattgtcagtgtcactgttggttcctagcccgtgacagcattttaagagaacagcgtttagatcaaatttgttgccattagtaagaagggagagaaagacagatatttaattcatggaacctttatggaacacctcctctgtggaaggcatctgcacgataaactagagaattttaaatgatttgaaaatgcattctaagtggtgaagagtcttcctgttaaacatatttaggcagagaataaaaagaatgttctgtatttaaaatgaatgttttttggatcttgtctaagggcaagccttatgcaaactgccagcgtckcttaagggggaaaaaagggggtgaaggttgtaatttccctcccaaagacaaatgaaaatttgtttttgtttttacaacaaagtccccctttctcagcttg

SEQ ID NO: 448391 - DNA, 607 bp, Homo sapiens
ttggtgggtgggaagcggcggaaggcaagctccactagcatgtccaaccaatgcatggaaaccctgcttttgtccttgctcaccttccagtagctacctcctattcccagtacccggtcactttgacatttttaaattttacgatggctatagtactagaagacctttttatttatttatttatttgcaatttccagagaaaatcatgacaacctctccaagtccaacaaggcccaacagaaagttattttcggaaaggattacaggaagaacgattttgcgtatctcagacgaagaaatygaagagaacattattctagttgcctaaggctgctttacattcacattactcaatctcctcttacttgaaacaattttaaaaatctcactgaagctaagcgagggtatggactgcacaggagttcgaaggaacacaaggaattgggtcagtgagcatcaatctagaatttaggaaggaaaccattttattccccctaaatccacagtgaaggaagaaaaacaaacatcccagagttttaaaacacgtcccaaagattggagaatgtttcgtcttttctctatgtctgaaaagttgtcatttacagga

SEQ ID NO: 448392 - DNA, 483 bp, Homo sapiens
ctgctttacattcacattactcaatctcctcttacttgaaacaattttaaaaatctcactgaagctaagcgagggtatggactgcacaggagttcgaaggaacacaaggaattgggtcagtgagcatcaatctagaatttaggaaggaaaccattttattccccctaaatccacagtgaaggragaaaaacaaacatcccagagttttaaaacacgtcccaaagattggagaatgtttcgtcttttctctatgtctgaaaagttgtcatttacaggagggtggtacttctcaatcgcatgagattgcctcttgtttctacgctgaagcggaaagtaaaacacagctaaatttgatcccctttactctcccagccattcaaaccaccagcacattatcaaggttgaagaagttagatttagattcagagtcttgggaatgggctacaggttgagaaaattatctttccttccctctggagtcct

SEQ ID NO: 448393 - DNA, 483 bp, Homo sapiens
ctgctttacattcacattactcaatctcctcttacttgaaacaattttaaaaatctcactgaagctaagcgagggtatggactgcacaggagttcgaaggaacacaaggaattgggtcagtgagcatcaatctagaatttaggaaggaaaccattttattccccctaaatccacagtgaaggaagaaaaacaaacatcccagagttttaaaacacgtcccaaagattggagaatgtttcgtcttttctctatgtctgaaaagttgtcatttacaggagggtggtacttctcaatcgcatgagattgcctcttgtttctacgctgaagcggaaagtaaaacacagctaaatttgatcccctttactctcccagccattcaaaccaccagcacattatcaaggttgaagaagttagatttagattcagagtcttgggaatgggctacaggttgagaaaattmtctttccttccctctggagtcct

SEQ ID NO: 448394 - DNA, 507 bp, Homo sapiens
tctcattcaatatacctaattttrtgacagttaatctaaaaaagatcaagaattattattgttctttcttaactagtgtgctttgtgagttggtttttatggcatgtcatgcactctagggtttatgaattaaagttcactaggagttactctgagtgcctgcaaaactctgtccaagcttcagtgtctactccaaagctcttaattggtgtggaaagtaaaaacagcaaaaagattatcctcaaaataatgagatactgtttagtcatgtctttttactttatttggtttaagctagcaatggagtccttttttcttgcatatttttgagagagtggggaaaatgttttgttgtcagatattccatttttatacaaagagaaaaaggtttttaaaaagggtcacttaaacgtatggctcctgagggagggaaagtgaaaagatggcatttattggaagttggcaatagtttgaggacagatggctttttgctctttctgctttgcc

SEQ ID NO: 448395 - DNA, 280 bp, Homo sapiens
tttgaatttcagctacataacctgtaactctaatatttgctcttgaaattgagttttcattaaaaaaatcaggaatyttactaattatctcacttataattaattttatttaaatgtgattttctttataagttttccttcatagtaatgattatggatctcttctataacactatagccaggaaaaaaaaaaaaacccacaaaggtctccaaaccaaaactttattaagtatttgctatggtaactaccataacgtgataacaatatacctacaaaaag

SEQ ID NO: 448396 - DNA, 541 bp, Homo sapiens
ttcatgtcaaattcagaagctgaaattcattaacacaatataaaaaaggaaaccattaatagtctacagaaacagttcatatatttctgaaagaaaacactagggtgaaaactggttctttcaaaatgacattaagtgattattttaagaaatgtagtctaagaaaaacattataaaattatccacgattaagcatgattaattctctttataaaaattagtagacaaatgactgttggtgtcataacttataaggtgtaatgcaacatagtcatcatttcaatgtttctaaacataagtcctgtcatagccttaaatgttccccccaccctccatgaagatagaattactagcttttaggtggctggggcccaaggcataccaacaaggtacctcttctctcttgggggaggttctcttttgaaacagyggccctggttggtcgtgttgaagaaaatactgacactataaatagactcttctcatattctaagctaaaagatagtctccaacagcatcttaggcatactgcccaagggca

SEQ ID NO: 448397 - DNA, 583 bp, Homo sapiens
atctttatgcagcgctgtcattgatttttaaaatgataaattggtgggtctggcacagagatcaatggagttgaagtcacgacgtcaaattgagatgtgaggttarggctgagagacagacatctccttctctcatgctggcccgatgaactctccagtttttttggtgagctctggtgaaaactctttttaacccagaatgtcagcatttgggttataagaacattaatttatctgactgcagtgagatacattttctcaattctccttatttgcttcttttaccctaatactaggtcaccaaattcaaagacattctttctctaaaaactcaacttctacccaactgaattttcaccaaaggaatcgctgaggttgagtttggtggtaaagaacccaaccctttggtgcttttttcttttctaaacactgcatggccagacgtcagtactgttcagccctggaagccgtcttcctctttactgccttctcacggtgtttcctttaattcctgctacacaaaaagttacaagtggaaatggaagaaaacaattctttcccaatcaggattccctgagttggt

SEQ ID NO: 448398 - DNA, 543 bp, Homo sapiens
tgatgtggggctggggcactcatcatggccttataggtttgcgccttggtccacattcgtactgcagttattgtttttatttgtgataatgattttatactaaataatggtgatattcctaccatatttaccacgtagtagtgtctgaggtttctgattctttcgaacaaatgcctcctgttgaccctgtttccatttaaccaatcaacctagatttctgctttttgccccttcatgacaccaacacagtgggttgaaattcaaaacaagtggacttcatttcatgatctcatgtgcttcttatttaaacaggaaataggagcattgcatttgacaacttttaactgtgtagccagataattagcttgtgaaaaacatactcagttttacaaacaagttgtgattctggaaagtaaaattagtcrttatagtactactttgcggatttacctcccactgcatgctgttaagatctcatctaagcaagattaataaaaaataaaaaatcttgactaaacatctgttgcaaagtgactttcaatt

SEQ ID NO: 448399 - DNA, 562 bp, Homo sapiens
tcacagtggcgtgggagtggcagaagggcaacataaatgcataaatgagcgaacggttaatttttgatactgctgagtgttaaggaagtgttgtgaagcagtattttggtctagaatgaactctaaggaggtgacatttttagtgagacctggatggtaatgaaaaagcagtcagtcatctgttgacccagggttggatgttgcaaacacaaagaccgtcacgtgttaacatcctgcagtgggaatgatgttcctctgtttgcaagtcagaaaaaaaggccagtgctgctggaatagatgcagcaggtgagagwggggagagatgaggacatgtgtataaaatgagaggccctttgggcattattttaaattgaatgggaagccactatagtttttcttataggtggttgaatgacatggaaacacttcttgacttttactctcaatcctctccttctataacatcattttcactcaattttctttctcttgcttcttttatttacaacccagcccaattcaccaattcctgagaaatggtttggctgacgtttgttggtaa

SEQ ID NO: 448400 - DNA, 557 bp, Homo sapiens
gctgacatgcacacctcattgactagatgccaaacacacagtggctaaccttggtaaaaggatctcacctgcttttgtcagattggagctgcttcttgccatgtattttcctcctgactcaacagcaaatctgttttagttctaartgttttgattctacaaggacctagtgatcagtaaccagatcgggccttgaaaaaaaaatgaagagtatgtcgtgtaaacattcttcgggggccaaacaacactgcagttgtatgctttaatttaaaacacacatgtgcacacacacatcctctgcggaaacactatatgaagttcgaatccctgaatatcaataaaaggaactgagaaatattttggtgcaagaacaatgaggaagttgatcctgtaacatgaaggaagtgtaactgtttcacgtagactaaatatttaaaaatgggtttcatgttttttatactgtttttaactaaagttataaaaatgtttccaacaagttctctctccttatgttttaagaatcccaactatctcagtaaattgaaataagggtatta

SEQ ID NO: 448401 - DNA, 626 bp, Homo sapiens
gaaaaaatgttgcttatctgaaattccaattttactgagtgtcctggattttgtcttgcaaccctagctgtaaagggaagaaggagctttgtagggtagagccaagcattggacaaaggcatggatggaggagcgatcggtgtccccagtccagttcagtaatatggagggcggagggtggagattacaagaattacaagcaaagatgggggccgtagaattccatcttctacctttaaagamtttgcccttttttttttccctttaattgatttttccctctgtttttaagttgttctcttttgaatactctgcttatagatttatttcctaaacaagtgctgttaaatggcctccacttcacaggctccatggaggagcagagctctcctctctctatgccgatgctttcagcatcctcagaatagcagctggaaggcagtaggttttatggggataactgtgcactcaccagtttagatgtgtggttgctaagagtcacggtatttgtttgcaaacctgttggtaccattggtccatgtttagctttgtttaatatacataaacaaaaaagtgtaactggaagctatggtattttatttttcaattagctatggaaagtacaa

SEQ ID NO: 448402 - DNA, 592 bp, Homo sapiens
gactcaaaatgtatcatagatttaaatgcaaaacttaaaacaacaaaactttttaaagaaaacatagaaaacttttgtgacctaggcataggaatatatttcttaggatacaaaaagcatgaaacataaaattttaaaattgataaattgaacttaaatcaaaattaaaaatttttggtctttgaatgacactatacagaaagtaaaaagacagactgcagaactggagaaaatatttttaaaaacacctatctgacaaagggtttccatccgcagtatatgacaaactctyaaaaaccaataagaagaaaataacccaccaaaaattggcaaaaaatgtgagcagatatttaatcaaaaaaggaacacaaatggccaagatgtacatgaaagcatggtctatcttactagtcaataggaacacgcaagttaaaaccacactgaaatataactatatacctattagaatggctaaaattaaaaaaaaaaacaaccaccacaaagatgcagaacaatggaaactcatgttgctggtctgaaggcaaaatggtaaagccattttaggaaatagtttggcagcttcatatacagc

SEQ ID NO: 448403 - DNA, 592 bp, Homo sapiens
gactcaaaatgtatcatagatttaaatgcaaaacttaaaacaacaaaactttttaaagaaaacatagaaaacttttgtgacctaggcataggaatatatttcttaggatacaaaaagcatgaaacataaaattttaaaattgataaattgaacttaaatcaaaattaaaaatttttggtctttgaatgacactatacagaaagtaaaaagacagactgcagaactggagaaaatatttttaaaaacacctatctgacaaagggtttccatccgcagtatatgacaaactcttaaaaaccaataagaagaaaataacccaccaaaaattggcaaaaaatgtgagcagatatttaatcaaaaaaggaacacaaatggccaagatgyacatgaaagcatggtctatcttactagtcaataggaacacgcaagttaaaaccacactgaaatataactatatacctattagaatggctaaaattaaaaaaaaaaacaaccaccacaaagatgcagaacaatggaaactcatgttgctggtctgaaggcaaaatggtaaagccattttaggaaatagtttggcagcttcatatacagc

SEQ ID NO: 448404 - DNA, 575 bp, Homo sapiens
ctcgtttaatttttttttttttgaggttcaaggggttataatttctttcctttttttttttttctttaatttctgggatacatgtgcagaacatacaggtttgttacgtaggtatgcgtgtgccatggtggtctgctgcacctatcaacccatcatctaggttttaagccctgcatgcattcggtatttgtcctaatgctctccctccatttgccccccactccccagcaggccccggtgtgtgtggttctcctccctgtgtgcatgtattytcattgttcacctcccacttatgagtgagaacatgtggtgtttggtgttctggtcctgtgttagtttgctgagaatgatggcttccagcttcatccatgtccctgcaaaggacatgaactcattcttttttatggctgcatactattccatggtgtataggtgccacattttctttattcagacacatgtacacgtatgtttattgcagcactgtttacaatagcaaagacttggaaccaacctgaatgcccatcaaagatagactggataatgtttaaaatatttagcacatgttatcattt

SEQ ID NO: 448405 - DNA, 580 bp, Homo sapiens
agtttgttttggatcattcatgacatacttaaaaatgtttatttttttcaaattcagtttgtcagaagggttttacattataagcaaaatgaaccttcccaaattgaatttttgctttaaaaattcaatgtgtatgggagaatgacttctagtttatatcgttctctatcaactttatcactactatttgccccaccaattttgggataactgcacttgaatttgcaagtttttacaaatagtaagaaaraccatttattggacatctatcttgtaaacattcttacatgtatttttatttaattctaatttacttatgtattaaatacttattacatacaaggcactgttttaggctctggggatacaagagactaaaacatttaaagctcctgacttcatggaattatatgctaggctgtggaaatggaaaatgagataagtaaattatttagcttattagaagataataagggcaatggagaaggagaaataagggaagagtgatactggggagggattttccttgataaatctatagttttgggggggttgtcatggaggatatgttttacgaagg

SEQ ID NO: 448406 - DNA, 426 bp, Homo sapiens
caaaaaaaaaaggattcctgcattgaattttgtttcagtaacacattttacataataacttataatcattgccgttttatagatcattwattaataatatatttacatatgagtctatgctagatcttgcctgaaaacaaagtattaataaacaattgctttatgtgcctaccctctaaaggcatttggtttctagatgatatgcaaacactggtttctcaagtcatctttggtatataattgatacatttataaagtaaaatatgtcaaaagttgatgactttatggtatgtgaaagtaatttactcacttcctggtgagaagaataggaatggggttgcattattcacctgtgttacctttgatgagtacattgaagagctgtgaagggaattcattcatctttccttggctagcaggtttgct

SEQ ID NO: 448407 - DNA, 426 bp, Homo sapiens
caaaaaaaaaaggattcctgcattgaattttgtttcagtaacacattttacataataacttataatcattgccgttttatagatcatttattaataatatatttacatatgagtctatgctagatcttgcctgaaaacaaagtattaataaacaattgctttatgtgcctaccctctaaaggcatttggtttctaratgatatgcaaacactggtttctcaagtcatctttggtatataattgatacatttataaagtaaaatatgtcaaaagttgatgactttatggtatgtgaaagtaatttactcacttcctggtgagaagaataggaatggggttgcattattcacctgtgttacctttgatgagtacattgaagagctgtgaagggaattcattcatctttccttggctagcaggtttgct

SEQ ID NO: 448408 - DNA, 625 bp, Homo sapiens
catggcttccatctgatcccttcctccagctgtcttcagcctttgctttaatgtattttgattattgtatgccctatctttatgttagtaatcatgcttaatcatttcaaatagactttttaaaagttgaattaaaccaataattggtgcaatagctttctttttgtgtttattcaaaagaattttataaggttatctcttccctgtcttatgtgaaaggctggcagacattttctgtaaaaggccagacagtacatattttaggttttgtaggccaagaggcaaaatgaagaatattatgtaggtacttgtaatacaagagaaaagacaaatttccacatattttattgagaaaattgaaaatataatagtattagtaataataaagtatcttgaaatttgtaatatagatttactaatgtaaataatagaattatttcttttgagataatgttttgcttgcctggggttgaacattaatgtttcctgtcatcagtrttaattgtaaatattcatctgtcgtactgatctgtgttgaaatgttacatatttcatatttaaaacatcttttcacacatacaggttttgccgaatatagatattagtctactagcatgtatgcaca

SEQ ID NO: 448409 - DNA, 606 bp, Homo sapiens
tctgtgctcaaatatcaatttctcctagtggccttcttttagcaacccatgtatacatgctaccaaccctcatcccccccataccagcattcttcttccttgtttaatctgctgtattttttcatggctttattatcttcyaataatgatgtgttttatttattatattcatttttgttgtctttttctccccgcaaggctgtaggccatgaggataagaattttgtttggttttgttgattcatgaggcctgagtgcttgacatgtagtaggtgatcaacagacatttgttttaaatagtatcttgaagacaattttgtaaatcattttttctatatctagaattgtaagattttagagctggaagggattttatgttataaatagtttctaaacctgtgctaatagccacatggtactattcaaatgtaaattaaaattaagtaaagatttagttcctcagtcctagtagcaacttttaagggctcttgtgttcagtggctgctgtatttgaccactcaggtatagcacttttctgtcataccagaaagctctattagacagccctgggcccatggattccccaaggtcatacaggtcattagt

SEQ ID NO: 448410 - DNA, 552 bp, Homo sapiens
tataacccgatttacttacactttgcctattgaaaaacatttggagggcgggtgctgtggctcatgcctgtaatcccagcactttgggaggtcgaggtgggtggatcacctgaggtcaggagttcgagaccagcctgaccaacatggcaaaaccccatctctactaaaattacaaaaattagctgggcgtggtgatggacttctgtaatcccagctactcgggaagctgagctaggagaatcatgtgaacccaggaggtggaggttgcagtgagccgagatcgtgtcattgcactccagcctgggtgatgagcaagactcttgtctcaaaaaagaaaaagaatcaagaaaagraaaacatttggaatatttctgggttttttttttctatttctcttacagactatgtacatgtataggaatttttccagattttttaaatctgggaaaggttttgttgcttcacaaggccatgaatctttaacctggcttggtattgccaaattgttttccaaagtggttgtgccagttgatactcgctccacagctgatg

SEQ ID NO: 448411 - DNA, 487 bp, Homo sapiens
attcatttgttaaactgatgagaagagaatttctgttttgaccaggcatagaaaagagaatcctctgtttaaaatgttctgtgtgatgattgaaaggatttttctatagaagagttcacggctccatgtatttgcatgtatggctgcttcactactcgcatgttccccaccctgagctttatagaacatgttgtattacaatcctggtgcttaagtcatgactccaggtaagtcagcacaaaaggatggaagatattcctggaaatcattcctaccctagggctctgccaattacttaaccatatgcgaaagtgactgtaaatcacatagacaggttcacacaactcgagttaatatattcccatctcaaatacttcttaggcaaatccgaaaaatgttcactcatagctgtagtaatgacagcagacacattgatgaagggsaagtcagagtggaaagtgacaggggtcttaaccaattacagtta

SEQ ID NO: 448412 - DNA, 597 bp, Homo sapiens
ttttttaatacatatatacctcttataaagtgtaatttataaatcaggcagaataagagatcaataactactaataaaatttaaaagttgtaaaaatatgctataataaaatttatgtggccgggcctggtggctcatgcctgtaatcccagcactttgggaggccgaggcgggtggatcacgaggtcagtagatcaagaccatcccggctgacatggtgaaaccccgtctctactaaaaatacaaaaaattagctgggcctggtggcaggcacctatagtcccagctacttgggaggctgaggcaggagaatggcgtgaacccagggggcggagcttgcactgagctgagatggaaccactgcactccagcctgggtgacagaataagactctgtctcaaaaaaaaaaaaagttatgtgaatgtggtctctctcaaaatatcttacagtagtactctcctattttgggaccatagttgaccacaartaagtgaaatcatggaaagcaaaaccatagatgaagtgggacttctgtacttagaaagaagttaagcattaaccaatcctggacctgccatcctacctcttttctgctca

SEQ ID NO: 448413 - DNA, 558 bp, Homo sapiens
gtgctctatctcaatatcataactttgcaaataamtttgcaaatgatttcccactgccagagatttcttactgtggcttttccaccactgtccagttgggtaattatttcaagttttagataaatgccatttctgccataagtttgtgttccacactaagttaagacccctgcagctatgtactgccataacaccttacagtcataacagaacactagtcataccttactgtaattgcatgtttaatcacacacctcccctcgatgcagtaaagggaatgctcaatagatgttaatgtttatccatactccttcctttcctttgatctgaatgtagtccacctcctgagagtcactgcagcatcttagactctgaaatgcggcctttcctgttaagtgataggctatgatgaattatttgatggtaggagccatgctatattcatctatttattcttaccttctggcacatagtagatgctcagtaaacattaatcatatgaacaaatgcataagtaaataaacaaatgagtagaattaatgccagaaaacaaaggag

SEQ ID NO: 448414 - DNA, 558 bp, Homo sapiens
gtgctctatctcaatatcataactttgcaaataactttgcaaatgatttcccactgccagagatttcttactgtggcttttccaccactgtccagttgggtaattatttcaagttttagataaatgccatttctgccataagtttgtgttccacactaagttaagacccctgcagctatgtactgccataacaccttacagtcataacagaacactagtcataccttactgtaattgcatgtttaatcacacacctcccctcgatgcagtaaagggaatgctcaatagatgttaatgtttatccatactccttcctttcctttgatctgaatgtagtccacctcctgagagtcactgcagcatcttagactctgaaatgcggcctttcctgttaagtgataggctatgatgaatyatttgatggtaggagccatgctatattcatctatttattcttaccttctggcacatagtagatgctcagtaaacattaatcatatgaacaaatgcataagtaaataaacaaatgagtagaattaatgccagaaaacaaaggag

SEQ ID NO: 448415 - DNA, 613 bp, Homo sapiens
attgtggctttgatttttatttttctaatgactgatgatgttgagtatcttttcatgggctttttgtcatttgtatgtcttctttagaaaaatgtctattcagattatttgcctattttttaattgggttgtctttttactgttgagttctcagtgttctttcatattctaaattcaaatcccttatcagatatcatgatttgcaaatattttctttctttctgtttctcttcactttcttggtattgtcctttgaagcacaaaggttttttatttgaataaatctaatttatctatttgtttgttttattccttgtgtgtttggtgtcatatctaagaaatcattgcctaacaacaggtcacaaagatttatgcctatattttcttctaagggttttctagttttagctgtgacattagagtctttgatcaattttaagttkatttttttatatggtgtgagctagaagtccaacttcattcttttgcaggttgatactcagttgtcccagcatcatttgttgaaaagaatattcttcctccattaaattgcttttgacgtccatgttgaaagtcagtaagtcataaatgggaggctatatttttggctctc

SEQ ID NO: 448416 - DNA, 490 bp, Homo sapiens
ctcctgtgctcctacttatttcttttcacaagtgtttccatctctcaggggaaaatacttatttttttcttcaagactgtatttccataaacccctgccttgtgttctgatgaattcaagaaaagcaaacaaaaaacaaactcattttttccttatggaataaatcactttggattacatagcaaaggctaacattgatagactgcatatcccatgccagacactctatatttgctatttcactgaatctcctaggagctccatggtatatggtatgtcctgcaattccagtcaatttgcagaagacagaagtgaattgtttagttggtcttacaactactgagtgctgtggctaggaatcaaaggcttcataatcttaaaacataaccrccttgaagcttctttcaagccctttcttaatcctgtttttctaatggctatcttgtttactgaattcatcagtactttgctttcttggctaatatgattt

SEQ ID NO: 448417 - DNA, 559 bp, Homo sapiens
gccttataaaagtgctggaggaaagtagtttaggccttttgttctcctgctgtttctccacatgaagatacatacacagcatcatgcatgagaaatgggccttcactgcttgctcttgatcttggacttcccagccttcagaactgtgacaaataaatttatgttctttatgaattagccggcttgtggtatttggttacagtaacacaaatggactaagacagtaagacaggagtttttttaaaaagatattcttgatgtcaatcctttatcagatatatgacttgcaagtattttttcccattctgtgggttgcrtttttcactctgttgctagtatccttttatgtacaaaaagttttaattttgatgaagtccaacctatctgctttttaaattttgcttcttgtgttttggtgtcatatccaaaaagtcattgccaaattcaatattatgaagggtttttaaatttttcttctatgagttttataatttttatcagttatatttaggtctttgattcattttgagctcatttttgtatatggtgtaagataagc

SEQ ID NO: 448418 - DNA, 493 bp, Homo sapiens
acaaatatttaaatggcttattaatggaaaaaaccaaactagagatttcaggatttgggatgtgacttcaaaatagcagtaagaacatttattaaatggtcaactttttaatgcataaataagcttagaattagaatactgtagtataacttctcttgagtgtccttgttgcacttgagtacaagcaatcatcactgcatccattttcattttcccttgagcttgctttccctaattaagagrgttagtaatggcacttacagttcatctaatctggctttaagtaattatggttcattgcagcaattacaagttacatttataaagaacaataaaggggaaaacctttcaaatgcagtttattaggctttgaaaacctgctacagaatggacactcaatatatatttactaggcaatcaaatactttagtgagaatatgaattaagactaagaaattcacatccatgactgtctttaaactgtgactccaaa

SEQ ID NO: 448419 - DNA, 557 bp, Homo sapiens
aactgctatttataaaaccatcagctctcatgagacttattcactatcatgagaacarcatgggaaaaatctgcccccgtgattcaattacctcccaccatgtccctccgattacacatgggattatgggagctgcaattcaagatgagatttgtgtggggacacagccaaaccatatcaattcctataacatattgtcttatattattaaggattgttaactcctaaaaaagaaaaaaaatactggcctatttgccctgtcatgtgttatgaaacctcgtccattcattcaaagagtatttattaattttttgtttcaatcttgagccctcatcctttccctctggactttctctgtggcataatcatatatacttgcaggtctttaactaccatctacaggctattaactttcaataactccaactcagacctctcttgagagatcaaggcatgtatatctagttttctctcaatatctcctatcaaatatttcatggacatttaaaattcaaccaatctaaaactgaagtcatcatctctccccccaccctaaa

SEQ ID NO: 448420 - DNA, 557 bp, Homo sapiens
aactgctatttataaaaccatcagctctcatgagacttattcactatcatgagaacagcatgggaaaaatctgcccccgtgattcaattacctcccaccatgtccctccgattacacatgggattatgggagctgcaattcaagatgagatttgtgtggggacacagccaaaccatatcaattcctataacatattgtcttatattattaaggattgttaactcctaaaaaagaaaaaaaatactggcctatttgccctgtcatgtgttatgaaacctygtccattcattcaaagagtatttattaattttttgtttcaatcttgagccctcatcctttccctctggactttctctgtggcataatcatatatacttgcaggtctttaactaccatctacaggctattaactttcaataactccaactcagacctctcttgagagatcaaggcatgtatatctagttttctctcaatatctcctatcaaatatttcatggacatttaaaattcaaccaatctaaaactgaagtcatcatctctccccccaccctaaa

SEQ ID NO: 448421 - DNA, 557 bp, Homo sapiens
aactgctatttataaaaccatcagctctcatgagacttattcactatcatgagaacagcatgggaaaaatctgcccccgtgattcaattacctcccaccatgtccctccgattacacatgggattatgggagctgcaattcaagatgagatttgtgtggggacacagccaaaccatatcaattcctataacatattgtcttatattattaaggattgttaactcctaaaaaagaaaaaaaatactggcctatttgccctgtcatgtgttatgaaacctcgtccattcattcaaagagtatttattaattttttgtttcaatcttgagccctcatcctttccctctggactttctctgtrgcataatcatatatacttgcaggtctttaactaccatctacaggctattaactttcaataactccaactcagacctctcttgagagatcaaggcatgtatatctagttttctctcaatatctcctatcaaatatttcatggacatttaaaattcaaccaatctaaaactgaagtcatcatctctccccccaccctaaa

SEQ ID NO: 448422 - DNA, 629 bp, Homo sapiens
cttattcttcatagtattgcttagagactactgtcaaaagtcaaatggctgtataaagcatgtgcttatttctgtgatatttattctgttccattactctattggttgaaccttatgccagtatcacactgtctggattagtgagagatttacagtgagtcatgaagttaggtaatacgttctccaactttgttcttttccaagactgctttgtctatatccaggtcctttgaatttccatgtaaatttttgaattaactggtcattttttaccaaaaaaaaggtctttgcagtgtgttaaatctatagatgtattagggagaatcaacatctttacaataatgagtctttcatttcataaacatactatrtctctatttatttagctcttattttatttccctcagcaatatcttgtaattttcagtataggagtcttctacacttttcttaaatgtactgccatgtatttcagtttctgatactgttgtaaaattttcagtttcattttatgattgcttattgcttatatttgaaaatacaatgaagtttgcatattaattttgtaactaacctatggcattgctaaatgcacccattatttctaaaaacttttccatagattttgt

SEQ ID NO: 448423 - DNA, 629 bp, Homo sapiens
cttattcttcatagtattgcttagagactactgtcaaaagtcaaatggctgtataaagcatgtgcttatttctgtgatatttattctgttccattactctattggttgaaccttatgccagtatcacactgtctggattagtgagagatttacagtgagtcatgaagttaggtaatacgttctccaactttgttcttttccaagactgctttgtctatatccaggtcctttgaatttccatgtaaatttttgaattaactggtcattttttaccaaaaaaaaggtctttgcagtgtgttaaatctatagatgtattagggagaatcaacatctttacaataatgagtctttcatttcataaacatactatatctctatttatttagctcttattttatttccctcagcaatatcttgtaattttcagtataggagtcttctacacttttcttaaatgtactgccatgtatttcagtttctgatactgttgtaaaattttcagtttcattttatgattgcttattgcttatatttgaaaatacaatgaagtttgcatattaaytttgtaactaacctatggcattgctaaatgcacccattatttctaaaaacttttccatagattttgt

SEQ ID NO: 448424 - DNA, 586 bp, Homo sapiens
ttgtaactaacctatggcattgctaaatgcacccattatttctaaaaacttttccatagattttgtaggattttccttgtaaacaattatgtcatctacgattttaaaaaaaagcagactaacttcttcgtttcctctaatatcactatttttttcttgttgcactggctaagacctccaatataatgttgaatatagatggtgagagtggacatccttcccttgtaatgcaggacattataaaactgaaaaaaagaagggaataaactcagaataaaaaataattcccagaaagcattgttataagttttgctttaaagrctatgtaatttaaataaattgaaaataaaacattttatatttcaataatacaatatttaatatttctgatcctcttaatattttaggataacaatttctttctggtatcatttctattcagcctgaagaactttctttagcactactctagtagaggtaggtttattggtgatgatttatcttagtttcctttgatccaaaatgtctttatttcacctttactcttgaaggatatgttcattgagtgtagaattctaagttgaca

SEQ ID NO: 448425 - DNA, 586 bp, Homo sapiens
ttgtaactaacctatggcattgctaaatgcacccattatttctaaaaacttttccatagattttgtaggattttccttgtaaacaattatgtcatctacgattttaaaaaaaagcagactaacttcttcgtttcctctaatatcactatttttttcttgttgcactggctaagacctccaatataatgttgaatatagatggtgagagtggacatccttcccttgtaatgcaggacattataaaactgaaaaaaagaagggaataaactcagaataaaaaataattcccagaaagcattgttataagttttgctttaaagactaygtaatttaaataaattgaaaataaaacattttatatttcaataatacaatatttaatatttctgatcctcttaatattttaggataacaatttctttctggtatcatttctattcagcctgaagaactttctttagcactactctagtagaggtaggtttattggtgatgatttatcttagtttcctttgatccaaaatgtctttatttcacctttactcttgaaggatatgttcattgagtgtagaattctaagttgaca

SEQ ID NO: 448426 - DNA, 591 bp, Homo sapiens
aatcaactgatgaggcatatgaataataagactattacatgagttatggggaaaaaaaaagccctagatcccagccacaacctacagacagaatagaatagtatcaatagaatctgttaatagaataacagaatacaaatcagaagcacaatcacaaaaatgtgtttatgagtcacaacctactcacatttctcattggaattactgatttctatgactaaccttgggacttttaaaatgatactggaaatgacaaaattacccttcaaaatgtaaaatacaaaaataactgggttagctcttgttttaaaagaaaggcataaaaattacttctatgaaatcacgttaacccaagaggaaaaacaacaacaaaaagaaacacttggagtcatttaattccttctctgtcactctttttactacattacagctatcaccatattcaacagattctacttctaatggtgactaccacctaataatgtctatcgaacacttactctgtgtcaggcacagttstatcaactggggcagaataggagcgaaaaagtcccattctcatggaggttaaaatctaatgggaggtggggg

SEQ ID NO: 448427 - DNA, 570 bp, Homo sapiens
ttcatgtctcaacataacaatgcagcataacaataggcataacaataacataacacagcataacaataacctcatgtcttgcctcctggatctcctccctctagtgcatattttactttgccacaatatctgtttgttttttaactcagaaccgattatgaatcttctattagaaatagacaaagtttgggtttcraataagagacagcgcagtaacctgagattaacaaccctgggaagcttttatcccctgaaatgggttgaactgtgtccccacaaaagatatgtaaagtcataaccccaagcacttcagaatgtgatctttggaaataagattgttgcagaagtaattatttcagatgaggtcatactggagtaggatgggctcaatccaacatgactggtgtttttataagacgagaagaagaaacacagagataagcacattgggagaagatggtggggattagagtgatgcagccaccagctgaggtacaccgaggattgttagcaagcaccaacagctagaagaggcaaggaagggctattccctacaggtttcagagggag

SEQ ID NO: 448428 - DNA, 225 bp, Homo sapiens
tttgctaaaatattaaatattggttaataaaatattttcaaccaatccttctttaaataattaatcccatcgaaacaatcattactggtgcttcatgcacttcagagaaaattcattgtggaaccacsatgttaacttttcaatttaattcacttccatgctgctggagtcccatgagcactagattgaatgccaggggtggtgggtcaaggattcaggcaagtt

SEQ ID NO: 448429 - DNA, 585 bp, Homo sapiens
gtctcttaggtttgacagaagcaaatgtgtcaagcytaaactttcagggttcttaagaccttttgaaaaaaatgatgtattgagataaagagttattagtgacttttttccaccatttcttttagtttgtgccacatagtgcattatttaacatcatttaagaaaataaaagagtccctattaaacattttatgccaacattaaattgcatattaaatgtgagttggactattgcctggttaactgaatatttttgtaaaaggagatgcacagttctttgaaagaagatgtcaacttggaagataggaatatggatttttagacagtatgttttcagcagtgccatggactaatctgtgacaaaggccaattggtaggtgtcatcaatatttcaatatagacatagcaaattagatggtgacttaaatacctctatgctctgtataaaattatagttttgtttttcaaaacatagttcttctccagttattgccatgactgtggctaggcagcccatcttagtggaataactttacagtgcagtagctgccatccagtttctgatcgccacggtgaagaggtgag

SEQ ID NO: 448430 - DNA, 590 bp, Homo sapiens
caagcctacactgggttccgctgggaagccagtatgaaggcttggtccccaaatgtcactgctaagagacacacattttgcttggagagagagagggagacaggctggttgtgcaggacctctctgttcacccggaagtgagagaaaacatgtcccataggatcccaagccagggacacaccaggggactgggatggttttcagggccaggtaaacataacattttgtgcacaattccatggagttcacaaatcaggtggtccctctctggttaagaatttcttatggatcagaacaaggatctctgaaggatatgctcacagagtgggctgctggtaggtgattagccgggattggaggttggtgggggaagaagtagaaasgggacaggctggatggagtgcaagatgaagagccaaatctggccagcctcactgtcttgcccggggctgatctggacattttaccttagggctgactcagtgctgtggttaacaggtcagaggtaaccgcctcgctcttggaggaatgggaagaatgctggcctgtgggtgaccaaatactgtatagacatacatgcatctctgttt

SEQ ID NO: 448431 - DNA, 564 bp, Homo sapiens
tctcacctgggatcatgcaagacaaatcaatagcagctgttaagataattgtatataggactatagtcttgggaaaccacaatatgctaatcacttgatttaattttgtgactatctgcagatgtggatatgaatttaaattgcaacctcacaatgttgtgtctacaggtacaggttaaactgaaggaaggtggaagggtttaagagcctatctgttaaatttcaagtctcaagtaagccaagtcaatgtaagtcattgctgatttggagcaagtctttgtaaaacgtacctgatttgctttagcattgtgagttctcttaattgatgcttgcctaattttgtgggacttggtttcaaattttrcaatggcttttgactccactccccattcttgtacataataggtacaacaaaaattgcttgaataaactagtagagcgaaagtatttccatagctcctaaagaccagattctgaatatggtaaatatggcagcaaccaaagggccaagccaaaactaggttctgctcagtcattctacctctcttgggagcctttaaaata

SEQ ID NO: 448432 - DNA, 477 bp, Homo sapiens
aaggtacaatgttgagaggaccgtacatgagcatgtgagaggctcccaggcagccccagaagtgcaaaaggggctgaggcccccactagcctgtgaaatctgagtgatccttatgactggaccccactggtggctggctacagtctggagcaacccggacaacccaggtgatgttcattgatggcctggattatttcagtttttgtaatcccagagagtgggaaagarcacgttttggggaggcgtaggaggagtgcctgagggtcatttgcacatctgatataaatgtgaaatgagtccagtcagcttggccatgcaagaatctcaagaagagtttcactatgtgtttgggttaaatggagtttaacccaactggggttctgaatagtgaaaaagtgtttgggccagtggatcagaaaacctttgctagagtggaagtactagagtttgtgtcttagtctatttttgctgatataa

SEQ ID NO: 448433 - DNA, 477 bp, Homo sapiens
aaggtacaatgttgagaggaccgtacatgagcatgtgagaggctcccaggcagccccagaagtgcaaaaggggctgaggcccccactagcctgtgaaatctgagtgatccttatgactggaccccactggtggctggctacagtctggagcaacccggacaacccaggtgatgttcattgatggcctggattatttcagtttttgtaatcccagagagtgggaaagaacacgttttggggaggcgtaggaggagtgcctgagggtcatttgcacatctgatataaatgtgaaatgagtccagtcagcttggccatgcaagaatctcaagaagagtttcactatgtgtttgkgttaaatggagtttaacccaactggggttctgaatagtgaaaaagtgtttgggccagtggatcagaaaacctttgctagagtggaagtactagagtttgtgtcttagtctatttttgctgatataa

SEQ ID NO: 448434 - DNA, 516 bp, Homo sapiens
tgtgttatatattctttatatagggggctagatggaaattgaacactaaaattaggaatagttttacttcyataaaatatatttaatatgctttgattacattttccaaaaattaaatacaacttcagctttaaaaactcttgatgtaaaaattttatattccttaattaaaatttgtattttgcataaacatatactttggaatattttagaaaaataacctatcttgaaagcatgaaaataattttaatttttaaaatcaaataatttatatttttaatgaaaattcattctaattttatacattttgaaatattacattttattatttaatagtttagggcattgctatcaatctaacacaaattctatgaaaattgttatttttgagacagggtcttgctctgtggcccaggtatgatcatcagctcactgcagcctcgatctcctgggctcaggcaatcctcccgtctcagcctccagagcagctgggactacaggcacatgccaccacac

SEQ ID NO: 448435 - DNA, 590 bp, Homo sapiens
gtcacgaactcagcctcagagctggccattgaatttgcaaggaccagtataaaaatgaaatgcagagcactttgttcaaaaaaacaggcaaaaagtgtcattaaagatgctaaaatataaaacgttttcttttttcctgcaatttctcttgcttgccctacatgtcatggtgttattatatttgttattaaaagtaagggcaaaaaccacaattacttttgcaccaacgtcagtaatatttactgtcattctaagtttaaaaaaagaaataaaatagaaaattattagtgtgaattttaccactcttctgtmtattgcacaataccaattttaaatgcaaatattagaacatttaacaaacatgtggaatcaccaaaatcacacaatttgcacttcgtacctcacacaaacatgagtattttgatcttacctaagcagcaggaatgctgcacacaaccaactcccttctcttctaagaacacatttaccaatcaggtttctgatgtgtgaggaggaggaactgtggcttgccctctcttttccttcctcctgtgtcatcattttcagcatagtggttggctaacacaggg

SEQ ID NO: 448436 - DNA, 506 bp, Homo sapiens
agtgtattcagggtactggtgagtgcctgttgrgcccaggaatttgaatccagtttgggcaacataacgagatcccatctctccaagaaaggaagaagcagcagatgtagctgatgatctagcttagcactctcaatgcctgctcctgccatgctgatgctgggctttgctcagaagtgaggggcatataggtggcactccctaaaaataggtggcaatcacttgttcattttctcaaagtgggtcaacattagttcccatccagggtgattttgcccccccggagcaaaatcatttggcatttggcaatgtctggagacatttttggttgtcacaacttggactactccaaggagtaccactgtcatgtagtggcatggaggcctggatgctgctggacgacttacaatgcacaggacagccccacagcaaagaactatttagcacccagtgtcagtcctgctcaggatgaggggctctgggtgagggtgatgcccagcatgcaa

SEQ ID NO: 448437 - DNA, 566 bp, Homo sapiens
ggaagcatggaggagggacmtttactttcttttaaaataaactttatctttttttatggaatatttgaaatgtgtaaaagaacagaggtctaaagttcactccaaatgcatatcattcagattcagcaacaatctatttaggaccacccttgtttcatttctattcctccctttcctaccctactggattattttgaagccaatcccagccatcatctcatttttataggtaagtttggatatctgaaagaaaaggactctattttttgtaagcatggctatgacaccattatcactcctaagatactgacagtagtttcctaatattgaacaccttatcaatgttcaagttgccctgattcagattctctctctttctccccctctcaacactttatttgaatcatgattcaaacaaggatgttcacattgcattggttgataggtacacatatgtggtttttggatggtgggggattaagtctctcttaatctatacatctccctccctccccacatctgtccttttaacttatttgttattgggtcacttgttctgtagagtc

SEQ ID NO: 448438 - DNA, 605 bp, Homo sapiens
tattttttgtaagcatggctatgacaccattatcactcctaagatactgacagtagtttcctaatatygaacaccttatcaatgttcaagttgccctgattcagattctctctctttctccccctctcaacactttatttgaatcatgattcaaacaaggatgttcacattgcattggttgataggtacacatatgtggtttttggatggtgggggattaagtctctcttaatctatacatctccctccctccccacatctgtccttttaacttatttgttattgggtcacttgttctgtagagtctcccagtttggattgtgctggttgcatctccattatgtaaacatgttcctctgaaccaatacttaaatttagagtcttgttgagatacaggtgattttttttggacaagtttagttcatagatggtgtgtgtttttactattgatgatcacagtgtacattcattatttcattaggggtttgtaaagtggtgatattctaattctatcattccatcctcatttattagagttcttctataaagaaaaacatttatcagcaactatgtggtgttctgaagtcacacttgctttttaaata

SEQ ID NO: 448439 - DNA, 515 bp, Homo sapiens
acccagaaacaatactttatcagctatataggcatccttcagtccaatcaagttgacacctaatattaaccatcacagtccctaagcccagctgccccatttagaatgagagggatatggcttagcagtgacgtgaatggaaaagactgggaggagttggttgaccataaactcagtgaggaaggactgggctgtagctgccaaaagaggtaatagagtcctgggcagcatcaacagcagcagagctggtgacattgctgacttgttgacaaaccatgacaggtgccaagaagggtagtcagggtcgtgggggatgcaaagccctatccagggaggagtggttggaagagctggagatattgaatctcaggactctgatgggacttgggaggattctgaagggctcttttctggaaaagggattaygctggatctgagtggacctaggggtgaatcaagagtattggggaagaattacatggaggcagattatggttgaacacaggatttttttc

SEQ ID NO: 448440 - DNA, 526 bp, Homo sapiens
tttgactattttagacacatcatataagtggaatcgcctatgtagtatttatccttctgtggctggcttatttcacttggcataatgtcctccacgttcatccatgttgttccaaatggcaggattttcttcttttttaaggctggataatattctttgcatgtacacawtatgttttctttatccattcatctgttgatggatgcttaggtggtttccatatcttggtgattgtgaaggatgcaatagacacaaaagggcagatatctctttgagatcctgatctcaattcttttggaaatgtatctagaagtgggattgctagatcatattatagttctatttttaattttttgaggaacctccatactgttttccgtagcaactacactattttccgttcccaccaacagtgcagaagggttccatttcttgaccttcttgccaacattcactttttgtttttttgatgatagccatcctaacaggtgtgaagtggtatctcattgtaattttgatttgcatt

SEQ ID NO: 448441 - DNA, 579 bp, Homo sapiens
ttttcttcttttttaaggctggataatattctttgcatgtacacaatatgttttctttatccattcatctgttgatggatgcttaggtggtttccatatcttggtgattgtgaaggatgcaatagacacaaaagggcagatatctctttgagatcctgatctcaattcttttggaaatgtatctagaagtgggattgctagatcatattatagttctatttttaattttttgaggaacctccatactgttttccgtagcaactacactattttccgttcccaccaacagtgcagaagggttccatttcttgaccttcttgccaacattcacyttttgtttttttgatgatagccatcctaacaggtgtgaagtggtatctcattgtaattttgatttgcatttccctgagattcttttgtttcttatggaaagcaattattgttcaacttttggctgaacttttaacttacagagataaaaaacatttggggggtggtagaaaatacacttgacaaccaatttttctttattgacaaaaatttgtacatatttattttgcacacatgctgttttcaaat

SEQ ID NO: 448442 - DNA, 313 bp, Homo sapiens
ttatgagctgtcagtgggggctggagcatgggaacacagcaccaggagggggatccgagggcatccgggtggggtcagtggtgtctgctgcaaatgttcaccccctccctccccacagggcacctgcaacaggctcattcaatgtggctaaaaaactattagacataaagtggaagacaaggctctccaagcacatgttggggctcaggacacaacaycccaaaatgtgacaataggagctcagaatatgccacccaaatatccctttttagcatattgattagtttcagctggttattttgagaaactgcag

SEQ ID NO: 448443 - DNA, 509 bp, Homo sapiens
ttcacatgtgctaaaagccattcgtggacccctgagggtcagggagctggggttgaatctttgtcagagatactggcctttgaccagggcttgaaggtctagtctgatcagtagtagccagggaaatagggtcacaagacagaaaaaggacacccgtgcacagagaacttcctatagcccatcttctccaggcgggttggccatggcagccactctgagtccagtgaacttcctttcagtctgttcctccaataaaggaatgtaatattataataacccacgttatwcccattctgaatgccctttcagctcatccccttactcatacccatcacttccttcaaaattcagagttctcccagagggaattcttctgtattaatctgttttcatgctgctaatacagacatacccaagaccaggtaatttataaagaaaaagaggtttaatggactcgcatttccacgtggctggggaggcctcacaatcatggcagaaggcaaaaggca

SEQ ID NO: 448444 - DNA, 648 bp, Homo sapiens
tgctataggagaggcgaagaagcccaaatactggtataagagaggaagaaataatttccccccaaccttcctcttacctgtaacmgacccttataacaaaaaacaggttaacaagagaaaagcagaagtttattaacatgtatgcctcatgtattcatgggagataccagggaaaaatgagtaaatctcaaagaggtgccttacagctctggcctatacagcatcttcaacaaaaacaacacattttgggagaagcgacaagacagagaaaggaccttgatacacattttccaggaaatactacacagccataagaagaatgaaatcatgtcttttgcaataacacggatgcagctggaagctgttatcctaagcaaatcaatacaggaacagaaaactgaacaatgtatgttctcacttagaagtgggagctaaacattgggtacacagagacagaggggagaaatagacaccaaggcctacttgagggtggaaggtgggtggagggtgagggtcaaaaaatgacgtattgggtactacgcctattacctggtgtcaaaaccatttatgcgccaaactctagtgacacacaatttacccatgtgacaaatttgcacgtgtaccctttgaatcaaaaataaaaatgga

SEQ ID NO: 448445 - DNA, 519 bp, Homo sapiens
tcagagtgattaagagagagtgtgtgctggcaagaggagtgtcatagtcttttataacctaatctgggaactgacatctcatcacctttgtyatattctagaagcaagtctctaggaccagccctctctccaggagaggcgttacacaagggcaggagtaccaggaggcagggatcactggagccaagtcaggagctgccctaccacaaggagaaattacaaaattctcgggattagaatgagaatcaaagtgggacatggtgatatttgcgtgatgcaactaaaactataccaagaggggaatttatggtggtgaataaaactagaaacaggaaaggtggaaaagaaatgaactcagctttcaattcaagaaactaggatagagtaaatttgaaagaagaaaagaagtaatggtaaaagcagaaatcaatgaaatagtaaagtaaagcaaagagtgaatagatgatttttcaagatctaaagctaggttttggctagtgagttgtaaggaggagctgt

SEQ ID NO: 448446 - DNA, 621 bp, Homo sapiens
aattcaaacacctatagtgagctcatatttgacaaaggtgccaagaacatatactggggaaaagacaatctcttcaataaatggtgctgggaaaactggatagccatatgcaaaagaataaaaccccactcatatctctcaccatatacaaaaatcaaatcaaaatggaataaaggcttaaatctaagacctcargctatgaaactattacaagaaatcaatggggaaaatatccaggacattgatctgggcaaagatttgttgagcaataccccacaagcacaggcaaacacagcaatcatgtacaaatggaattaaatcaagttaaaaagtgtctgcaccgcaaaggaaacaatgaacaaagtgaagagacaacacacagaatgagagaaaatatttgcaaattacccatctaacaagggattaataaccagaatatataagtagctcaaacaactctttaagaaaaaatctaatgatctgatcaaaaatgagcaaaatgttgaatagagatttctcaaaaaaagacatacaaatggcaaacagacatataaaaaggtgtttagtatcctgatcatcataaaaatagaaatcaaaactacaatgagaaattatctcacc

SEQ ID NO: 448447 - DNA, 580 bp, Homo sapiens
gtgagtgagcatgctacccagtcagggaaaccaagctycttccacggacaggaggatcccactcgcaaacccatgccactggggcctagtgtcccaaccccggagccatgcagattctcaacagtcgctcagctggaatccacttaagcctactgagctttctgggggagcagcgaccagccccacaggtgcagctgcctgctgtctaagccctttgagctcactgggggcagggcagcacctggcactgggactcacaattgcctaacatgctaagcttcctgagtgggggaagggcagcacccatctctatagctccaggccatgcttttcgcctgctggagccagggaggctgcatgacttggtaccaagatgtgtccccccgcagcccaacacaccagctgtggcaaactgtggtcagagtgcctcttcaggcctgaccctgactcatgcttcttcactgggcagggcttccctgcagaactccaataactccagccggagactcaggaacagaacccagatctcccttggcctgagcccctaggggaagcagtggccacagtctctgtggaccgg

SEQ ID NO: 448448 - DNA, 580 bp, Homo sapiens
gtgagtgagcatgctacccagtcagggaaaccaagctccttccacggacaggaggatcccactcgcaaacccatgccactggggcctagtgtcccaaccccggagccatgcagattctcaacagtcgctcagctggaatccacttaagcctactgagctttctgggggagcagcgaccagccccacaggtgcagctgcctgctgtctaagccctttgagctcactgggggcagggcagcacctggcactgggactcacaattgcctaacatgctaagcttcctgrgtgggggaagggcagcacccatctctatagctccaggccatgcttttcgcctgctggagccagggaggctgcatgacttggtaccaagatgtgtccccccgcagcccaacacaccagctgtggcaaactgtggtcagagtgcctcttcaggcctgaccctgactcatgcttcttcactgggcagggcttccctgcagaactccaataactccagccggagactcaggaacagaacccagatctcccttggcctgagcccctaggggaagcagtggccacagtctctgtggaccgg

SEQ ID NO: 448449 - DNA, 519 bp, Homo sapiens
ggcttagcctttggatgttaatctgctgacctggtggccacctaataaaatcctcctgtcccacccattggtctctcctgtcccttgattcccacaaccccaacgctgaggttacagaaaggttakctatctgataaagacattaaagcaggcattgtaagcgtgcttcaacaagcaattattaataaccttaaatgaaaacaagaaatttttatcaaataagtagaatttatacagaaccaaatggaaatgagtaaatataatagacttttcttttgagttttctaaattatgatgaaatgttgaagaaattgtaacactgtatgatgtggctctaaatacatacacagaaaatatttaaggctattgaattataaatggggaatagtaaatggagatgaagtttctacacttcatttaaactggtaaaattatgacaccaacagactgaaaagttgtgtatacataatgtattatcttgagcaaccactaaaaatattacacaaaatgattcatgtg

SEQ ID NO: 448450 - DNA, 578 bp, Homo sapiens
ccccctgaaatacacatatttattatctaatcatttggcttgcaggttgttcctttttaaaaaagatattagggcctttaaaacaataaaaacatatttgaatcacacgtgcaggtttaaatttcaaaaccacattcagagttaactccaaggagctaagctagctgttttcatagaaaagtcttctgattagcttcaaagggtgatttaaattaatgtttcttttgaaattgaattgtatatgagaaayatttggactttctacatgttattccttacttccaaaaaatgataccacatccacctttaacaaattagaaaaacatatgagataaactaagtacatttcataacaaagttgatataaaaacaaggtttatctaaatccacatttgaaacatgtatgtacctggttagagagactcttgctaccagagacatctgaaaagttgtttattttttcctcccaatatcacaaactatagctttttttcactatattctaactcagcatttctatagcccttatcacaaagcaatgaaattatatccaagattttaaaatatgcaaagacctt

SEQ ID NO: 448451 - DNA, 407 bp, Homo sapiens
cactcagttttaaaagggaaacagcataaaagtttggaaaatctgcagcctgacaatgtgatagaaaagaaaatcccattttctttcttatgcaaatctctgctggctgcataagtaacaagaagccaatgttaatcgccaagatgatggacaaaatgtctccagggcatgtcagggtcttcatggcagcccctcccataacaggtctgaaggcytaaaatgaaaaaatagattcctgggccaggcccagtgcccccctgctatgtgcagcctagggatttggcaccctgtgtctcagctgctccaaccatggctaaaaggggtcaagatacagcttgagccacggcttcagaaggtggaagccccaagccttggcagcttccatgcgttgttgagtctgtgggtgc

SEQ ID NO: 448452 - DNA, 553 bp, Homo sapiens
tgggagaggtggttctcttatctaatgtgcagaaccaacatagtcaaggaaaatgaatgaacaggaaactatgttccaaataaaagaacaagataaatgtccagaagctgacactagtgaaatgaagatatgtgacttgcctgacagggaatccaaaaggacagtaataaagatgctcacacaaataaggagagcaatgcaaaaacaagctgaaaatttgaacatagayagaaaatattaaaatgtaccaaacatacatagttgagctgaagaatacaataactgaactcagaaattcaatagaggggttaaacagcagattatatcaaggagaaaaaagaactagcaagctcgaagacatgtaattagaaatcacctaatctaatgagcaaaagaataaggaagaagttggaaagcctaggaaagttatgggagaccatcaagcagaataatgtatacattattaaagtacaagaagaaaaagagaaaagagcagatgatatattcaagtaaatgacgacagaaaacttcccaagtcttgggaaggaatgag

SEQ ID NO: 448453 - DNA, 522 bp, Homo sapiens
tcatctagtttcttgttaccttttaagttttattccaagcattccactacagttagaaaarctattatccaaaaattctactttgaaatttattatataaatatcaccataagtaagtttatattatttgctgtaaggagtcaatcacactgattaattaatcttttctctcagtttttaagagtttttctttaaaaactcatttcaaataaaaatataaaaatgacatatatcctctatctcagaggttactctgactcctataaaatgaagagaatgtttcagaccagccatatattcaaggattttttttaattgttctggatgacaatttactccctatgctctaatgctttttggtattctgtttaatagctttacatgccaaaatgcataagacaaaatatcagaaacctgaataagtgtttgaatttgatctcattgccatcaggcaagaccatatctaaaaagacaagtggacaatagcctcacctacctctgtgtaaccactagagaagacat

SEQ ID NO: 448454 - DNA, 456 bp, Homo sapiens
acttcagtcagtcattctaaacagaatatttcattgtgactgtttatttttttgatagccgttagtggatttttctagttgtccggaagaattttacttactagtaagatttgtcttagacataaagcagtgttatgtctrataaatttgttcaggactctccaaactatttattcattaagaaggcattaaattcttaatcattcttggaggacatgatacctggatgtcccagatctgaagctggctacagacaaatgagcaagctcactcgacccagacacttttaccacctcattcctctgcattctttctctggacataatttaataagatgcattttagcctgtttagtttggtgtgtcctagaccttagcttgaatactaactgtgagtatatttttaagagggagggagcaggaagatgaaaagtaagtgctggatgctgtgcatgca

SEQ ID NO: 448455 - DNA, 511 bp, Homo sapiens
gtgacattcttaaggaagtccctgtggctggagcacttagcaaaggatagttctgagaggcgacgttaaagaggcaatgaaggggatgacatagagcctcataagccttgttagtaggagagtgacaatgagccaagttctcaaaggatcgctttgtctcatatgttaagaattgactttaggagacgcggaatggaatctgggatgtcagtgggaaaattgcaatcatttgagcaagagacaatcacrttccttcacatttgtgaaatgtggtgatgagaaatggaggaggagagaaaaggtcagagtctggctatgttttggagacagagccaaagggattccagatggctggagtgtggggtatgtaagattaagaaaggtgtcaggagttttggcttgagcaactgcaaggatggaatgggcattgaccaagatggggaaggctgaaggtagagaaggatttaggggaaggaatgggagttaagttttgatgtgttaagtttgtgat

SEQ ID NO: 448456 - DNA, 605 bp, Homo sapiens
ttaagtgaatgaatgcattcggcataaccaaataaaactgaagactgtctacacctgtagcttaatttaattgtatttttatgttctcaaagtagatgaaatcagtcaatgcccaacagaattaaacaaaacgtgattcactaattcttctcttcttttgtgactttacctggtatttaaatgaaaattaggctgaggcaggaagatcacttgaggccaggagttcaacaccagcctgggcaatatagcaagactccctgtctacaaaaaatttaaaaattggctgggtgtagtggtgcacacctgcaatcccagccacttgggaggctgaagcagaaggactgcttgagcccaggagttcaaagctgcagtgagctgtgattgcactgctgcaccccaggctgggtggcagaacaagaccctgtcaaaaacaactctagtactgcttggctaaaatcagaattgccccatttcatccattctgagatgaactctttttttttcacattatactatctctgaactgagaatacatcttrtagttgatggaattttatcatctctgttggccaaatttatattacacagtaattgtcactgtgaaa

SEQ ID NO: 448457 - DNA, 566 bp, Homo sapiens
tgcaccccaggctgggtggcagaacaagaccctgtcaaaaacaactctagtactgcttggctaaaatcagaattgccccatttcatccattctgagatgaactctttttttttcacattatactatctctgaactgagaatacatcttatagttgatggaattttatcatctctgttggccaaatttatattacacagtaattgtcactgtgaaagtacaaattgttattcctgatggccaactggaaaattgaaacctcctaataatctggtaaatataccatttaaagactattgtaaatatgtgattactgattgttcactacatacttttattgatttttttgataagattaagaaagcaccagcatcaaaacttagtgaaagagtttgtaacttctaacttaataactgatttagacagagggcattagtgagtgctaaaagcrttgagtaatatgtttatgaaggaatggaacactgataaggtcttagagcatctctcaatagatacttattaatttatattaaatgactaattaatataaataaattgagattaatca

SEQ ID NO: 448458 - DNA, 600 bp, Homo sapiens
acttgaatgctgtcaggagcttgaaagaaaatcttgtagacagtggtggaacactcttgtgtcaccaaagcccttcatgatagtgaggcttggcattgtgtatagaatcacagacaactaatctttttcttcttttttgagacggagttgtccatccatgtattttacatgtattatctcatgattgtcagagcaaacctatcgatcatgtcgcccaggatggagtgtaatggtgcaatcttggctcattgcaacctctgactccctagttcaagcgattctcctgactcagcctcccaagtagctgggactacaggcacgtgcaaccacgcccagctaatttttctatttttagtagagatggggtttcaccatgttggccaggatggtcccaatctcctgacctcatgatccgtctgcctcggcccctcaaagtgctgggattacaggcatgagccaccaygcctggccgacaacaactcttaaccagagtagaaggtgaaaaaattttagaaatacatttttacaaagtattttgaagttacaaacccattcacaaatttattgtttctattttcatttttatataaaaagtgttat

SEQ ID NO: 448459 - DNA, 574 bp, Homo sapiens
ttattgctgtatatcccaaaacttggtggcttaaaacaaccaccaattatttagtgcctgattctctgtgggttggcaattcaagctcaagttcactgtgrggaggaggcttcatccggactccctcatgagtccgtggtcagctgctgtccagctggggtgctggctggtctagagtggcctcagctatattagcttttttggttccctgtggtgtctccttggtaacatcccatcttaagctttctaaaagcaggagtggaagcacacgagatccttgatgtctgggttcagaattggccacaacttctgttgcatttctgttgcctacagcaagtcacaagtcacaggacagcccagattcaggaaagggaaagcagactgcaccttgtgatggaggagttgtgaagtcacattacagcaagacatagatccaggaagactattgtgttcattttcacaaatcatcttccatcatactattattacttccactttatagatgaagacacgggagcataggctgaaagactgtaaagtatgtgagccaggacttaactgtttgagctgcctg

SEQ ID NO: 448460 - DNA, 575 bp, Homo sapiens
ccagacatagaagagaccagacactggcttaggcttccagaaagaacaagtcacaacaacaccccctctggcatctcccccaaagcctgactggtttttaatggggatcacctggggttttagttgaatgtagtcagagtgttgaacatctaatctgcctttgagaaagagtatcctgcatttcgaagggaaggaagtgaaaataaagccgcctgaatctaaataaaagggcttgcatagcaggggttttcagtgggttcctagctttggagcatgaagcagaagaaggagctgagcactgcccgggtaggggattcgaagaggcatgctccgctgccagtggtgtcaccttctgttgtgtaaatcgcagctcctgccaaagggaactccctaaacagagaaacaacgaccagaatagttcatgaaaagcctgggctgttggaagttaggccttctctggaattgctccccggatactgacggctccaacgtttccagtgtgctatggttggatcagacattcttctccaagccaagattgcttccaacagctrgaggaacagcccctcctgtcc

SEQ ID NO: 448461 - DNA, 530 bp, Homo sapiens
gtctatctaaaatgatcccaggagaggcatagatggaaaactattctgcacattyttccccagaaatagagtattagttttatagcatacttttcacctaaatattgagactgaacctgtaaagcaatggagtctttcatctaatcacctacatcaggatgcctggaaaaattgtgacaatatatatgtatatacataatttctgttttgagtaggcttgcaatttttaaaaacaagctttaattcagttgaaataaaaatcatacaatattaaaagcggtgatctgcaaatactatatatgtatgtatttctgtattgtaaaattagtaagttactgaatgtgatatgtaaactgtgttgggttcagtatgatagttgtaattataggaaaatagaacaagtaagactcatgtgatttgatctgaatatttgacatttgcgtaacatgagtgacttatttgctttagactgatattcatagtggtacaaattgtccttctattcatactatttctagtgggatgccaat

SEQ ID NO: 448462 - DNA, 530 bp, Homo sapiens
gtctatctaaaatgatcccaggagaggcatagatggaaaactattctgcacatttttccccagaaatagagtattagttttatagcatacttttcacctaaatattgagactgaacctgtaaagcaatggagtctttcatctaatcacctacatcaggatgcctggaaaaattgtgacaatatatatgtatatacataatttctgttttgagtaggcttgcaatttttaaaaacaagctttaattcagttgaaataaaaatcatacaatattaaaagcggtgatctgcaaatactatatatgtaygtatttctgtattgtaaaattagtaagttactgaatgtgatatgtaaactgtgttgggttcagtatgatagttgtaattataggaaaatagaacaagtaagactcatgtgatttgatctgaatatttgacatttgcgtaacatgagtgacttatttgctttagactgatattcatagtggtacaaattgtccttctattcatactatttctagtgggatgccaat

SEQ ID NO: 448463 - DNA, 570 bp, Homo sapiens
gacgctacagtttatagaaagcataagatgatgaaaaacctttgtccaaaaggagaaaaatcctaataattcctttatggaagagttgcaaatctttaattcagtttaatgtgtttatgtgagaaaagccaactggtaagcatgcttcmcaaaaataaatattgtggttactttcctgtcacagcagagaagcatatatgaaatccctacatttgtagacaaattattttccaggaccctttaaaaatgatttgatggtttcttagggtttaaaattacagtggagaaatactatgttagtttgaatttctttctcaactaggtaaacacttttgttgctagaaaattggattcttctatttatacagttttggtgaggagacatctataggtgtatttttaaaaatattcttgtccagcaacttggtaagcacttttctttcaatgactccagttcatcttcagcttcagaattttttttttaatttctttgattgttgattctctgtaatttagtgcagtctttcctcaaggtagttgcagggcattttgtcctaataagtccatctt

SEQ ID NO: 448464 - DNA, 578 bp, Homo sapiens
atgaagtatataatttgcgaatattttctctctgaggattgtgtttcactttcttgatggtgtgttttgaagcacaaaaggttttaattttgattaactcaaattatctattttttcttttgtcactcatgcttttaatgccatagctaagaatccattgcaaacactaggtcatgaagatttacctcgatgttttcttctaagagttctatagtttaacacttacatttaggtctctgatccatttgaattaattgtcatatatgatgtgagataaaggtctgacttctttcttttcatttggctatccagtttcctcrcatcatttattgaaaagactagtctttccccattgaatgatcttgtgcccttgtcaaaatcagttgaaaatagatacatggcttcatttctgaactttcaattctatttcattgatctacaagtccctcattctattaggactacactgttttgattgctttttgtctgcaatgtaagttttcaaagagttggaatgtgtgaaccctccaactctattattcattttcaagattattttggctattctgactacccta

SEQ ID NO: 448465 - DNA, 578 bp, Homo sapiens
atgaagtatataatttgcgaatattttctctctgaggattgtgtttcactttcttgatggtgtgttttgaagcacaaaaggttttaattttgattaactcaaattatctattttttcttttgtcactcatgcttttaatgccatagctaagaatccattgcaaacactaggtcatgaagatttacctcgatgttttcttctaagagttctatagtttaacacttacatttaggtctctgatccatttgaattaattgtcatatatgatgtgagataaaggtctgacttctttcttttcatttggctatccagtttcctcacatcatttattgaaaagactagtctttccccattgaatgatcttgtgcccttgtcaaaatcagttgaaaatagatacatggcttcatttctgaactttcaattctatttcattgatctacaagtccctcattctattaggactacactgttttgattgctttttgtctgcaatgtaagttttcaaagagttggaatrtgtgaaccctccaactctattattcattttcaagattattttggctattctgactacccta

SEQ ID NO: 448466 - DNA, 591 bp, Homo sapiens
agtagtttttcagtggattcctcagaattgtctgtatacaagatcatgtcacatgtgaatagaaattgtattacttattcctttccaatctagatgtatttttatttatttctcctgcctaattgcctttgcaagagcctccagtacaatgttgaatagaagtgggtgaagtggcaagatataatattcctgtgtttttcctggtcataagggggaagaattctgtctttcattattaattattacattaacagtgcatttttcatagatgccccttatcatcttgaggacttttacttgtattcctagtttgttgagtatttttatcaagaaaggatgttagatctggtcaaatgtgttttctctgtctatgatataatcatgttaatgttatcttggtgyctttattaaactgataagatgtattacattaactgatttttagatgttaagtcaaacttacattcatgggataaatcatacttggtcatgatgtgtatttccttttatatgtggctggattccactatctagtattttgttgaggatttttgcatctgtatttataaggtatgcatgctggtgtatagt

SEQ ID NO: 448467 - DNA, 524 bp, Homo sapiens
agacatatgcatttatgcttttttttataattacataatcatcattgccagggctctttgtgttttcatgtatttaccctctgggatcacatacttgtagcctgaagaactttctttagtactttttgtaagakaaattggctagcaacaagttctttctttttgtttatctgggaatgtctttatttcaacttaatttttgaaagatagctttgctgggaatagagttgtcagccgacagttttttgctctgagtgctttgcatatgctatgccattgtctctggccttcattgtttctaatcaatactcagctgttaactataaagatcctggaagacaacctaagcaataccattctggacataggaatggcaaagatttcatgaagaagataccaaaagcaattgcaacaaaagcaaaagttgacaaatgggatctaatcaaactatagagctctgcacagcaaaacaaactatcaacagagtaaacagaccacctacaaaatggaagaaaatatttgca

SEQ ID NO: 448468 - DNA, 601 bp, Homo sapiens
tcaggaggtcaggttttcagaaggagaagttaaggaggcgcaggcattgtatcactcactactttctttaattcaaatgcattccatgtctccttatgttggaagcttcaatgacattttatcagcttgagtatgcatggccccttagctttctggcactaaacggagagaaatatttagaaataagtgagtactttcttggaaattctacttgtatatgatggwgtaggtagatgaagagaattacatcggattcctgtagctagagtagagatacattatcatttgtttggagattctagttcttctccaacatagtccatatattgaaataaaaacacttccagttgattggctaatatatacatatatacatgtctatgtatacatatacaagcatacacaaatacatatgcaaatatgtgtgcatgtctgtatgctaatgaaaggccaacagtttctaagtgactactagttaattcatagctaaaatattgctgtcaccctttttatgttttgtaacgcttagtaactacgtgataggtactgtatacagaaaggttatgcagcatgctttattctgtagttgtgatagtgactc

SEQ ID NO: 448469 - DNA, 627 bp, Homo sapiens
ttcattgtttttaaggcatgctagttcacactactatatacaaaccctgaattgtgaacttttcactcactaaccaattcattaagacctggtctccttaaaaagtgaccattatcaaaaagaaggcaagaattttatttggaaattgtgcaaatgggatgattaattggttagaagtcaggaatacggaattggccttcaatttgcatttgcgtggcaagcacatcatttcttgtatatattttatgtttatttggggtgcctttacagggagctgaaggagattactgggagaccctccacaaacattgctacatttagcaaagtggctggacattccccaycttgtgtatcactgccctgatatcactgtgatctgtttttatcattgatggctgcagcagcccatctggagcagccactgtgaggatgcgagctgcagcctgggccatgcactccatgaagccagtgggggccaggaacaggtggaagccctgcaccctactgagttggtggggcaggagccccacactcccatgcacagctccagccacccagccatggttccagacccaggcatccttgcactctcaggggcctgcgaagactcctgccctggcaggcttg

SEQ ID NO: 448470 - DNA, 632 bp, Homo sapiens
tattgggtttgtattaataattactctagtttccatcagcttcaaatgagaatcatattcaaaatgttcagaaaagagcctcagtggctttggggcatgatcttgtaagaggatgtttcttttcaacatctattatttttactcatgttttaaattgtgcatattacttgcttaaagcactggcctttatattttccaagagataacattcataggaaaagtgaacaggtggtacaaatgacctgataacatttttaagtctgacatctttatgagcatttcatctagatatttatgtatttattttatttatttatttatagctctccttatttcacaaaatatttgcttaataattatttcattatgtaataraaaaggatgacatatgacctatgttttaagctcaaacatttttaaggaagaaaaatctatacctgctatcatgttaggtaaaacccatccagtacttatgaaaataaaaaattattaggcatagccattgtgacggtttggaacacatctttgaattttttgcataccactttcaaaatatggagtccaattcccctttcctaatgtgaactgaacttagggatttgcttctaatgaatagaaaattgtggaagtga

SEQ ID NO: 448471 - DNA, 632 bp, Homo sapiens
tattgggtttgtattaataattactctagtttccatcagcttcaaatgagaatcatattcaaaatgttcagaaaagagcctcagtggctttggggcatgatcttgtaagaggatgtttcttttcaacatctattatttttactcatgttttaaattgtgcatattacttgcttaaagcactggcctttatattttccaagagataacattcataggaaaagtgaacaggtggtacaaatgacctgataacatttttaagtctgacatctttatgagcatttcatctagatatttatgtatttattttatttatttatttatagctctccttatttcacaaaatatttgcttaataattatttcattatgtaatagaaaaggatgacatatgacctatgttttaagctcaaacatttttaaggaagaaaaatctatacctgctatcatgttaggtaaaacccatccagtacttatgaaaataaaaaattattaggcatagccattgtgacrgtttggaacacatctttgaattttttgcataccactttcaaaatatggagtccaattcccctttcctaatgtgaactgaacttagggatttgcttctaatgaatagaaaattgtggaagtga

SEQ ID NO: 448472 - DNA, 628 bp, Homo sapiens
tggccaaaaaatcaaatcaagatgcaaatcttagaaaaactgcagatcatcaggaggataaaacacacatacgtatgtgcacacacacacacatgcccacacctctagtcgaattatagaaattcttctgaaactagggacaaaagaaaatattaaaaaagtctaaagaaaaacattatctaaagaagcaatgaagatttacagctgatgtcttaatagaaatgatgaaatcaagaagacaaggggtgacatctttaaagtgctgaaagaaaaaaacagccaacctataattctatacctagagaaaatattcctcaaaagtgaaagagaaataggtattaccatccatacaaaaactgagacaatttgttgccagcagacaagaatacasaaaaaagaaattctttttttccaaatttatttatttttaaaatcgacatataaaattgcatgtatttattgtatacaacatgatgttttgaagtacatatacattgtggcatggttaaatttagctaattaacaaatgcattgcctcacgtagttatcattttttggcaacaacacttaacatccactttctcggcatttttcaagaatacaatatatcgtcacgaactatggtcac

SEQ ID NO: 448473 - DNA, 571 bp, Homo sapiens
attaaaaattttggaggactattttaaaccataaatgtatagtatttcaataaaaataaattttaacctaaaaattaaattaagaattgacttcacttcaagcagggtctgtaattttaaactggagctacacccaacattgacatatagctacttatatgtgaggcttgagtctccttccactttctggcatgctttgttaatatcattcagagccatccagaaaatactgtatctgtcagaagaactcagcctcaaaatctcaaaacatcagaaaatttttttaaaaaaactatcactctaactacctgagaaatccaaaccaaacaccaaatatgttatggaaaaatatgaactccatcattgcgactcctcatgttaccagctgttcatggaaaagcagaaaatagagacrcagcagatgatgaggtaatcttgtttcctacaggatttattctctagagggttatacagccactcgtgttttgaatgactcaagtacgcgagtcactcagcactgctacccagggaaatctatcctgtgctagcaacagagcacctgcagtgatgc

SEQ ID NO: 448474 - DNA, 566 bp, Homo sapiens
cacctcttacaggcgtgttgaggctggcaacaggtcagtacacccctcagatggagcttccagaggaaggcacaggctgccatctatgccatttcacagcctccactggtgatacctccaggtacttgaagaactgaggtgactagatctggagtggattcccagaaaacggcagcagccctacgaaagaatggstagacttttagaagaaaaacaaacaacagcaacaacaaaaccaaaaactccatccaaaggtcagcagcctcaaaaatcaaaggtagataggcccacaaagatgagaaagaatcaacataaagatgctgaaaactcaaaaatccagagggccccctctcctccaaataactgcaacacctctctagcaagggctcagaactgggctgaggctgagatggctgaaatgacagaagtaggcttcagaaagtgaataaaaacaaattttgctgagctaaaggagatattgtaacccgattcaaagaaactaagaatcaggataaaacaatgcaggagctgacagccaaaatagccagtatggagaggaacataac

SEQ ID NO: 448475 - DNA, 617 bp, Homo sapiens
ggcactggggatatagcagtgaacgaaacagacaaaatcctgccttcaaagagctcacattctattgggagactgacaactaataagtaaatgaaagataaatttagatcgtaataaatgctattaagtaaataaggcagggtaaggggatagcaagcaacaagttgtggggtgaggggactttaggtctctctatacagccgaatgatgtgaatgagggagcaagccatagggaagcccaagaggaaacactaaatataaaagccctaacataggaatctggtgggttcaagggacagcaaggaagtcagggtgaccagagtggaaatgtttgaaagttcatgtgggcaagaagaggtggccagatgccagatagtgcaggatcctacaggccactgtaaggacatggggttcattttcrtttgttttgttttttgtttttttaagagatgggatctcactatgttgtccaggctggtctcaaactcccggcctcaatcaatcctcccacctccgcctcccaaagtgctgggattatgagtgtgagccactacccctggcccctggggttaattttttagtgtgatggagagccttgaaggattttgaacagcaag

SEQ ID NO: 448476 - DNA, 579 bp, Homo sapiens
gatgccagatagtgcaggatcctacaggccactgtaaggacatggggttcattttcgtttgttttgttttttgtttttttaagagatgggatctcactatgttgtccaggctggtctcaaactcccggcctcaatcaatcctcccacctccgcctcccaaagtgctgggattatgagtgtgagccactacccctggcccctggggttaattttttagtgtgatggagagccttgaaggattttgaacagcaagaaatatgatctgatttggattttaaagcaataactctggctgctgaatagacatgagaacaggctatctctgctcccttctttggaagtgacctccttctcctctgtgcttccacaatatttaccatgtctcaattatagcatttgttttactcttttctgggttgtccccactggagtgcaagttccttagagacaaagtctgagcttgtttgttctttttcctccaccttgactacccccatggaccacccatgtcccyatggaccacccatgtccacccacacacatacttagaacagtgctgcacaaagtagatgctccata

SEQ ID NO: 448477 - DNA, 597 bp, Homo sapiens
aatttgagctattcaacaacaaaataggttcacaaagtctctacagcagctctccagaaagccagagaaggaatcctactggaatgatgttagattgaaaaaaatcaggaaaggcaaaagcctccacattgagtgccaactgtaatgatctggtcgtggctgctgaaacactggtgagaacattctcaggcggcatctatgctcagcaagcatgtggatatcaggaaaaaatgtctgctgtgggtagaggagcagggaatggcaacaagaatgccgttcccactccccaaagactccttcagcccttcagttgtatgatcctccattgctctgtgcttgaatactgggccactggtggctcaggtgcagtcgttggtatgaaattcaataaaatgtctcccaaacaggtacacattgttgtattctgcaaaatcagcatgaagcctccatccatgggccctgtggctttcagatctgctcagagacctggggcagctggcattgattctgtttgtttccttagaaggaacaatattgatctactrtaccatgaaacccgctcccggttcacctagttccaacaagcaattcccttgt

SEQ ID NO: 448478 - DNA, 576 bp, Homo sapiens
tctccatcataactgataactatcattttcatgggggatgattgctttgcatacacggttatacaacttaaataattagagctgtatgatgatggggactgtgtatctggtcccctgctatgcccccagggtctgatgctacgtgagtacacagtcaacattatgaagtcatcacagccaactggaaggttgatatcattcctattttacagatgtggagactaaggcttgcccacagtcacagattaaataagtggtagagccaagacttcaacccagatctgtctgawccccaaacctgagagttttctattctatgaagctgcctgaggaaggtggctctttcacattatcctcacacaaaaggagagcccaggtgtaggcacagactcatggtggtctcaggactcatctggtaccctggttgtagaaagtatcaaggtattcagattcagtggtggtggggagagtatggcttcacaaacactgtgcctttagcccattgacttttattgccagtatgttcttttccagattgggtgaatcatccttggttggcgggtagacctctcttaa

SEQ ID NO: 448479 - DNA, 563 bp, Homo sapiens
ccaaaagatgcctggattttttagttgggaaatctaaagttggcaaactttagaggagaccaaaatgttgtgccaccagagaccagcaggggtttcaataaatgaaactttagcattgaaaasattcaagtccaattccctcagaaaagttactgaaaataaagattatttacttaaacacccaaagatagcatttacgaaaaaggcactttgcagggaaatcaatcttaatgttgcctttcgtgattccaaatccgtatgtgctgttaagaagtggcccttaacatttccttgggtctctgttcaccaggactctccccagatagacctgtttttgctctggggctttctcttcttttttctaataaagttatgagaaaactggaggataggcagtgggacagccaccctatgatgagcactgatattaagaagggttcttgtcatttggttcccaactgcaagtcattacaaggaaaggaacgttagtgatagaaaggcacaagcttcagctcaaatccttaactttgggattttgtcataaaactcttatgctgagaatg

SEQ ID NO: 448480 - DNA, 509 bp, Homo sapiens
caatgtggtgcagtggttaagcatgtggatttactgaaccaactgggtttgaatcctgacaccacyagtactcactgtgtgaccttgggcaagtcgtttgcttcctcttctcatgcctcaattctcttctctcttaggaaggggttttagtagtatttatttgataggttgtttgggagaattagatgcatttaatgctggcaaaacacttggcaccatgctacattactacataaatgttagcaatcactgccatgactagctggggtttgaacttatatcccagtatgctagactgtgcaggaatactccttctctgtacaaaaggaaaccatctgttcttcttaacatccaaactcaggtgtaagaacatgatgttcctatgggatgcaaggccaccccacatcaaatgaaggatgagagagtaagagagggagcttgtcccaatgcctagagtgaagctggtctaagcctcctccccaaggctccttaagcgtggggagtaatcc

SEQ ID NO: 448481 - DNA, 591 bp, Homo sapiens
aggaattaggtgtagggagaagctgtctgcaaaagtgatcttgaggaacgagagtgttaactaaagttgttgattacttgatatttcttttggctcacaattcccaggcctccctgaaaggacagagagaggaccagtccatccaacaaacaagcacaaggcctctgtgccatgcattgtgtttagcgatgatgctggctttggtggggtacagacacacatacataattrtgatctggtggggagcactataacaatgatgatgagagctcattgggaaggcaagtggagggaggaggcagaagttacttgttagtccaaggaagttggaaaagttttgtagagatgacgtgagttggatcctgatggaggtggaggaaggagagaaaggaacaacacgtgcaaaggaagcaaggtgtaaaataatgcagcttggagagcagaaaaaattctttctgcctggagctgtccttcttgctttcttgagataagtgggtcaatttggggccccataaccctagatgacagattgggttaccaattttaaggtgtcctgaggatgtaactctgtgacatgtctagccaaattct

SEQ ID NO: 448482 - DNA, 561 bp, Homo sapiens
tgtggttctcagagcatggtccacatggatgttcctggaagccaagggcagatctacttttctacaatatcagtatttaggtaagctctgaatgatatagctactgagtggggaacaaaaagcaacagaccaagagttcacagacctgagttttctgggcctagatttttcactaactagctatgtgaccttgaacaagtcttttaacctctctgtgactctattgcttctttacctgtgaaacaatgaggttaggctgcaatgtctctcaaaatgtgatcctcagaacacttgtagcagattcacctgagyggcttttagaaaatgcaaattccgggcctggtgcggtggttcacacctgtaatctcagccctttaggaggctgaggcaggtggatcacttgaggtcaggagtttgagaccagcctggccaacatggtgaaaccctgtctctactaaaaatacaaaaaaaattagctgggcatggtggtgtgtgcctgtaattccagctactcaggaggctgaggcacgagaatgtcttgaacccaggaggtggaggtta

SEQ ID NO: 448483 - DNA, 598 bp, Homo sapiens
tttcatttttagtcgtgttgttgcctgattttggtatcaaggtgacacttgtttcctataatgagggatactatgaaatagcttcaggaaggtttgtttcggatcttctttgtacatctcataaaatttggctgtgaattcatctcgtcctgggatttttttgttcttgctcttttactgattaaatgtgcttgcttattattggtgtgtttagaatttctatttatttctggttcaattttgagaacttgtgtatttccaaaarttcaatcattttcttcaggttttctattttgtgtgcacagagatgttcatagcaatatttgttagtttttgtgttctgttctaacagttgcaatgttgcctttgtcatttctgattttgctcatttgaattttctctgtctttcttggttaatataactagcagtctataattttgtttaacctttcaaataacatatttttaatatttttgattctggcatcattgttttagtctcaatctcatttggttctcctctaatatttcttatttttttttctgctagctttgggtttgatttgttcttgtttttctagttcttaggggtgtgaca

SEQ ID NO: 448484 - DNA, 604 bp, Homo sapiens
taatagatgtactatacttttcatgttggcccttttccccatgcaccttctgaagcactttcaaatcccatcatttgccayactgatacagtaattttcttattccttttctattcgtgtttgaaaattattaaaataccttgtgccccaattatagcctctaaaagccatttttactgaaagaaaccaagattccttagaggaagggcatattccagttctgagtgtgaaagtttccatttgagcctagaagagcttgcactctagaaaggagagaagataagaatgacaatgacgcatgctgccaaaggacccaggatcttacttgaagaggctcctgctggtcaaaatatggaaacttgagcatcaaaaaatagtaattatgatgaatggaaaatgacgtattggctaaaattcataaattcgcatggcattaatcaagtgagatcagatctgtagcactaagcttcaatttacaggaagtacaaaaggaacatgtcaaagtgtgtcacgtggatcgatgagtaagccattaggaagtgatgtggaaatctttacaggacaaacgacttgatttctttcataaaaccgaaactttcactgg

SEQ ID NO: 448485 - DNA, 604 bp, Homo sapiens
taatagatgtactatacttttcatgttggcccttttccccatgcaccttctgaagcactttcaaatcccatcatttgccacactgatacagtaattttcttattccttttctattcgtgtttgaaaattattaaaataccttgtgccccaattatagcctctaaaagccatttttactgaaagaaaccaagattccttagaggaagggcatattccarttctgagtgtgaaagtttccatttgagcctagaagagcttgcactctagaaaggagagaagataagaatgacaatgacgcatgctgccaaaggacccaggatcttacttgaagaggctcctgctggtcaaaatatggaaacttgagcatcaaaaaatagtaattatgatgaatggaaaatgacgtattggctaaaattcataaattcgcatggcattaatcaagtgagatcagatctgtagcactaagcttcaatttacaggaagtacaaaaggaacatgtcaaagtgtgtcacgtggatcgatgagtaagccattaggaagtgatgtggaaatctttacaggacaaacgacttgatttctttcataaaaccgaaactttcactgg

SEQ ID NO: 448486 - DNA, 590 bp, Homo sapiens
gctgtattcccagctaaatctaggcctgggacattaaacctccacgaggaaagtggtgcaatgattcagatactggtgtttrcaaagtgttttacatacagaattgttagaattgtctttagaagataggtttatctaacatcttgcatctattatatgtactaataccattttcttatggggtctcctagttgacttaagttactttttcttgctccctgtatgttgctttgtggaaatgcttttcactgggaaaggcagtagttacctaaccttaaagttcagcaatactggattgcagttttgacccagggtagacaaccagtttcttatacctttggacatatgatggtccaaaggcagataaaagagcataacagtgtcaatcaatgttcttttcagtcccccgacccagtggatattggaaggtctacagaactcttcatgtattaacgaccttgagtcttgaactgtcccatggtcatattttccaccaatgtaaatactgggacaaaaagcaagctataaaatgcagagatacaagagaaaaaaggaggatgtttttgaagacaacttggaattaagtctaa

SEQ ID NO: 448487 - DNA, 604 bp, Homo sapiens
tacatctgtccatgtctgcagatactggacacaaaatagtaaacgagagacaaggtccttgtcctcaggagctgacatcaggagaggagacagtaaacaagacttccagtagcaggtgccatggagtgggtaactgggtggtgggtagatagcaacccatgtgcagatgggggagggatgccttacttagccaggtcagcaggagtctctctcaagaactctggagagatgagaaattggtagaggcccaggaggtacaaagtctctaaagcaggcctgaccacagtgacagaatccaggggcagaaaggaggccagtgaagaccctggatkaggaggcaggacatgcagctgagccagatcataggccctgaggccatgctaaggaacgggatttttttttttctatgtttaataagaactactggtaaggttcaagcaggtagtacagtgtgatatgttttatgaatttttacttttcctttaaactccagaacaatgtaggggaattaaattatttatttattcacttattttatatgtaagagatggggtcttgatatgttgctcaggttggcctgtagtggctattccccagtgtgatc

SEQ ID NO: 448488 - DNA, 567 bp, Homo sapiens
ggcctttgttcctcagcccatttaagacattccttaaatgcaatctaccagaagagtggcttcattcagagccagcgggggccagttatgcgggtgggaggcacaaaggtttgcctgggtatctccctgcgcggcaagtcccacaaccagcacaaaccactttagcctcagaacaagaggctgatgggggtcactcgagttcacattggaaaggctgtgttggataggaaaaaagaaggctggaaaatgataacagcaattatcttttggtggaggggctatgggaaattttcactccttctttatagcctcccctgttcctcaacacagaagagcatggagtttttacrcagagaaaagaagttgtgcagtggccgctatgttttcatttggagccgtaaatctaaggttgtccctgtttacttgatatttgtatcagagaaaaaagacatattaaagatggatggaagggggaaaatcaccgtatgtccagatttactgtttccttccagcatttggcaaaagtaatgagacagcattggacaggtgtgctggtcgggacctttt

SEQ ID NO: 448489 - DNA, 567 bp, Homo sapiens
ggcctttgttcctcagcccatttaagacattccttaaatgcaatctaccagaagagtggcttcattcagagccagcgggggccagttatgcgggtgggaggcacaaaggtttgcctgggtatctccctgcgcggcaagtcccacaaccagcacaaaccactttagcctcagaacaagaggctgatgggggtcactcgagttcacattggaaaggctgtgttggataggaaaaaagaaggctggaaaatgataacagcaattatcttttggtggaggggctatgggaaattttcactccttctttatagcctcccctgttcctcaacacagaagagcatggagtttttacgcagagaaaagaagttgtgcagtggccgctatgttttcatttggagccgtaaatctaaggttgtccctgtttacttgatatttgtatcagagaaaaaagacatattaaagatggatggaagggggaaaatcaccgtatgtccagatttactgtttccttccagcatttggcaaaagtaatgagacagcattggacwggtgtgctggtcgggacctttt

SEQ ID NO: 448490 - DNA, 578 bp, Homo sapiens
tcaaatgataagtattctgtaaggaaagaattacaggtctttttttgtattttttatttttctaaaatttatgggtattactttaataatcaggaaaaacaaacatcttcttgttaaagtcttcatttcataaaataaagaaaggcaagcaacctgcaactacagatcctacttcctactcctctatcaaatactgaaatcctctctctgtcacctaaaaggaggaaattgtggtggtaatgttcaatagctcatggtcaatattcttcagaaaatggaaaataagggtgattagcagcactgaaagagaaaaaatattaatttagtaacttttttccattctgtcaaagagtttttctgaagaagcacttgggatgggctaaaattcccgaatttaccacyacgtccctacttgtacctcggcacacatggtttaatctatggaggggatgagatgcatttctaatacccacacctgaaaaacacaattatgacttatttaaatataatcataaagatacttgttagtaattaaaattactgtttgttttcctttttatgttcatttttctttttta

SEQ ID NO: 448491 - DNA, 603 bp, Homo sapiens
agggctcctgcacagtgtccttcacacgtgtgcttcttgtaaggttctcaggacacccttggactaagtccacttcctgggcatttcctatgcacaaatgctttgtgtgcataagtgttttctactctaccacaggaggggcagcatgggtggagagaatcaggatgggaccaaaaccaggaattttggtttcacaacataaagttggcaacttaactctatccctctgctagggacatcaccttttcttcattttctgaagtgaggagttgggttaggtgttctctaatcttcaaaaatcattgcagatttttcatgtccttgtttactcagtataaatttcatatatttattctcttagaattatttgttgagtgcctgttgaaatctttgggtattttattaggttgcatgtctttttctatgtgtagaagatcataattatactgagtaaacttattaaagaaaacctctcaacatagaggtttaatacaaaaccatttatttaactgacaattccatggtttgaartttagcctaaagctccacctgaactcagtctcgtcctgtttctggctgggctttctcacgtgtgtgcagggc

SEQ ID NO: 448492 - DNA, 603 bp, Homo sapiens
agggctcctgcacagtgtccttcacacgtgtgcttcttgtaaggttctcaggacacccttggactaagtccacttcctgggcatttcctatgcacaaatgctttgtgtgcataagtgttttctactctaccacaggaggggcagcatgggtggagagaatcaggatgggaccaaaaccaggaattttggtttcacaacataaagttggcaacttaactctatccctctgctagggacatcaccttttcttcattttctgaagtgaggagttgggttaggtgttctctaatcttcaaaaatcattgcagatttttcatgtccttgtttactcagtataaatttcatatatttattctcttagaattatttgttgagtgcctgttgaaatctttgggtattttattaggttgcatgtctttttctatgtgtagaagatcataattatactgagtaaacttattaaagaaaacctctcaacatagaggtttaatacaaaaccatttatttaactgacaattccatggtttgaagtttagcctaaagctycacctgaactcagtctcgtcctgtttctggctgggctttctcacgtgtgtgcagggc

SEQ ID NO: 448493 - DNA, 487 bp, Homo sapiens
tcatattcatctttttatattactgcaatatttttctcttcattatcacatcatggagtttctcaagtccttcctttatttcatgtcctatgattgcacaggtaggctgcaaatgccaaggagttgatgagcttagttcaaccattgctaacaatttctcaatttctgagagagacaagttcttcaagtctagtttcttagcacctgtaagtacagggacatctttattttcttataccctattttataaagttcagttttgacttcttccatcctgttaacatcaacagtccacaacaaacacaatgccatctgtgcatcttgcatatggcttctacagwgttcctcatttcttctgaccacctacatctcaggagtgaaaagtgacttttagaattttccaaaattaccttaatcttttcagtgttaaatcctttggtgtgggtatggtatttacaaatttattgaatagcagcctgtataaaac

SEQ ID NO: 448494 - DNA, 397 bp, Homo sapiens
ttatatacattctactccaaatcatctttaccaatccactctctggtggtctttcataccttagagataagtccaccttctccctgagttctgattaaccatttcagtcctccttgatgaaattcacctcccccmaaaatagtacacacaatttagcatgaaggtctctgtaccattttcattaagacttctccaagaagaggtgcaattaagggtcttccgttttcttctagacagatgttttgctttctagaatcttctgtttcacaaatgtaagtggaacaaaacaaatggaagccaggcagtaggacaggaagatggacattgagaagataaaggagaggaagctgaaggtgctcacctggttgcagacaggcttgtacttgagtcctggctt

SEQ ID NO: 448495 - DNA, 584 bp, Homo sapiens
tcccagggtgggaacctgagtctaatgctcttatattccatggtcctcctgggcttgttggctgcctggcctttaggggagctgcttttgccttttctctaaacagagggagagcttccactatcacactgattgtgcctaatgaaaaagtctctggcatttaggatgtcatcaggcatgagcccttggcctttttgttttgtaccaaatttctcacccttttctgctgcatacacctccagaaccattgcagacacacccacaccaagactcagttgctaattacaacccatgatacccaaccttgaccttgamccttcatcttataccacagcatcacaactgctagagtgtttttaaaagtcagctttattgaggttaatttacacacagaaaaaaaaaaagcccttttaactacacagttctgaattgtgacaagtatgtatggctgtgtaaccactaccaaaatgaagatactgaacatctctatcattccaaaaatttccctcacgccctttgtggctcacgccttcccccagtcccagtcctggcaactactgatctgtttccctatagttttgcct

SEQ ID NO: 448496 - DNA, 584 bp, Homo sapiens
tcccagggtgggaacctgagtctaatgctcttatattccatggtcctcctgggcttgttggctgcctggcctttaggggagctgcttttgccttttctctaaacagagggagagcttccactatcacactgattgtgcctaatgaaaaagtctctggcatttaggatgtcatcaggcatgagcccttggcctttttgttttgtaccaaatttctcacccttttctgctgcatacacctccagaaccattgcagacacacccacaccaagactcagttgctaattacaacccatgatacccaaccttgaccttgaaccttcatcttataccacagcatcacaactgctagagtgtttttaaaagtcagctttattgaggttaatttacacacagaaaaaaaaaaagcccttttaactacacagttctgaattgtgacawgtatgtatggctgtgtaaccactaccaaaatgaagatactgaacatctctatcattccaaaaatttccctcacgccctttgtggctcacgccttcccccagtcccagtcctggcaactactgatctgtttccctatagttttgcct

SEQ ID NO: 448497 - DNA, 375 bp, Homo sapiens
tacatgagggtcagggacccacttaaggaggcagtccatccattatcagagctcgaccaccatgctgggtgagccactgctcttttcagaggtgtcagccagggacatttaagtctggagaagctgtgcccacagttgccccttcccccacgtgctctgtcccagagggacgagggttttatctgtaactccctgactggggctgctgccttttgttcagatatgccgtgcccacaraggtgaaatctagagaggcagtcagccttgctgagcttcagtgggctccgcccagttccagtttcccgacagctttgtttactctatgagcataaaaccacctactcaagcctcagcaatggtggatgcccctccccc

SEQ ID NO: 448498 - DNA, 594 bp, Homo sapiens
aagcgcagtatttgggcagaagcgtactgttcttcctggcacagtctctcatggcttcccttggctagggaagggaaatcccctgacaccttgtgcttcccaggtgaggcgacgccccaccctccttcggctagccctctgtgggatgcacccactgtccaaccagtctcaatgagatgaaccagatacctcagttggaaatgaagaaatcacccatcttctgcatcgatctcactgggagctgcagaccggagttcctaytaggccatcttggaagagtccctggtttttcttcttgtgctcccatgtcctcttatttatcactttaatgtgattatttttggtatttcattattaagtattatattggctttggatttctaaaaaatacttgttaccaagttaagaaagtctgcttttcccttggcacaccaggaattttaatcaaaagtaacgttaacatttataaaatgtcctttagcatctaccaagattacattagcatatttcctaaatttgaacaatttttgtactcttgaataaatttgatcaggtaaagtgtattgctcttttagtatactgttggatttgata

SEQ ID NO: 448499 - DNA, 596 bp, Homo sapiens
ttggttaaatcttaatgtaaaagttggctttatttttttaattgtgcatccttggtacatggttataaactgccaaaaaaataaaaataaaaaagagtagatctattgaagatctacctaccttaataatgtgtctggaattggttcctgcyggtagattagtggtctcagtgacttcaagaatgaagcggcagaccttggtggtaagtgttacagctcttaaagatggcacagacccagagtgagcgatagcaaggtttattgtgaagagtgaaaggacaaagcttccacagcatgaaaggggactggagcgggttgctgctgctggctggggtggccagcttttattcccttattgtcctctccagtgttctgtttctgtcctatgagagtgcccttttttcagtcctccctgcgattggctacttttaaaatcttgctgattggtgcgttttacagagtgctgattagtgtgttttacagagtgctgattggtgctttttacagagcgctgattggtgcattttacactcctcttgtaagacaggcaagttccccaagtccccacttgtctcaggaggtccagctggcctcac

SEQ ID NO: 448500 - DNA, 596 bp, Homo sapiens
ttggttaaatcttaatgtaaaagttggctttatttttttaattgtgcatccttggtacatggttataaactgccaaaaaaataaaaataaaaaagagtagatctattgaagatctacctaccttaataatgtgtctggaattggttcctgccggtagattagtggtctcagtgacttcaagaatgaagcggcagaccttggtggtaagtgttacagctcttaaagatggcacagacccagagtgagcgatagcaaggtttattgtgaagagtgaaaggacaaagcttccacagcatgaaaggggactggagcgggttgctgctgctggctggggtggccagcttttattcccttattgtcctctccagtgttctgtttctgtcctatgrgagtgcccttttttcagtcctccctgcgattggctacttttaaaatcttgctgattggtgcgttttacagagtgctgattagtgtgttttacagagtgctgattggtgctttttacagagcgctgattggtgcattttacactcctcttgtaagacaggcaagttccccaagtccccacttgtctcaggaggtccagctggcctcac

SEQ ID NO: 448501 - DNA, 634 bp, Homo sapiens
ccagtaagtttaccctgggcagaagagaaaaatgtattttgtgagaatgttcatctgaaagagaattttaaaataggcttttttttccccattttcaccacttaatcactcttcaccaagagtagtgagcataggaagaagggtgtaagtctccttttaatattttcagaaggtaagaagaagttcctatttcatggatcagcaagaaatcagaaaattctggaaacaaaaacaaatactgatctaaccagtagaaactggggagatgttacaacatttgtatgggatagactcataggagaggggaaaatggcacctgaaacttaactccagggcatacattttttaaaccaagatatacagaccgtaagaattcattttccttattcckgtacatcacaacattttcaaccttcccaatttaaaacaataacaatctaagttttataatgtatggagaaagaactttatcagtagaaatagaagagctgaatactacaccttcattaattgttacaggttgtccccccctatcctatccttgaagaatcttggggtcttgtccaagtcccctgcagactgtagggtttggattttattacattttatttctgtcttgagtgtctctcctgta

SEQ ID NO: 448502 - DNA, 625 bp, Homo sapiens
ggctgagtccaggcagaaagatgcagctgcggaaaaaagttaaactaacaaaacttttagcagttatatggggctttggtgactcactgaaggtgtgagaaaccctaaatacatgattaagacattaactgaattctgagactgtatggaggctaaaacagtagtccccaaacttctgaaatgcaaagtgaagtcccccacagtgtcatggtgctagagaatcaacgaactgctatggaaaagaggagccccaaaacaaaagaagtaaaatataaaaacataagagggagtagggaattgacattggtaatttacaggtggttttttgatgggaatatttacagattctgagcaaagctacaggctgtccctcaaagaaaacaacaaaagagatctctattcttcacagaagactatagagtgtcccaaacacattgccagtcttcctttcaagcgagttgctgaattttgaagctttatggagcaggaggttaaagagctaaactgaaaacttgctgttatcttttagggctggaagacagagatccaccaggctctcaaytgaaagccctggagggctacaccctaagaacagaagtgaatcggaggtacacttagcaaaact

SEQ ID NO: 448503 - DNA, 613 bp, Homo sapiens
aacactgtaaatcctacaggtttcacagtacagccctcacttgaatattcactaaagtttagctccatactaataaaggatctgcctgtatggttaaagcaaatccatacactctggatgggtttgaagttccttatgaaaccttaatttcattaagttgagttagcaaacttcctctgctcctttttataatatcactttaaaagttgtaacagttaaataccaagttttagccaaaaatatgaattcatgatgaattcacatataaatccatgaactggaagcatatcattgaaattttcaggtagatatttaaactgtgaaccgtttctccacctacagaactaatgtatagaccaacagagagttccgctgatgctgatcacataccaaaatatgaaaacggtgtttatttttaacaaataggagatgagcagcctgtctgatccacagccatatatccrattgaccttagccacttttcccttctgataataattacatgtcagttattaaattactttacatcctcatggattatagtttcactcatgccaactaacattttctatcattctttaaaattacttttcctatgtgaagctttcaaatt

SEQ ID NO: 448504 - DNA, 626 bp, Homo sapiens
aacatcttttcactaaatgtaatatatcataccaagttttatgtcaacttgtttttcctcgctatctttaaaagttagtataaatttagtaagcttcctaatgtaaaatttaatatacttyctgatttctaacaaagcacagtttagttttgtttatggtattctggtgaaaaaattattgatagttttaaaattagtgtaccttataaagcagcataaattatgtattttctttgttctgagttcttagagctcttagtgctatttcttcctgattttagatttgtaaattttgtttgactttttgatgtgtgggcattgaattagtttctcttaggagaagtttccagatgagtactgcttttagaaaaagaaacatatatttttattaatacctgttggaacttctctggaaggttttggatttgttttctttcttctgtctactacaaaagtgatgagactagccttatcctttcatggagtgctttcatcaaaaaaatgtttgttgttctgtccatgtacaactttgactattgatggttctatttattagaatttaaacatatactttgtatgtttgtaagaatagaaaggtaaaaaaaaatcaaaaggatatgcatcac

SEQ ID NO: 448505 - DNA, 626 bp, Homo sapiens
aacatcttttcactaaatgtaatatatcataccaagttttatgtcaacttgtttttcctcgctatctttaaaagttagtataaatttagtaagcttcctaatgtaaaatttaatatacttcctgatttctaacaaagcacagtttagttttgtttatggtattctggtgaaaaaattattgatagttttaaaattagtgtaccttataaagcagcataaattatgtattttctttgttctgagttcttagagctcttagtgctatttcttcctgattttagatttgtaaattttgtttgactttttgatgtgtgggcattgaattagtttctcttaggagaagtttccagatgagtactgcttttagaaaaagaaacatatatttttattaatacctgttggaacttctctggaaggttttggatttgttttctttcttctgtctactacaaaagtgatgagactagccttatcctttcatggagtgctttcatcaaaaaaatgtttgttgttctgtccatgtacaactttgactattgatggttctatttattagaatttaaacatatactttgtatgtttgtaagaatagaaakgtaaaaaaaaatcaaaaggatatgcatcac

SEQ ID NO: 448506 - DNA, 529 bp, Homo sapiens
tgcctcagcctcccaagtagctgagattacaggcatgcaccaccacgcccagctaccttttgtatttttagtagagatggagttttaccatgttggccaggctggtctggaactcctgacctcaagtgatccacctgccttggcctccaaaaatgctgggattacaggcatgagccaccacatccagccataattaaatttagttgaggatattgaagatgatgtaatgggatgaaataaaagcaattctggataaattatatatgttttaggaataaatggtagaagtytaatgaatttgtcctatattacaaacaggagtgtaatagtttagtgcattccagagaagaaaaataatagactattacattaatttaatcaaaaccaattgtgcatttcaaaaaagataaagacatgaatggaatttgagtatacttccatacttgcgaaaatgaatttaaaatctaacatgactcagtaaatcagctatgatttcctgacagggagagttggggaggtgtagaaaaaa

SEQ ID NO: 448507 - DNA, 546 bp, Homo sapiens
caattactcatttaatccttctggtgctacaaaaaaaaataccagatagtgatgacttagaagcaatcagaatttatttctcaccattctggaggctgaaaagtccaaaatcaaggtgccaccattacgttttccatgagggtcttcctactgcatcttttgcatggcagaaggggtaaaaagggcaaaagaaaaaacatactgtctttacatgatgaaaaagccagaagagagaacacatgtcctcaagctcttttataacagccctaattctaggcatgaggacctccccttcatgacttaattacttcctaaatgtctcacctcctawtattattatattggcaattaagtttcaatacataaatttaagagggacacattcagatcctggcaacagtttatttaccaccataggtctcaggaagaattatagttgtgaattataatggtggtgttttgataaaatcaatgaataatccagaaaatgaaacagagaaattttaggttggttagtaagataaactaatgggaaaataagtttta

SEQ ID NO: 448508 - DNA, 605 bp, Homo sapiens
tagaaccttaaaaaaagttgcaactggtaaatmctatggagaacaaaacaaatattcagttttatccattgtctcaaaatagcatacttccttggaccaggtgtcctcccttaaagaatactgtggacatgtgttcttccgggcaaagttagaatatacagagtctacaacttcaattttttaacacaggaagcaaaggggattaatttactcttaaagcatatttcaaatcattaagccactgacttaaacatctcaagccagtgattaaaagaatatcttattgtgacttctcccaattcttgttttaagaattatttttagtagtccatgtcacaagaggttattatatcaggatgagtgagacaataattgagtgtactaactactaatagttactagtgtagagataagagtgctgtgacactaagattttgcttatacattttcattacacttgtagttcataaacacctcacactcttttcttatttctaacagtagaatttcaagaaattttttattaggtaaccacaaatggaacggaaatacaatatgtagcttctgagtgagtaaagggaaataaaatagttacatctattaat

SEQ ID NO: 448509 - DNA, 625 bp, Homo sapiens
taaaataatattaaagttctatctaagacaaacattctgcatgtcttataagacacaaactgtactattatttgtggcaggggttctttactgctgtttaattggacttctrgttttatttctgtaatatgtggtataaagcttcagtgaagttcaaatgttataattaacaaaaattgattagtgttccgcttaaatacatttatactatgtattgtatgtatgctctggacacagtcacaattatagattaaaagctcaatatataaatataagtctcagtgacacaataagaaaagttctgatatcttttggaggaaaaatgttagcaggtggggtcaaattacagcatatcaccttaaagtagtactgttcttgtgaaatctcttaagtatgtttattttcacatccctcaggaaattgtatggaatagaaagaagtgcatacagaacaaaaatgacacctatatttaataggagctcctcttctagggctgctaccttaacaccagacaatagatgaggcactagggtctaactttattattttgtaaacaatatattcagctagtaaaatagaattgaggaacaaaaagtaactctcaggttgcaactatttctcattt

SEQ ID NO: 448510 - DNA, 587 bp, Homo sapiens
tttcagtagaggaaaaaataatagtaaagaatgatttatgatccttattcagttactacctcttttgtggaaggagtttccccacttttttgcagtcaatgaatatttaggacccccatggaaatacacatgcaaacacactccaatttgcctgtgtttccagagtctatgatgtagttactcatttgtgaatctgtaggttagagccccgattagaagatgagattctcatgtcaacaagatgtacttttgtgtcttaataattgcctcaaaaatagtaaataaataattgctacttcttttgccacttatttttaatagtcagggtttccccaagagagcagtgagaaataaaaagcaattctttacatcacaactatttcttattttagatctcctcttgtcctgttaattgaacatcaaaataatatgcttatgttaaaataaatcatatttaacatagagttattttgtgagcctgtgtgttggaggggcaggggcagggtgagcartaggttatcaaattatagaagtcaaattacattttacaataagaggacagagtgaagggaactctagaaatgatt

SEQ ID NO: 448511 - DNA, 617 bp, Homo sapiens
taccaccatacttacccagagcaggttggaaatactggagtcagtacctctctacctaagatttcttataaccctctggatccttaccctttgtcaacttctcctgttcaccagtttaccacagggaggactgaaaattcccactggaagattatagcttaatttttattttctttttcgctttttataaagatagttaatggcaaagggaaattgtattttagcagttagaaaggggtaagtagccacattggcctgaggctcattgcactttcaccccattagrgtaaaatgaaatcctgatgtggtcagatcaactaagggagagaccgacctcaaagataaagagaaagcgctttccacagctttatatatttatccttttcccagtaattctcctcgttgtccttagcatcaaagtacctatttcttttggaattactattctgccttataaagagaatctcccagactaaatgctcatggtatagaaacttaaaattaaaggtaggcactttgacatggatctacatacatgggagaaagaggtaataaaggagttaggagttagcactgacctaacgctacaagaaaatttcacagcagatgtggaattt

SEQ ID NO: 448512 - DNA, 617 bp, Homo sapiens
taccaccatacttacccagagcaggttggaaatactggagtcagtacctctctacctaagatttcttataaccctctggatccttaccctttgtcaacttctcctgttcaccagtttaccacagggaggactgaaaattcccactggaagattatagcttaatttttattttctttttcgctttttataaagatagttaatggcaaagggaaattgtattttagcagttagaaaggggtaagtagccacattggcctgaggctcattgcactttcaccccattagggtaaaatgaaatcctgatgtggtcagatcaactaagggagagaccgacctcaaagataaagagaaagcsctttccacagctttatatatttatccttttcccagtaattctcctcgttgtccttagcatcaaagtacctatttcttttggaattactattctgccttataaagagaatctcccagactaaatgctcatggtatagaaacttaaaattaaaggtaggcactttgacatggatctacatacatgggagaaagaggtaataaaggagttaggagttagcactgacctaacgctacaagaaaatttcacagcagatgtggaattt

SEQ ID NO: 448513 - DNA, 559 bp, Homo sapiens
taatatccaaaacatctatcacaggtttcaagagcctcaaataattactgtcaaaatttcacataaagctcatttaatattgtgcttgaggaatctttccaataactttgaaatcaaaccatatagaaagcacttggcttgacttacctagtggctgtatgttaaagcatcggtaaaagagcattccaaccaaatcaattcacttaatttttcaagtagatctgattactatggtcttttaaaaaattcaaaggctccacctaatgagaaaaaaacaaagaactacatttaaaccggagcgtgattataggagctatacattaataacacaaaaatcaaatccagagtattatgatattatactatcttttcytacgttactgtgctacttaaagctatcaaacaacaaaagcgtctaggaattaagttaaagtttccagtttggggtaaaatgaatgttcaagcatagagaaaacaataaaagaatacaacaaagtgtgagaacagaagagtttgttattggcaggtggaaataatggttatacaatgtcagttaaga

SEQ ID NO: 448514 - DNA, 617 bp, Homo sapiens
taatgagaaaaaaacaaagaactacatttaaaccggagcgtgattataggagctatacattaataacacaaaaatcaaatccagagtattatgatattatactatcttttcctacgttactgtgctacttaaagctatcaaacaacaaaagcgtctaggaattaagttaaaktttccagtttggggtaaaatgaatgttcaagcatagagaaaacaataaaagaatacaacaaagtgtgagaacagaagagtttgttattggcaggtggaaataatggttatacaatgtcagttaagacattaaaattagagatgggggaaaatgcaatttattgctttggaattatactcattgattcttctaatttactgatgcaatgaaaatttgtaggtgacagttcctgaaagccattaagccctagctacatgcaatctctgttgagaaatagaaactaatatctagacagatcatttaaacataaaaatggtcaagaagtcttggagataattcactggcatggatttccaaatcattctgagaatgttacaccttgtctccacagaaagtgtttactctcctaaggactcacaaatagcttaattattatttataaata

SEQ ID NO: 448515 - DNA, 617 bp, Homo sapiens
taatgagaaaaaaacaaagaactacatttaaaccggagcgtgattataggagctatacattaataacacaaaaatcaaatccagagtattatgatattatactatcttttcctacgttactgtgctacttaaagctatcaaacaacaaaagcgtctaggaattaagttaaagtttccagtttggggtaaaatgaatgttcaagcatagagaaaacaataaaagaatacaacaaagtgtgagaacagaagagtttgttattggcaggtggaaataatggttatacaatgtcagttaagacattaaaattagagatgggggaaaatgcaatttattgctttggaattatactcattgattcttctaatttacygatgcaatgaaaatttgtaggtgacagttcctgaaagccattaagccctagctacatgcaatctctgttgagaaatagaaactaatatctagacagatcatttaaacataaaaatggtcaagaagtcttggagataattcactggcatggatttccaaatcattctgagaatgttacaccttgtctccacagaaagtgtttactctcctaaggactcacaaatagcttaattattatttataaata

SEQ ID NO: 448516 - DNA, 551 bp, Homo sapiens
aatgctgggcttgagtgactttctctagctgagtggtctaccgggagtagtacacaggaaccatgctccctgagttcaccaggacactccctgggagcagttgaattgatcatactgttgcaatactgatcacagtaaatgagctttttgaggagccctctagagtagcaaccacactctcgagtaagcctgtgtatcataatgtctctatagacctaaataactcttttaatagtcatcaaacactctcctttcattgacaatgaaactgaagcccagaaggtcacttgcaaaaggtcatgcaactagaagcagttttcctgaatactattctactgttttcccctttgcatcrtagagccactgtgcctctcataggcaaaaattcaatcatggctagcaagagtttactgaacagcaactatgttaaacttgcttatcagcttaggatgggaaggaaaaggggagagtaatgagttcagagtgagagagaacagacctcaaataccacggtctccagagtacccccttcatcatggttacaatcaact

SEQ ID NO: 448517 - DNA, 606 bp, Homo sapiens
aaaacacagcctgataagcagaatcttggggaacataaagcagttatgtgattcactcaaccatttgtatgcaagtgtgacctatttagcttttaaaatcctatttaatgccaaaaaccacattagagaattcaaacaaaagctcacagggagtcccataatgagaccgttttgattagtccagtgattagctcatttcctctctctttagtaatttcatttagaatagtagtcattttaagagcaagtagattttcttattgctttactagtttgctgtgaaattggcaagtggccaaccatctgtgcaactgcaattattactattacttaaaatttatcaaacctcttcggttactatgaaagtaattctccctrcctataaagacaaggccaagaaaggcattaatgagacccaactttgcacaaaaatagacattatcaccccatgtttcaacctactagcccaaagttccagaagtggtatttgtggaccctgttgggaaaaagttgagtgaacgatggttttgatcgactgccatagtcatctactcttcagtgcctaggaatctacttctccctctcatgagagctatgcattcattt

SEQ ID NO: 448518 - DNA, 602 bp, Homo sapiens
tggctgggtacatgtcgaaataaaaaccagaaagaaaatatttccaaattaggaagggcacaattggtctcagaagtatagtttcaaaagccaaattaaacatgttcatagtttgcaaagttaattatttatctgggtacataagaacactctggggcttcaagcccacatttaaaacacatgtaagacaatataaatttacccccaaggaaaagtttctcataaagaagaaagttctgtgtatgctggccttggcacacaacagacttaacggatgagcattcttccagagtgcaatgtttataaagcagagattgctcagatttctgctcagaacttacacagcatcttataatcatccctcctctactaactgctgtcactccccataagtacctagattataaatctatccccataagtacctagattataaatacatttacatgttcttgtcagttwttgcaatcagacctcaaaaattaaatgagccaagaagactgtgtgtctgagttatatattaagaataatgtttaaagaaaaacattcatttttcaggaaaaaaggaattgtaggacactaagtgctttataaagtgctct

SEQ ID NO: 448519 - DNA, 579 bp, Homo sapiens
aagaactggagatctcatcacaacctggctaagtggagggtacccactggtcatataggacgtgccttatcctggtgctccagcccctgtgtgcacaagcagtggaagccagggcctgcatgcaggcagcgggggtaccactgcagcagaggggtgtgtgtgtgtgtgtgtgtgatcgcgcgcgcgtgtgtgtgtgcktgcatgtgtgtgtatgtgtgtgtgtgagagagagagagaggaggggggctctctttcccttgatgtttccattttcttttactaaagaaggcattgcccttttcaagggccttatgacttccagctttctactcagaacagaaatcatcaccccaatcccaaaagggaatgatttgctgttatcttttaatcttaactggatttcattcataccaggtagctaattccattcaatatttaagtgttaatggtatttccgcctaacaatgaaaaaaaggtctttatctgcaattaagggaattctaggtgatagtaagtcatagtttagatgagggggagggccgaggtggcaagagaaatagcaatttgtccttgaagtca

SEQ ID NO: 448520 - DNA, 579 bp, Homo sapiens
aagaactggagatctcatcacaacctggctaagtggagggtacccactggtcatataggacgtgccttatcctggtgctccagcccctgtgtgcacaagcagtggaagccagggcctgcatgcaggcagcgggggtaccactgcagcagaggggtgtgtgtgtgtgtgtgtgtgatcgcgcgcgcgtgtgtgtgtgcttgcatgtgtgtgtatgtgtgtgtgtgagagagagagagaggaggggggctctctttcccttgatgtttccattttcttttactaaagaaggcattgcccttttcaagggccttatgacttccagctttctactcagaacagaaatcatcrccccaatcccaaaagggaatgatttgctgttatcttttaatcttaactggatttcattcataccaggtagctaattccattcaatatttaagtgttaatggtatttccgcctaacaatgaaaaaaaggtctttatctgcaattaagggaattctaggtgatagtaagtcatagtttagatgagggggagggccgaggtggcaagagaaatagcaatttgtccttgaagtca

SEQ ID NO: 448521 - DNA, 628 bp, Homo sapiens
gatccagttagaggcctcttacatctgactgggtcagaagaaactggtagtaaatgataatattgcaggggttgtaaaatttggcttttgaaaattcacagggatttttgtgttctaccccttcatttcacttttcttgtgcacttaggtaggaaaaaaaaaatcattggctaagttaaccaagggaacctgagagcaaagccaatactttaggtaaaaatgggatcctgaattgctgaaaaactgagttccctttgacttatacattagacccagggaggagcaaagtcttacagaaatggcaaaatcttactaaagataacttacagtggaaygttctggataaacaacacattgaagtgtatttaaaaatgagggctccccaaaattaaatctgctaaccttttatcttagttactatcctgatccaaagaaatagacggcagcaccaattggctgactttggataagtaatgggggtacattttacctgagtaaaggataagtttgggttagaggccctcgcctcagtaaagtccttcttggttaaaagggactaaagatgacaaggcccaaccgggggcaagtttgagccttgccagtctaatactgggtgctaagcagagtg

SEQ ID NO: 448522 - DNA, 554 bp, Homo sapiens
tatgccatcagaagggaggctgtgttatctgaaaattaaattactgtattcactaatttagaattgtaatggatatttttatttcatacagcaatgatttggttttgttttttttttttggtatggcaaaatacacatacattttgttactatttgaaagataaattttcttaaagcagggattgatccaacatagtagtcatttcttctagttaaaatttatttctattgcctttttaaaaattaaactatgaatatacttgtagattcacgtgcacttttaagaaataatagagaaagcccagttaacccctgtgagcccaagtatctgagataggtctcaatcaatttggaaartttattttggcaaggttaagggtgcacccgtgacacagcctcaggatgtggtgacaatatgtgcccaaggaggttggggaacagcttgctttttatacattttagggagacataatacatcaatcaatatatgtaagatttacattgatttgatctggaaaggccagacaactcaaagcagaggcttccaggtcaca

SEQ ID NO: 448523 - DNA, 475 bp, Homo sapiens
ggtctatcatcttataagtattgtacaaacaagacactgttgaaattgaaagggtgttagtttcctattgctgctgtaacaaattaccacaaatttagtggcttaaaaaataacccaaatttactatcttacagttctggaagtcagagcctacttgggctaaaatcaagtattagcagaggtatgttggttctggaggctctaggggagaatccatttccttaccgtttccagcttctagaggccacctgyatttcttggctcatggcctcttcctccatcttcaaagccagcagaatggcatcttcaaatcagactctgccatgcctgcttttctcttttggacctgctattacattcagcccacccagataattcaggataatatcctcacctcaaaatccacatctgctaagtccctcttacctcataaagtaatatattcacaggtttcagggattagggtgtgaatatc

SEQ ID NO: 448524 - DNA, 475 bp, Homo sapiens
ggtctatcatcttataagtattgtacaaacaagacactgttgaaattgaaagggtgttagtttcctattgctgctgtaacaaattaccacaaatttagtggcttaaaaaataacccaaatttactatcttacagttctggaagtcagagcctacttgggctaaaatcaagtattagcagaggtatgttggttctggaggctctaggggagaatccatttccttaccgtttccagcttctagaggccacctgcatttcttggctcatggcctcttcctccatcttcaaagccagcagaatggcatcttcaaatcagactctgccatgcctgcttttctcttttggacctgctattacattcagcccacccagataattcaggataatatcctcacctcaaaatccacatctgctaagtccctcttacctcataaagtaatatattcacaggtttmagggattagggtgtgaatatc

SEQ ID NO: 448525 - DNA, 570 bp, Homo sapiens
aattctcaaattggagaaagaaggagaggcaggggtttgtgggggtcattattcttastctctaaagacaactgattttggtatttgtcagtagattctgtagctttcccatgtttaatattttgcattgaatgacctagaagagcaaaatatcacaatatttaaccagaaagatttagtcctttttttttcctaacagaaaaggaaataaggaaaaaaagaaaaagaggagaaataagggacatgagaaaggagacagagcaataattgaggagtttgaaagtatctgaaaaagctctggtctcttctggcaatttatttccagttcagtaaactcagaagccgaacttttgcatttttaatgcacttcataataataaaaatgatcttgttggtctagtgcagagccaaaattaggaggtcaggcatcaacttgtttgtgttcgtttttccatggagccaggttcgtctagttgtcttggcctgaatagcaattggctcgggcccagtggcaatagatcaggacctggcagagcttttcgtcccagggtcttaccgttacaggccaca

SEQ ID NO: 448526 - DNA, 558 bp, Homo sapiens
aataataatgacattgttaagttttagtatggaatactttgagcccagtgcccatacttctccatgatactctggaatttaaaggtgaatattgaaggctatttgcgagaaggtagcaactgtttatcaggaaacaaacagcttatttagaaaaaaaaaaaaaacattaaacccataatatgatttcttttttgacagctgccatttcataatattctttacaaataacttactcatctacttatttcatttttttgtctttcttgccaccaccaggtacatgaaagagaaagaaatatagaattccaatactgatgcaagggagctcatttttcattttgtcaaggggtttcctccttcccacagccatgatagtatttcctgatgattgttcattgctataaattgaaaaagaacagcttccaagtttatcaataatccawtaagggtgttccaacagaagttgaattaaagttgagtccttcccctgtgcaaaagaaagatagattgcccttagaagcttgagtatagggaatggaagaaacaaaaagaattact

SEQ ID NO: 448527 - DNA, 584 bp, Homo sapiens
ccagcaatgagggcctcgtgatttaagaattactttcatatgtagtatctctgaggttcatgctgatctttggggaaagttgttatcttcattttactaacagaaatttgaggctcctgagcttgtgatttgcccaaggtcacatagctgtaaatgagaatctgtactcaaattcaggtcttctggctcctagcacaggggtcttctcatttcaccacattatctctctacataattggggcaaattctctatcaactctttggacttacatgtcagatggaatctcactatttgtacaaaatatataaaaaatgaaatcaaatttttttgctatactctattcaactttctttaaaaaattttttttctaatagttcttttaagtatttctacttttgagactcatatttgtatttatatttagagcacttttttattttaagaatgaaatgacaagaacagatmaatttttactggtagcaggaagacagctgtccaggagaaattaaattcaacttttgtctaatttctaataattcataaaacattataagacctctgcaccctcatctcccattcccgg

SEQ ID NO: 448528 - DNA, 622 bp, Homo sapiens
aacttgtactccatataacatatcctctatttaacccagtatggactgtgtttcttgactctataagcctatttcctaacctgtataaagaggatagcaatagttatcagcattacactgttgtggagattaattactgtacataaagtacatgacacatagtgagtgctcaatccatattagctgataatagtatttcccatctctgtagcttaaatcactttagtgcataaggacaagagtgatcaaattctatccttagtgagagagagaacattccaagaggaaatgtttatacacatactctgttataaatgtagttactgcagmcattttgtagttgtcagtcaaaaagtaattcagttcatttgtatgatcatgctgatcaattgaaaaccctacctggacagcaagttggactttcagaggcattgttaatgtccattaactatctaatgtccatctaagaacagccaaggaagggcaacgatactgcattccaactctcaatttaatcatgtgttaactaggctggctatgctttgcttgggaaacagtatattcacatgcaaaaacatcggttgacctagttgtcaattgtgatagtgtatatattccactc

SEQ ID NO: 448529 - DNA, 469 bp, Homo sapiens
ttcctataaatcatctagcgtcttgtcaaaatatgaattcacattctgtatgatttgggagaaggccgagattttacacttctaacaaactcccacattttgggtagcaagggtctaacataatgtttgcccgaacatccctaaaaataagagtcacttgcaacctctaactaaaagaacaaattactggttcccaattcagaattacttaatcagaatttccataggargagaatggtaatctgcatatataatatgcatcccagctgattattaacttcagggaggtttggtaagctgaagagttactcagatactattacttattgtgtctgttttcaaaagtaataaaaggaaattgctaattagattagcaattaacccccctcccccctatatataaataaaactctggacaaaatagaatgaaaaactacctgaagattctggagaataacaaaagcaagta

SEQ ID NO: 448530 - DNA, 526 bp, Homo sapiens
agtggtcttctttttataccattttattttacaaatttatgaatcaaagaatgaggcacattyattttcattgggaaaagtgaattatgtcaagttaattaagtgaagctgttacaagctgagtctagtacataaatccatctgaagtagggttatcatatggtttcaatgtgaaaaataaaggaattgagggacagggtgtggagtgctctagaaagaaaatcagaaaagcatctttagtcttagctccctcactactgcaaaaagaaagaaagaaaaaaacgctgtagcagggacgtttagccgcagggatacctttttttatgagccattttcaagactccctttcctattattgaactacagttagagccatcttttagctttgtactatagccttgtaacttacttcatagaatctctgggtcattttcctgttttcctttcttccaacttccaattaatttttgtctttttagcagtttttagttctttcagtattagcattaaggacaataaaattgat

SEQ ID NO: 448531 - DNA, 508 bp, Homo sapiens
gatagggtggttatcacagaagccaagcaaaatagaatttccaaaagcaagtggtcagaggctgcagagaggtatggtaagatatagattaaaaatgtccayggggtttaccagcaatgaggctgcccgtgaccttgatgagagcatttccagtggagtgctcaaaggtgaggaagaggagatcaaggaggagacaactctcaagaggtttggttgtgaatagggagaaagagctaaggcagtagacagaaggggaccttgggtcaataaaattttcttgttgatttgtttatttttaaaggcttgaatgacttgaacacgttttgatgctgctgatacaaagctagtagaaacagacagaaagcacttgtcataggtgagtgaatagaaggtgaagaaaatggggatcagacagatgaagaaattaactttagaagggaggagagacactgctctactatcacaggaggaaaggaataaatgatgggggaaacacaggtgacttagt

SEQ ID NO: 448532 - DNA, 630 bp, Homo sapiens
actgggaaatggaactgccagctagccagcacattctctgccagaagaaaagataagttggaaaaccaaattaaagtccaaaggttgtttggagagtgcagaaatcaggactagagttgttaaatggcttcaaaggatagttgcccagctatggcagtctgatgagtcctgcttctctgctgcagtgacggaccttcttcgcagatcccaggacttacgttggctgatcagggttccctctcttggccactgctagagacacactgactatgtgttactctgcagctctcctttttcaaatctctaagaaaactgtacgatgtgaagcatagcctaagacacacaggtaatattcccctgccaccacccaaagaacccaatatttttatatcaatgtccccttctctttgcctaaactgttttccctataatcttagtctaktctctgaaaatttctttctctttcttgctctaactgaaattcagttctcctctaggaacaataccctttcccttgttgctttcttaagtggtggctgttaaaccctcatactgctagatttgaaagtggggtaggtggccttttttttccattgccatttccaggccattcttcttttctccactaaa

SEQ ID NO: 448533 - DNA, 562 bp, Homo sapiens
ctctactgctaattgtttggtcagggaaagcctccccaaaggaagaatatttaagctgagatttaatgataagtaagatatatctaggtgaagaatagagagaacagtattctaactagaattcaccatatgtacgaagtagggtgaccaattgtcctggtcttcccagcacaaagggattcctgagacatgggacttctagtgctaacataagtaaagttctaggaaagctgtgatgagccagtaaccttagtgtgaaggctctgtggtaggaaagagcttgatgtgttcaagcaatggaaaaccaacagctgttagcktaaggtgcaatagggaaaaagtacacattgagagtagtgggcaggcatgggccatatcatgccaggcctgggacaccatgggaaggagcttggattttctccaaaggaaagccactaaagggtttaaacagtggcataacttcatttgaagggcattttttaagggatctgctatggggaaaatggattatggaaggacaagaatggaatcaagggggaatagttaggagattacaacagtg

SEQ ID NO: 448534 - DNA, 573 bp, Homo sapiens
atatatatacacttcattcaaaaatacatttaaaaggagacaagaagggggatgcttgaggctgacacactgacaagtaaagttagcaggaagagagaagccagwatcaccaaatcatcataaaaaggttaacttttgttcagtgtagtaaagacataaatatggaatatagtggttaaaggagcaagtttaaattatcgggaaaattagcactctaatttccaaatatattgtaattctaaagatttgtaagtttgctttcaaaattctatttgtgttcacttgcaaaactatgccttaaatgaaggtccaagttagaaacttagggaatcattccagactttataagctatcttattctttattctaagaaaaaggatatgtatgtcattgaagaatttcatgcaatagggtgccatgatgtgatgtgtatatcagagcaatcactcttcctatggggtggagatcaaactagaaggagagaaaaaatgggagtaaagaggccaattaagaaagctgcaattgtctaagccaggtgagaactgattttgtctgagactagagttgtggcag

SEQ ID NO: 448535 - DNA, 661 bp, Homo sapiens
ctttcttttttgcttactcgtccagcccaagatgcaatccatgccagctagttcactcatgcactttctttatactcttccaaactataccctgtatcaataaaattatatagctagattttttttatattgggatttaaaataacattaatttttaaaaatgtacattttataaaatgcacattggcattctataaaaccactttgactatagtcctatgacataatcaaacatttatttaatgcctattctgtccagccctgtaggaaatgggagagaaccaaaagacataatctctacccttaagggactttcagtgtatttagagaggcaagcctaacacccatgacacaagtaaggaaaagatcatattaatcaagtgtatattgcacagcataggcactaaggtctattagagttcaaagcaaggagctccaatttacattcacagaataaggcatcagagcgatttgatgaagttgctctgctctcacatcaccactattcttgctcctaggaggaactggacagaaaccatatgtgacatacagatctctaggggagaatgttgcrcaaccacctgcagaaaccaattcaatctcacataatagaatctgaacctcttttaaatgatttaggccacttgagagttttagaagt

SEQ ID NO: 448536 - DNA, 661 bp, Homo sapiens
ctttcttttttgcttactcgtccagcccaagatgcaatccatgccagctagttcactcatgcactttctttatactcttccaaactataccctgtatcaataaaattatatagctagattttttttatattgggatttaaaataacattaatttttaaaaatgtacattttataaaatgcacattggcattctataaaaccactttgactatagtcctatgacataatcaaacatttatttaatgcctattctgtccagccctgtaggaaatgggagagaaccaaaagacataatctctacccttaagggactttcagtgtatttagagaggcaagcctaacacccatgacacaagtaaggaaaagatcatattaatcaagtgtatattgcacagcataggcactaaggtctattagagttcaaagcaaggagctccaatttacattcacagaataaggcatcagagcgatttgatgaagttgctctgctctcacatcaccactattcttgctcctaggaggaactggacagaaaccatatgtgacatacagatctctaggggagaatgttgcgcaaccacctrcagaaaccaattcaatctcacataatagaatctgaacctcttttaaatgatttaggccacttgagagttttagaagt

SEQ ID NO: 448537 - DNA, 609 bp, Homo sapiens
ggggcttatcctagaatgcaagtttcatttattatttaaaactcaatcagtacaattcaccacattagcaacttaaaaaaratgcaagtcatttatcatatatgtgcttggctagtatttacccagtctgaggcttgccttttatttatcatgtgtgtttttcaaagagcataagtgtttagttttgatgcagttaaatttgtcaattattttctttgatagatcatgctttcggtgtcatgtctaagaaagctttgctcaatccaaggttgcaaaggttttctcctatattttcttttataagttttatacttttaggttttacatttaggtctatgatccgttttgaattaatttttgtatgtaatgcaaggcatggattgaagttctttttttgtatatggatatccaattgttccacaccatttattaaaaagatgagcctttctaagtgaatttaatttgcacctttgtcaaaaatcagttgtccatattcgtatgcatctatttctgaactctcttttctgttgttttgtctatcttgatgccaataccaaactgagcagattactgacaaattgaaatactccaattttgttatttttcaaa

SEQ ID NO: 448538 - DNA, 609 bp, Homo sapiens
ggggcttatcctagaatgcaagtttcatttattatttaaaactcaatcagtacaattcaccacattagcaacttaaaaaagatgcaagtcatttatcatatatgtgcttggctagtatttacccagtctgaggcttgccttttatttatcatgtgtgtttttcaaagagcrtaagtgtttagttttgatgcagttaaatttgtcaattattttctttgatagatcatgctttcggtgtcatgtctaagaaagctttgctcaatccaaggttgcaaaggttttctcctatattttcttttataagttttatacttttaggttttacatttaggtctatgatccgttttgaattaatttttgtatgtaatgcaaggcatggattgaagttctttttttgtatatggatatccaattgttccacaccatttattaaaaagatgagcctttctaagtgaatttaatttgcacctttgtcaaaaatcagttgtccatattcgtatgcatctatttctgaactctcttttctgttgttttgtctatcttgatgccaataccaaactgagcagattactgacaaattgaaatactccaattttgttatttttcaaa

SEQ ID NO: 448539 - DNA, 522 bp, Homo sapiens
gtaaatgtttcttctatagatacatggtaaaaagaaatatataaaatatttattttatataaatatcaatttatatcttgtataaatacatggtgaaagaatatgacataaactggatgtgtggcaaatccactttatatcatatttttcccctcttgggtctcaataaaactcttttaaagagcaatagagatatagcaagaaaatgcgatccatttgtatttgatctacccaaataatacaagtttagaaccagtttcacctgaacaatgtcttgaacagtaatagtatagtagatactcaagaaacrtaaatatttcttgtatggataaatgcagatgagatgtcaagagaaatacgtactgagaaaataccttacaactagtagacccaaatcaacgtttgattgtctgtcaaaaatggagtgggtcaattaagagaaatcaagtcaattgcaaacaatactgaaccgcttccaacaagaaaaggtggactgcatgcccaatgcttacataaagttga

SEQ ID NO: 448540 - DNA, 501 bp, Homo sapiens
caagtttctactttggggttagcaaggcaattcctttttgaataatacacctgttattcccccacttctcttaaaatagacagtacatttaatatgtgtttatgtttcatctgggttgaaaaaamcatcacaatttggatgttctgatatctcttcagacttcttaaaataagattctactgctgtgtatatggataattgtttttgaagcagatatatagtaattggcaggtgaatattagcttaaatccccacttaacatttgccatgagtttcatgattttgctgcacccatctttatttttagtaacgagacctcatagtcttaatattgccacaatttaggtctgaaacagaattggggtgtgagaggggattttctgcagtattggaggaaaatgtccctcaagaaagaaagaagctctggaagaaatggacagtttgtcatttctgaaagccaaaggttaaaacttttctttttgacagcctggaaaatggttt

SEQ ID NO: 448541 - DNA, 579 bp, Homo sapiens
tgctgaactgactcggtctctgtacttacggagattacaatctgtccaggtgggcagccagtcagtacctaacatggcaacagcgacatggcccagccttaaaccacaaagcatccctctgaaagatttctataccagaatgaaaagctgcccctgtcatcctcagcactcctctccactccatccctatgcagggaatccagtctagggtgaatgttacacagccttcagatcattctgtgcaacccatcttgtgccttttaggagaaagggaccatttcccaggtcctgcaggaggcctgagaggaaggaaacaagtgccaggatgctaaaacagctctgtttctggaaatctcgtggatgggaarccaccacaattccagagagagctcctccaggatgactttaatatcttttcctgcccctctgccccagcatatatcaaaatcctggggatacagactcttattctttcctcttgctccctctgcctgggcataatgatatgatgtaactgggcataaagtccatgctccatacttggggaaaactatagcaagttgcttgggacttaaaatc

SEQ ID NO: 448542 - DNA, 579 bp, Homo sapiens
tgctgaactgactcggtctctgtacttacggagattacaatctgtccaggtgggcagccagtcagtacctaacatggcaacagcgacatggcccagccttaaaccacaaagcatccctctgaaagatttctataccagaatgaaaagctgcccctgtcatcctcagcactcctctccactccatccctatgcagggaatccagtctagggtgaatgttacacagccttcagatcattctgtgcaacccatcttgtgccttttaggagaaagggaccatttcccaggtcctgcaggaggcctgagaggaaggaaacaagtgccaggatgctaaaacagctctgtttctggaaatctcgtggatgggaaaccaccacaattccagagagagctcctccaggatgactttaatatcttttcctgcccctctgccccagcatatatcaaaatcctggggatacagactcttattctytcctcttgctccctctgcctgggcataatgatatgatgtaactgggcataaagtccatgctccatacttggggaaaactatagcaagttgcttgggacttaaaatc

SEQ ID NO: 448543 - DNA, 562 bp, Homo sapiens
aaattttgtgtgcagtattttcttaaagaaacacctataggatcaccaacaagagaaaaaagagcaatattttgtctcctctgcacctccaaaaaaagcctttaaaaatagaatcaagttcttttcaaaaagcatctctgcggtggccattttatttgccgccaagtacttggcttgggctcagttgaaaagcctaatatgcagtcatgctgaaggtctctcgtcttgaaatgagagcctgacaaggaaatcaaagtatcctttatatcccaagtcagtctgaaaatgtcacagctcccacaagaactcaaattaacttagcacccactacatgcaagactcaccatctagattccgggacaggtacaaacatgataaggctcagtccttgccctcaaggagctttgtcattcaatgaagacacatgaaattcacaaacggggagtcagatacgttgggsaagtctctctggacccccattccacatccacaatatgatattgggtaatattctcaaattttgcaaatgtgagtaacccagaaataatacaaagaataactg

SEQ ID NO: 448544 - DNA, 581 bp, Homo sapiens
ttgttgacagaaagctcctccttgcttatctctgcaaccactgccctgtgcctgcagcactcaggccrggcaggcccctcccttccctcttctccctgggccttccccactcatctcggcccttgggattttcccacagcagcctccacagcattccctgaattgttcccccaccccgactcccgcatctcaactgagtacattgtcagaagaaaggggtattttcacaacaccagagggacgttaaagttggcacaaatcaagcacttcattaggaatttagtatgctcgaattttctttgtcagaattcctagtcaaaggcagcaagaccctaagacttgaggattttcttctaacaatgcagttttactccccactcaggtcagctgtgtctgaaccaacctaaaacattcttttagttcttttctttttcctagttacaacttcatctccaggttcaagacccctttaccaataagaaaatgcagcttcctcatctgccttaagaaaggacactccaaacttgtggtggagaagcctaggatttatttccttggagtcatataaccaccatagtagg

SEQ ID NO: 448545 - DNA, 573 bp, Homo sapiens
cctctcacttaaatatataatctccatagggtttcaaaacttccatcttaaagatcttgccattcagattccctttgcagcaatgacaccagatccggttttcacttcacaggcaacattttcaaagaagctgacttgtcactttcatttcctcgtctttgctaactccccactctggcatttgctcccacagctccattggaatgactctmatcaagattaccctgacttccatgttgctaagttccactggacacttcatggttcctaccctgcttgacttttagtccaatgttgtccaacagatgtttctgcaatgatggaagtggtgtgtatctgtgctgtccagtatggtagccaccaggcttatgtggttattgagcacttgaaatgtggccagtgtgactgaggactgaatttttaaactttattgaatttaaatttcaatagtcacatatagctagtgtctaccataccagccaaggcatctctaagctgtatgccactcccttcttgaaacattttctttccttggcttttatgttgccaactctctctccatacccctttagg

SEQ ID NO: 448546 - DNA, 523 bp, Homo sapiens
taaaattctctctttgtgatgtgcagctccatggattttgacaaaaacagtgttatttatctatcactctactaccataggaaacagttccattaatgtaaaaattccctacggggccccttaatagtcaatccttgtcccctgacaaccaccaatttctttccattcctacagttttgccatttccataatatcgtataaatggaatgttacaatatgcagccttctgagtctggcttctttcactcagcaaaatgcatttaaggctcatctatgttgctgcataatgtgtgtgtgtgtgtgtgtgtgtgtgtgtgtgtgtgtgtgtgtgtrtatatggtatatatatatatatatataccacatatatggtgtgtatgtgtgtgtatatatatttgtgtgtgtacatatggtgtgtatatatacatctttgtatatattttgtatatatatttaatatattttataaatatgtatggtttttttaggtatatatatttttcatatattttataaatatata

SEQ ID NO: 448547 - DNA, 523 bp, Homo sapiens
taaaattctctctttgtgatgtgcagctccatggattttgacaaaaacagtgttatttatctatcactctactaccataggaaacagttccattaatgtaaaaattccctacggggccccttaatagtcaatccttgtcccctgacaaccaccaatttctttccattcctacagttttgccatttccataatatcgtataaatggaatgttacaatatgcagccttctgagtctggcttctttcactcagcaaaatgcatttaaggctcatctatgttgctgcataatgtgtgtgtgtgtgtgtgtgtgtgtgtgtgtgtgtgtgtgtgtgtatatatggtatatatatatatatatataccacatatatggtgtgtatgtgtgtgtatatatatttgtgtgtgtacatatggtgtgyatatatacatctttgtatatattttgtatatatatttaatatattttataaatatgtatggtttttttaggtatatatatttttcatatattttataaatatata

SEQ ID NO: 448548 - DNA, 554 bp, Homo sapiens
gtgtctttcttaaaaatttggcaaaatatacacacatgatatttatagttgcatataggtctgtatctgccattaacaataaactccttacagaaaatgttccttgtgttttccatctttaagtgaaatatttgcagcatcaatatataattccctgacatacagtaaaattatcagtaaatgagtcacagataaatgtcaacagaggagctatacaagaggaactcaatgaagcaatccaatttgtgtggtgttcaaaagcattttctctaattaaagagctctaaatagagtgaatgttaaatagagtgaatgtgagatattagattacatttgattatttactagttaacatatacaactagaagagggtttctggtttattattgtttaaataacagataaaactagacacctaatcackgcctgatgtacatattatgtaaatatcagcaacttttaaaaactaatcattttaaatgacaaatttttacttttcctgttttctagttgttaatagaaaatatttaattttctattatctttaactttta

SEQ ID NO: 448549 - DNA, 591 bp, Homo sapiens
atagaggtgttcatagtagactctgagaggtgtatatatatatatatatatatatatatatatatattttttttttttttttttggtggggtcagtgataatgtccccttcatcatttctgattgtgtttatttggatcttctttcctttttacttttagcctaactagtagtctgtcaatattatttatttttacaaagtgcaaactcatgaatgtgttgatgtttagtatggttttaagtacctcaattgcattcagttcagctctgattttggtaattttttgtcttcttcctgctttgtggttggtttgctcttgtttttcaagagcaggagggcagcaggtatgctcccaccgacagtggtggggtggcagggtgtgcatgcacttgcacactggcagggtcacagaggcaagttccacccacacaagtgcacctgcatagacaaatctatttcatacaaataggaagaggaatagagcagagggagctataytaatatcagatgaaatatactttaagtaaaaagctgtaaaaaaaagacaaaggttattatatattggtgaaggagcaaattcataagatgata

SEQ ID NO: 448550 - DNA, 561 bp, Homo sapiens
tatctgtggtagtctggcaatactccttatggactgtgggggcagtggggctaaggggtgaggcttctctgccattggaaaggggtaggaatagtggaaargtcagtgtcttgtggtttgagtgccacctcagcagcaatacagtagaacagcaggtagatttctaagttttttgaccctagtctctgatttctaaatggcgtttctgggcccacccagggccaaggggatctcactgccctaaaggaacctgatgattgtagagcaccagggtgatgagcaaacaggcagtagtgagggagtggttacagcatgctttgggtaagacccagtgctctgctggcttcagctttgacccagcacagtcatagtggtagtggccacaggtggaactcccaaaagtcaaggataaagagaggatccttaaaggtagcaagaaaaaagaaaacaaataacatacaatggatttgcaatacctctggaagcagaattttcagtggaaacattacaggccaggagtgagttgtatgacatatttatagtgctgaagataatagaaaa

SEQ ID NO: 448551 - DNA, 555 bp, Homo sapiens
ctcccatgatacatatttacctatataaaaacccagcacatgtacccctgaacttaaaataaaagttatagttaaaaacaataacaacaactcctagctgtgctctcttatggaaaaaaagcaggaacatagaaagactgaagcaccctcctggractccaaccttgtataatagctccctgatgctgcaacactcttttcctttgttccttttccctttgaggaagaactaaccgagcttaatggtcattggcaagcatacatttcagtctctccccagttgtatgtaggatgggagacctaaactcaattcaaatgctttgacaactttttgtggtagaatgacagaacgtaacacaaatcctcctgtagaaactttgttaatcagcctctccttaaccccatactctgtaatataaacaaatgactaagctctagaaagttcaggatttttatctcaatttctacctccatcctatttatttgagtgcatttagtgccacgaggtcctgttgtccccaggcttgtctttaggaaagtattagttgacaacta

SEQ ID NO: 448552 - DNA, 624 bp, Homo sapiens
caattttccaatcatgcttyttccaagtccctgaccagccaaaccattggctacagcccagaaatcaatatataatcacacatctgcaattatatatcaaatatataccattcaaagtgcacaaccaggtgcattgcttaaagttctgcccactgggaagatttcccttcagcactgtccttcagggatttcctagaaagggacggtagtgcagcagctgtccacttttgggtactccctgaaaatcatgcagagccatctgtgaaccaggctctagtcttctcttcttctgtcaacggatcataggaaattccccaagaagccatcagtgcaggctggagaagagaaggcagggtggcaggagtggagaccatgggcatttgagccacttcctcatgtcacttaccttcaggatatacctgctcaagccagatcacatatataccacttccatttgatgatggaatttgcagtgcaccacccacctgatggctagatgggtcagaaagcacccagttcatgataggcagttcaggtcacatggtgagttgatgatccatagtcaaacattcagtttccatcaaagcccagtaacaggccaagaggtgtctctcaaaaggagag

SEQ ID NO: 448553 - DNA, 624 bp, Homo sapiens
caattttccaatcatgcttcttccaagtccctgaccagccaaaccattggctacagcccagaaatcaatatataatcacacatctgcaattatatatcaaatatataccattcaaagtgcacaaccaggtgcaytgcttaaagttctgcccactgggaagatttcccttcagcactgtccttcagggatttcctagaaagggacggtagtgcagcagctgtccacttttgggtactccctgaaaatcatgcagagccatctgtgaaccaggctctagtcttctcttcttctgtcaacggatcataggaaattccccaagaagccatcagtgcaggctggagaagagaaggcagggtggcaggagtggagaccatgggcatttgagccacttcctcatgtcacttaccttcaggatatacctgctcaagccagatcacatatataccacttccatttgatgatggaatttgcagtgcaccacccacctgatggctagatgggtcagaaagcacccagttcatgataggcagttcaggtcacatggtgagttgatgatccatagtcaaacattcagtttccatcaaagcccagtaacaggccaagaggtgtctctcaaaaggagag

SEQ ID NO: 448554 - DNA, 538 bp, Homo sapiens
gaattttagttggatttatttcccatcctctggcatgcaaaygtctcaccaataagtgcagtgtgtttggtacttcttgaactggatccaagcagcataatgtcatcaatttaatggatcagtgtgatatatttgggaagccaaaaacaatcaaggtctctccgaataagattatgacacaaagccagagagttgatatactcatgaggtaggaaattgaaggttattgctggccttaccagctgaaggcaaattgcttctgatgggccttatggacaggaatggggaaaaaggcatttgccatgtcagtggatgcataccaggtaccaggagatgtgttaatttgctcaagcaatgaaaccacatcttgtatagcagctgcaattggagtcaccacttggttaagcttatgataatccactgtcattctccaagatccatctgtcttctgcacaggccaaatggaagagttgaacgagcacgtggtgggaatcaccatccctgaatctttcaagtccttgatagtggcactaatctc

SEQ ID NO: 448555 - DNA, 538 bp, Homo sapiens
gaattttagttggatttatttcccatcctctggcatgcaaatgtctcaccaataagtgcagtgtgtttggtacttcttgaactggatccaagcagcataatgtcatcaatttaatggatcagtgtgatatatttgggaagccaaaaacaatcaaggtctcyccgaataagattatgacacaaagccagagagttgatatactcatgaggtaggaaattgaaggttattgctggccttaccagctgaaggcaaattgcttctgatgggccttatggacaggaatggggaaaaaggcatttgccatgtcagtggatgcataccaggtaccaggagatgtgttaatttgctcaagcaatgaaaccacatcttgtatagcagctgcaattggagtcaccacttggttaagcttatgataatccactgtcattctccaagatccatctgtcttctgcacaggccaaatggaagagttgaacgagcacgtggtgggaatcaccatccctgaatctttcaagtccttgatagtggcactaatctc

SEQ ID NO: 448556 - DNA, 587 bp, Homo sapiens
ctggctgcaaggagcttactgtacagatgggattcagacaaataagcccatgggcttcacacagggtcaggtgggaagcgctaatcaaatttgagcagtcaggaaatgctagaaaaggcagtggttatcctgagtcatatcctctccagatgtgttttcctcttcattcaagtcctacaagacatttattttccttatgatgttggtaaagttttatrcttatttagatattataagtgtattttatacatcatgaatatgcttatttctatatgtgtttttatttgttaacacatcatctttatttctcattcatgtcaattaattatctggctggtggcctaccagcttactcaggatctgggctccttccacgtagtggttgctccaaatactccattggcttctctgagtctggctaggagatgagagaagagaaatatcctgcagagaacctcaggaacaattgcaggagtcacctaccacactagatacattcaaatggccataggtaggcacatgtggcctcaattaattttacctatgattaaacagtgaactgaattatgcaactaatttctaatata

SEQ ID NO: 448557 - DNA, 473 bp, Homo sapiens
aatcatggcagaaagtgaagggaaagcaaggcatcttcttcacaagacatcaggggaaaaaagtgctgagcaaagtgggaagagccccttataaaaccatcatatctcatgagaactcactcactatcatgagaacagcatggaagacactgcccccatgagtcrtttacctccacctggtctctcccttgacatgtggggattagggggattacaatccaagattagttttgggtggggacacaaagcttaaccatatcaaataccaaataaaaatagtaacttatgttgtcaaagatattgggtaaacttagcaagaagactagagaaaactgttacctattattagatacattcaattcctttactttatggcatcatttatgccataattttgacaaagaatagatggaatatagactgtttttttctgagaaaaatatgttctaatagagaaaagagtagtaattaga

SEQ ID NO: 448558 - DNA, 527 bp, Homo sapiens
tctgaaccaaagccaaccacacagctgttgagctagggattacccctttatttattggaatagtgggtcatgcagagggtacttggrcagaggctgggttagctgtggcaatgaaggactctcagagggcaacagctacttatgaataagtttagaaataatttcatattttgaaattatttcaaaccagaaaggcagaacagtgtatccagtgggatgtcagccatagcagaaatcagagagccctggtgaaacttattagcaaacattgcttgagaggcttgtctaggcacgagcaatgaaaggaagaaataaatatttcatctttcctttctgtccatgggcaaaatattcaaacttcaggtaaggactccgttggcttaccttgggtcaaatgtctatcccttggctaaggggatacgggacacctaatctcatatccagtaggggagagatttttggaagtatgattaccaaagcaaggtggaatgaatactgccatttgtgtgaagatatcatagtttaat

SEQ ID NO: 448559 - DNA, 540 bp, Homo sapiens
gttatgaagtactgcagtcagtcttaaatcagaatttccctgtggatttttagacctgtaaatagcactccatttaacctggcggtacatgaatggaaagccctgcactctggcacaaggacatttccattactctgctttctgctgattcaaaacattacatggatttatatagtgggagtaactggattatatgtgtgtcaaagagagtcaaaagaataaaataaaatatatacttaggaaaaaactatatccctacagagttcagtattagaagttatataaaataattgatgtttacttcagatctattcttctaaacaaaacgaaacaaatctaccaattttatttgtccaaaattcatcatcaacaggcttactcactcagatactccattgtgtggacagacagaccacttgcactcaccaaaaaggtctaacacratatggaaacattatagttagcctatttctatttgaaattttatatgctaacaaaataaacaatgtctcttgcatgatatgatttccattctactaa

SEQ ID NO: 448560 - DNA, 557 bp, Homo sapiens
atcctccccagttacttacagtgtaacatctggtatttctaaataaaacaccagaaaacctctgaatcatagtaggaagaactaactaaaatatcaagtagtgtagaaatgatatacttcacagaaggggraaaaaaaaaaccttcctgcttgatataattgctctttagagatcacaaacaatgcttacattcttgcatctgtgtggaacagatcctttatggcattaaaggcctaactgttcatttgatgcccatgtgtaattccttttagagaaactaaaaataagcttccaacaggcttactcactcacatactccattgtgtggacagacagcaaacaggggcagagagctaagccttgacccacttaccaccctcagatggttctgatcaatgtctaagaacctattaaaaccttactattaggggattaaaggaaataacagattcatcctggttccccagagcttttgccttttttgggacaaaatgggcaaggttttttgttttttttttttttttccagatctttccctgaaggtatgccaatgaaa

SEQ ID NO: 448561 - DNA, 647 bp, Homo sapiens
catgccgttttaaatttagtgatttgttcttggacaaaatgccacataatactttctttcattcttgagttttccattcagaacactgtgttctaaaagatactagtttccaccatgaaaagcaatcattggtatgattatgtgaatggaagataaatcatttaaatttctttccttctactcttatactaacaggattaaaagctatagaatgaaagagtaacaggacaaggacagtcagtacacaaaggaagaaataaaacaactccattagtagccaaaggaaaatcaaactcatcaccacacagtatttttaygtattatattggcaaaaaatgaaaaataattgaaaataaattagaaaacatccaatgttgtttagcatgtaaggaaacagactgtcattaactgctgataaacatgtaaagtgtcataccctttctggaaaaagatttggaattgtcagagatatttgatacatgcataaaggaatttatgtgtcaaagagtataatgtatttgtaagtgtttatgctgaagtcagaatatacacagagttgtttggttggatgtctatttcgattggacagccccatgctgtactagttgtaaaatatttttattttcacccccacatatatgccagca

SEQ ID NO: 448562 - DNA, 465 bp, Homo sapiens
gaagaaacagcactgtatggtttgcaaaagtcccctgccccaaaatggtgatgtaatttaccatcccaaccgggacacttttgaaaataaaaagggcttccttaataattatgccaggataacagacatgaaccagtactgctctgacacagcagggtctgaccccacccctccccacacttacccatatctttaccttcacacctatactctacctaacaatgtacaatcatagctctagaacttaccctactgcwtcatgtcactaatgctttcgtataaatgttccctctacttggaatgtcttttatcaactacagtctccatcaagtttcctctcagaaacctaccttgaatccttatactgagctaaccatcttttcttttaaacactatctctcttccaatattatacataattaacacatagaattggaatccggatatttgttttctatatccttt

SEQ ID NO: 448563 - DNA, 568 bp, Homo sapiens
aacaaaataccactatctttcatacaaccagaaatgcaccaatgcccaaccaatatgctactacataaagttaacaacatttaartgttgatataaagtcaataaatcttatgtcacatgataaaggaaaaagaaaaatgaagatgttttcttagtatgagtgtatacatgcacaaacatgttcttaacaaaaggaggtggaaatactcatgaccatcaaaatactcatttctgcaactgctcacgtggttgtagctggtattgatgactaccttctgctactacccattctgtattccctttgctttcaacaagcacctcagcacgtcatgggtttttacctggtgaagtgacccaaaccttcatttctgaagggtctgggccatttgtactcctgcctgaattgggctgttgtagtttcacattgaccttaatcacatggacatggttatactaagagatgccctaagggatctcctgtattccatgcatagtcttccttacctccattgtggagtagtagactgatttcatcttgatattccaggtaatcaccccagccaacact

SEQ ID NO: 448564 - DNA, 592 bp, Homo sapiens
gagattaacatttgagtcagtaggctgagaaaggcagacccacccttagtatgagtgggcacggtgtaaccatttgccagattggctagaatataagtaggcagaaaaatgggaagagactgccctagcctctcagcctacatgattctcccatactggttacttcttttcctcaaacatctgactccaaattcttcagttttggaactcagactgcctctcctttctctcagcctacagayagcctattgtgggacattgtgatcgtatgagttaatacttaataaattcatatatatagtagtgtttacatcaattagtgcataattatatatagtatatattccatttgttctctctctctctctctctctctatatatatatatatatacagttctgtgcctctctctctctctctccatatatatatatatatatgtatatatatatatatacatatatatatatgtatatatatatatatacatatatatatgtgtatatatatatatatatatgtgtatatatatatattccattagctctgtccctcaagagaaccctgactaatacagattttggtaccagga

SEQ ID NO: 448565 - DNA, 592 bp, Homo sapiens
gagattaacatttgagtcagtaggctgagaaaggcagacccacccttagtatgagtgggcacggtgtaaccatttgccagattggctagaatataagtaggcagaaaaatgggaagagactgccctagcctctcagcctacatgattctcccatactggttacttcttttcctcaaacatctgactccaaattcttcagttttggaactcagactgcctctcctttctctcagcctacagatagcctattgtgggacattgtgatcgtatgagttaatacttaataaattcatatatatagtagtgtttacatcaattagtgcataattatatatagtatatattccatttgttctctctctctctctctctctmtatatatatatatatatacagttctgtgcctctctctctctctctccatatatatatatatatatgtatatatatatatatacatatatatatatgtatatatatatatatacatatatatatgtgtatatatatatatatatatgtgtatatatatatattccattagctctgtccctcaagagaaccctgactaatacagattttggtaccagga

SEQ ID NO: 448566 - DNA, 592 bp, Homo sapiens
gagattaacatttgagtcagtaggctgagaaaggcagacccacccttagtatgagtgggcacggtgtaaccatttgccagattggctagaatataagtaggcagaaaaatgggaagagactgccctagcctctcagcctacatgattctcccatactggttacttcttttcctcaaacatctgactccaaattcttcagttttggaactcagactgcctctcctttctctcagcctacagatagcctattgtgggacattgtgatcgtatgagttaatacttaataaattcatatatatagtagtgtttacatcaattagtgcataattatatatagtatatattccatttgttctctctctctctctctctctctatatatatatatatatacagttctgtgcctctctctctctctctccatatatatatatatatatgtatatatatatatatayatatatatatatgtatatatatatatatacatatatatatgtgtatatatatatatatatatgtgtatatatatatattccattagctctgtccctcaagagaaccctgactaatacagattttggtaccagga

SEQ ID NO: 448567 - DNA, 591 bp, Homo sapiens
tttgacagaccctgagaggtgaatcacagcagaggcctctaggattgtggagcaaggtgctgccatcctctgaagataactactctccttttgaaagacatctcttggcctgttactgggctttggtggaaactgaacgtttgactaygggtcaacaagtcaccatgtgacctgaactgcctatcatgaactgggtgctttctgacccatcaagccatcaggtgggtcgtgcacagcagcattccatcatcaaatggaagtgatatatatgtgatcaggctcaagcagatcctgaaggcacaagtaagtgacatgaagaagtgactcaaacgtccatggtctccactcctgccaccttgtcttctctcccccaccctacactgatggcctcatggggagttccctatgatcagttggcagaggaagagaagactagggcctgcttcacagatggttctgcacaatatgcaggcatcaccagaaagtggacagctgcagcactacaacccctttctaagacatccccaaaggacagcggtgaagggaaatctttccagtgggcagaacttctagcagtgcacctgtttgtgc

SEQ ID NO: 448568 - DNA, 547 bp, Homo sapiens
ctgacactctgcaatcagcatgtggcaaagccagtcagacctgcatcctttcctccagagcagcaagttccccttaggcccggggtargtccagaagtgccatccggaagtcagaaataaggctcaaaaaccttagcagtctaccttatgttctattgaactgcggttgagctggaactcttaccacaagatgcagtctttcccaccattccctcccctttccaaaggtagaggagcctcacctgctaccggccatgagaaatattgccagactaccatagatattcccttaaggcccacccaagggctcttaagtaagcttgtgctgaatgctgcttgtcctgagactcacccttcagggcagtgggctcccctctggcccagggcaggttcagagatgctgtccaagagtccagtcctgcaaatggggacctcgggagcccatttggtgttctaccccactgtggccatgctggtatctacagtgcaagacaaagttccctttaccttcactgtaattgtctcaagcagactcttttcctgtaac

SEQ ID NO: 448569 - DNA, 546 bp, Homo sapiens
ccacttataaattttattttgtaatttatttttaccatattttaactggtaaaattaaatttctctagatttaataaatataagcactgttatcatgcactttgtcccatataatgttatrctttctatatatggctttcctgttgcttcttgaacatgtttgatttagacacaatgactaactcctctgtcctcataaataataatgagaacattttaactctcatcaccacctttcctttaatttactgccatccagtattttagttccacattgtttttattctcattagttactattatagacctttacattctgtgctgtttaagttaactcatatagttaccaatttatttcatttcttcttgatacttttagttcatttttgattcaatttcctggtgtgtatcttatagaagatcttttaatatggtttttttcataatcaattgtctcagattttgtgtgaataaaatattttatattggcttttgataattctttttaaaattttgggttacatctattatgcttctgcccttgtg

SEQ ID NO: 448570 - DNA, 474 bp, Homo sapiens
cataaataataatgagaacattttaactctcatcaccacctttcctttaatttactgccatccagtattttagttccacattgtttttattctcattagttactattatagacctttacattctgtgctgtttaagttaactcatatagttaycaatttatttcatttcttcttgatacttttagttcatttttgattcaatttcctggtgtgtatcttatagaagatcttttaatatggtttttttcataatcaattgtctcagattttgtgtgaataaaatattttatattggcttttgataattctttttaaaattttgggttacatctattatgcttctgcccttgtgacatattatatcttcacaagcttgccacagaaatatctcccatctcacaaagtcttctacaatgtgacatcacctctcccacattgagatatgaaatttatgctacatttctccccacaata

SEQ ID NO: 448571 - DNA, 601 bp, Homo sapiens
tgtacaatggcataatctcatctcacagcaacctccgcctccygggttcaagcaattctcctgctttagcctccccaaagtagctgggattacagacatgcgccactatgccaggctaattttgtatttttagtagagacagggttctccatgttggtcaggctggtctcaaactcccgacctcaggtgatccgcccgcctcggcctcccagagtgctgggattacaggcatgagtcaccgtgcccggcgattattagtttattaatccacccagttgcccttatccagcccatgtatttccatcttctccacaaacatatgcaaaattgttgaaaatcttggagttgaggttattgtattctcatacttgccaatttataacagcaatttaaaaaataaaaatataccggggaatttagtaagcaatttaaggttctgatgagcatcgttttttttgtcagaattttccaaataggccctcaaaaactgttgctagaatcttgtacaggattgatattggactggtatcgtctttgcaaaataaactatactcccctcttgacgtttgttatcttttgcccatttctgtagtctagacac

SEQ ID NO: 448572 - DNA, 498 bp, Homo sapiens
gacacgttgtagaaactctggattctgttgttttcctctgaactgtgttgatttttgttccagtaggcaattcaatgacctgttaaccatcttgaactttagaaggcttggttttatgctctattaggtagatctgtggaaagtccacgcagttcctatgaccttctaaatgcaacttcaaaactctgtctcccctgctcatcttgacagggattgattttaagctttgttgggtagatctcactctgggacgtgacccttatttctaagctatggccttaggatgttcatggtgttaataaagtattaacaacatctctcctctctggctgggctggcccccaatgtcctgcaacatgtctctgcctctactatctctgtttcaaccccatagcagtggttctctggcaaacttcaggaggtctcactctgagcaagcactactcggccaaggactycccccacagacttctgcccctcctctccacttggcaatcc

SEQ ID NO: 448573 - DNA, 620 bp, Homo sapiens
acacttctcaaaagaagacatactaagtgtccaacaaacatgaaaaaattctcagcatcactaatcatcagagaaatgcaaaacaaaactacagtgagataccatctcacaccagcctgaatggtgattattaaaaagtcaaaaattaggtggattgctgggcggacccgtcacggagaagagaggagagtcgcgggccactgaataagcttccaaaatgatgcccacactagttatcctgttgaaagaggggactgatagctcccaaggcatcccccagcttgtgaataacctcagtrcctgccaggtgattgccaaggctgtaagagccaccctgggtgcctgtggcatggacaagcttattgtggatggcggaggcaaagcaacaatatctaacgatgtggccacaattctgaaacttcttcatgttgtccatcttgcagcaaagacgttagtagacattgccaaatcccaagacactgaggtcggtgatggcaccatctcagtgaccttgctggctgcagagtttctgaagcaggtgaaactgcaggtgaaggatggtttacaccctcagctcaacattcgagctgtctgcacagccacccagttggtagttaaca

SEQ ID NO: 448574 - DNA, 592 bp, Homo sapiens
acactgtctgttttaaagtggtcattgctttaggaggaaaaagttcaggttaagaaggttcaggattgcctgagcaggcacagatactgccattttaaatagatgcctgtacatttgaaaacggttgaaatggctcctggctgtggcagggcagcaggctggggccatggcaggccaagtgcaggcccaaatcagactgcaggagcttcwcatacactctgggcaggcacctgcctctcagtagctcactgagagatgagggcacccagcaggggtccccaagggaaggcacaaagagggagccagcctgagattaaggggctgtgaaaacaatgcttttccagaagtcctagctggttaccttcacagctgcttgcaaaacagagaaattctacatccactcacagcagccatgtccacagggtgctccagacggccaggaagttaaagtcacgccacctggctgtggagatcaatgaggctgaagtgcaacaggagcagcaggaatccctcctgggagatctccaggatgacattcccccaggtgacagcctaccaggcccgtggaaagccctggctagtaacctcacag

SEQ ID NO: 448575 - DNA, 576 bp, Homo sapiens
agtcaatataactagggcccggtagcctgaggatttaaacttacatccttccaatttctaaccctatgtgatctcttgcaaaaaaaaaaaaaaaagaatttccaaagaattgtctaaactgactgaagtagattgaaaattatatcctgtcattctaataaattaatccagtgttatagtggatttacataaagcaaggtatatgctcacataaaacacatcccttcaaaatatggtgggtgcatagtctttaaaaaaatgaaaaccccaacactctttactttaaaatgggtacagcrttttgctatgttattgtttaaggtctatatttttctaaaaatccacagttgcagatttgactcagctgtgtgctttcagatcttgtatgctaagctactcaggaactgttgtctatgggattgaacacttaacagctgtctctgggaatgtaaatttgattctttggactgctcatgggactctgtgacattttcctctccagtgacagcagatttgaatggcattaggctactgattaaataatacccaagtaagtttaatgtcaacttaggcatc

SEQ ID NO: 448576 - DNA, 618 bp, Homo sapiens
ttccttttgtttttctggcctctgacttacttggatgggaaatagccaaaaaaaaaaaaaatgctgaatatctcagatataggtaatgggtcttcaccagaacataaaaatagacccttattagccatatcagtaatgtgctgtgtgggggattttttttttctttcaattcctctggcaacaaaccacacactgggatctgacactgtagagtgctttctcttctctttttttkggggggggagggggtgtggttgcatatttaaactctcacgcatttatgtactgaggactgcagtgtaggactttcctgcagaataccatttgatcctattaagaattgtccaaatgttggagcatttgattgaaaaatccttcttagccattttaaaggtaagttgtatgatttttctttaaataaaaaagattaagggatttttcccatcacccagatgacgggaggtgacactactgtataaatactcctaagaagttatataggaggacaggaaaaaaggtagtaactgttttcttagtcactaggctttatctaaaaatcaggtttgcattattttcaagttatcaaccttcctatattttatgcttaaaccataccca

SEQ ID NO: 448577 - DNA, 618 bp, Homo sapiens
ttccttttgtttttctggcctctgacttacttggatgggaaatagccaaaaaaaaaaaaaatgctgaatatctcagatataggtaatgggtcttcaccagaacataaaaatagacccttattagccatatcagtaatgtgctgtgtgggggattttttttttctttcaattcctctggcaacaaaccacacactgggatctgacactgtagagtgctttctcttctctttttttgggggggggagggggtgtggttgcatatttaaactctcacgcatttatgtamtgaggactgcagtgtaggactttcctgcagaataccatttgatcctattaagaattgtccaaatgttggagcatttgattgaaaaatccttcttagccattttaaaggtaagttgtatgatttttctttaaataaaaaagattaagggatttttcccatcacccagatgacgggaggtgacactactgtataaatactcctaagaagttatataggaggacaggaaaaaaggtagtaactgttttcttagtcactaggctttatctaaaaatcaggtttgcattattttcaagttatcaaccttcctatattttatgcttaaaccataccca

SEQ ID NO: 448578 - DNA, 580 bp, Homo sapiens
tagtcatgcttttaggttctgttgttttacatgctaacgagttctattgttttacactrtatataaactacaatcttctctgtacctcttcatatgtaagtattgcattcatcttatctccctattgattccaactttttgtttttatcacagtcaatagcagaagcagagccagcattctctcctgagacagactattacaaggttctatttactgtccttttctcctgggttttggcatttatgcattttgttttgatacttaagacttcatcatattaaaggttctcttgagattgaaagaatcagtctgactcaggtttttacaggacaatgctacatttgattatattttaaattttttctttatattttatccattgccttgtaattctgcaaatgatgaagttatttttgaatcctctagtacatcagttcaactaggctatgcccctgtggttgacgatatgtctcatctcacagacggaaacaagtacaaagagagaacttaggttattttcttggaattaattctcattggaacagaaaagccaattcccaggggtccttgcttaagcct

SEQ ID NO: 448579 - DNA, 581 bp, Homo sapiens
ggaccacccctgcatctcctctctgctgaaagctgttccatcactcaataaaattattttctgtcttcctcacccttcaatattcaccatatcctcattcttctggggcacgagacaagagctagggaaacgctgaatgctggtataagctgggacatgccagtgtggccaagagaggcccaggtggggcatggcttgccgagggtccccggcttgcaaagagaccatgaagaaaaatcttaccttactagcattgctgaaggagaacaaagaagaataatggcatccaccaaaaatcaaagcaatactgtctcaaacattacagcagaacttggagaaaggtgttaaaaagagataaaaagtggamacagaaaaaagagcaaaacaaagcaatattctagttacatttttaaaaataatcattaggatgatttagaacaagtgtttgtaactctgggggtctctgaaccctcatttgtaggactagatgtctgcagtgagaaaataagaaaggaaagagaagaaatgtattctacacagaagtaggggaaagttccttaaactatgagtcacagctattt

SEQ ID NO: 448580 - DNA, 581 bp, Homo sapiens
ggaccacccctgcatctcctctctgctgaaagctgttccatcactcaataaaattattttctgtcttcctcacccttcaatattcaccatatcctcattcttctggggcacgagacaagagctagggaaacgctgaatgctggtataagctgggacatgccagtgtggccaagagaggcccaggtggggcatggcttgccgagggtccccggcttgcaaagagaccatgaagaaaaatcttaccttactagcattgctgaaggagaacaaagaagaataatggcatccaccaaaaatcaaagcaatactgtctcaaacattacagcagaacttggagaaaggtgttaaaaagagataaaaagtggacayagaaaaaagagcaaaacaaagcaatattctagttacatttttaaaaataatcattaggatgatttagaacaagtgtttgtaactctgggggtctctgaaccctcatttgtaggactagatgtctgcagtgagaaaataagaaaggaaagagaagaaatgtattctacacagaagtaggggaaagttccttaaactatgagtcacagctattt

SEQ ID NO: 448581 - DNA, 175 bp, Homo sapiens
ttaaataaccttagataaattccccaatgatgttgtattcccagaaaccaaagtcatttgtgttgttattattctttccactcggcagtgaatgggttaaagatcactttctaaaagcaagtyttgctaaaaattagagcagaaggccatgaggacttagaagcatgtaaaggat

SEQ ID NO: 448582 - DNA, 577 bp, Homo sapiens
agtgctaagtgtatgaagttagggacagactttggtcagtgcctggtatgtattgggcagacaaatatttgttgaatcaatgaacaaaatgcaatatatcatccaattctttagagacagtcatttacataatactagccttcataaattccttgccttttcatataaacatatatctgtttagtagcattactatacagtacatcacttcaatttctttatttctaattattgtagcataggtaacgtgggtaattataaatcagtaattctttgaggtcttctgttgaaatatttaatcacagcttgtctagaatacttgagtcacaatactagccatccaaatgacaaatagaattgcayagatctgaaatacaagcaaggttatgattttttgaatgagcatgcattagcatttcatatctataaacaccttcttcagtcccttatcttcacacaatgcccactgcggcaaaccatggcctcctgtactctcttttaatacatcaggctcagtttccaactgttttagatcatcacaacaaagttaaggcatagtttgtttctatagaacaat

SEQ ID NO: 448583 - DNA, 664 bp, Homo sapiens
tatatgaactgtattataagggctggaggtctcaattgcagagctttgctagaacttttcagtctacctcagaaccatagtacttaatccttccatgttttgctctaagaaagaggatggagctatasttcactagatacagccttgtaccatgcttgtcaaaaaattacaataagaattgtttgatcgttactgattactatctgataacatcaaaacaaagtttcataaacataagtgctacagcatggaagtaataatgataacaaaccaaggctctctgtctgatttaaaaaacagtgggacatctgcttggctgctaccataattggctaccagcctgttgttttgttgtgctggaagagggactttatgtcctatggatattatttgttcttggtccagggggacccaagtttccattagattacaagctctatgcacatagccagatgtgtgcaagactcttgcataagttctgtaaatcatgcttaactttattccttttagtattgggtttcttttagtttcctttggtcctttctctgtgagaattaacttgtatctccctggactcatagtgtctacggtgtcacttggtgtgttgtaactctccctgccatagccttttgaaagcctcctatgataaccaaactaaacagat

SEQ ID NO: 448584 - DNA, 573 bp, Homo sapiens
ccaattaagattctggcctagaaaatcaagtctaattccttggcctggcattcaggtcccttgtatcaggtcttggctttcctatccagcaccatctcaccagcctgctctgtccccttctctcccaatcatacatttttgcattcttaaatctcttaattctatctgaaatgccataccagtttgtcaaattaatagacttataagccctttcttcataaatttattatttatttattatccatctcccccactagctagtaaaaccctctgtagcagtaccattgcactggcatttaccaagaccctggtacattttyctggtaaatagaatgtgaccaataattatttgtaatatgcatcattgaatggcatttgtccactttgtttagtataaagccaagtaatataaatatgaaatagaaatacatattctatgcagaggaactgcagagagtatatttgttctacaagaatgaggggtagttttaggaaaggtgttattgaattggtaacaagtcaggcttgagtttgtgactgaaggctagggattttgtccagaagcaattactc

SEQ ID NO: 448585 - DNA, 573 bp, Homo sapiens
ccaattaagattctggcctagaaaatcaagtctaattccttggcctggcattcaggtcccttgtatcaggtcttggctttcctatccagcaccatctcaccagcctgctctgtccccttctctcccaatcatacatttttgcattcttaaatctcttaattctatctgaaatgccataccagtttgtcaaattaatagacttataagccctttcttcataaatttattatttatttattatccatctcccccactagctagtaaaaccctctgtagcagtaccattgcactggcatttaccaagaccctggtacattttcctggtaartagaatgtgaccaataattatttgtaatatgcatcattgaatggcatttgtccactttgtttagtataaagccaagtaatataaatatgaaatagaaatacatattctatgcagaggaactgcagagagtatatttgttctacaagaatgaggggtagttttaggaaaggtgttattgaattggtaacaagtcaggcttgagtttgtgactgaaggctagggattttgtccagaagcaattactc

SEQ ID NO: 448586 - DNA, 573 bp, Homo sapiens
ccaattaagattctggcctagaaaatcaagtctaattccttggcctggcattcaggtcccttgtatcaggtcttggctttcctatccagcaccatctcaccagcctgctctgtccccttctctcccaatcatacatttttgcattcttaaatctcttaattctatctgaaatgccataccagtttgtcaaattaatagacttataagccctttcttcataaatttattatttatttattatccatctcccccactagctagtaaaaccctctgtagcagtaccattgcactggcatttaccaagaccctggtacattttcctggtaaatagaatgtgaccaataattatttgtaatatgcatmattgaatggcatttgtccactttgtttagtataaagccaagtaatataaatatgaaatagaaatacatattctatgcagaggaactgcagagagtatatttgttctacaagaatgaggggtagttttaggaaaggtgttattgaattggtaacaagtcaggcttgagtttgtgactgaaggctagggattttgtccagaagcaattactc

SEQ ID NO: 448587 - DNA, 553 bp, Homo sapiens
tgacctgcagccgttttgcaaattgtaaagtgaatccagttatctaaaaagagaacaactaaataattaccaacttttaaaaacattattttatactattcaaaacttatttttcttacagcagaagagaaggtagtaacttaaggttaaacaggactaattgaaacttttaaaactgcatatatagttatakttatatacacatgcatccatatagatacacacaatttatttgcccaatcgaatgtcaaggttttagttagttagatttgtgagttacttgaaatggtttttaaaaaatcaaaaatcagcaacaaaatataagatctcagataattcctggtcaaatatatattcagttagaatccatgtgtcattgtttaaactaaaacataactactaaaatcctagaatttcatttactttttgaaaaggaaaatacaaaaataaagatgattaaaactgttgcgctacaacaattttatagattttgacaataagtatagtcaaactcacatatactctttgacttttgcataatatacaataactc

SEQ ID NO: 448588 - DNA, 613 bp, Homo sapiens
atgtagataagaaaacttgatattctgtttcaggaggcaatacagcactgagacagagcaaattctcctcttagcttctctccccaccattcattcccttaccacaagaatgacaatgggagagaattcaccatgatctcattttatgctttcaatattccttgatacatagttgattctggaaatacatatggaaagttgcatcacaatgtgaacaatacagtataaacttttaatttttaggctgggtgtggtgacttatgcctgtaatcccagcctgtaatccctgtaatcgcagcaccttgtgaggtcgaggcaggtggatcgctttaggccaggagtttgagaccagtctggcccatgtggtgaaaccccttttgtactaaaattacaagaaaattagccagayacggtggcacatgcctgtaatcccaatctggaggctgaggcaggagaattgcttgaacccctaaggcggaggttgcagtgagccaaaatcgcaccactacactccagcctgggtgacagagccagactctgtctcaaaaacaacaacaaacaaacaaaccttttaatttttaaagaaaattacacctgcttaggcctataggca

SEQ ID NO: 448589 - DNA, 535 bp, Homo sapiens
aatttaaaacatggctttagctatgaaataaagagagccctttctctaaataaaactgagccttaacatactaatatctctatgacccatgattaagttttgcctaccataaaaattaaataaacagtgtaagtgtatcttttcaaaagaagaacaaatggaaacgactcaagagctcctggtcatgggaggggggaaaggccgatagtaaaacagtgaaatttcatgagaatgggaggcaaggaagtgaaaatagacttccatttatttcagatttcttcttaggaagagccctgggtgtttgagtcttgcaaggctttcattctgggtgttcacagctgtactgagctcctgctcagtcccacrtgttgttacaggcactgggccatgccacagtgaacaaggctgcaagatcagcaggccaaatatatttatttccatttaacagaaaagagaacccagggagcttgcccaagtgattttcctgaggttcttagggatggttttgacagaactgcatcaagaatgaacttgt

SEQ ID NO: 448590 - DNA, 580 bp, Homo sapiens
agaaaaggcaaaggctgaaaagatgacacatatgagtgatgttaaaagacaggtatttaaagccaaagaagtctttcatagataaagattactcctttatattatgacagaatactacacattatctttaattacatgacattaaattrtatatatatatatatatatatctgttacctcacactacatatacacatatgcataaattggcatgtgggtattgtgtgcatagatatatttatattcattaatgagatatatatcgctctatagaaaatacataattcatccacatatttggtaggtacttccaaaacatcatttttctatctttatgacttatattttatgccctgattccaaaatagtgtggcaatataatctttttcattggttgtttattcatgtgtgctaagttcaagttcagaacatatttctgaacatttctgttcaattaagtaccactttctaaaggtcaactgtaagctaattaggtggaagaagacttgtagttcataaatgacctcatatgacttcagatatatttgatgatatttggttcacttagataactagttgt

SEQ ID NO: 448591 - DNA, 537 bp, Homo sapiens
aaataagtaaatcttaaaattagatttttgactattagaagttttgagtttaaatattataacatcaggctgggtgtggtggctcacgcctgtaacctagctctctgggaggccaaggtcggtggatcacaaggtctggagttcaagaccagcctggccaatatggtgaaaccctgtctctactaaaaatacaaaaattagccgggtgtggtggtgggcacctgtaatcccagctacttgggaggctgaggcaggagaatcacttgaactcgggaggcagargttgcagtgagccaagatcatgccactgcactccagcctgggcaacagagcaagactctgtctcaaaaaaaaaaaattaatgtcatgactttgtaattgaataattaaatatgcttttgaaacatgttaatgaagagctagatattttgtgtctgtggataagtaaatctgacatcaatatgttaaacatctctattttaacccataatttgacattttaataaaaaaccataccaataataattgggaaattat

SEQ ID NO: 448592 - DNA, 537 bp, Homo sapiens
aaataagtaaatcttaaaattagatttttgactattagaagttttgagtttaaatattataacatcaggctgggtgtggtggctcacgcctgtaacctagctctctgggaggccaaggtcggtggatcacaaggtctggagttcaagaccagcctggccaatatggtgaaaccctgtctctactaaaaatacaaaaattagccgggtgtggtggtgggcacctgtaatcccagctacttgggaggctgaggcaggagaatcacttgaactcgggaggcagaggttgcagtgagccaagatcatgccactgcactccagcctgggcaacagagcaagactctgtctcaaaaaaaaaaaattaatgtcatgactttgtaattgaataattaaatatgcttttgaaacatgttaatgaagagctagatattttgtgtctgtggataagtaaatctgacatcaatatgttaaacatctctattttaacccataawttgacattttaataaaaaaccataccaataataattgggaaattat

SEQ ID NO: 448593 - DNA, 579 bp, Homo sapiens
gaacggcttactcatttagtgtgttttagttagtgggacaatgcaataacaagaaaatttgtcttaagagatttgcttggagtatgcacattccacatagattgctattttgaaaatacttagatttaacagttttagaatttcaaattaattttaattccagtgatatcatatatccaattagctamagtttttaagtttttgtaagtcctaattactagctttatgacctggattttttccttcagagctcacagatgtaatttttaagaaacacaagtagcataaattagcaacactctggaagcgagagatggagccttagtcgtgacaagattttatgtaggcaggaaacaagctatgcagtttcattgtgattgcaattccatacattaaaacaaaaacaaattaaaggcaacagtgagaagatttcatttcattcaagaagatagtgaataatctggtcaacacatatttcaacaaaaattcatcattttaatttttgatttacttaaagctgttgtgtatatacttttttgtattgaatccattttgaattgaaatttaaatattactcaa

SEQ ID NO: 448594 - DNA, 369 bp, Homo sapiens
tacccaccatcctgtgcccataaaaaccccaagctcagccatcatagagaagagaagcaggtgggtgtaggagactgtggttggatgacattggagagaagtggcttgacttcagagggagagcttgatggcataacttyggagaagaaattggccagaggtggccggacttcaggggaagattagcttcccacactatctccttttcaggtccctttccattggcaagaaaatcatccgcatttaccatccttcaattcattcatgagacctcatttctcctaggacattggacaagagcttggataccaccaagcgaaagactgtcatactgaccctttgccctcgctgttggaaggcagccacctc

SEQ ID NO: 448595 - DNA, 506 bp, Homo sapiens
tctggtagtcaacacatcagaattattactgtggattctaaagcccttttaaaactgaaaacaaagtgtaaactgatgctgcttataccctcttaaagcttttccttttatatttaaaaacttacattttaaaaatgaagataattttgtccttatgacatgtaagcatttaagttattggaatataaaaacatgaggtttgataagtatcttgcttaattaaaatcttattatctgtcctgctatgtctgcccctgctgcacatcaaggtatgttgygtatttagatttttcacagatcagaaaatttccatcctctgtagtctagtaggtggtaaggcttccagccttgaatgggccttccatcaacaagctcctatatagaaagcagttagtattccttgctctaaacagaggagtttccccccttttaccttatagtgagctaattagctctggaaatagtgtgctttcttagtgtgactataggcatatatgtgcacatgt

SEQ ID NO: 448596 - DNA, 506 bp, Homo sapiens
tctggtagtcaacacatcagaattattactgtggattctaaagcccttttaaaactgaaaacaaagtgtaaactgatgctgcttataccctcttaaagcttttccttttatatttaaaaacttacattttaaaaatgaagataattttgtccttatgacatgtaagcatttaagttattggaatataaaaacatgaggtttgataagtatcttgcttaattaaaatcttattatctgtcctgctatgtctgcccctgctgcacatcaaggtatgttgcgtatttagatttttcacagatcagaaaatttccatcctytgtagtctagtaggtggtaaggcttccagccttgaatgggccttccatcaacaagctcctatatagaaagcagttagtattccttgctctaaacagaggagtttccccccttttaccttatagtgagctaattagctctggaaatagtgtgctttcttagtgtgactataggcatatatgtgcacatgt

SEQ ID NO: 448597 - DNA, 550 bp, Homo sapiens
tgtgtgtcctcaactaaaggagtagaaccttycttttcatagagaagttttgaaacgctctttttgtggaatctgcaagtggatatttggctagttttgaggatttcgttggaagcgggaattcatacaaattgcagactgcagcgttctgagaaacatctttgtgatgtttgtattcaggacacagagttgaacattccctatcatagagcaggtttgaatcactccttttgtagtatctggaagtggacatttggagcgctttcaggcctatgttggaaaaggaaatatcttcccataacaactagacagaagcattctcagaaacttatttgagatgtgtgtactcaactaagagaattgaaccaccgttttgaaggagcagttttgaaacactctttttctggaatctgcaagtggatatttggctagctttggggatttcgctggaagcgggaatacatataaaaagcacacagcagcgttctgagaaactgctttctgatgtttgcattcaagtcaaaagttgaacactccctttcatagagca

SEQ ID NO: 448598 - DNA, 550 bp, Homo sapiens
tgtgtgtcctcaactaaaggagtagaaccttccttttcatagagaagttttgaaacgctctttttgtggaatctgcaagtggatatttggctagtttkgaggatttcgttggaagcgggaattcatacaaattgcagactgcagcgttctgagaaacatctttgtgatgtttgtattcaggacacagagttgaacattccctatcatagagcaggtttgaatcactccttttgtagtatctggaagtggacatttggagcgctttcaggcctatgttggaaaaggaaatatcttcccataacaactagacagaagcattctcagaaacttatttgagatgtgtgtactcaactaagagaattgaaccaccgttttgaaggagcagttttgaaacactctttttctggaatctgcaagtggatatttggctagctttggggatttcgctggaagcgggaatacatataaaaagcacacagcagcgttctgagaaactgctttctgatgtttgcattcaagtcaaaagttgaacactccctttcatagagca

SEQ ID NO: 448599 - DNA, 550 bp, Homo sapiens
tgtgtgtcctcaactaaaggagtagaaccttccttttcatagagaagttttgaaacgctctttttgtggaatctgcaagtggatatttggctagttttgaggatttcgttggaagcgggaattcatacaaattgcagactgcagcgttctgagaaacatctttgtgatgtttgtattcaggacacagagttgaacattccctatcatagagcaggtttgaatcactccttttgtagtatctggaagtggacatttggagcgctttcaggcctatgttggaaaaggaaatatcttcccataacaactagacagaagcattctcagaaacttatttgagatgtgtgtactcaactaagagaattgaaccaccgttttgaaggagcagttttgaaacactctttttctggaatctgcaagtggatatttggctagctttggggatttcgctggaagcgggaatacatataaaaagcacacagcagckttctgagaaactgctttctgatgtttgcattcaagtcaaaagttgaacactccctttcatagagca

SEQ ID NO: 448600 - DNA, 349 bp, Homo sapiens
ctactcaactaacaaagttgaacctttcttttgatasagcagttttgaaatgctctttttgtggaatctgcaagtggatatttggctagttttgaggatttcgttggaagcgggaattcatacaaattgcagactgcagcgttctgagaaacatctttgtgatgtttgtattcaggacacagagttgaacattccctatcatagagcaggttggaatcactccttttgtagtatctggaagtggacatttggagcgctttcaggcctatgttgaaaaaggaaatatcttcccataacaactagacacaagcattctcagaaacttgtttgtgatgtgtgccctctactg

SEQ ID NO: 448601 - DNA, 492 bp, Homo sapiens
tttctggaatctgcaagtggatatttggctagctttggggatttcgctggaagcgggaatacatataaaaagcacacagcagcgttctgagaaactgctttctgatgtttgcattcaagtcaaaagttgaacactccctttcatagagcagtcttgaaayaccccttttgtagtatctggaactggacttttggagcgatttcagggctaaggtgaaaaaggaaatatcttcccataaaaactggacagaagcattctcagaaacttgtttatgctgtatctactcaactaacaaagttgaacctttcttttgatagagcagttttgaaatggtctttttgtggaatctgcaagtggatatttggctagttttgaggatttcgttggaagcgggaattcatacaaattgcagactgcagcgttctgagaaacatctttgtgatgtttgtattcaggacacagagttgaacattccctatcatagagcaggtt

SEQ ID NO: 448602 - DNA, 492 bp, Homo sapiens
tttctggaatctgcaagtggatatttggctagctttggggatttcgctggaagcgggaatacatataaaaagcacacagcagcgttctgagaaactgctttctgatgtttgcattcaagtcaaaagttgaacactccctttcatagagcagtcttgaaacacccsttttgtagtatctggaactggacttttggagcgatttcagggctaaggtgaaaaaggaaatatcttcccataaaaactggacagaagcattctcagaaacttgtttatgctgtatctactcaactaacaaagttgaacctttcttttgatagagcagttttgaaatggtctttttgtggaatctgcaagtggatatttggctagttttgaggatttcgttggaagcgggaattcatacaaattgcagactgcagcgttctgagaaacatctttgtgatgtttgtattcaggacacagagttgaacattccctatcatagagcaggtt

SEQ ID NO: 448603 - DNA, 492 bp, Homo sapiens
tttctggaatctgcaagtggatatttggctagctttggggatttcgctggaagcgggaatacatataaaaagcacacagcagcgttctgagaaactgctttctgatgtttgcattcaagtcaaaagttgaacactccctttcatagagcagtcttgaaacaccccttttgtagtatctggaactggacttttggagcgmtttcagggctaaggtgaaaaaggaaatatcttcccataaaaactggacagaagcattctcagaaacttgtttatgctgtatctactcaactaacaaagttgaacctttcttttgatagagcagttttgaaatggtctttttgtggaatctgcaagtggatatttggctagttttgaggatttcgttggaagcgggaattcatacaaattgcagactgcagcgttctgagaaacatctttgtgatgtttgtattcaggacacagagttgaacattccctatcatagagcaggtt

SEQ ID NO: 448604 - DNA, 492 bp, Homo sapiens
tttctggaatctgcaagtggatatttggctagctttggggatttcgctggaagcgggaatacatataaaaagcacacagcagcgttctgagaaactgctttctgatgtttgcattcaagtcaaaagttgaacactccctttcatagagcagtcttgaaacaccccttttgtagtatctggaactggacttttggagcgatttcagggctaaggtgaaaaaggaaatatcttcccataaaaactggacagaagcattctcagaaacttgtttatgctgtawctactcaactaacaaagttgaacctttcttttgatagagcagttttgaaatggtctttttgtggaatctgcaagtggatatttggctagttttgaggatttcgttggaagcgggaattcatacaaattgcagactgcagcgttctgagaaacatctttgtgatgtttgtattcaggacacagagttgaacattccctatcatagagcaggtt

SEQ ID NO: 448605 - DNA, 589 bp, Homo sapiens
gctgccaaagcttttccctctcctttgttaatctggatatctctgtctcatcctgccttactcagatccaatatgccatgtcagaacaattacctctctttcacctgagttacacatccctttcttgggtcctcacagcatcttactctaatgtgtgtatgtttctcatataattgtttatcgtatgctctcaccacactctgaacttgtgcatagaaactgtatcattgatatctgtaataaccatggaggggatcctctctgatatgccttcatattagttaaagggaagctttcagctgctgcaacttcgggatctgctgcagcacccatatcaacgtccccgggctgctccttgccagtgactgatcccagtgggtactagagccaggccattcctgcctgagcaaaactyctctaatgggtattctttgttctgaatctccttatcagactttctgagattttttttttcttttcagaactacactactttcggattcttttcctattctatttcccttcttttcccttattctttcacaggtatcagacctgcctcatggactgaaagctcctgctgcctcct

SEQ ID NO: 448606 - DNA, 496 bp, Homo sapiens
atcttttatattctattggcaaataaaatataaatgatactgaaacacttgtcaagcctcttaaagttttgcttttcctgagttttattacgaaattaatagagtatatataaataaatatacatatatacacacaaacacacatatttatacacatgtatacaatgtatatatgcatacatatcttcatcttatgctttatrtaagtgcttacaaatagtacctagatattgctctgtgccctcagttaatgttgtgtgttgcgtggtatattatagtaaaagtacaaatggtctttgaataagaaaatctgggttcaaacccagtaggccgttttctgcctttacctaagcacaaactaatatgctttcaatactcatctgtaaaatgaggatagtaactccaacccagcaaatagactacacccaaatataactgcgtcttgtggaagcatgcagtcatcatgaattgtatattattatttatagttcactaa

SEQ ID NO: 448607 - DNA, 627 bp, Homo sapiens
tgacaatgcatatgagcttagtagacacagaatttgatcttatttctagctgtcttctggggctcattttataataaaaccattcatagttaacattgatgcacaggtatctttgattcaaaaaatatcccagatataaggtcaagttttcagtttcttaccaaaacggaaactatctttactttattggacaccatgggaggtaatgataaccgaggttgttaaatttttaacagaacagaaaaatactaattttcaatggcttctaggacttatttttcagcatattttatttctcacttacacaaataacagaaaacccaccagacaatgtcaaaaatataatcaaaattatattgtgattatcattcatctggttgaaattactgtttgtctctaatgaagcattcactattttaccatagaaacatccttactatgccactaccaactttagagaattcggtcacacccattaatggtcaagaccaccttcattatggctgtgaaagagtcrtggttttgtggggtttttttacaatatgagacaagggtaaatagatattagtttacctagcttgactcccacaggtctaaccacttactaattgataagtataatgcatt

SEQ ID NO: 448608 - DNA, 336 bp, Homo sapiens
agaaatctgaaaccacttaacaaaaactttttgtattgtttccaaaaatgcacgcttcaatcttgtaatttgatggcatctcttaccttgaatgactttgtaacatcatgcatctgtcatttggaaaatattagtcactgtgttatgtaggtattcatatattaaaatgttttattatatgaaatcttcacacattctaaatccttagaaaattgtgactatatactcatgagagaatggtagtgggtaaaaaaaaatcttattaatatttagaaattgtwttgcctttgaagactcctcaaaaagatgccaaccagccccatggatctctagtct

SEQ ID NO: 448609 - DNA, 644 bp, Homo sapiens
taatttcagttaaatgtcaataataaatatctaagatcatagttactttcacttatctttaatagctcttaattgcttacaccactaattaatattactaaaattaattgtcaagatgtatttccagattaattttaagccctaactcttgtataaaccttctactgcagtatagatttttgtataagtattcaaacatttcctgtgtcttctcattagttcatatcaaagtgttctctagaaaaacaaaaacaaaaacaaaaacaaaaaacttgccttcagaaaagtttccaatgcaagtcagaacattgtaaagccctgaaattagctcttatgacaaactcctatttgttaatacgctacaaaacatagtttgacatgcttgaaattaaaaatattttgtctaatttaagaactaaagcactaaagtgcatattttgatttgaattttcctagtatttctcagtaaataattttgtttccaaaaggaactcatttaaatgtatgcattatatctakgtatttattttctgaatgataaaacagaaaatatttgttgaattatgttgtatgtaagatacaatacagatataaaaataacagtataatatgaaaatattacctgatgtaatgtttttcattag

SEQ ID NO: 448610 - DNA, 579 bp, Homo sapiens
acatacatatgtctgtatgtacctatatagacacatacatatgtatatatgtgtatatacacatatactgatatcctgtacatatgtacatgtgtacatatatacatactgtacatatgtaatttttgatccacaaaattaagcatattaaaatacgtattaaatacatatattacatatactgtagacatactgtacatatgtacatatacatatgtatmcatgtacacactatatatagacacatttatatttatatatacacactaacatatattcaaggggcatagggtatatatgtccatatatggacatattgtacatatgtccatatatacataatatagacatactgtacatacatgtacacatacaggcatatactgtacacatgcacatatatagacaaatactctacatatgcacatatatagacatactgtacatatgtacatatatagacatatatagacatatatatataatactgatttctttgtggttataggttccagaggtacttccatatttgtctgttttggtaggaagtggtatgtcaatcctgttagattgacatgg

SEQ ID NO: 448611 - DNA, 579 bp, Homo sapiens
acatacatatgtctgtatgtacctatatagacacatacatatgtatatatgtgtatatacacatatactgatatcctgtacatatgtacatgtgtacatatatacatactgtacatatgtaatttttgatccacaaaattaagcatattaaaatacgtattaaatacatatattacatatactgtagacatactgtacatatgtacatatacatatgtatccatgtacacactatatatagacacatttatatttatatatacacactaacatatattcaaggggcatagggtatatatgtmcatatatggacatattgtacatatgtccatatatacataatatagacatactgtacatacatgtacacatacaggcatatactgtacacatgcacatatatagacaaatactctacatatgcacatatatagacatactgtacatatgtacatatatagacatatatagacatatatatataatactgatttctttgtggttataggttccagaggtacttccatatttgtctgttttggtaggaagtggtatgtcaatcctgttagattgacatgg

SEQ ID NO: 448612 - DNA, 513 bp, Homo sapiens
gtcaagtgaattaggataaaaacataatgccaagtaaagaaaaaaaacttttaaaaggagatggtgatacaccatgccaaatatttcttatagattaacaagcagagagcttaaaattgtccatcgggtttgtcatagtgcagatcatccatgacttagataagatgagctttagtgaagtgatagcaaggaagtctgatcatagagttgtaagagggaatgagactagaygaaactacttaaaaatggtgatttccagtatgttaatcactctgcatttgtgatagctgggggtagagtagcatatgtgtccattcttagagcatatgtacatattgtataccatttttaaatttctggcataaatcttacttcaatattttaatgtgattttgaatatagttagtatttgatttgggcttctcaaatttatgttcttgagcaaattgagcctgtgttttcctttgtctcatattgttctttaccaaatttagaatcaaggttatgacaggg

SEQ ID NO: 448613 - DNA, 647 bp, Homo sapiens
gaaaacaaaaaaaagagtatggttgggaagtaaatgacagagagggagtggccagaggggaacataagagaagagagggttttttgccggcaaaggagatttgagctcatttataggcatgggggaagacaatcagtaggtgcataagtgagttgagaatctatactascaatacaggaaaccatgttaggatcactgtctcaacaaaaatgatcacagccttccaaaaatgcaacttgactttaaaaaggctttcttttatcacttgcaagaatattgctgtgacacctaataaaaatttaattaaggcttagatgatatcacgttttatgtaacctgaagtccttaaatccatgaaatcactcaaatagaatcaagtttgtggaaagagaatctcatcttaagaagtggcagcaggaaaaatgagtaagttccattttattttatcagtgaagtctggggctacgaaatggttctaacagcataaagaaataacagctgcattcaagaccaggatatgtaaaataatttgtttagtttcagccactttttaaagtcaattttacaccctgaaagaaaggcaatcctgactccattgttctttcgccaataaggagatcgggaattacaataataaatagaagaaa

SEQ ID NO: 448614 - DNA, 569 bp, Homo sapiens
gagttcaaatagttatccaatttcatgaaaatagcttttttaaatatagccatgacatatccagaatttctcattttaaatattagaatacctctaatattcaaaatacaaaaatatcaaaatcacacttattttgattttctaagtatttgcccatcacaatgtgctttttaaacttagtacagataaamttgttgttaggttataaagtcttttgttggcttcctccagcatctcactgcacctccacattttacacattatattatactttaaatgtcctctatctggctatagcaacttgagtctttctgttattgatgttccttatataattatagttttgttgttttaatatgtcagttttctgaatagttttattaaagtaattttaatctcaatgagaatatggctgtgcttccactttatgcatttgcataaaggttcaactcattttcaaattatcaaggactgcaatctctaattatgaattagatgctgatatttttatttgctcatttatttggcatcctttttcatatcattacctctaaaagtatgtacatttc

SEQ ID NO: 448615 - DNA, 526 bp, Homo sapiens
ttgtattgaaagtctgaaactgtggagtgccttaaagataattttcaaacttctctcttatgaatatgcaaactgagatggcaatgaagaagttaatagagaccaaacctaggatttgaatctaggtgtcttgattcccagtccactacttttcctactaaaacattttgcaacttgtgacaaatgatgaatattcttggatttaggagatatatacaaaagarcaaggagatgtatcacaaggacatttcacttagaggttataatagcataaaattgaaaacaacctaaatttcaatcaataggacatttgataaacaagagtacataaaaaacatgtcctactcagccattcaaaatgatgatatagagctctgtgtattgtcctagatagatgaacatgatgtattattgtttagaaggaagaaagcatgttacaaaacagcatgtataacgtggcttgctgtatattaaatatcagcattcatagatgatgcagttttggctagatgatgagattaagaag

SEQ ID NO: 448616 - DNA, 605 bp, Homo sapiens
tcattttttctgccttatgcccctcagtcaaattctttcttctgaggaaggcaagaattgaggttgctgtagacccacacagatttgccaccagtagcagatacctcccactggtaacaggacaacacatgtagagagtgaaagaaagcactggtgataatatactgagaaaacaggcatagaatgtgactacccacagccggtcatcctaagcagaagacaggctgctgaagcagggagtgattttagaggggctgcatactggggaaccatcacaaggagcaggaagtggcctctgtgctggttaccttctccatttaaactatcttcactgtttttcaaaagaaggaagaaaagtaggcaggatggaaggaaggagggatgaaggaagagagagtaggaaggtggtaagaaaaggaaagaaggaaagaaatgatttttaaacaaaatatatcaaaactattaaaagtaaaaaatacagaaaagtacaaaaatttactgaaawattaccagtgtggggcagaagagatagtgtcatcttgtgttgaaaatcatttttttccacatttccatacttgaagaataaatagataaatggaaggagg

SEQ ID NO: 448617 - DNA, 569 bp, Homo sapiens
gcctcccaaacttagttgaacacagaaatattttaccaagaagcatctcttgggtctggcattctgaggaacatgcttatcaagatgtggaaaayatatttccccaactaagacaaacatctttccaattataaataacataaatgaataaaaatcccctaatacttaagtgaatgtgaataaaaagggctagtctgtcattccacatctatttatgtgacataatggtcacccatttttatttctgtacatgttgacattttcaattttattttttaaaggctgtgggggtctaaccctctggggttggaagatagacctgaaatatgcggtgtaatctaactgtagaaataggaattaggatgtagagatgttctcctttctcatcgttctcatttgcagtttccacctaaaaagtgataattaaagttgaaagaattactttccttctccaattgctatgcatatattttcaagttttggattaatcatgggggtctaccattatttcctatgtttcaaagttatacagatttactgtgggttgactccagctccaacagcttgtg

SEQ ID NO: 448618 - DNA, 527 bp, Homo sapiens
tattattaattataagaataataatcaatatgcccatcaaaaggtgatattatttaacttctggtaccctgtattaatgcttgaactttatacaaatgacttatgtgggtttttktgtgtgtgtctggcttcatttccataatgttatatggttaatctacattgttgtgttcattttcactgagcctaggatttcacggcacagacataccacaatttattcattctattgatgatggacattgagtggcttctaatatttggctattactaataataccgtgaaaaacattcttctatgtgtcttttgatgaacatatacacattttgttcaagttcatgcttagaattggtattgcaggcatgcaggttaagagaacgctctacttcagtagatactgacacttggtaaggcaatggtcctgggattcttgagggatgaaaggtatatctcacattcactcaaatgcaagagctaaacacaggtagaaagtgaagatggcattttgcttcacagcaggttcata

SEQ ID NO: 448619 - DNA, 513 bp, Homo sapiens
tcttctatgtgtcttttgatgaacatatacacattttgttcaagttcatgcttakaattggtattgcaggcatgcaggttaagagaacgctctacttcagtagatactgacacttggtaaggcaatggtcctgggattcttgagggatgaaaggtatatctcacattcactcaaatgcaagagctaaacacaggtagaaagtgaagatggcattttgcttcacagcaggttcataaagttgtgcttttaacttgtgttaggctgagtatagagttgtgtccaccatcgttatcctggagtttctcacactattataagaactagttgcctttctgaggtctccaagtgttcagctgtacagtgcctaactgaaatctccactgctgttacttgtatgtttttaacaggtaaaagttaataactttgacaaatatcaaggagtctctaactggaaaagcttattagctttgggggcagaatagcaggatggggtggccatcagaaggccccgtt

SEQ ID NO: 448620 - DNA, 513 bp, Homo sapiens
tcttctatgtgtcttttgatgaacatatacacattttgttcaagttcatgcttagaattggtattgcaggcatgcaggttaagagaacgctctacttcagtagatactgacacttggtaaggcaatggtcctgggattcttgagggatgaaaggtatatctcacattcactcaaatgcaagagctaaacacaggtagaaagtgaagatggcattttgcttcacagcaggttcataaagttgtgcttttaacttgtgttaggctgagtatagagttgtgtccaccatcgttatcctggagtttctcacactattataagaactagttgcctttctgaggtctccaagtgttcagctgtacagtgcctaactgaaatctccactgctgttamttgtatgtttttaacaggtaaaagttaataactttgacaaatatcaaggagtctctaactggaaaagcttattagctttgggggcagaatagcaggatggggtggccatcagaaggccccgtt

SEQ ID NO: 448621 - DNA, 545 bp, Homo sapiens
tggagattaaatgctgcaggaagacagtttttttgatacatctaaaattggttcaatctaaaacctatctatttagaygcaaattaaatggctaggttaggtaaagttccataatccctggaagaacgtcaaaacatatcaatgaatgaaaccacgttttctgtatggaaaacagagcatatacagggttcctttacaaatctggtgtctgtaaggtatatcctgcatcatttactttatactatttatgagctgtgaagctctgatgcacaacttcaggaaatgaataatttatcaatctttgaaagatattctggagaatttctgaaggcagatggtagaatttgcagtgtactagacataatttttcaacaatagtagcgtcaaattaaatgatcattcagaaaaatacagacatgagattttaaaatttacgttgtgatggaaagattttcttctttatttgggaaaatagatttttattggctataaatatatctattgctcttagagagatttccttagcagatgggcatacagttata

SEQ ID NO: 448622 - DNA, 471 bp, Homo sapiens
cttactggagtcttccacttttccgttctgctctgctaccttcttacatatacctccctcaaattttggctgaaattctgtgattttctaagaagaaagaaaacataagtatagttgaggcagaaaatgcaaacattcctaaagattaatgtgctgaataaatgcataccaggtatacacatcctatcagasgtttgcaagagaggactttctaatcattttgatttatactcaaaggtggaatggaaggagaagagtttagaactgagtacacaaaatggtggcctgctaggctgcagatgaacttttcttcgtcctatattttatttttaaagtacaaattatttgtgaaagtcctgttcttttccagtgatatttcaaaattcatttgcattactcgtttggcctgtgtaggttcttagtatatagttttggagtttatgagtactgagtgcctaaaacttccgcttt

SEQ ID NO: 448623 - DNA, 587 bp, Homo sapiens
atagagcaaagttgaagattattaactacctgattttgagattttttaaagctgaagtagtcaaatagtgtagtaatgacataaggatagacaaatagcccaatggaagggaatataaactccaaaaatagtcagtcgtgtatgtctaattgactttcttttaagctggagaaataatttttttaaaataaattgttctggagcaattaaccatccacttacaactcaacaggaagacaaaaaacctaattaaaatgggcaaaatatttgaagagaaatttcaccgatgaatgtatacaaatggcaaacaaatacataaaaaatgctcagcttcactagttattaatgaagtgcaatttaaaaccacatgtgatatcccactatacacacactagaatggctgaaagttgaaggactggcaatagcaagtctttgcaaggatggagagccactaattrgaacacttatacattgttgaaagaatgcaaagtgatatagccacgttggaaatgtttaccagtttcctacacaattaaaccagtatcacatgccacaacaatttcattttaggtattttatccaaaata

SEQ ID NO: 448624 - DNA, 587 bp, Homo sapiens
atagagcaaagttgaagattattaactacctgattttgagattttttaaagctgaagtagtcaaatagtgtagtaatgacataaggatagacaaatagcccaatggaagggaatataaactccaaaaatagtcagtcgtgtatgtctaattgactttcttttaagctggagaaataatttttttaaaataaattgttctggagcaattaaccatccacttacaactcaacaggaagacaaaaaacctaattaaaatgggcaaaatatttgaagagaaatttcaccgatgaatgtatacaaatggcaaacaaatacataaaaaatgctcagcttcactagttattaatgaagtgcaatttaaaaccacatgtgatatcccactatacacacactagaatggctgaaagttgaaggactggcaatagcaagtctttgcaaggatggagagccactaattggaacacttatacattgttgaaagaatgcaaagtgatayagccacgttggaaatgtttaccagtttcctacacaattaaaccagtatcacatgccacaacaatttcattttaggtattttatccaaaata

SEQ ID NO: 448625 - DNA, 563 bp, Homo sapiens
gcctattacagtgcctggtgcatagaaggcatataatatgtatttttggaaagaaacaatgagtaatccaggtggattgacagcaagatgtcaacacaaatggagaatccatgccaggaagtgattgataggtccaggaaggcaggcagctcagtctcatctgaaagtccaccactaggtcaggacaggtgcttccttgggggcaatcataaggggagaggtaggaaaggagctgaagcaatatttagttgggcactgtgctaggtaatttyttattcatttccttattagatcttcacatcaactgcgtgatagaaacattcttttacctccatcttatagttgaggaaactaagagtttatttttgtttttaatatattttgtttttgtttttcaattgacaaataaaaattgtgtatatttattgtatacaatgtgatattttgaaatgttatacagtgtgggccaggcatggtggctcatgtctgtaatcccagcactttgggaggccgaggcgggcagatcacttcaggtgaggagttcgagaccagccaggccaaca

SEQ ID NO: 448626 - DNA, 579 bp, Homo sapiens
tctctcactatggatttaatttgcattttctctgattactagtgatgtgcattttcttataaacctgctggccattggtatgtcttcttttgagaaatgtccatttaggtcctttgcccgttgttttatcgggttatttgttttcttgctattgagttgtttgagttccttatatattttggacattcaccctttactggatgtatggtttgcaaatattttctcccaatgcatggattatgtccttactctgttgaytgagagaaaactaagttttgaacagcctcaattagtaaattgtgcaagagctcacatctatccgttgaaaaagctgggctttatgctgcctgaactccaaagtgcatttttccccagtgtcccaaactgatttccagcagaacagagccccagtcccagggaggcatagattctgagtcgtgaggtgctgatccacaggttatccaaaggttgaaacattcccagaatttttgtggttgaacagtgactcctgcatcagctagtgagtagtgtgtccactaaccatctacataataccagactgttaattcagttaaaaac

SEQ ID NO: 448627 - DNA, 661 bp, Homo sapiens
ctgaactccaaagtgcatttttccccagtgtcccaaactgatttccagcagaacagagccccagtcccagggaggcatagattctgagtcgtgaggtgctgatccacaggttatccaaaggttgaaacattcccagaatttttgtggttgaacagtgactcctgcatcagctagtgagtagtgtgtccactaaccatctacataataccagactgttaattcagttaaaaacattgtattgcacatgtgtgcctgacactattctggatgctgctagtttcttttccccatcaagttcaacctttttttcccatcaagtgcaagtcaaatggtcctaaaataacamccaggtttcccacttactgcattcaggctgcaaaatgctattgagacacttctttctccttcatattcactttaacctgctgtttttggaatcacatggtgctgggaaaactgaatactagagtttaaaatcccccttctccttacagcaggcacaatagcccatttgtccagggctgtcacacacagaggccctcatgctgccttgtgagttcagtgagggcaggtgggacctcttcctcccaatggatagagaaccaatgtcaccacatcaaggtgaatactcatactgtgttccttttcttggaaacaatta

SEQ ID NO: 448628 - DNA, 574 bp, Homo sapiens
gctgggtattgtggggaggtccctagagggaggcagtgggagaagagaatggttctgttgtggcataaaggaaatctttagtaggacatyatgtgagctatgagaaacccttcaaaatatagtccttttggtatttttatgtaaaatgttcccttgtggttaacaatgaagagaatcctgatagatactgctatgcattgaatcacggttaaggccaccaataatttatgtcccacccataaatttatgttccacattaatagaaaaaaatggaataaatatgcaacaaataggaagggtgaggaagaagtcagttcacctgctaagtgtttattgaaattagacactaatgttatcctccgcttttgatcaggccaggctaaatgttagagtctgacatctgtgtggatgtgggtgcatttctttaagttagataatctgtaacacaatatagtagcaaaagtacacgagtatcagctaatacaaaataaataaagcaaataagagaccattctggtcagaattgacttatggtctctaatatcccttgagctgtttttcctgctgactcata

SEQ ID NO: 448629 - DNA, 584 bp, Homo sapiens
acacaatatagtagcaaaagtacacgagtatcagctaatacaaaataaataaagcaaataagagaccattctggtcagaattgacttatggtctctaatatcccttgagctgtttttcctgctgactcatatgatggatggtaatagactgatagggttctggaccagacaagtagctgcctgtgaactgtggcttgcatccatcatacacatattaattgattcattaatatgagttacacagtcttctttttccctatgtgccgtgtttagacttgttactatcagaaatcaaaatactctgtttttaaaagctgagtagaaattgccttaaacccaagcagagtctgcaaacattttaagcaaatatttttccactttttaatttttaaaataaactccagtatttctttcctttttttaaaagtatgtaatacaaagcacaagatacaaaatcagatatgtttctatctggttttcttcagtamcctttctaagtgaaacaggatattatgtttaaaatcctttgaaagtaattgttgttgtgtattcctattgttcttgttcttgtgtaatcctctcct

SEQ ID NO: 448630 - DNA, 566 bp, Homo sapiens
tccctaatggcctaaagtcttcaccaatatataaagcaataattatgcaactttctctatattttatccatcagtcctaatttatctacccatcttctcactctttcgacaactatttatttacatgcagtaattgtgctaggtactgaggatacattcagatgaactgaattttgatacattgggtaaatgcttcaatttaagttggaattaggacggttaagcatggctgaggttgggttgctattttctttcatttgaaaagtttactataaagtaaaggggatactactttcagatgtatttctattaaataaagcataaaattattgtacttgaacatamatagatttttcatatgttccattccattagaattggaggaataaatgaaacatgtttactaacattcatgttaatgtagtaagatacattcttttgatccatagaaaaggcactcattaggaatgggctggagggattattattttttaaatgaaaatttaattagtatattagaaaaggaaaatttatagcaaaacaaaaacaagaatctcaatctgatc

SEQ ID NO: 448631 - DNA, 390 bp, Homo sapiens
gttattgaactattttggagccacgagctgataccttgttttaatcaaatctgaaatactaaaaagagttttataagatgttcagcctaaacatcatgcttagggttaataacagtctctgggcttaaagaatgtaaattattccaagaacatgacagtaaaaagttcatcatgaatgtgtgtttttcttttygggggcaatctttcatcctgtttggtgtgaacttttatggaaaaaggcatcagcactggaaggggggttacctgttgtagagtcagaatcattgcaatttatataataaaaatcactataattttaattgtattagcaatatagaattgaaacttcattacttgattttacctatatgatactcatagtaaaatata

SEQ ID NO: 448632 - DNA, 584 bp, Homo sapiens
tctgagatattgtgtacatttttcttcaatatgaatgttttcctgagctgtaagattcagaagtagcagaaatgtcattcttatttttcaataacgtttccagggcttgtttgggttaattctaaatggccctttgaaaatgagtgaaataattgctaattgyagccctttggtcagtggcctgaatataccatggtcttttgtatatggaggttgcattgctggaaaaaaaaaaaaaaaaaagaaagaaaaagaaaaaaaccaccaccttcatttaatgatttctgcttagggtagaaaggatcttttgtcactttaaagtgaattccattaatggtctagtcatggtgaattggttaagggcgggaatggtgtttatgtgtaaatgcagccctacttgatcaattgtacatacagaaatcatgaaacaaccctaagaaatatcaaatcagagacatgagtgatagactttctatttttggatgccatacctggtgcatagttgaccttcacttgaataatgacagagatataccacattctcgggaatgaatttgatgtttaaaaacaattacctaaagaca

SEQ ID NO: 448633 - DNA, 445 bp, Homo sapiens
aatttccctttgatctgatctatggtctcagagaaaataaataccattgaatggatgtcactacaagtgcaagtgacattattctaccctgtaaaaaataatagcagctattagaaagattttttccccaagctttatttgcagttataaactaaacagatacttgtaaaaaatggccacttaaaatgttaatttcatgaatgtttkcaataatcaaagctaaaaggattaatgagtctaagagaaagatgatacggaaagaatggcaaactaattcaatgtttttaaaaggatgaaaaaatcgtctctttttacaaaataaaaataataacgaagtccatgaatttaaaaaacatgtgtttattatgtttcacaaaagaaatacaaatttagagtgaagggtgggaggaaagtgagggtggaaaaattacctgatggatacgaa

SEQ ID NO: 448634 - DNA, 445 bp, Homo sapiens
aatttccctttgatctgatctatggtctcagagaaaataaataccattgaatggatgtcactacaagtgcaagtgacattattctaccctgtaaaaaataatagcagctattagaaagattttttccccaagctttatttgcagttataaactaaacagatacttgtaaaaaatggccacttaaaatgttaatttcatgaatgttttcaataatcaaagctaaaaggattaaygagtctaagagaaagatgatacggaaagaatggcaaactaattcaatgtttttaaaaggatgaaaaaatcgtctctttttacaaaataaaaataataacgaagtccatgaatttaaaaaacatgtgtttattatgtttcacaaaagaaatacaaatttagagtgaagggtgggaggaaagtgagggtggaaaaattacctgatggatacgaa

SEQ ID NO: 448635 - DNA, 579 bp, Homo sapiens
attttaatacttggaccagtctctaaagcctttcagccagaggctaccacctggagactaaggcacaaacacctctgttctttcatttcctttaaccctatcttaggtttttgttaatttaattttccctagaacttayttcaaagtcaaggctgggattgggaagaggcaagagtcctatactagcctttaacttggtttcctccagtctgagattcctctatattccttccacaggccagataatgtcatatcctctccgtgggggagaacatgctcttacttctctgtgcattcccctcatggtttgacttatgatataaaatctataatctgagtcttccagcacttaacagttaaaatgaaaagcatgcttttggaatgcaaaaatatattcccccgcttcaagcctttggctgcctcatctttcactcactcactgtgttgacttggactagttacttagagtcacgacctgctggaaacagggacaacacaaatgcctaacctactgaattattttgagaattaaacaaaggtaacacataaagatccaggtagagttcctgactgtagtag

SEQ ID NO: 448636 - DNA, 586 bp, Homo sapiens
ctttctcatcaagtcttctctgtattgatatcctttctacttttctatctcccccaacccaaaactgttgggagaaaaagattgaatgttggttttagacacagtggtatctgaggttattattcttaactgctaggtcacttgatgttgtagctatgaacctcagctccattagtacacagctgggctggagctgaccagccgtggacagagaaaggccagctcttgtggcagcctcgtgaaatgctggctgtcattttaccctttgacataagtgaataactgttcaaagtttgatggacttctggctaatcttatttattaaccaaattgtagttgttattttcctttcagagtttattagggaattctaatagtatttatagcacccttttcctaaaagcacagcaaaacaattcaaaggcacatacatasgaagttttgttttcaattttggggcttcaagcgtctgacctcctaaatgtgttctgtgagctgttatgtgttcatgaaccacagataaacaacctctcgttgttaaaacaattagagggaaggaagactaagatgtgggaccctgggacaa

SEQ ID NO: 448637 - DNA, 530 bp, Homo sapiens
gaaactctgtttttataacaattctcaaaaataaagaaaactcaagaccaagaatagaatcagctcatgtttgtgtcttcaaaggaagaatgtcctcaagcagaggcttctgctgagccatgggtggggtgaatgttgagatgaggacaaagtatgaggtwaaaatgccaccagcaaggatgagacctgggaaggtgtggaaaaccgaattctaagacagccttcgagatttctgcctctcgtcactttgcatgtgggcaggacctgtgaatctggtgaggcatcacctccatgactgagtagttcaatggcaagggtaagaggatagtttaatataattaaagtccttgaccaattgactttaagttcattaaaagggaaacgatcctgggtgggcctgacctaatcaggagatctctttaaaagacagtctagcagccagagatcgaaaaagccagagagacctgaaacagcagagaagctggccttgcagaagcaagttgccatatgcggacagggccagaggtagg

SEQ ID NO: 448638 - DNA, 530 bp, Homo sapiens
gaaactctgtttttataacaattctcaaaaataaagaaaactcaagaccaagaatagaatcagctcatgtttgtgtcttcaaaggaagaatgtcctcaagcagaggcttctgctgagccatgggtggggtgaatgttgagatgaggacaaagtatgaggttaaaatgccaccagcaaggatgagacctgggaaggtgtggaaaaccgaattctaagacagccttcgagatttctgcctctcgtcactttgcatgtgggcaggacctgtgaatctggtgaggcatcacctccatgactgagtagttcaatggcaagggtaagaggatagtttaatataattaaagtccttgaccaattgactttaagttcattaaaagggaaacgatcctgggtgggcctgacctaatcaggagatctctttaaaagacagtctagcagccagagatcgaaaaagccagagasacctgaaacagcagagaagctggccttgcagaagcaagttgccatatgcggacagggccagaggtagg

SEQ ID NO: 448639 - DNA, 581 bp, Homo sapiens
gtatactgttcacatttttaaattctttagcccttgaaaacgaagttgggcatttttctaatcaataacttttgttgcaataattactgatacttataacataatacctttttaagttgaaaatttcttttttcaccgctggttatgaagtatgtggctaatgatgtcacctctttcatcacatggaatttaacacattcaaagtcaaggacaatgtgttccatatttttaatgaaatgagggtgtcttcattaaaaggcaaayccttcatttcaaaaatctgaatgattcttaaaatagaatgccaggtggctaaatttaggtgctgaagaaagtctaattcaggaaggctttctggcaccattcccaaaactttttcatttgattatggattgaatatattttcattcatttcaaactcttgcctctctgtatgttattctgagttaggcaaactaatgttggtgggcaaactggcctcaaaaaactatgccactctgcttaaatgatctatttgttgacatactgaaaagatggccttatgctttatagttatcaaggtcacatgtgtccctggtaaa

SEQ ID NO: 448640 - DNA, 534 bp, Homo sapiens
ggaaaaatgagaagacgtgttctgtctcatgctgttgtcaggtatgtttcatatttaggcataaacagtgagagaaattaaaatttcacaacagttgagtcatttctgccactatgaacacttgtagtttatttgtagtttctcatgatttttattaatagcaaagctgttgtatggtttgggatcatttttgcacttaaatgattacactctcaccatgttgcccatgcttatttcagtcagtactaagcaataattcaattgcttttcccagagagcaactcaaagctcacatactgattgaatraccgttctgcaaaaagcgaggagttacatggggaaaataccatagtataagacatgatcacaaagttactgatatcttacgcatctcacatctaaaatgaaagtttccctattttaattaatacctacgaggtgtaagagtttgataccctaaatgctcccaaccgagacatccttctcaaaactctgtgcagaggtgtctaaaaacctatcagaaagccaaatgtt

SEQ ID NO: 448641 - DNA, 534 bp, Homo sapiens
ggaaaaatgagaagacgtgttctgtctcatgctgttgtcaggtatgtttcatatttaggcataaacagtgagagaaattaaaatttcacaacagttgagtcatttctgccactatgaacacttgtagtttatttgtagtttctcatgatttttattaatagcaaagctgttgtatggtttgggatcatttttgcacttaaatgattacactctcaccatgttgcccatgcttatttcagtcagtactaagcaataattcaattgcttttcccagagagcaactcaaagctcacatactgattgaataaccgttctgcaaaaagcgaggagttacatggggaaaataccatagtataagacatgatcacaaagttactgatatcttacgcatctcacatctaaaatgaaagtttccctattttaattaatacctacgaggtgtaagagtttrataccctaaatgctcccaaccgagacatccttctcaaaactctgtgcagaggtgtctaaaaacctatcagaaagccaaatgtt

SEQ ID NO: 448642 - DNA, 334 bp, Homo sapiens
tgagttctaaatagatgtttgttacttgtcattcaagacttgtggcaagcaaaaagttcagatatatatacttttcaatacaaggaatttacrtacctcttaatgttaatacttgcaggtagtaatcatatttatttcagctctatttattccaaaacataaataacattatccgtttgtggtaaatgcacttaaatgttcatgaagtcataagctatttaactgcagtaagcttttcatcatacacttctcttgagtaatacatatgttcctgaacttctttccaaagttgtagaaacagaactagacagacttgaggcaagtctgagtttct

SEQ ID NO: 448643 - DNA, 334 bp, Homo sapiens
tgagttctaaatagatgtttgttacttgtcattcaagacttgtggcaagcaaaaagttcagatatatatacttttcaatacaaggaatttacatacctcttaatgttaatacttgcaggtagtaatcatatttatttcagctctatttattccaaaacataaataacattatccgtttgtggtaaatgcacttaaatgttcrtgaagtcataagctatttaactgcagtaagcttttcatcatacacttctcttgagtaatacatatgttcctgaacttctttccaaagttgtagaaacagaactagacagacttgaggcaagtctgagtttct

SEQ ID NO: 448644 - DNA, 542 bp, Homo sapiens
aatctctttgtcttaccaaaacatctaatcataaattttttcaaatagraaaccatttgagtatcaaattctaagactttaggggaagaagttttctagatggcaatatctttttcagaaagttctcatttggccaggctcatgtggtggttctcgtctgtaatcctggcactttgggaggatgaggcaagaggattgcttgaatcccaagtttgagcctgggcaacatagcaagaccctctcttgctatttttcttaaaaataaagagagaaacacagttcttacttgtgcttcatctgaaatgggaagtaccatagaaagaaatgccataacaaatgcacaggccaatcattcacgctgtgaaagaacactatgtggtttgctgcctatttgcagggagcagttcttcactagtgatataaagactcgattgcaaaacttggctccagatgttgggctcagcctccaggtctaatgtggtgggaactttatcaatcaaatccctgtaccgagcacaggcacgaagccatagctatgttgc

SEQ ID NO: 448645 - DNA, 440 bp, Homo sapiens
ttggtcaagtttgaattggtggagccaaaaattcattctagccctgcgattctgtaagtctgtaataacaataatcatagaattagagaattttctttaaatagaaggagactgcactcaacattcatttattaggcatctattctgggggagggggactagcccgaccccattttacaaacataagaagtgatctgtagacttgatgattgctctgagatcactcarccaacgagtctcagagtcaggcttcttgaatccaaggcagatcttttcactctgggccaagcctattactctctcacagtctcctaaccatatcacatccagggtcaatatgcagacatgataaaaaaatcatccatatactatttgatattttcggggggatcatttgtaaataaacaaacaaattgcctaattgctagcctggactaggg

SEQ ID NO: 448646 - DNA, 502 bp, Homo sapiens
tacccttctttagattcataataatctaacgacttatgaagaattactrtatcaccagttaaacatcaaatgtatttccttaaaatgaatgtgttattaattgtatttaattttccaggaagaatgcagaatattattattaaacatcttatgcatttcatatatttcctgtttataaattactttcccaaattatgtatcatgtttcccttattgttctcaaaattcagcattactatctcacttttttctcattttcagagattaaagttaagaaaaattaataatctgtgacagaagttctgcaatttatagcaactcacacaagagcctgctgaaatacattattacctccctttaatattctgatgtgcccagcaggaaaaatagagtcaacacccacctccccacaatggcttaaataatttaccaatgaactaacagcacatttttaatcctacccttgtctcctaacatgccaattttccttgtgtcagtttac

SEQ ID NO: 448647 - DNA, 365 bp, Homo sapiens
atatatgacctagagtcatatatatatttgtactaaacatatatgtgtgtgtatgtgtgtgtttgcgtgtattatgctaggagtaatatatatatatatatrtagataaatagatagatagatcactcttttgccaccaatctacttcacaagaacatacatatttttttagaacagaggctgttttctttacgtttgtatctgtaactcctaaaacagtaactgacatttaatacatatttgtggtactaaactgtactcatgcacatggctcctaattattctccgcctacttttggtggggggtcatgccttatcctaaaaacaaagcagcagtttctttcatgcatgctgtgaactaattt

SEQ ID NO: 448648 - DNA, 600 bp, Homo sapiens
ctgacatttaatacatatttgtggtactaaactgtactcatgcacatggctcctaattattctccgcctacttttggtggggggtcatgccttatcctaaaaacaaagcagcagtttctttcatgcatgctgtgaactaatttcatgcccttcaataatgacgatagaaaatttgcagagaagatttttgtaactttcaacaaatggtcacctatattaatttacaagagtccttctgcatttaaagatmtccttcagtgattcattcatctatttaagaagcatctataaaggctgggcgtggtgcctcatgcctgtaatcccagcactttgggaggccaatgtgggtggattgcttgagttcaggagctcaagaccagcctgggtaacatggcaaaaccccatctctacaaaaaatgcaaaaattagccaggcatggtgcacctgtagtcctagctactcaggaggctgaggtgggagaatcgctgaacctgagaggcagagattgcagtgagccatggtcgcaccactgcactccagcctggatgagaatgagaccctgtctcaaaaacaaacaaaaaaaaagagggtggggggaag

SEQ ID NO: 448649 - DNA, 633 bp, Homo sapiens
cataacaactttttctctattcttgtgaaatttggagacagacatttctcattaggcttgtcattaggacataatggcccagtatttctttaaatgacataattctttatcaaacaaaccaatgcactatattaatagataactttaccgtggtattttaaagcaaacaaatctttaaagtgttaaagatttaactcctcaaaatatagcaagacataaactgaaaacgatatactcaatgttttcctccacagccatttttatatgaatgatatacatagatgtaygtatctaaaataaataagtccttataaatgttatatttgtatgtgcttaaatttttaaaattatacatagttaaatctgtaaatggatagctgtggcatacacacataattatattaaaaatatatatgtgcacattatagctaaatgaattccttttttaattgcattatataaaacattaagagagggaagcttttacattcattttaaaactattcgtgttgagcatcctagtaataccaatgtcttataatatgcccctattaatttaaattgaaattaatggaatatattcttgtattaattttagttaattcttaatagaatgcctttatttgctttcaa

SEQ ID NO: 448650 - DNA, 536 bp, Homo sapiens
ctcatacatgatcacatgtactcattacttcaattgcaaacctatggtaatytgttggtgaaataagaagatgtgaaaaggtgccgtagggacaaattttccttccatatttcaattcaagacatcattgtgagtagactaaaataattcatatttctgctgaaaactacctagggttatcacataaaattcacgacattcaaattaatttgaatttcagataaacaaagaatagatttttagtgttaagtgtgccccaaatattgcatgggacatagttataataaaaatatattgttctttattttaaattcaaatttaattgagtatcccatgttgttatttgctaaatatgattaccctaaaatctcattgttcataactcggttttgtggatatagaaccattgcgggaaagtggatggctaaagcagccttactaagacctctcctcatgtgctcctgaaagagaagtgcacattttaaccagcttcctaaaatatggacccatcactgtcattttccttttcgaaagat

SEQ ID NO: 448651 - DNA, 564 bp, Homo sapiens
atgcttgttttaaggtgaaattgttctaggagtttgtgttctgcttttcccgcctttcttgccccaccagcatacatacatacatgcacgcactggtgcacacacacacacacacacacacacacacacagtcatagagctgggaattttgatttagaataccttttttaaatttttatttacttatttgggcacatggtctaagccttagaggaatacgccccaagatgtcaccagtgccagtgattctatttgcagccataggcccttgtggtctgggcattgctactctttgctagtattacgttggtaggcagggtttcctctttccaaaatgatgacataaatgaagtttatttttctatttattattctttatatgctcttcatgacttcttgttctttctttcagtttgatggaaatcatgtctcttttcttaaaacycaccctccccaacaccaaagctgttaccttccttcccctatcaacacatgctctcagaaaagggtcctgcgtccccttcactcagaggtgtgagtcttgaacaagctaaaaatggcaac

SEQ ID NO: 448652 - DNA, 579 bp, Homo sapiens
taaaagaaaggaatcaaagtatacaacagtgaataatcaattcacaaagaaaaacagccagagaggagaaggggaacaaaataactccaaggcaggcagaaaacaattaacaagatggcaatagtaagatcctacctattaataattactttaaatgtaaattatcaaatctctaatcaaaaggcatagaatgacctaagagatattatttttttaggccttgtgtggtggctcatgcctgtaatcccagcactttgggaagccaaggtgggtggatcacttgaggtcaggagttcaagaccagcctggccaacatggtgaaacacctactctaccaaaaatagaaaaaattagacgagtgtggtggcccatgcctgtaatcccagctactcaggaggctgaggcaggagaattgcttgaacctgtgaggcagaggttgctgtgtgctgagagactctctctctctccatatatgtacacacacacacacacacacayacaaaataagcaaatatcaatgcaatatgtatattttattagtagtagtttttaaagcccaactatgtgctgtctacaaga

SEQ ID NO: 448653 - DNA, 521 bp, Homo sapiens
ctatttcatttatttaaaattctagtttataattttatgctcacagacgtaatttcagtcaccgtttattgaatatttgctatcaaccaatcatcrtgctaaatagtatgcataaagtaactcatttcattcttccaatgacctatctgggaaattgctgtatttgttttagtgataaaactgagacttaaacatcttaatcacctgatcagagttactcaagtaaagtagaattcaacccaaaatttggcagactccaaagccttcaaggtaatcattctgtatgcctccctgcctcgcaaacattctccccagcgcaagctagatcttttcaaagcctaaaacggatcatatcaccctgctaattcaagacttgtaaagcccatcatggaaatcatacaatccaaactcctgatcataggttaccatgaactggtccctacttatacctcgaacctcatcttctgccgtgttttcttgtcttttatgaggcttgcttgcttgctgctgaataagcaaga

SEQ ID NO: 448654 - DNA, 616 bp, Homo sapiens
taaaccacattttcaatggtcttgcttccagtagccaaaattcttcaaaggttttttaaaattaaaaaaaattaacatgtattttaagaaaaaaaaatcgtctcattttattatggcttgacccaaatatattttcagagtcaaatccaaggctggtaaaataaatttttacttatgagaaatggkaagttggatcttgcaaaataacaaatgtatcataaaaaggaatgtgatttagtttaacttcagaagctacaggatatatatatacagtacttatccttcttgtaccaaagttgctaagtaaataagcatatattttgacccccaatatccgacagtatgcatgtgtaaataaatatgttttcaaatcagagtatttacaaagttgttcctcctttgctaatctgtcaggaatcaaatttaatgttcttcttgatccactggataacatccaaagcaacaaagccattgaaaagaattccacttcctttgttggttgaggtgatagtgacctcatcaactccagcaggggaaactggagagctctaaaaccagctgtttccaggaggaaaaaaataataattttaagacactgcatagtaatttttttcca

SEQ ID NO: 448655 - DNA, 553 bp, Homo sapiens
ttttggtcaaagtagatgaagaagacagattgaaggtctgattaaaaatgatmgattgcttttgtgttagctgctgcttttgtgtgtgtgtgtttgtgtgtgtgtgcacgcgcgtgtgcgtgcatgtgtgtgtgcacagaagctgtgagcaaaatgtttttgcaaaaacaagtgttaagttaatcaatggttttcagtgcatttctgcaaacaggctctgctggaaaccatggcgtgtccacagccaatcaaaatgggcttgttgattatcacagggggttgggggaaggcagatgctaacatcaagtgagataggattcagtaagaagttttgagattgacctctggaatcaaactcagctgccagaagccctctatagaaagcaagtgttaaatgcaatgataaactgaggtcagggtgtcacttccagattcaccagaaatcctatacaattataaaggaagtaggggtgggaaagagacttgtgtagatctatttctgtttactaataggtatttctgcagaataaggcagtataatacttgaagacag

SEQ ID NO: 448656 - DNA, 553 bp, Homo sapiens
ttttggtcaaagtagatgaagaagacagattgaaggtctgattaaaaatgatagattgcttttgtgttagctgctgcttttgtgtgtgtgtgtttgtgtgtgtgtgcacgcgcgtgtgcgtgcatgtgtgtgtgcacagaagctgtgagcaaaatgtttttgcaaaaacaagtgttaagttaatcaatggttttcagtgcatttctgcaaacaggctctgctggaaaccatrgcgtgtccacagccaatcaaaatgggcttgttgattatcacagggggttgggggaaggcagatgctaacatcaagtgagataggattcagtaagaagttttgagattgacctctggaatcaaactcagctgccagaagccctctatagaaagcaagtgttaaatgcaatgataaactgaggtcagggtgtcacttccagattcaccagaaatcctatacaattataaaggaagtaggggtgggaaagagacttgtgtagatctatttctgtttactaataggtatttctgcagaataaggcagtataatacttgaagacag

SEQ ID NO: 448657 - DNA, 498 bp, Homo sapiens
tataatctcttgtgctttgccttccacttggtccattgtgcgtctaaactgtggtcacgtgttagagcagctgaggcaattcccaggcaaaaggcagccaggaggagtgaaggattcatgtttcaaaaatctaggaagggaaaagaaatgaggatctgattagaccgatcctaaaaagccattttactacgccctgagaaactagagscaccatggtagaaaaaaaatatttaaattattcttccaagcatttacctaaggactgtggaagaggccaaggatgtggctggagaaaaacagggcaagtggaggtattggatggacccaccaaaatgaaaagcagcctgtccagagctgtaggagttgaaacagttttatggggtgatgatgacaggctatgaaaaggacaggaaggtacctgatgggcgagaagcttaaggcaacaaccaggaaactaggaaaccgtcggcccaggttttgtcccaattgtgctgaggt

SEQ ID NO: 448658 - DNA, 498 bp, Homo sapiens
tataatctcttgtgctttgccttccacttggtccattgtgcgtctaaactgtggtcacgtgttagagcagctgaggcaattcccaggcaaaaggcagccaggaggagtgaaggattcatgtttcaaaaatctaggaagggaaaagaaatgaggatctgattagaccgatcctaaaaagccattttactacgccctgagaaactagaggcaccatggtagaawaaaaatatttaaattattcttccaagcatttacctaaggactgtggaagaggccaaggatgtggctggagaaaaacagggcaagtggaggtattggatggacccaccaaaatgaaaagcagcctgtccagagctgtaggagttgaaacagttttatggggtgatgatgacaggctatgaaaaggacaggaaggtacctgatgggcgagaagcttaaggcaacaaccaggaaactaggaaaccgtcggcccaggttttgtcccaattgtgctgaggt

SEQ ID NO: 448659 - DNA, 455 bp, Homo sapiens
ttaatcacaatcatcaaattgtaacaaatggaactttaaaattgaatttgtctctttgtgtgaattacacctgagattatacctgcacaccaagtgaagaatcatatttcawaatgcatttcatttggcttttaacacagttattctgttgaagacatttctgtaaagctttccagatacaggaaaagcaatttaataaacactatgatcaaataactactcaattgttcttcatcttttttaacttttaacaccttgcagatcattcctagaataaagtgtgttatccccttttcacaatgattcattaacctgtattaattgttctttacaaagttgtttttatatatcttactaactaccaatgtgaggaaaaggtctatgttgctttcattcagtagaaaacacatgcactttaataatattgtttcttaaaaaacacctattggtttgtt

SEQ ID NO: 448660 - DNA, 455 bp, Homo sapiens
ttaatcacaatcatcaaattgtaacaaatggaactttaaaattgaatttgtctctttgtgtgaattacacctgagattatacctgcacaccaagtgaagaatcatatttcataatgcatttcatttggcttttaacacagttattctgttgaagacatttctgtaaagcttkccagatacaggaaaagcaatttaataaacactatgatcaaataactactcaattgttcttcatcttttttaacttttaacaccttgcagatcattcctagaataaagtgtgttatccccttttcacaatgattcattaacctgtattaattgttctttacaaagttgtttttatatatcttactaactaccaatgtgaggaaaaggtctatgttgctttcattcagtagaaaacacatgcactttaataatattgtttcttaaaaaacacctattggtttgtt

SEQ ID NO: 448661 - DNA, 455 bp, Homo sapiens
ttaatcacaatcatcaaattgtaacaaatggaactttaaaattgaatttgtctctttgtgtgaattacacctgagattatacctgcacaccaagtgaagaatcatatttcataatgcatttcatttggcttttaacacagttattctgttgaagacatttctgtaaagctttccagatacaggaaaagcaatttaataaacactatgatcaaataactactcaattgttcttcatcttttttaacwtttaacaccttgcagatcattcctagaataaagtgtgttatccccttttcacaatgattcattaacctgtattaattgttctttacaaagttgtttttatatatcttactaactaccaatgtgaggaaaaggtctatgttgctttcattcagtagaaaacacatgcactttaataatattgtttcttaaaaaacacctattggtttgtt

SEQ ID NO: 448662 - DNA, 455 bp, Homo sapiens
ttaatcacaatcatcaaattgtaacaaatggaactttaaaattgaatttgtctctttgtgtgaattacacctgagattatacctgcacaccaagtgaagaatcatatttcataatgcatttcatttggcttttaacacagttattctgttgaagacatttctgtaaagctttccagatacaggaaaagcaatttaataaacactatgatcaaataactactcaattgttcttcatcttttttaacttttaacmccttgcagatcattcctagaataaagtgtgttatccccttttcacaatgattcattaacctgtattaattgttctttacaaagttgtttttatatatcttactaactaccaatgtgaggaaaaggtctatgttgctttcattcagtagaaaacacatgcactttaataatattgtttcttaaaaaacacctattggtttgtt

SEQ ID NO: 448663 - DNA, 587 bp, Homo sapiens
tgtggcacgtgtgttcctaggacctataaaaaggaaagcaggtaaatgactttgatctgtttgataaatgatttttatcttgagtagtgtaatcacttaaatatgttgatcctccgtctgggtggaaattatttcaataccatgttgtttttgttattattaactatatatattattatgtatataataatacataaaagttattaggaatgaaataaaaaattattgaaatcctaacacacagttgtagctatttttcattcatgtatttattaaatattattaaattattcaccacataataaatagtaaagcattttccacataatcatatctaccattttattcatggaaatcattttatttgattatttaatttttattttagattaagcatgcatgtgtacatttgttacatgaacatattgcatgatgctgaggtttgggcttctattgaacttattatctgaatagtaaacatagtacccaataagtagcttttcaaaccttgccctccttccttcccctgttttggagkccccagtgtctgttatttccatccttttgctcctgtgtacccaaagttt

SEQ ID NO: 448664 - DNA, 588 bp, Homo sapiens
tggctgttatctagctgtgaaacaaaacacataatamttatatagtgaaataggacttcaaaagagaacttaggcaaatgagatttatgttcaacatttttgtggttaattattccatgttgctgcttaataaattttctaatttttaagaaatacaattcaaaaatgaaagttttgattatattatagggtattagcacatgttcagaattttcagaattggagttctctgctgccctaactgacaatgacaaaatcaagggtagaaacttaagcttatgcttatttcataatgctggtcaaattcaattaaaattagtaatgtaatctttgagtggttactttatatttgtgttctcaagcagggacaattttacttttcaggggatagttgtcaatgtctagaagcctttttgatagttgtcaaaacttggagaggaggaggtacgctactggccagagacactgctaagcatcctatagccccctctgcattaaataattgtctgacccaaaatgtcatagtgccaatgttgagaagctgtgctctacattcttcttattcctttattaaatcattattatgtg

SEQ ID NO: 448665 - DNA, 588 bp, Homo sapiens
tggctgttatctagctgtgaaacaaaacacataatacttatatagtgaaayaggacttcaaaagagaacttaggcaaatgagatttatgttcaacatttttgtggttaattattccatgttgctgcttaataaattttctaatttttaagaaatacaattcaaaaatgaaagttttgattatattatagggtattagcacatgttcagaattttcagaattggagttctctgctgccctaactgacaatgacaaaatcaagggtagaaacttaagcttatgcttatttcataatgctggtcaaattcaattaaaattagtaatgtaatctttgagtggttactttatatttgtgttctcaagcagggacaattttacttttcaggggatagttgtcaatgtctagaagcctttttgatagttgtcaaaacttggagaggaggaggtacgctactggccagagacactgctaagcatcctatagccccctctgcattaaataattgtctgacccaaaatgtcatagtgccaatgttgagaagctgtgctctacattcttcttattcctttattaaatcattattatgtg

SEQ ID NO: 448666 - DNA, 516 bp, Homo sapiens
aacttaagcttatgcttatttcataatgctggtcaaattcaattaaaattagtaatgtaatctttgagtggttactttatatttgtgttctcaagcagggacaattttacttttcaggggatagttgtcaatgtctagaagcctttttgatagttgtcaaaacttggagaggaggaggtacrctactggccagagacactgctaagcatcctatagccccctctgcattaaataattgtctgacccaaaatgtcatagtgccaatgttgagaagctgtgctctacattcttcttattcctttattaaatcattattatgtgtgaagtgactgttacataactagtagtaaacaatattttattgaccacttatcacgtgccatgctctattctaagaactacatacattcattctatttatcctcactatactacaaaatagggtaggctataattccattttacagatgaggaaattgaagcacagaagaggtaacatccacaatcacgtagcct

SEQ ID NO: 448667 - DNA, 516 bp, Homo sapiens
aacttaagcttatgcttatttcataatgctggtcaaattcaattaaaattagtaatgtaatctttgagtggttactttatatttgtgttctcaagcagggacaattttacttttcaggggatagttgtcaatgtctagaagcctttttgatagttgtcaaaacttggagaggaggaggtacgctactggccagagacactgctaagcatcctatagccccctctgcattaaataattgtctgacccaaaatgtcatagtgccaatgttgagaagctgtgctctacattcttcttattcctttattaaatcattattatgtgtgaagtgactgttacataactagtagtaaacaatattttattgaccacttatcacgtgccatgctctattctaagaactacatayattcattctatttatcctcactatactacaaaatagggtaggctataattccattttacagatgaggaaattgaagcacagaagaggtaacatccacaatcacgtagcct

SEQ ID NO: 448668 - DNA, 610 bp, Homo sapiens
tcatagtgccaatgttgagaagctgtgctctacattcttcttattcctttattaaatcattattatgtgtgaagtgactgttacataactagtagtaaacaatattttattgaccacttatcacgtgccatgctctattctaagaactacatacattcattctatttatcctcactatactacaaaatagggtaggctataattccattttacagatgaggaaattgaagcacagaagaggtaacatccacaatcacrtagcctgcagaagatagatctggatttatagtcaggtaatttggttttagaagcccatccactgtggtaaaggaaatcaagtgctgcttattatttcccttgactttctcctatgctcttgcaactctaagaaaaggaccttggcaaatctcaatctacagaataattcataattctgggagctccacagaaaataaaagttatttatttatttatttatttatttatagctgttgcagtgttctgccacaggtatagtcaactttgtctgcaaagttaaaatttttaaaatgaaagaattaacaattcctcccctaattatatatatatatatataaataaatgtaggcct

SEQ ID NO: 448669 - DNA, 600 bp, Homo sapiens
gtgccactgccctgcctggagatcctctacccttgaaatactgcatcatcagagcaactgcagacataccctaaaacctgctctgactttggtaagcacagtggactggtgggtctctggagagttgtgtgtccctagagatgtaatcctcagtgtggaccatccctaggggaagggggagtgcagyctgccaaagcacaacatgagacaaagaaaatgcgaccatggcataagccactgaaaggagcaccaccaaggcccagaaccagacttggagaaggaattatgtctcacctccatctcccctccccagtgcactgttgcagatgcaaaaatagctcttcccataggggcccagaaagcatgcactgaaagaagttgtttctcatgattctccagtgagggcaagcatgcaccaagaccccacctgccagctcttactcttaagtccatctaccagattgaagtttgagttataccatcatataaaaatacattgctaaaacaagcaacatctgtgaaagccactgcagcaacctatctgtaaccaaggaacatatatggaaacttcaccgtctgcaactacccagaaatgaagcc

SEQ ID NO: 448670 - DNA, 575 bp, Homo sapiens
tctatagagttgttaaagccatttgtgtgtctctgtgtgtgtgtgtgtgtgtgtgtgtgtgaattgtctattgatgcccttttcccattttttctaatgggtgcytgatctcttaatttctaacaattatttacatattaggaatattagcccttttcctgtaatatatgttgaaagcatgtttttaacctggttgtcagttgtcttttgactttgtttatgatatttatcatgcagtttatttttatgttactagattcatcagtcttttatacatggcttttagatttagatttataaccattgccaactgctggctcctccagaaaccaccaaaatggtttactgatgaacaaaaaccaagtttattgctcactgcagtaaggaagatgactgtcttcacataatcttagtagcctcagaaaagggagtcaagggtgggatatttgtaagctttggggagtctggttctaaggtatgtctttcaatatgaggtgtgcagtcctgactgggatagggtaaagtttggattgctggatacagtgaggcaagacctataaagccagccttgaaag

SEQ ID NO: 448671 - DNA, 575 bp, Homo sapiens
tctatagagttgttaaagccatttgtgtgtctctgtgtgtgtgtgtgtgtgtgtgtgtgtgaattgtctattgatgcccttttcccattttttctaatgggtgcttgatctcttaatttctaacaattatttacatattaggaatattagcccttttcctgtaatatatgttgaaagcatgtttttaacctggttgtcagttgtcttttgactttgtttatgatatttaycatgcagtttatttttatgttactagattcatcagtcttttatacatggcttttagatttagatttataaccattgccaactgctggctcctccagaaaccaccaaaatggtttactgatgaacaaaaaccaagtttattgctcactgcagtaaggaagatgactgtcttcacataatcttagtagcctcagaaaagggagtcaagggtgggatatttgtaagctttggggagtctggttctaaggtatgtctttcaatatgaggtgtgcagtcctgactgggatagggtaaagtttggattgctggatacagtgaggcaagacctataaagccagccttgaaag

SEQ ID NO: 448672 - DNA, 575 bp, Homo sapiens
tctatagagttgttaaagccatttgtgtgtctctgtgtgtgtgtgtgtgtgtgtgtgtgtgaattgtctattgatgcccttttcccattttttctaatgggtgcttgatctcttaatttctaacaattatttacatattaggaatattagcccttttcctgtaatatatgttgaaagcatgtttttaacctggttgtcagttgtcttttgactttgtttatgatatttatcatgcagtttatttttatgttactagattcatcagtcttttatamatggcttttagatttagatttataaccattgccaactgctggctcctccagaaaccaccaaaatggtttactgatgaacaaaaaccaagtttattgctcactgcagtaaggaagatgactgtcttcacataatcttagtagcctcagaaaagggagtcaagggtgggatatttgtaagctttggggagtctggttctaaggtatgtctttcaatatgaggtgtgcagtcctgactgggatagggtaaagtttggattgctggatacagtgaggcaagacctataaagccagccttgaaag

SEQ ID NO: 448673 - DNA, 575 bp, Homo sapiens
tctatagagttgttaaagccatttgtgtgtctctgtgtgtgtgtgtgtgtgtgtgtgtgtgaattgtctattgatgcccttttcccattttttctaatgggtgcttgatctcttaatttctaacaattatttacatattaggaatattagcccttttcctgtaatatatgttgaaagcatgtttttaacctggttgtcagttgtcttttgactttgtttatgatatttatcatgcagtttatttttatgttactagattcatcagtcttttatacatggcttttagatttagatttataaccattgccaactgctggctcctccagaaaccaccaaaatggtttactgatgaacaaaaaccaagtttattgctcactgcagtaaggaagatgactgtcttcacataatcttagtagcctcagaaaagggagtcaagggtgggatatttgtaagstttggggagtctggttctaaggtatgtctttcaatatgaggtgtgcagtcctgactgggatagggtaaagtttggattgctggatacagtgaggcaagacctataaagccagccttgaaag

SEQ ID NO: 448674 - DNA, 553 bp, Homo sapiens
aatgtattaattttataatatatgaaattcttgcattgcggtaaaaagaaaagcacataacataaaatataccatcttaatcatttttaagtgtacagtccagtatcattaagcatatccacattgttgtgactctctggaacttttctatcttgaaaaactgaaactctatacctattaaacaagtcatcagttctccttctccccaggccctagcaaacatctttctactttctgtttctattaatttgactactttatttatttatttatttatttatttatttatttattgggccaggatcttactctgtcacccaggctggagtgcagtggcacaattatggttcactgaagccttcacctcccaggttcaagtgatccttctccctcagccttctcaatagctgagactagaggcatatggcaccaggcctggctaatttttaatatttttttgttgcycatgttggtcttgaactcctgggctcaagtgatccttgagcctccacctcccaaagtgctagcattataggcatgagccactgggccc

SEQ ID NO: 448675 - DNA, 464 bp, Homo sapiens
cttaataatgtagtacaattaggtataaattcacttagtatttttaaattttacgtrtattcctatttatatgaatggtcatttaaaatcacatctactgatcctgatagcattaaaggcataagaggtactgaggatattaatttaattttgtttacagctatgcacagatatttttagttcactcagatttaatccagtagtctattatttgattaattgtacagctatcaaatcattcaggactcccactgtttcaacaacgagtggaaaaatattttttcatttatgtttatatgcagctatttgtagtctaaattaatatcctagcaattgatggtgaaattaaaattatttctgtcagatatggtaatttgatgacagtggataagcatgggagtaaaagaaagttttggggaagaggggacagtttttgtttacttaatgattattccaaagatgtt

SEQ ID NO: 448676 - DNA, 464 bp, Homo sapiens
cttaataatgtagtacaattaggtataaattcacttagtatttttaaattttacgtgtattcctatttatatgaatsgtcatttaaaatcacatctactgatcctgatagcattaaaggcataagaggtactgaggatattaatttaattttgtttacagctatgcacagatatttttagttcactcagatttaatccagtagtctattatttgattaattgtacagctatcaaatcattcaggactcccactgtttcaacaacgagtggaaaaatattttttcatttatgtttatatgcagctatttgtagtctaaattaatatcctagcaattgatggtgaaattaaaattatttctgtcagatatggtaatttgatgacagtggataagcatgggagtaaaagaaagttttggggaagaggggacagtttttgtttacttaatgattattccaaagatgtt

SEQ ID NO: 448677 - DNA, 464 bp, Homo sapiens
cttaataatgtagtacaattaggtataaattcacttagtatttttaaattttacgtgtattcctatttatatgaatggtcatttaaaatcacatctactgatcctgatagcattaaaggcataagaggtactgaggatattaatttaattttgtttacagctatgcacagatatttttagttcactcagatttaatccagtagtctattatttgattaattgtacagctatcaaatcattcaggactcccactgtttcaacaacgagtggaaaaatattttttcatttatgtttatatgcagctatttgtagtctaaattaatatcctagcaattgatggtgaaattaaaattatttctgtcagatatggtaatttgatgacagtggataagcatgggartaaaagaaagttttggggaagaggggacagtttttgtttacttaatgattattccaaagatgtt

SEQ ID NO: 448678 - DNA, 553 bp, Homo sapiens
taattctcagggtcagctgcaagagcccaatctaagacagttgatagcagtagtagttatatacacctgagtctaaggatgggattctggagtttgctcactcaccagtggtcccatcagaatctcttccctgaagatagtctcagatgtgctcctgcagtgaaattgctaacacttttacttgtagtgaaccaggacagcatataagtagaagcgaatgcattaacttctgtgatgtatctagtatttgagagtacaggtggaaaagtaacttgaaagattgttgaattgggagggtattgctaagcaccattgatgcactaagtatagatgccaggatcaaatctattaaccaccaatttaaacccaagtgtgagagtcaaagggcctccatggaagcctttaaaaagtccctcatcactggcagccagaaggccaactgaactgaagcccaggtgcagcctgtacttatgagtggcagaacgccagagaaggttaattctcagcctgtgtaagtctccytcaagagaatcagggtcctgattggaaaaaa

SEQ ID NO: 448679 - DNA, 629 bp, Homo sapiens
gattaattgatattttaaaatgtttccaggaagactaaaacactttttgagaattatgttcttaattttatactcacagctactaaagcaagagggcttcttagtaacaaattatttttacagtaatcaaagaaaggttaaaataagagagtaagatacctaaggccacatggagagtaaatrtcatagctggaaatttggcaatggttttgtgattctcatcattttctattttgttttattttgtcttgtaatacagacttctctgaattattttatttctgacagagagtaatattagactaggcctttatttttacaaagcgtatgatttgtattgtttaataaataggtagataaataagtatggaccaaaataatgagcagttatcataaatgtttacatatatagaaaattgttttttaatggataacctatataaaataattttttaataaacatgtatggttcaagaagggcattttaaattaaatgttcaatgccattttaagaatttgattctctaaagaatatccacaaaatttgataccacattaaaaaaaagaagccaaataaatatatctagaatcctctagaatttatttattgatgaaatcataaggaaaag

SEQ ID NO: 448680 - DNA, 629 bp, Homo sapiens
gattaattgatattttaaaatgtttccaggaagactaaaacactttttgagaattatgttcttaattttatactcacagctactaaagcaagagggcttcttagtaacaaattatttttacagtaatcaaagaaaggttaaaataagagagtaagatacctaaggccacatggagagtaaataycatagctggaaatttggcaatggttttgtgattctcatcattttctattttgttttattttgtcttgtaatacagacttctctgaattattttatttctgacagagagtaatattagactaggcctttatttttacaaagcgtatgatttgtattgtttaataaataggtagataaataagtatggaccaaaataatgagcagttatcataaatgtttacatatatagaaaattgttttttaatggataacctatataaaataattttttaataaacatgtatggttcaagaagggcattttaaattaaatgttcaatgccattttaagaatttgattctctaaagaatatccacaaaatttgataccacattaaaaaaaagaagccaaataaatatatctagaatcctctagaatttatttattgatgaaatcataaggaaaag

SEQ ID NO: 448681 - DNA, 629 bp, Homo sapiens
gattaattgatattttaaaatgtttccaggaagactaaaacactttttgagaattatgttcttaattttatactcacagctactaaagcaagagggcttcttagtaacaaattatttttacagtaatcaaagaaaggttaaaataagagagtaagatacctaaggccacatggagagtaaatatcatagctggaaatttggcaatggttttgtgattctcatcattttctrttttgttttattttgtcttgtaatacagacttctctgaattattttatttctgacagagagtaatattagactaggcctttatttttacaaagcgtatgatttgtattgtttaataaataggtagataaataagtatggaccaaaataatgagcagttatcataaatgtttacatatatagaaaattgttttttaatggataacctatataaaataattttttaataaacatgtatggttcaagaagggcattttaaattaaatgttcaatgccattttaagaatttgattctctaaagaatatccacaaaatttgataccacattaaaaaaaagaagccaaataaatatatctagaatcctctagaatttatttattgatgaaatcataaggaaaag

SEQ ID NO: 448682 - DNA, 629 bp, Homo sapiens
gattaattgatattttaaaatgtttccaggaagactaaaacactttttgagaattatgttcttaattttatactcacagctactaaagcaagagggcttcttagtaacaaattatttttacagtaatcaaagaaaggttaaaataagagagtaagatacctaaggccacatggagagtaaatatcatagctggaaatttggcaatggttttgtgattctcatcattttctattttgttttattttgtcttgtaatacagacttctctgaattattttatttctgacagagagtaatattagactaggcctttatttttacaaagcgtatgatttgtattgtttaataaataggtagataaataagtatggaccaaaataatgagcagttatcataaatgtttacatatatagaaaattgttttttaatggataacctatataaaataattttttaataaacatgtatggttcaagaaggrcattttaaattaaatgttcaatgccattttaagaatttgattctctaaagaatatccacaaaatttgataccacattaaaaaaaagaagccaaataaatatatctagaatcctctagaatttatttattgatgaaatcataaggaaaag

SEQ ID NO: 448683 - DNA, 440 bp, Homo sapiens
tcatatgtaatttattaaatgataagtgacttgtcatttcatttacttgggaaatagcataataaagtttttaggaggttttcctctagctggtaatttttgacaattaaaaaacttgacccagttttgaaaaatatttgaaaatayttgaccctgcccaaaagccacctgcaaatagcttatttgcatgaacattaaacacaagggctttcatgtaccttttacttattactgggataacaaacctccattcattaagcacagcatcgtttttgttgtgaatgaaaaatcagccaatttctgccacatctggctgctaatctataggttttgaataaacagtagacagtcaattgccggcatccattctcttaaaccacatgaagttttttttttctccccagtcaaaatgccatttaatacaatttcatttcattttt

SEQ ID NO: 448684 - DNA, 440 bp, Homo sapiens
tcatatgtaatttattaaatgataagtgacttgtcatttcatttacttgggaaatagcataataaagtttttaggaggttttcctctagctggtaatttttgacaattaaaaaacttgacccagttttgaaaaatatttgaaaatatttgaccctgcccaaaagccacctgcaaatagcttatttgcatgaacattaaacacaagggctttcatgtwccttttacttattactgggataacaaacctccattcattaagcacagcatcgtttttgttgtgaatgaaaaatcagccaatttctgccacatctggctgctaatctataggttttgaataaacagtagacagtcaattgccggcatccattctcttaaaccacatgaagttttttttttctccccagtcaaaatgccatttaatacaatttcatttcattttt

SEQ ID NO: 448685 - DNA, 440 bp, Homo sapiens
tcatatgtaatttattaaatgataagtgacttgtcatttcatttacttgggaaatagcataataaagtttttaggaggttttcctctagctggtaatttttgacaattaaaaaacttgacccagttttgaaaaatatttgaaaatatttgaccctgcccaaaagccacctgcaaatagcttatttgcatgaacattaaacacaagggctttcatgtaccttttacttattactgggataacaaacctccattcattaagcacagcatcgtttttgttgtgaatgaaaaatcagccaatttctgccacatctggctgctaatctatargttttgaataaacagtagacagtcaattgccggcatccattctcttaaaccacatgaagttttttttttctccccagtcaaaatgccatttaatacaatttcatttcattttt

SEQ ID NO: 448686 - DNA, 578 bp, Homo sapiens
attttcataaaagacttaatttgtcatttccttagaaatgagaggttaggggccaggctcggtggctcatgcctgtaatcccagcactttgggaggctgaggcgggyggagttcgagactagcctgaccaacatggagaaaccccgtctctactaaaaatacaaaattagctggacgtggtggcacatacccgtaatcccagctactcgggaggctgaggcaggagaatcacttgaacccgggaggcagaggttgtgatgagccgagatcatgccattgcactccagcctaggcaacaagagtgcaactccgtctcaaaaaaaaaagaaaaaagaaaagaaaagaaaagaaaggataagtctgaagaaataaggagaaataagataacttgcttgagaaagaaacatacacacacaaacttgatagctatggagtatactagataatccataatacgaacactcaggtttgaggagattctatatagcagaaaaggcctatcttcacaaaactgctaatttgatagaaagtctaaccttatctttatatggttattaatgttaaagcatggaactttt

SEQ ID NO: 448687 - DNA, 578 bp, Homo sapiens
attttcataaaagacttaatttgtcatttccttagaaatgagaggttaggggccaggctcggtggctcatgcctgtaatcccagcactttgggaggctgaggcgggtggagttcgagactagcctgaccaacatggagaaaccccgtctctactaaaaatacaaaattagctggacgtggtggcacatacccgtaatcccagctactcgggaggctgaggcaggagaatcacttgaacccgggaggcagaggttgtgatgagccgagatcatgccattgcactccagcctaggcaacaagagtgcaactcygtctcaaaaaaaaaagaaaaaagaaaagaaaagaaaagaaaggataagtctgaagaaataaggagaaataagataacttgcttgagaaagaaacatacacacacaaacttgatagctatggagtatactagataatccataatacgaacactcaggtttgaggagattctatatagcagaaaaggcctatcttcacaaaactgctaatttgatagaaagtctaaccttatctttatatggttattaatgttaaagcatggaactttt

SEQ ID NO: 448688 - DNA, 578 bp, Homo sapiens
attttcataaaagacttaatttgtcatttccttagaaatgagaggttaggggccaggctcggtggctcatgcctgtaatcccagcactttgggaggctgaggcgggtggagttcgagactagcctgaccaacatggagaaaccccgtctctactaaaaatacaaaattagctggacgtggtggcacatacccgtaatcccagctactcgggaggctgaggcaggagaatcacttgaacccgggaggcagaggttgtgatgagccgagatcatgccattgcactccagcctaggcaacaagagtgcaactccgtctcaaaaaaaaaagaaaaaagaaaagaaaagaaaagaaaggataagtctgaagaaataaggagaaataagataacttgcttgagaaagaaacatacacacacaaacttgatagctatggagtatactagataatccataatacgaacactcaggtttgaggagattctatatagcagaaaaggcctatcttcacaaaactgctaatttgatagraagtctaaccttatctttatatggttattaatgttaaagcatggaactttt

SEQ ID NO: 448689 - DNA, 524 bp, Homo sapiens
agatacagtagttacggtacatgttaagctgctacaacaaaaagacccctagcccccaccaaatacaatggctaaagaacacagaaacttaattctcttttgtttaacaacagtgcagggtgagcagggggctttgctctatgagattattcaggaacccagttccttctcttctgtttctctgccttcccctagggtattgtcctagtccacatggtctgagctgacccacacttcctgtttgtatatctgcttgtgagaagagtgagacagagagtagagagcaagtaatttcttatataaacctgatctgaatgtttcacacrtaaattatttttgcctcccattggccaaagctgagtcatgtagtcgtatgagctataatagaggcgctgaagtatagtctcttgtggacagtgtttttttttttttacacaaattctcaccctgtcactgaagctggagtccactggcatgatcttggctcactgcgacctctgcctccctggctcaagcgattctcc

SEQ ID NO: 448690 - DNA, 514 bp, Homo sapiens
tttgacattgttggtaactagctaaaacccctattacattctagatagatagactggcaagaatttgagacaattacaggaaaaatggttataatttcttttaatttcataattaaaawctaccgttacagcctttcttgaacttttaaaatgtgtgttctgccattttcaatagtcattaatgttagaaaataatatgtttttaattgtgtttagaaattgaagtaaatacagtctatgttatggaaagtaaatatttgaccgctaatattttgagacctttatttatagtttcatatttcacatttccattgatttttaagtctaaatatctttatattttattacagatgggggtgttttagaacaatctctgaaaacggaaccaaatttttccatagcgttatacttttatttatgttctctttctctgcagcctgatactgtgctgtcaatggcattgtaaatgaaattgaaagtaaaatgtagtagttttctacaaaaggagcagata

SEQ ID NO: 448691 - DNA, 514 bp, Homo sapiens
tttgacattgttggtaactagctaaaacccctattacattctagatagatagactggcaagaatttgagacaattacaggaaaaatggttataatttcttttaatttcataattaaaaactaccgttacagcctttcttgaacttttaaaatgtgtgttctgccattttcaatagtcattaatgttagaaaataatatgtttttaattgtgtttagaaattgaagtaaatacagtctatgttatggaaagtaaatatytgaccgctaatattttgagacctttatttatagtttcatatttcacatttccattgatttttaagtctaaatatctttatattttattacagatgggggtgttttagaacaatctctgaaaacggaaccaaatttttccatagcgttatacttttatttatgttctctttctctgcagcctgatactgtgctgtcaatggcattgtaaatgaaattgaaagtaaaatgtagtagttttctacaaaaggagcagata

SEQ ID NO: 448692 - DNA, 575 bp, Homo sapiens
aatttgaagttttctgatacataacaaagttgaacaccttttcatacatttattggccatttttgttttatccttcatgataagcctgatcaggactttgcccatttttttactgtgctgtctttaaaaaaatgtttttacacattttttatgtatttagatatgagccttttcctcctgattatgtgttgcaaatacattattccatataatatattattgggcttgcctagtcattatatcttttgatgatcagaaattttaaattttaatgtaataaaatttatcagtattctcttgtgtgatttatgctttttatgtcttgtttagtaagaaatcccttgccttgggatcatgaagaaaagtatttgtatttttttctacaaaattgattggctaaagcrtttcacatttagatctatagtctatctagaattggtttgtatgtaaattcatttttcccttatatcctcgattttccaagcacaatgcattcaaaacatgatccctcactcacccactgctctgcagccaactttgtcatacatcagaatccatgtgtgcaagtgtctgtg

SEQ ID NO: 448693 - DNA, 598 bp, Homo sapiens
gtatctttctttctttcagagaattagcaatcatgccctacctagtattcctaggaccttctacaaaattaatgaacatattctcaattcctttattcaggtcattggtaaaggtattaagtaacacgggtttatatatctcccaaaatacctaactaagatggataccactgaaagacgtgtcatggtataccaccaaattttacatctcttaatttcatcatacatctcttaatttcatcatttcattgcttatcttttctctttttgattgacaaattctttcttcagttaatgttgatttggtggctggtgacccttgtagcactacttcttactttataacaccttacttattgaraagtagctcctacttcattttaattatttaaaatttgtatttcaatctctaaggacaggactcaaactgtttctcacatgattctgctccaaaactgcgatgcttgttcagaggttactcagcaaatctatcagcagctgaacttaaaggattgtatcttttctcaaagcttttagagtagtttttctttaaaatttcaaatatatttgcttttactatatctgatacagatatcat

SEQ ID NO: 448694 - DNA, 423 bp, Homo sapiens
tccaaaactgcgatgcttgttcagaggttactcagcaaatctatcagcagctgaacttaaaggattgtatcttttctcaaagcttttagagtagtttttctttaaaatttcaaatatatttgcttttactatatctgatacagatatcatatcaacaaaaaggtagaatgatatcattttgcaaatggagctacacattttttattctagatgcattgagaatgcaagtgagtasaacattccagttgctatattcaggtgggagcacagtatgatgttgatgttgagctcttgtcatcactaactgaactatgccggactcatttatttagtggataagaaaacatgatatgctggtaaggttagatgaagctttgattgcctatgtatgtgttcatacacagtaaatctattgaaccattc

SEQ ID NO: 448695 - DNA, 565 bp, Homo sapiens
gggatttaccaaatgtttttatactcagaactgttactggctgacttctggtatcataatgtatttgaaataataaatattagtttagttctcagataaggatgaaaaataagcctgaagatttttagtatttttattagaagatattttatttcttctctacaaccatactactgttttaaaattataaatagataaaatatttttaatgaatgtgaaaaacaggcattcagtcagggtattgtgtgaacagtatgtttacagcaggcatatttcaccttttcctagtggggaaagctgcttttttttttaatttgtctgaagctttagtatgtatttatctaaagatatgtaacataagatatttaccattartaaagcctggcacctgcatttgccagcttggtattatttagtgagtgaagtgtttcatatggaataagaggagcaaaaaagagggaaaaaatttcaaattttgttaactaacctgacctttaccagaacatcatactcatatttccctctgtgaaatattctgttggcatttccagtgtagcatgtcaaa

SEQ ID NO: 448696 - DNA, 613 bp, Homo sapiens
ggttaactgaaccctaggactagttcctggcccttaagagctcctgggaaagaggtgaatgaaggacctgagggacagctcactttcaccactgacccctaggatcctagttactcgtctgctgtggacatgcgagctggcagagggatcttgctggggayaggcagagactaattttcagatgttgcagagcctgggagtttttgtgggctgggtagctctgtcagagagtgaccatagatgtcttttccctagggttccccatcccccttcaggaagtgccagccccaactgacctctgagccagaaaagagtggggctggcttcgccatggaacaggggcacatctgttgtgcaagctcgcctgtcgactgcccctccttggacacatgcctagctgccccgcatgattgagtgcacagtgtagcatctgcagcctagcctgagtgcattgtttcaccttatttcttttcctagtggcccagaaacacttgtaattcctcagcacagctggaacctgaccccaagctgcgggacatctgggtacccccagagctccagcctgcagccaagatctgtggccagcacatgagctggggaggagactgtatgt

SEQ ID NO: 448697 - DNA, 565 bp, Homo sapiens
gggatttaccaaatgtttttatactcagaactgttactggctgacttctggtatcataatgtatttgaaataataaatattagtttagttctcagataaggatgaaaaataagcctgaagatttttagtatttttattagaagatattttatttcttctctacaaccatactactgttttaaaattataaatagataaaatatttttaatgaatgtgaaaaacaggcattcagtcagggtattgtgtgaacagtatgtttacagcaggcatatttcaccttttcctagtggggaaagctgcttttttttttaatttgtctgaagctttagtatgtatttatctaaagatatgtaacataagatatttaccattagtaaagcctggcacctgcatttgccagcttggtattatttagtgagtgaagtgtttcatatggaataagaggagcaaaaaagagggaaaaawtttcaaattttgttaactaacctgacctttaccagaacatcatactcatatttccctctgtgaaatattctgttggcatttccagtgtagcatgtcaaa

SEQ ID NO: 448698 - DNA, 541 bp, Homo sapiens
ggtctcttttctttttgcttctcaaaactcaaaccatgattaatatctgcctcaagagaggacagacaggacatgttcttctgacattatcatctgaacatttcagtgtaggtttttgctattataactgacttctactttttttgtctcccctaattcttattctagtttgtacgayagcagtaactggaaagaaagaatatctgaatgatcctgtcccgtattaaaactcagttttaaggcaaaaaaaaaattgaaaatgcaataatttggggagtactatgaacaaatttagagaatacttaaataaatagtgcaaacgtataggtacgcttctatcacaattagtagaatggaaaacatggaagagtaaactaggagaacagtatagctaaattaatcagtttctaattattgtcttcatagtaagtatttaaataaaaaaacaacagaattgatatattcttctgctacagtatttatttgtaactattaatatttacactctacttctcaatgatgggtttttttttttttactg

SEQ ID NO: 448699 - DNA, 553 bp, Homo sapiens
ggtctgtactcaggagacttgtaaatagcagacatggtttctaatcttaccctttgtataaactattaccttaggcatgtcacaggctcacgtttccttttgcacaaatgttaaggttaggcaatgygatctaaggtaaggtccattccacttctcacattttgagttcctatgttcctaagtagagctactaaaattgcattttattgcctttataattgccagcataatatgtaaagttaacttcaaaaaataaactgtgtatgcggtttatattctgtaatctttcttttagttcttttatatagctacttttctaaaatttatcatttgtctctatgtcaggattaacgtgagaattctgtgtgctttgaactttggtgctgtattacaaatattccaaagtaggtttgtaaaggaagaaaactctgagccaattacttatttacctttagagaggtttaaaatattcattggttgtacttgtgggcaaaaaatatggaaatttaaagggaaacagccctctaatagaaaggaaaaaatatatatattc

SEQ ID NO: 448700 - DNA, 545 bp, Homo sapiens
atactgggtcaatgattttttttctaatttgtcaaacttttgacactagaaaacaaaagcacaataatgtgcaaatgaataaggattacctttcacagattattagttgattgctcagccatgctgtttctaacatatttttcaataaataggcaggaagatttgatgcttgttataccactttgccatcaacacgtccattttgaattctagaattgcagtgggtacaactaaacgttgtagtttacaaatgaaatttgrcattctattctcatgaattcctgtacctttcactcccatttcaaattggtagaaaacagttcattctaactacaatctgtatctttgacacttatattttaatttacatttccaactatacatttttcctaacgttttaattgttctttaattgtgaaaataatttctagttttaaagtttaatattaaatgttttagttttttatagtttatgtgcttgtattatatatgctgtgtgtatgcatgtatatttatttgtgcatgttggtaaatttgaccgtttt

SEQ ID NO: 448701 - DNA, 603 bp, Homo sapiens
cgactaatttttgcagtagccaaactagtgaaagcatttgtcaaacctgcaattctctaatctccgatggtagactagtctctgcctttcttttgagatgccgtgttactggagaaaggaagctctgttggttttcagctgtcctttcctgtaccatgcaggcactgcctagaatgccaaagtttggattccaccaattgctaagaatatacattctaattataaacccaagaactggaaaaataacaacaatgtcatttcttagcattatccttaggtatttgatgttacctgatgctattatatgtgagatttttaaaatttttgctttctaattgatcgagtgtagaaattcattttttaaaatattgatcacatagccagtgaatttgctaaatttaccaactcttagtagattatctctaaattattttgggttttctacatcacratcatcatctgagactaatgactgttatttttctctttccaatcattttacatcttctttttctccccttattgccctggctaggacctttaatacattgttgactagaagtggtgataacagtcatccttgtcattcctgatctcagaggt

SEQ ID NO: 448702 - DNA, 587 bp, Homo sapiens
gcaaatatatgcacacatatatgcacatttgcactaataacttctatctatgtatttttaaactatgagtttatgtggattgtccaattccaatccaacaccacagaatttgttttagttttttcttttttcatatttgtaactcccttttccatcagtaagaaacctggctgccattaaccttaaatatatttattatttgatcagtctgcacacatgttctcccatctccctgcacacatgcccccttcactctgtttgagtttggatatctcatgctgcctttcccacttgtgggtgtcctcatgaccagctgagcatgggctctgatatccgaggtcagcttgccccacattgggtgccctcatcrtcctatctaggccctgacttcctgcctgagttttagtaccatggtccaggactcctccttactccacatagttgccctcttcaccccacttcgccacactccaggccaccctcacactggataccccgcccatgctgcttaggctctagtatcccgataggccacctgtctgtgcagatgcacaccttaccctgctcaggctctgatatacttcacc

SEQ ID NO: 448703 - DNA, 493 bp, Homo sapiens
acttttttgctgtggtatataaagtatttgctttaaaattgtatatgtatatatttactgttatctccctattttmgtgtacagtattctatatttgtaagtattgtattagtccagacaattgaatcctgactctgccacttacggctttgtgaatttggacaaattctttcatcacatgtttcggtttccttttctgcaagggtagtagagttgttgtgaaacttgaatgaaattatacatgtaaaatacgtgggatagtgcatgatgcagagtaagccttgaattacttttgttgtaatttttattagacttgccaaagtatgttcatcttattttagtcctttgtcctcatacgcgcacacacacacacacacacacacacacacacacacaatctaagaaaatgttcttagatacttctgttgcttttatcgaatttaatttattgctgcttttctttttattatgttctcctcctactttcattagg

SEQ ID NO: 448704 - DNA, 493 bp, Homo sapiens
acttttttgctgtggtatataaagtatttgctttaaaattgtatatgtatatatttactgttatctccctattttcgtgtacagtattctatatttgtaagtattrtattagtccagacaattgaatcctgactctgccacttacggctttgtgaatttggacaaattctttcatcacatgtttcggtttccttttctgcaagggtagtagagttgttgtgaaacttgaatgaaattatacatgtaaaatacgtgggatagtgcatgatgcagagtaagccttgaattacttttgttgtaatttttattagacttgccaaagtatgttcatcttattttagtcctttgtcctcatacgcgcacacacacacacacacacacacacacacacacacaatctaagaaaatgttcttagatacttctgttgcttttatcgaatttaatttattgctgcttttctttttattatgttctcctcctactttcattagg

SEQ ID NO: 448705 - DNA, 493 bp, Homo sapiens
acttttttgctgtggtatataaagtatttgctttaaaattgtatatgtatatatttactgttatctccctattttcgtgtacagtattctatatttgtaagtattgtattagtccagacaattgaatcctgactctgccacttacggctttgtgaatttggacaaattctttcatcacatgtttcggtttccttttctgcaagggtagtagagttgttgtgaaacttgaatgaaattatacatgtaaaatacgtgggatagtgcatgatgcagagtaagccttgaattacttttgttgtaatttttattagacttgccaaagtatgttcatcttattttagtcctttgtcctcatacgcrcacacacacacacacacacacacacacacacacacaatctaagaaaatgttcttagatacttctgttgcttttatcgaatttaatttattgctgcttttctttttattatgttctcctcctactttcattagg

SEQ ID NO: 448706 - DNA, 512 bp, Homo sapiens
gacttcatcagctttcttctccaagtcacctgactgccygtcttctaccatctgagggaaaaggaaaaaagtgaagtcatgaaggtctcccacatgggatggcttcggaagagaggccaatgctaaattcagagatttacaataataaaaggcaagggttgcattatccaatcctgattattaaggacctgaccattcattcattcacacaacaaatactcccagaacgctaccatccatccatccatccatccatccatccatccatccatccatccatccatctgtccatccatccatccacccaccctcccacccacctgacaagtacttttgcagcaccgggtatctgccaggcactggtaataaaaaagtgaggacaaaagagtcccgaatgcttatgaagcttgcgctttagctagaaaaaacaggtagaaagcatggaaacaattgtaaaagctcttcatttcatctctgggctcagcagaggggctcaagaggaagtgcacact

SEQ ID NO: 448707 - DNA, 512 bp, Homo sapiens
gacttcatcagctttcttctccaagtcacctgactgcccgtcttctaccatctgagggaaaaggaaaaaagtgaagtcatgaaggtctcccacatgggatggcttyggaagagaggccaatgctaaattcagagatttacaataataaaaggcaagggttgcattatccaatcctgattattaaggacctgaccattcattcattcacacaacaaatactcccagaacgctaccatccatccatccatccatccatccatccatccatccatccatccatccatctgtccatccatccatccacccaccctcccacccacctgacaagtacttttgcagcaccgggtatctgccaggcactggtaataaaaaagtgaggacaaaagagtcccgaatgcttatgaagcttgcgctttagctagaaaaaacaggtagaaagcatggaaacaattgtaaaagctcttcatttcatctctgggctcagcagaggggctcaagaggaagtgcacact

SEQ ID NO: 448708 - DNA, 379 bp, Homo sapiens
tcttaggaaactgcgaccttaatggttgctaaggagcaggggaggtccttcccgtcgccgaccccctccctgggaagcggcgtgttttctggaccgggccaagggcgcgtsgaggatgtgacctgctccgcggccgcgcgtgagtgcggggcgcgtcggccgagcccaccgatgggcgaggccacctttctctccgggcggggcggggagctgggggacgcggggaccccacggggtgcgggcccgggccgcttgacaggcgccgcgtgcagctcgcgcccctcggccgccgtgcatccgtgatgggttataaaagaggaggaaagtatttctccttgctcagcagatttgccctccctcgctccttactggttaggag

SEQ ID NO: 448709 - DNA, 662 bp, Homo sapiens
attaagacgaccaactcatcccagcttgtccaggactttcctggttttaccactgaatgttctggggtccaagaacctctcagtccaaagcaaaccaggttgctcatcctaagtgtgtttggaaacatgtctgacctgctcacgtgtttttgctcagggcccctcctcaagctgccaagccactgcctcagccaaacaccccagggagctctgataacctccagcaactctccctggccaatctctgttaggcaacagatgccacccttctagctttggggaaggagacatagccctcctacactgagttccagacatgcttacctaccccctacatyaactttccagagctccactgtattagtctgttctcacattgctaataaagacatacccaagactgggtaatgtataaagaaaaagagatttaatggactcacagtttcacatggctggggaggcctcacaatcatggcagaaggtgatggaagagcaaaggcacatcttatatgatggcagtcaaaagtgtgtgtgcaggggaattgccctttataaaaccatcagatctcataagacttattcactaccatgagaacagcacaggaaaatccgcccccatgattcaattacttcccaccaggttcctcctacaacatgtgggg

SEQ ID NO: 448710 - DNA, 462 bp, Homo sapiens
tttttttcaggacctttgcacatgctgttcctcccacttccaacatgcctgaccagctctgcaaaacaactatgctcatctttcaggctcaggttaggcagcccctctcccaggggcgtgtctcattgccttatctcacatagcactctccctccaggttttggccatatgcttccttttatagcattttttttttagtatcaagaagtatcacattgtatatatttttatacatttttgtctctacgagaatattggccctcaaactgagatacacagrcctcctgaggtacatgaggccttttaaggatataagggtataaagaatcagttttaagggaatctttttccagatacctaatttccgtatgaaatttacctgcaatggagacattacgctggttctccatttcccattcccctgtcacagtcgtgcttctcttatgaacatgccactcactc

SEQ ID NO: 448711 - DNA, 574 bp, Homo sapiens
gattctctgtgcagcaagcaaaatctgtcagcagttttccttcataatttttttctctctcgacaagtaactttgggctacttaatgatggcccatatgtctctgatcctgtagtgcggtgccctagcctggtcaacgcttggagttttataaccctccatagcttcagtttcttcatctataaaataatcatggagcgtctactaggtcttgcaattaatctgrtaaaacctttttcttcaacaaacaccaataaagaggatcaaaaatagcttgcttttttttcaggctggagagtggcacatatccactgttttatctagggttagttcccaggaatatctcctgttctctgttacaatgaagtccaaagggccttgatcatattgacattccggagagcatcattcagttcctcatattgattgaacttaataagtgggaagtggcaagtagtttggacactgtagtaaaaatacatgtataccagagggagggagctacatgcccaaggagattcagatactctgcacattggtctagtttttgggtccaacagtttgagtcatgctga

SEQ ID NO: 448712 - DNA, 574 bp, Homo sapiens
gattctctgtgcagcaagcaaaatctgtcagcagttttccttcataatttttttctctctcgacaagtaactttgggctacttaatgatggcccatatgtctctgatcctgtagtgcggtgccctagcctggtcaacgcttggagttttataaccctccatagcttcagtttcttcatctataaaataatcatggagcgtctactaggtcttgcaattaatctggtaaaayctttttcttcaacaaacaccaataaagaggatcaaaaatagcttgcttttttttcaggctggagagtggcacatatccactgttttatctagggttagttcccaggaatatctcctgttctctgttacaatgaagtccaaagggccttgatcatattgacattccggagagcatcattcagttcctcatattgattgaacttaataagtgggaagtggcaagtagtttggacactgtagtaaaaatacatgtataccagagggagggagctacatgcccaaggagattcagatactctgcacattggtctagtttttgggtccaacagtttgagtcatgctga

SEQ ID NO: 448713 - DNA, 574 bp, Homo sapiens
gattctctgtgcagcaagcaaaatctgtcagcagttttccttcataatttttttctctctcgacaagtaactttgggctacttaatgatggcccatatgtctctgatcctgtagtgcggtgccctagcctggtcaacgcttggagttttataaccctccatagcttcagtttcttcatctataaaataatcatggagcgtctactaggtcttgcaattaatctggtaaaacctttttcttcaacaaacaccaataaagaggatcaaaaatagcttgcttttttttcaggctggagagtggcacatatccactgttttatctagggttagttcccaggaatatctcctgttctctgttacaatgaagtccaaagggccttgatcatattgacattccrgagagcatcattcagttcctcatattgattgaacttaataagtgggaagtggcaagtagtttggacactgtagtaaaaatacatgtataccagagggagggagctacatgcccaaggagattcagatactctgcacattggtctagtttttgggtccaacagtttgagtcatgctga

SEQ ID NO: 448714 - DNA, 574 bp, Homo sapiens
gattctctgtgcagcaagcaaaatctgtcagcagttttccttcataatttttttctctctcgacaagtaactttgggctacttaatgatggcccatatgtctctgatcctgtagtgcggtgccctagcctggtcaacgcttggagttttataaccctccatagcttcagtttcttcatctataaaataatcatggagcgtctactaggtcttgcaattaatctggtaaaacctttttcttcaacaaacaccaataaagaggatcaaaaatagcttgcttttttttcaggctggagagtggcacatatccactgttttatctagggttagttcccaggaatatctcctgttctctgttacaatgaagtccaaagggccttgatcatattgacattccggagagcatcattcagttcctcatattgattgaacttaataagtgggaagtggcaagtagyttggacactgtagtaaaaatacatgtataccagagggagggagctacatgcccaaggagattcagatactctgcacattggtctagtttttgggtccaacagtttgagtcatgctga

SEQ ID NO: 448715 - DNA, 492 bp, Homo sapiens
gccttgttgtgttcaccatttctctgtgattcatatgataatatagatgctattctatcattaacagaaaattttttaaaaaacattgaattgaggtctgaaattatctcaaaggctgggacaatgggccgaatccaacaccagtaaatctcactcctccttcaggacctaactgaaatcatatttcttcagcaagttcttccccaatcattagaccaggcaaggtctctcatgtgcttgtggagtatcttgtcctgtccctttctttgtgtgcaaatcataaatttgttgagggcaggagaacaagtctatctcattcaccattgaactcctagtgctcatagcagttcctggcacataacaagtgtttcaaacaaattctttgagttaaaaaagaatatacaaaatgtcatgcattttggctaaaggcattagtgtgtgattagaagatgtagcargggggtggtggagattgtgattgctaaagagtag

SEQ ID NO: 448716 - DNA, 503 bp, Homo sapiens
gttgtttacagtaagaaagcaaatctgatatcagttattccattatggctgaaagaggaatccaataattttattgtaaattaattattagtagataacaatagtttaaacaagactgagtatgaatgaattgatataaaactacattgactaaagctttatgtttatgttttttaaaaagcaaatttcaatgtgcacagcttgcgcattttcttttctaggttctcagttggattgtgagaatttttatgcttttaccatcttttcctrcatatatgtcatcaaagtgtcctgatacttggttttgcaaggcagatctgtggattctgcaagatatttcaaccatatcaatgagtactatttcatgctcagatcaactgtgcatacatacaatgaaaatttactagtctatatttttctctcagtccaaccatcccaggagattgatgaaaaatgaaataaatcctgttggtatttttacaactcttaggggcaaaaaccat

SEQ ID NO: 448717 - DNA, 668 bp, Homo sapiens
actgctgttttggcttgattgttgaaacgtggttatctgctgttgaaataaaagagcagttctttgtctcagctggaaacaaatgattaggatataggatgccttttccaaagagaggagcttttcaaagagcacattgtcattattttgggagaatcattctgaagagacaatatttgctcttttttcttttcactttcaatgctattaacataaatttgaaaagattttgataggcattcacatctcctatgaggtagcatatgaacctggatacaatttagtttccagaacagtttggagcattagccttgtgtatcagcttgttagggctgccacaataaagcacataccaaaaacttagtgacagtcttaaacaacagaaattttttctcttagttctggaggctggaagtctgaggccaaggtgtcagtagggttggttccttctgagggctgggtggggaatctgtcccatgcctatcccttacttttagtggtttgctggcaatctttggcattctttgttacgaacaagcmttaccctgatctctgccttcatcctcacatagcattctccctgaacacgtgtctgtgcccccaacatcccctttttataagaaacatcccctttttatataacctgtcatataaggttagggtcgaac

SEQ ID NO: 448718 - DNA, 561 bp, Homo sapiens
agtgaggccagaccaacttcagtggtatcagctgaggatgccccgtgacatggcaggctcatgcctagaaattaggaggataagatccctccaactcaagcccatggggattgcttactcttctctggtgccagaagagggcaacacatgaatctctctgggaacttagatcaacctaggagttgacaatagagatagggaaagggaagaaacctccaaagactgaagatgctccccaaagtggctaagaattggaaagcaactgaaataataatctgattttaaaggtcactgattgctgtagatttattaaaattactctgtggagattggagctttaggaaagagttgaatttagatacaaaaaaaaataaagaataaagttatatttaggcaactcaattgttagtgcgtaagttttgaycctgctattatatatgcatgtgtatatatgtcatcactaatttctattacaactataaataactagctaacatttccattttatggttaacgagtgtgaggcttaatgagataagtaaattgtccatgtacacatcg

SEQ ID NO: 448719 - DNA, 539 bp, Homo sapiens
agaagttttttgtgaagttgttcattccttacttgcttcatgtacagtcttggtaatagccttgagcagcaggtggtggattgcacgtcctattcagagcagtgtgtagtttcctattctgcttatggacaacatgaaaaacctcaaggaagttgtgcttgggatatgcactgtccatcccagcctcagctgactcattgaaaagaggctgatggcaatctccctagagactctctttcctgggaaggacagggaactccagcacagctagctcttgatgggcctcggggccatgccttctgaggctaccaggggactattgggcctaagttggcatctactgccaaactaaatcccccatgcctcacctactttgccccttttgttctgatcctctctcctgtttcaacgttttatcctcatattgctctatgttgcctctttcctctgccaagcccgcaacaagtttcttctcctcttaacctttcctcagtgctctctggaactccmtatccatggttagccaattctacttccat

SEQ ID NO: 448720 - DNA, 591 bp, Homo sapiens
gggagacacgcacaggctgagactcaggctgtgggtgccgacgctgggcgcagaccgccagccggggacctgggatgggaggtgtttttgcgtgtacgaaagagccagcagcttgtttctgttggacgatgacaatattattgggctaggtttttccatgtgcggaaatcgagttttraatgattagcctcacatcaaatgtatgcttgggtcatgcaattgcttcgtttgctcagccccggttaataatttccgttttaagtagaaagcacaaaataaaactgctcgctaattcggtgcccgggaagcgagcctagagaggattttgccagcttgtctgaatgtgcttttctgctcggagtgtatgtctgtctgagtggtttgtgtgttttcccacttcttttactcggggtccaaacgcccttcccgggactgtttcccatgaaatgagtctggtgtgagccgaagctgtaatgcgtttctcatttttaaagtgtttttaaagcccgtctcggggtgggtcgcgggggctttactgtggtttcgcagcagtttgtgaaattctctaatgggcaccacagagtttgcgat

SEQ ID NO: 448721 - DNA, 590 bp, Homo sapiens
cttgcagaaagtttgagcctggcctgcgcgcgcagcgccccgctcttccttgacgcacctcgcggagcgcgcgccggcacgcgggcagagggcgcggggtggtgaggggctgaggacccccgaggggcagtcccagtttcaaaaaccttggcctcacttctctgtgtgccttctggcacccaagtactttctgcctctacctccacctctcttgtggggtggaagagccctgggctgctgtttgggagagaagggtgaatagcccgtcctacctgtagtggtgatgctagaaacttcttgtttggacacccaacctgcctarcgctcacctagggcgcatagacagtagacggagtgaagaagataaagtctattggttgcaagacaacttgagtgatttggctccgcgaaacaccaggtgaagtcaaaataagtctttcccccaaaggaaccgttttacctcgactttttatctcatggagagtccttttcaacatggttcaaaggagttggatggaagtgtaatctcactactcatcggttctagatctgccacttccaattagatctacagtaggggcgggggagag

SEQ ID NO: 448722 - DNA, 544 bp, Homo sapiens
ggatactgaccgaggtacgatctgaagatggaaatgcagsctccacctacacgtaagtctgctagatgctttgttggtgctgcggttgatttttgcttctacacatgcagagcttctcacgctgggatgctttgtatcaagaaatctgatctattctgctcaggtatcacttcatttcatcttcttgctatagtttgcttatgtgtataaacttttaacctattcatatgcctgtaagcttattggctactaactctctgtattgggttgcatttatttatttacatatttgccactctgctagtcggagagcttctggagtgggagcctgccccttgtttatctccctatcttcattgcgtagcactgtttgttggtgtataactggcatctaagcagatgtttgttgaatgaattattaagtgaatacacaagtgctaatttgtgatattcaaggagctagatgtagagcaatcttttggctgccttttagtacattttacagttgactgtaaaatctagggcagagtctcacccaggcagt

SEQ ID NO: 448723 - DNA, 609 bp, Homo sapiens
ttgtgtcttagtttttaacaaaaaagtttaaaggtaaaagtaaaacaaacaaaaaggtaaaatagaaaaaagcttataaaataagaatataaagacaaagtatttttgtatagcagtacagtgtttgtgttktacgctgttattgtgagtcaaaaagttaaaaaaatttaaaagtttataaggtaaaaaagttacagtaagctgagccgaatttattattgaggaaagaactgtttttaaaatagagtgtagcataagtgtacggtgtctataaagtctacagtagtgtatagtgacgtcctaggccttccctttcactcgtcactcgctcactcacccagagcaacttccagtcctgcaaggtctattcatgctaagtgtcttatatttttttcttgtattctatatttttactgtaccttgcactgtaccttagatatgtttagatacacaaataccactgtgttacagttgcctacagtgttcattacagtcacatgggtacaggtttgtagccttaggagccaaaggaatagatgataccatatagcctaaggtctgcagtaggccataccatctagatttgtttaaatacaccctatgatgttt

SEQ ID NO: 448724 - DNA, 639 bp, Homo sapiens
acctcctcgaactgaacgtgtatggaagtcatccgggaatggaaaaggagattttctgaggtgaatgaaaaagcatgaaacagaatggaccaatgttcatttagagaaatgaaatagaaatagacaggactgaagatgaatataggaaagaagaaactggaaatgaagccagaaatgaagaagatagagaaatccagtacagattagtaaagatgagctagagaagaggactctaattttagttacattatctctatttaattacatttaaagatcatctcaacgtgaatgttcagtattcatttgctttggatacatgaattttcagtatwcgtttgctttggattgaaagatttggtaaagatgaagtcctcagaaatgaggtatcacaatctgggagaatttgctaaaaaaaaaaaaaaagagagaaatgagggtagacctgtgaaaatggtgatatatatttttataagacaaaaaggtacacagagttttatatttccataacaaaacttaaagtaacaagtcagaatacatgtttcacaaaaatagaaaatggcaatattgtgaaactacggtgcattgcttcaaacatgcacgctctttcatagatcatcttcttcagacccaagatggcgg

SEQ ID NO: 448725 - DNA, 575 bp, Homo sapiens
tcccagtcccaagttctccttcttccaccctcccagcattatcttgctactcaagtggccatgctgcagaatggttcccgcatttgtgctcgctaacctcctagctagtttactcatctccctcttattccatgggtggatgtgttagtctgttctcacgctgctaataaagacatattgagacttggtaatttatgaaggaaagaggtttaattgatgcacagttcagcatagcttaggaggcctcagtaaacttacaatcatagcggaaggggaagcaaacatgcccttctggacctggtggcagcaggagaagtgctgagcaaaaggggggaaaagccccttataaaaccatcagatcccgtgagaactcactatcaggagaacaccattaggataatcaccccatgattaaattrtctcctagcaggtctctcccacaacatgtggggattatgggaactacaattcaacgtgagatttggctggggacacagccaaactgtatcagtggactaatttttctttctattcccttctcccctagaccagtcagtcattttagtaagattgtc

SEQ ID NO: 448726 - DNA, 575 bp, Homo sapiens
tcccagtcccaagttctccttcttccaccctcccagcattatcttgctactcaagtggccatgctgcagaatggttcccgcatttgtgctcgctaacctcctagctagtttactcatctccctcttattccatgggtggatgtgttagtctgttctcacgctgctaataaagacatattgagacttggtaatttatgaaggaaagaggtttaattgatgcacagttcagcatagcttaggaggcctcagtaaacttacaatcatagcggaaggggaagcaaacatgcccttctggacctggtggcagcaggagaagtgctgagcaaaaggggggaaaagccccttataaaaccatcagatcccgtgagaactcactatcaggagaacaccattaggataatcaccccatgattaaattatctcctagcaggtcyctcccacaacatgtggggattatgggaactacaattcaacgtgagatttggctggggacacagccaaactgtatcagtggactaatttttctttctattcccttctcccctagaccagtcagtcattttagtaagattgtc

SEQ ID NO: 448727 - DNA, 592 bp, Homo sapiens
caggattgtggacttctaggtttctggaatgttgaaaccacatcatgtacaggatatggcttagaaataggtacaggcctacaattctgtgtatatatgtacatatacttcaacatgcgttagtgaataaggcattatattttgtcttcctggtgcatactttttttttttttttttggctgagtgtcagtcactctgtcatcctggctggagtgcagtggcaccatcatttctcactgcagcctcgacctctcaggctcaagtgatcctcccaccttagcctcctaagtagctgggctacaggagcacaccattaagcctggtgaattttttaaaatttttttgtgcaggcagggtctcactatattgcctaggctggtcttaaactcctggctttaaacaatcctcctgcctcagcctcccaaagtgctgggactgcaggcggagccaccgcaacaaggtattgaaaagttgagacatagcttatccattgaawacttaacagcactcagtaagtcttagttaagaagaagacagaaaatcaggagcggttggaatcaaaaagtgagagacaacacccaaagtcagttta

SEQ ID NO: 448728 - DNA, 615 bp, Homo sapiens
tctctgggccgaggaactgaaagaggacaaacactgttctcgttcagtctgttaggagggggaattaaagccttcgctagaagcaatatttctatgaaatcctccctgatcatttccaccagagtctaccctgatcaaaagccacactatttaaaaagaaataagagtggatatcaccgagaataatgtgagcatggaaggggaggtgcacaggagaataagtcagagagatagcattaaaatgccttttcatactcgacacagaagaaaccttatcttcaaaacataaaagaggctgatgaatatatgagccgctgataccctgctagatcttagattccatcttggagggagaaaggaatgatttcattgtggtgttttgaaaagaaacctacagagaatgaagaagtatcttcacttaaagattggacagcatgataccacattctgagaagttgtctcctgtcagaagccatcatgccttccctgayttttatgggatttgacacaaactgaaggagggtcgcaaataaagtactttctctctctctctctctcagtctctctttctctcaaaatcgctctacctctggtttaaaaacaatgcaaagagtg

SEQ ID NO: 448729 - DNA, 615 bp, Homo sapiens
tctctgggccgaggaactgaaagaggacaaacactgttctcgttcagtctgttaggagggggaattaaagccttcgctagaagcaatatttctatgaaatcctccctgatcatttccaccagagtctaccctgatcaaaagccacactatttaaaaagaaataagagtggatatcaccgagaataatgtgagcatggaaggggaggtgcacaggagaataagtcagagagatagcattaaaatgccttttcatactcgacacagaagaaaccttatcttcaaaacataaaagaggctgatgaatatatgagccgctgataccctgctagatcttagattccatcttggagggagaaaggaatgatttcattgtggtgttttgaaaagaaacctacagagaatgaagaagtatcttcacttaaagattggacagcatgataccacattctgagaagttgtctcctgtcagaagccatcatgccttccctgacttttatgggatttgacacaaactgaaggagggtygcaaataaagtactttctctctctctctctctcagtctctctttctctcaaaatcgctctacctctggtttaaaaacaatgcaaagagtg

SEQ ID NO: 448730 - DNA, 559 bp, Homo sapiens
aagcacaccatttatatatgaatagtattgtcaccatatggataaaatcaatgtaaataatcccaaggcacagatagtaaaataattaggtggggaagagtttggggataattagttcctttgtttttattttaacttattttatctaatattattgtttacataatttaattttaaataatgactattttaaccagcaaacaaaattcctaaaaatgaaacaattggccctcatgagctggtacagctagctccagcacgccactggagattgatgttcatgaactggtttgggtgagcagatcaccttccccagatgatacctgtgtttcaaatgtgcatattctttagagtttccatgtggttcatagaacagagtcagtrttactatttactccatgcttaaaatcataagcctggtctcattaatcccttagatgtacagtccttatacagtgtacaaagagcttcaatgcccataatttaaactgatttttatagccacttcagaaattgagtataacagttattttccttcttttacaggtgaagaaactaa

SEQ ID NO: 448731 - DNA, 557 bp, Homo sapiens
tagccctactatcaaagcacagtaattcttctcttttttctctgtatcttcctcgtttttgtctataaactcacttacaaaaatcaataaatctccaactaaaggaagaattcggtcttttgtatagttgagttcagttactgccacactctttctaggaaccccccccacaaatacagcatatatttgaaatgctgaaatcagggtatggtggagctgggaagaaccttagagattatctgaattcaaccccagcattttagtggtggctgtatggtcagtattgtcagttttagtagtagttataacagctgctgctattccttcaacatcaggaatatgtgctagayactttctatgtctaatcttcctgacaattatgaaaggaagagtgagtagaaatgatttgggtttgagtcccatagcataggaacaacaatgcctccgaactcctaggtttgtaagaaagatgatttgaggggaaatatgtaaatcacttggcatggagcctagttatttttatcatcatcattcattttcagggaggaaactgaggc

SEQ ID NO: 448732 - DNA, 592 bp, Homo sapiens
cactctacctagtactcttatctatcaggaggcctttccactctggctggtcttgtgtgaactttaagaatgtcctattttttttttctctggtggttctttctctggcygtagttaatcacacacatgcacagatcagtactcagccaaaaccttgagaggactctctgcagctcccttcttttctggttttctggtttgtaacttttagctgtcttggactctccaactctaaactttctcctcaccttaggattgatggaccactgagacctggaaatgtcaggtacttgtagggttaccttgcttatttcttttctcttaaagatcactttcttgtgctgcccagtgtctgttgtctggaaactatagtttaatatattttgtccattttctaatgatttaaggggaaagggtaaacctggtttcttttattccattatggcctgaagcagaggtcttaacttttattcctccctcctacaacctaccagatcaactgactaatttgagaagaggaggtagaatttataatttgaaaatttgtcacatacctttttccacactagcctgttgaaaagaaaagactgac

SEQ ID NO: 448733 - DNA, 547 bp, Homo sapiens
ttttcctcaggtctactcagtttgttggcatacctttacctttcttatagcctatgaaaaaagtgttatttttccttccttctgctgctatttgtaattcttttccgtgcctttaagaagaaatcctgcacactgcacatggttttctcccctccaacatttgctgcttcagcctttcttatgcttyttatttctgtggccaaaataagaaagagagggaaacccatgtgactgtctgggttttcagcatgctctttcctgcaattaagagaagtttaccttaggaaatcaagctacaagtcatgcttcttacttagagctagtttgagagtgaacttgataaggtgtttaactcatctttgaatttggcttttcaggttttttttttttaatttgaattttatgttagatactttttttgttaaaaaatatttccatctgcttgtctctaaccccacatagattaaaacattttaaatttggaactgaacataataattttgaaatcaaattatgtgctgttttctcatattttcccaagtactgt

SEQ ID NO: 448734 - DNA, 598 bp, Homo sapiens
ttttttttttttttttttttttttttatgaaattgacttaatgtctttgactagtaattactttgggcttcctcagggaagatttttgtcaaattcctttttctagggaatgggccatactttcccgtttcttggtatgttttgtaattttttgttgttgacaactggatactctgagtattatagtatggtaactataaatctgtttctcccactcctcagtgattgctgttttttgcttgttgagggctgaagccacctgtttgtgactttacaagctattttcacaaagtatgtattccatattgtgtatggtcacaagtttttgttctgttgtctctgtggctagctggtgacctgacaaagattttcttaratatctggctccaaaaaaggagatcaaaaaggttttaccttttttattgttctaataatacttacagtgaaagccactgctgtggagagtagtgaaactgatgcatgtgcctgcatcactcccttagggccagaccaaccaaaatgtacaaccctaaattttgaaggacatgatccctactgtccctcctggcaccggttagcaactccaggaacatgggct

SEQ ID NO: 448735 - DNA, 611 bp, Homo sapiens
aaacatctttagatgtatactttgattattgatattgtaagggaggaaaaataattttctctctattgtttattgaggaaaaaaagccaaactctgtaaatattttaaaaggtttattctaagtcattatgagtgaacatggcccggaaaagtctcaagaggttctgagaaggtgtgcccaaagtagtcaagtaatagtttttctcacacgcatccgtgtgaagagatcaccaaacaggctttgtgtgagcaataaaggtttttaatcatctgggtgtagacgagctgagtccaaaaagagagtcagtgaagggagatacgggtggggccgttttatagaatttgggtaggtagtggaaaattacagtcaaagggggttgttctttggtgggcaggggcaggggacataaggtgcccagtggaggagcttctgagccaggaaaaggaatttcacaaggtagtgtcatcagttaaggcaggaaccggccattttcayttcttctgtgattcttcacttgcttcaggccatctggatgtatatgtgcaggcttgggctcagaggcctgacagttttgttttatacattttgtgggggacagaagttacaagca

SEQ ID NO: 448736 - DNA, 633 bp, Homo sapiens
acaagccatttctatcttattcatgggtgaatcaactagtccagcacctggcataaattcgataagtgaaaaatattggatggatgagtagatggaagatgaatgagtggatgaatgaaccccaccaaggaattttccagcctctgcttgaactcccccagagacagacagctcattacctcctaaggtaactgtcccacatttagaaggttctaaccatgagctctcatgttacacagagacgtacctcctacataggagcctacacagtaggctacctaccacagaakcctagcatccactcctggttgtggctcaaggattctatatatttaaagctttggttttagccaaccgtgttagtcctagctatttgggaggctaaggcaggaggatcacttgagcccaggaggtcaagactgcagtgagctatggtcatgccactgcactccagcctggcaacagagtgagacccagtctctaaaaatacatacatacatacatacatacatacatacatacatacatacatacataaatcactggccctgtcttcaatgtggttaggcagaaggaccactgggctgattccagtccatgcagcagcttcccctcactctccttccgtgaagg

SEQ ID NO: 448737 - DNA, 593 bp, Homo sapiens
atttcaggtttaactctgactccagttkatgactttatctgaaaacaatatctaacatatttaatatttggtgggcacttaccaagttgctcttttacttccgtgagtgaagaacaaggtaagttcgctggttgcaattatgtctgtcttagtccatttttgtgttgctataaagaaatacttgtaggccaggcgcggtgactcatgcctgtaatcccagcactctgggaggccgaggcgggtggatcacttgaggtcaggaattggagaccagcttggccaacatggggaaaccccgtctctactgaaaatacaaaaattagccgggcatggtgatgcaagcctgaaatcccagctattcgggaggctgaggcaggagaatcccttgaacccgggaggcagaggttgcagtgagctgagatcacgccactgcactccagcccgggcaacagagcaagactctgtctcaaaaataaataaataaataaatacttggggggccaggcacagtggctcatgcttgcaatcccaacactttgggaggccaagggaagaggattgcttgagcccaggagttcgtgaccaggctgggc

SEQ ID NO: 448738 - DNA, 591 bp, Homo sapiens
ggcaatttcctcatctgtgaaatgggaccaatagaatattttttgcaggtttgttctgagcattcaagataatgtatgtgcaacatctggcacactgcgtgacacatagggaataggaaataacagctgtttgaaagaatcctaaggggctcagcaggttcttgtggcaaaactmcattatctgctagggtagtccaggagggatcttgtggtttacctgcattatgtcagctttaaaatgaatttgcatttattgcaagttattttccatctgtgccagaggagtgactgttcctcaaaggagatgttggctcctctgctgatgttcttcacaagctatatatttttacttttgacataacaaccacttgctgaagtgcttagtatggctaaaaaggatccagatgctaatagtcaacaagatgggaaaaggccctgaaggcattttagaattcactaagggcaggctggcacagtggctcacgcctgtaatcccttcactctgggaggctgaggtgaggggttcaagaccagcctggccaacatggtgaaaccccgtcgctactaaaaatgcaaatagtagttgtgcat

SEQ ID NO: 448739 - DNA, 591 bp, Homo sapiens
ggcaatttcctcatctgtgaaatgggaccaatagaatattttttgcaggtttgttctgagcattcaagataatgtatgtgcaacatctggcacactgcgtgacacatagggaataggaaataacagctgtttgaaagaatcctaaggggctcagcaggttcttgtggcaaaactacattatctgctagggtagtccaggagggatcttgtggtttacctgcattatgtcagctttaaaatgaatttgcatttattgcaagttattttccatctgtgccagaggagtgactgttcctcaaargagatgttggctcctctgctgatgttcttcacaagctatatatttttacttttgacataacaaccacttgctgaagtgcttagtatggctaaaaaggatccagatgctaatagtcaacaagatgggaaaaggccctgaaggcattttagaattcactaagggcaggctggcacagtggctcacgcctgtaatcccttcactctgggaggctgaggtgaggggttcaagaccagcctggccaacatggtgaaaccccgtcgctactaaaaatgcaaatagtagttgtgcat

SEQ ID NO: 448740 - DNA, 592 bp, Homo sapiens
tgcctttctatgcaaagatttatcttggttctatccaaaggaattggtcagatcctgtcctacggtggctagcaataaaagagggtggggtagtggtatctaaaagaccttcaaaagtacgcaggcggtgtgtgttcctgcacaaagagaatcagataagaatggtttctgctctgaagagtttacaatgtaagatatagcactgaactaacactattccagtggcaccccagtgaatgagcaaaaagacaagttcactcctagaacacatcctgggagtcttgagtgaaatcctcttctccctgcagggttgcattttattatctatactggagagtgttgatggatgcggtaggaataaggagcatgaagatactgggtccaagaagaatttcaagtaytgccattccaaacagagagggacaccctcagtgctttgcctatttaggtgaggcagtcagaagagaatctgaaggcaagacaatcagttgcacacgtctgtcaggctgaatacatttcctatcttacctaaccaagatgcagaatgagccaatagcccacattcagctaatataatcaaatagttcttgga

SEQ ID NO: 448741 - DNA, 581 bp, Homo sapiens
tctctctggtcaaactttaaaccaggctttctcaacagcagcaggactgccattttgggccagatggttctttgttgtggggaactgacttgtgcattatgtttagcagcgtccctcgcctctaccccccagatgccagtagtaccagttgtgacaaccaaaaatgtctgcagacatggccaattgttactgggggacaaaattgccccccagttgaaaatcactgttttagactgaaagtcttcatagacaggaaaattggtgctcagtcctcaagagctgactaaaattatgtattattatctgatactttgaaaagtaggatgcytgaatattttcagcaagagaaccagcttctttcccacaactttaaattctatgtgtacaatattgtttgggtgtcacatataccagctgagactagtcaaaattagctatatgtataatactttatgccttacacataatgcatagactagcaaaagaaaatgttttcatttacaagctttgaagataggtgattcttaagaatatagaatatggtagtgccttcatgtagaatcatattaattcaacctaac

SEQ ID NO: 448742 - DNA, 581 bp, Homo sapiens
tctctctggtcaaactttaaaccaggctttctcaacagcagcaggactgccattttgggccagatggttctttgttgtggggaactgacttgtgcattatgtttagcagcgtccctcgcctctaccccccagatgccagtagtaccagttgtgacaaccaaaaatgtctgcagacatggccaattgttactgggggacaaaattgccccccagttgaaaatcactgttttagactgaaagtcttcatagacaggaaaattggtgctcagtcctcaagagctgactaaaattatgtattattatctgatactttgaaaagtaggatgcctgaatattttcagcaagagaaccagcttctttcccacaactttaaattctatgtgtacaatattgtttgggtgtcacatataccagctgagactagtcaaaattagctatatgtataatactttatgccttacacataatgcatagactagcaaaagraaatgttttcatttacaagctttgaagataggtgattcttaagaatatagaatatggtagtgccttcatgtagaatcatattaattcaacctaac

SEQ ID NO: 448743 - DNA, 571 bp, Homo sapiens
gtagaaactcccacatcaatgtccasttctctgacttttagtccagtgctctttctgtaacactctgatgcccattcgtattccattaagtttttagtccagagaatttccccccagaatgtagccttgggaagaataaataaatagatgactagtggggagatatcaggtttgggattcctttaggtggaagagtagtgcttggatcggaaggacctgatcttgaatcttagctccacccctgactaggtagctgtgacctgggcaagttacttttctgagacctacttctctcctttataaaatcaggatataatcccattttgcctggtctttgtgaggatttagtgagtttaaagggcttgccaaggcgcctgccctgtggtagaagatactctaaaatgagtaggaaatggttattgttagataagaggtcctggagattagcttgatctccctcacagttggtctgccttttgccagccattctttcactctcctgtgagggtgtgtattttttaagaggagaggaaactgcaccctccaacattgctggttcccttccccagga

SEQ ID NO: 448744 - DNA, 571 bp, Homo sapiens
gtagaaactcccacatcaatgtccacttctctgacttttagtccagtgctctttctgtaacactctgatgcccattmgtattccattaagtttttagtccagagaatttccccccagaatgtagccttgggaagaataaataaatagatgactagtggggagatatcaggtttgggattcctttaggtggaagagtagtgcttggatcggaaggacctgatcttgaatcttagctccacccctgactaggtagctgtgacctgggcaagttacttttctgagacctacttctctcctttataaaatcaggatataatcccattttgcctggtctttgtgaggatttagtgagtttaaagggcttgccaaggcgcctgccctgtggtagaagatactctaaaatgagtaggaaatggttattgttagataagaggtcctggagattagcttgatctccctcacagttggtctgccttttgccagccattctttcactctcctgtgagggtgtgtattttttaagaggagaggaaactgcaccctccaacattgctggttcccttccccagga

SEQ ID NO: 448745 - DNA, 621 bp, Homo sapiens
aatattctagttctgagcaattatcatgcaaatcctgccaggtgacgggaataaataggatactcatcactcggaggtttcctttttgggaaagtaagaccaagggagctaatcaaagccaagcaccatgcacccaaatcttagcaagcataactatagccaccagttatctgggtatatcacaaggcctcctttcctctcccttgttggaggacgactcacttccacagtttcaccttagcatttggcttatgacaaggagtccatgcaacccccttagaggcacatttttgtcccaaacttaattccaagcttcgggtcaaaaccctaggaaggataactggatctaagggattcagaggcagatgacaacagaggttaaaaggcacactgcaggtgagtgtggctgattgctgccgattaagccaagcccaagcttcctgcttcatggataaaggccatgttaatatccatggcataaatgaggtctagggaactccaaggctactgacagcaggcaggatagaggcacaggtgagagccrataattcctattctcaaggccctccctgcttcatgagtgcaagccactttagcactcatgacgggaccagccaaggt

SEQ ID NO: 448746 - DNA, 619 bp, Homo sapiens
tcgggtcaaaaccctaggaaggataactggatctaagggattcagaggcagatgacaacagaggttaaaaggcacactgcaggtgagtgtggctgattgctgccgattaagccaagcccaagcttcctgcttcatggataaaggccatgttaatatccatggcataaatgaggtctagggaactccaaggctactgacagcaggcaggatagaggcacaggtgagagccaataattcctattctcaaggccctccctgcttcatgagtgcaagccactttagcactcatgacgggaccagccaaggtcaccaggactcagggatgcaaggatggaagagtgaaagaggacgctctttcctctctccctcatgtaccctgggtatctgccaagagtatctgctaggaagagaaggaaaccagggacgcctgctcccctctttctagataggtagccattcatcttcagtccgtacccctttagaatgcatcctgaacctctggggctcctttgaaaaaataccctttttycccctctctcttcctctgtcctctcttcacagataggtaattgtgtccctatactatgggacactcccctcagatgcatccttcaaattg

SEQ ID NO: 448747 - DNA, 602 bp, Homo sapiens
aggcattctggcattctagactcttcctgcattgccagcttcatctctccatcaccatgtgctctgcctaatttcccaaatattctgttccctgcttctttccaggtctctgtttaccctgcttctccagcctgagttccttttttttctccattctgcttgttgaactcctgccaaactccgattttgacatcaaagcccaccttgaatgctgcttgtcgctaaagccatcgctggcatttccagtaggtattgcagtactttggatctctatcctagcaccttccctgaattagtatgtgcatgctccacttccctgactagaaccaatacttctcaagggccacagagccatccccttcaagagaatttggacaagaggaaaatgaggtgaatcttctcagtgttaaattatcaaatcaactcaatgggccagaaaagtcatatacaaagaccacttaagtagtcaaaataattcttggttcagagtgcaacttgattgcmgttgtttttaaagcagcattcatcaccctgtaatctggaggtgagggaggtgtgtttgtttggaagagttcattatcctatcatatcttccctttggt

SEQ ID NO: 448748 - DNA, 558 bp, Homo sapiens
atctggaggtgagggaggtgtgtttgtttggaagagttcattatcctatcatatcttccctttggtggtttgcatgatgagttagcctattcaaggctctgagaagtgctgtaataatgagcccttttcactttgttgaatctaatatttcttgaatttatgacgttcttttatttttcatagaacactatgaaacttttattttttcataggacattgtcaatatctactggactaaagaaattctctactaatcagaaaaggaattggtctgtattgaagctggaaagaaaatcagaggagccaatgctgtcagagtgcatccaaggaccatttaaagatgtcctggccggaggtctgggctgtcaggtcctgccagcaggtagattccttccagagacattccttgacctgataccatcaaatcactttagtargacaagtaactttccttattctcatttcatgcttgctagacaactgattatactttagttttggaagtaaatttcttacatgaaggaaataatctggtctcaggatgggatgtttaaaccc

SEQ ID NO: 448749 - DNA, 593 bp, Homo sapiens
aaatgctatggaaaaataaaaatgaaatttaaaaaatgttcaagaaagccacagggaggtaagaaaaaccaaacagaaaaatggaaagcaaagaggataaacagaaaacaaaaaagaaaatggcagaattaagctctaacacataattaattacattaactataaatggtctagatatacaaaataaaagagattggcagggttgtttaacaaacatgactaaattatattctatctgaaggaaactaacttcaaatagaattataaatgtatgataaaggatatattatgcaaatattaaccaaagaaaacaagagtaactttattaatggtagataaagtatacttcagaacaaagacaattaccagagatagagatattatataatgacaaaagggtcaatctattaagaatagcaattttaaatgtgtatgcatcgaacaaaaaakctgcaaagcatgtgaagcaaaaactgatataattgaagggagaaattttaaaaagtctacaagtatagttagacacatcaacccctctcttgacaaataatagaacaactagacagaaaattagcaagaatatagaagaactc

SEQ ID NO: 448750 - DNA, 522 bp, Homo sapiens
ttattacctggagaaaatattttcaaaccaaaaacccaacaaggactactttttagaatatrtaaagcactctcaaactcaacagaaaaaacaacccaatcagaacatgggtcaaatatatgaagaggcattttactctaagaggatacatggatggcaaataagacatgaaaagacgttcaacttcattagccaatgggacaatgcaaattaaagccacaatgaaatttcactacacacccaccagaatggctaaaattgaagaaaagtaataacactaaattctgaagaagattcagagaaacttgaccactcatactttgctgatgggaatgcaaaatggtacagccactctgaaaaaaatagtttggcagtttgttaaaaaaactaaacagggaactaccatatcacctagcaattacactcttggacatttatgctagagaaataaaaacatattcatggaaacacctgtctgtaaatgttattgcaactttgttcataacagttaaaaactggaaa

SEQ ID NO: 448751 - DNA, 291 bp, Homo sapiens
ttagtttacctcacctctccttcattccttaaggagctagagaccctttgacaacagatttgagaccagatgcagctcttgccttcttctgccttctctcagtacaaatgaacacttccattaacacgcataccatggtagtaaaaaccccaagattcttattccaggcgtgwtgtacaatttttttcaagtcacgtctgataataataaaattctcagatgggagtgtaatttggatgttttaacaaaacatttgccccaggttgtgacctgtattgattgctctgcctt

SEQ ID NO: 448752 - DNA, 593 bp, Homo sapiens
cctgcttcctagctgtgtgccctaagttctaagcctcaacttcttcatctgtaaaggggggacaataatagtactgaaaacatatggttttcatgaggatttgctgaaataaagcctgtgctttgctttcayagtgcctggcacataacagcccaagaatttagtgatcatcatcatccacatctctagctttgggaaaaggatttggagcaaaaagaagagggattttcatactttgaccataaatcatagcattgtcagatttagtaaatgaaaatacaaatacatttatgtgttgtttatctgaaattcaaatttaactgggtctcctgtacttagtatggcaaccctattgagtctcccagaagcgggtctggattgcctcctccgtcttggtcccaaactagaacagttgcagggtcagggaggtctccagtgaagcagggttgtgggggcaaggaagccctgcaccctgactggccactcatccagcagcctggaggctgaaagctctgaaggagggacgattcgggtgaagggagctgcccaggcagaggctgcgtgtgtgggggggcagttggagggggggaccc

SEQ ID NO: 448753 - DNA, 557 bp, Homo sapiens
gggcaccctatgatgggggtgagggtgggaggaaaatgaaaaagactacagtgggaggattggaagaagttgtttgtgtgggtttagaaaactaaaaaacaaaattattaaaagagacagamatagagaagtctttgctggattagcaccaactaaagagaaaaaaaatcaggccaagctttaaatcacctcttctgggaagtgtttccggattcattcgcccaatgtgggccatttagttttcatcttccctgtcttgtctggaccatttgaccctggctctggggacgacattcacttccagttctcctcctttgtttttctctgttccttttgctaactcaagacatggagcagatgctaaaataataattggctgccctgtccctcccttaccatcttattatgtggcatgtaattgtttatatgtccattttggttaattaaatgaactatataatgtgtgtttgatttccttttttctttttgttttttgaggcagggtcttgctctgccacccaggctggagtgcagtggtgtgatcatagctcaccata

SEQ ID NO: 448754 - DNA, 593 bp, Homo sapiens
tctgactttgttcaaattagtgatgtgcaacccttgaggaagcctgatgcattaaaactggatttacacaaaatcggtagtataaggtgggggattaaacactctgcagagccatttgctatttacactcattatccaaataccttcaatgtaaaactcaaccaaaagaagtagttttaggcaggktgcattggctcatgcctgtaatcccagcagtttgggagaccaaggcagacagattacctgaggtcgggagtttgagaccagcctggccaacatggtgaaaccttgtctctagtaaaaattcaaaaattagccaggtgtggtggcacacacctgtagtcccagctacttgggaggctgaggcaggagaatcacttgaaccggggaggcggaggttgcagtgagcagagatcacatcactgcactccagcttgggtaacagagctccgtctcaaaaaaaaaaaaaaggagtagtttatttatttaattttagcttcggggtacatgtgaaggtttgttatgtaggtaactcatttcatgggggcttgttgtacagattattttgtcatgcaggtatttaagcctagtac

SEQ ID NO: 448755 - DNA, 580 bp, Homo sapiens
taaaaaaaaaaataggtaaggcaacctctttttgagcatgataatttcttggagggatgttattggctctgtcaatctagattggttttttcacattgtctagattttgtgttgggggtgcggggatctcctctccttcctggttgagggcttggagcagggcagcagccctgttcacatttatgttcccttgattctcaatcttcaatatggcccttctcttctcatctgcttttttgaaatgcacacctcctgccctccagcttccagttctgtagagctcagctagttcagacaaaaaggttggatcaaactgattcccattaaggtgtggacaactgacacctgcccctaccctagtcctcttggatttaaaaagaggctgcttgttgtccaagtatatctttagtgtatagaattccaggtaatagatgaagagaattgaaccattctcctgatcacagctgggggagtttggtggkgctttttaaagggagaaggagagaagggatggctattcctatgctgacttgtaatgtctcctcaaatggtgagaacagggcattgttcaagaacaagc

SEQ ID NO: 448756 - DNA, 578 bp, Homo sapiens
gatatgaatcttggctgcaggtgctggtgaaggatggtgaggttgacaaacctacatcaaacacacctccgttctaggggagccatcactcacctctctgcactctggtggcccatgctaatgagatcccagctcatatacaacccctgcccaaaagctggggcccagcctctcagcagacagagacagagtagtccttggaggaactatgaaggagaccgcgctcagctgtatcttctccctactctccagtcygcatttggagtggcgtttctgctaccttcctctgcctctgcgtcatcttcttaattccttgcctagggcatggcctctctcaaatgactaaataaatgtggttgagtattgcatcatgtgttcttcattcctcctggtggctgttatatttacaaggagaccccaggcataagacaaatgcttaacctaaggaataaatgtttcattgtcacatttcaagcacctactaggaggtggtttggaagggatattgacagcccttttgaaaatggaagttccatcacctatttactgataggtggtcctgaccatcagctgaaagg

SEQ ID NO: 448757 - DNA, 546 bp, Homo sapiens
gacagcaatgatgatgacgagatgatgatacaagctaacatctgacaagtgcttgccaaacaccaggcacgacattaagagtttacatctacatgggcgcagtggctcacccctgtaatcccagcactttgggaggccaaggcgggtggatcatgagatcaggagattgagaccatcctggctaacacggtgaaaccctgtctcaactaaaaatacaaaaaagtagccaggcgtggtggtgggtacctgtagtcccagctactcgggaggctgaggcaggagaatggcgtgaacccgagaggtggagcttgctgtgagctgagattgcaccactgcactccagcctgggtgacagagtgagactccgtctcagaaacaaacaaacaaacaagcaaacaaaaaggktttacatctacaagctcgtctactcccatcagctctgttggtgggcactcttgttattcagaaatgaagacacccagcctcagagaggttcaataacttacctatattgctaagaaataagcattgatgggagctgcccta

SEQ ID NO: 448758 - DNA, 546 bp, Homo sapiens
gacagcaatgatgatgacgagatgatgatacaagctaacatctgacaagtgcttgccaaacaccaggcacgacattaagagtttacatctacatgggcgcagtggctcacccctgtaatcccagcactttgggaggccaaggcgggtggatcatgagatcaggagattgagaccatcctggctaacacggtgaaaccctgtctcaactaaaaatacaaaaaagtagccaggcgtggtggtgggtacctgtagtcccagctactcgggaggctgaggcaggagaatggcgtgaacccgagaggtggagcttgctgtgagctgagattgcaccactgcactccagcctgggtgacagagtgagactccgtctcagaaacaaacaaacaaacaagcaaacaaaaagggtttacatctacaagckcgtctactcccatcagctctgttggtgggcactcttgttattcagaaatgaagacacccagcctcagagaggttcaataacttacctatattgctaagaaataagcattgatgggagctgcccta

SEQ ID NO: 448759 - DNA, 611 bp, Homo sapiens
atgctcaagtttggagtacaaatgaattttttatccaggtactgatcatagaacctgataaagcagtttttcaatccttgcccccctccttccttccccctttttgtatccctcagtgtctattgttcctgtcttatgtccatgtgtacccaatatttaactcccacttgtaagtgagaacatgcagtatttggttttctgtttctgtgctagttcgcttagcatgatgacctctagctgcatccatgttggtgcaaaagacataatttcattctttttttatagctgtgtagtattccatggtatatatgtcccacattttctttatccaacccactgttggataaaggcacctgggtcaattccatgtcttagctattgtgaatagtgctatgatgaagataygggtgcaagtgacattttagtaggactatttattttcctttgggtacatacccagtgatggcattgctgggtcaaatggtagtcctgctcttagttctttgagaaatctgcaaactgcttttcatagtggctgaactaatttacattcccactaacagtattaatattctttctcggttccagcaccctatccagggtcccatatt

SEQ ID NO: 448760 - DNA, 529 bp, Homo sapiens
tgtctacttgtctgctattggcttgtaggaagtaatgagtattgcttttctagttggaaaaagaaaatctaaggaagcatttaaagaaacaataggggcgaatgaaagatgaggaagatcttctaggatttctaaatccctcaaatttatatgtagcttttctttagatgtatgggtttatttctggattctcaattctattccactggcaagtatgtctttccttatacaagttccatactattttgatgastgtacttttgtagcaagttttgaaattggaaaatgtgagtataccaactttgctcttgtttttcaatatcgttttggctattcaaggaccctggaaaatttcatatgagtttgaggattggctttttcttctctttgagatggagtctcactctgtcgcccaggctgctggagtgtggtgttatgatctcagctcactgcaacctctgcctcccagtttcaagcaattctcatgcctcagcctcccgagtagctgggactacaggcgtgccaccat

SEQ ID NO: 448761 - DNA, 552 bp, Homo sapiens
ctaacaggtatgaggtgatatctcattgtggttttaatttgtattttgctgatgctatggtctgaatgttcatgtgtgccycaacatttatatgttagaatctaaaaccgactgtgatagtattaagaagtgggttttttgggaaatgagtaagtcatgagggcttcaccctcatgaatgggattaatgacctcataaaagagaatcaaaggaccgcccttatccctttcttcatgtgagcacacagccatttttgaagcacagaacaagtcttcatcagacacagaatttgctggcacctggattttggactttccagtcttatgaactgtgagccatacatttctgttgtttataaattattcagtctaaggtattctgttacagcagtaggaacagactgagacatctaatgattactgaagttgaacattttttcatatacctgttgaccattcatatgtcttattttgagaaatgtctatttaggtcctttggctcactttaaaatcagtcactggttctcttactatagagttgtttgagtttttt

SEQ ID NO: 448762 - DNA, 552 bp, Homo sapiens
ctaacaggtatgaggtgatatctcattgtggttttaatttgtattttgctgatgctatggtctgaatgttcatgtgtgcctcaacatttataygttagaatctaaaaccgactgtgatagtattaagaagtgggttttttgggaaatgagtaagtcatgagggcttcaccctcatgaatgggattaatgacctcataaaagagaatcaaaggaccgcccttatccctttcttcatgtgagcacacagccatttttgaagcacagaacaagtcttcatcagacacagaatttgctggcacctggattttggactttccagtcttatgaactgtgagccatacatttctgttgtttataaattattcagtctaaggtattctgttacagcagtaggaacagactgagacatctaatgattactgaagttgaacattttttcatatacctgttgaccattcatatgtcttattttgagaaatgtctatttaggtcctttggctcactttaaaatcagtcactggttctcttactatagagttgtttgagtttttt

SEQ ID NO: 448763 - DNA, 552 bp, Homo sapiens
ctaacaggtatgaggtgatatctcattgtggttttaatttgtattttgctgatgctatggtctgaatgttcatgtgtgcctcaacatttatatgttagaatctaaaaccgactgtgatagtattaagaagtgggttttttgggaaatgagtaagtcatgagggcttcaccctcatgaatgggattaatgacctcataaaagagaatcaaaggaccgcccttayccctttcttcatgtgagcacacagccatttttgaagcacagaacaagtcttcatcagacacagaatttgctggcacctggattttggactttccagtcttatgaactgtgagccatacatttctgttgtttataaattattcagtctaaggtattctgttacagcagtaggaacagactgagacatctaatgattactgaagttgaacattttttcatatacctgttgaccattcatatgtcttattttgagaaatgtctatttaggtcctttggctcactttaaaatcagtcactggttctcttactatagagttgtttgagtttttt

SEQ ID NO: 448764 - DNA, 552 bp, Homo sapiens
ctaacaggtatgaggtgatatctcattgtggttttaatttgtattttgctgatgctatggtctgaatgttcatgtgtgcctcaacatttatatgttagaatctaaaaccgactgtgatagtattaagaagtgggttttttgggaaatgagtaagtcatgagggcttcaccctcatgaatgggattaatgacctcataaaagagaatcaaaggaccgcccttatccctttcttcatgtgagcacacagccatttttgaagcacagaacaagtcttcatcagacacagaatttgctggcacctggattttggactttccagtcttatgaactgtgagccatacatttctgttgtttataaattattcagtctaaggtattctgttacagcagtaggaacagactgagacatctaatgattactgaagttgaacattttttcatatacctgttgaccattcatatgtcttattttgagaaatgtcyatttaggtcctttggctcactttaaaatcagtcactggttctcttactatagagttgtttgagtttttt

SEQ ID NO: 448765 - DNA, 583 bp, Homo sapiens
tctgtcaatgcttggtcatgtattttggagctctgttgtttggtgtgtatatgtttataattgctacatattcttgacgcatygactcctttgtcaatatataatgtccttctttgtctcttgtaatagtttttgacttaaagtctattttgttagatattagtataacctccttaactttcttttggttactatttgcttaaaatattatttttccatcctttcactttcaagctatttgtgtctttgaatctaaagtgagtcacttgtagacagcatatagttggattttttaaaaaaatctatttggtcaatctctgccttttgattatagaatttaatccatttatatttaaagtaattaattacaagggaggacctacttctgccaatttgctatttttctgtatgtcttatgtctttgtggttcctcattttctttattactgtcttcttttgtgtttaattgattctttacactgtaacattttgatccccttcacatttccttttgtgtatttttaaaaagatattttcttagtgattatcagagaattatgattaacattatacacttataaaa

SEQ ID NO: 448766 - DNA, 568 bp, Homo sapiens
ctacttctgccaatttgctatttttctgtatgtcttatgtctttgtggttcctcattttctttattactgtcttcttttgtgtttaattgattctttacactgtaacattttgatccccttcacatttccttttgtgtatttttaaaaagatattttcttagtgattatcagagaattatgattaacattatacacttataaaaatatagtaacagtatagttaaaattgatatcaacttagcttcaatagaatacaaaatctctgcttctaagcatctctgtccccaccttatgttgttgttgtcactamatacattttttattcattacattcatttggagtgttcaataatgtagatttataattattgttttatgcatttgtcttttaaattatgtgggaaataaaaagaggagttataaaccaaaatccagtatattggcttttatatttactttctagttaacttttctggagttccttaccttttcatattgctttgagttactgtctagtgcgctttcatttaagcctcaagatctaccttcatcatttcttaaagggca

SEQ ID NO: 448767 - DNA, 512 bp, Homo sapiens
ggagagaatccccaactacttttacaagacttgtgagggccttcggggtccagggtctcaccagctttccttgcctcactggcggcccctgcatagtgccccaagctccggtgtagatggttccccctgcctggaacacygtctcaacccctctcaccacattctctccatttcatcctttagacctttgttcaaatgtcctttgcctggggttctgctgagagcctggccaggccccatgtccgtgtcatgggcacctctcactgggccccagctctgtgtcatggacacttcttacctggctccatctgcctgtcatgggtgcttctaaccgggtacatctcccttttcgcatttgcctcagaagcagtttcacagttgtctgtgagatgagtggattcctttgtgtttccataaattctaaatttgatgtggtagagaccgtgtctgttttgtgcctggcacacagcagatattcggtaggtgctttattgagcaaataaacaaacacc

SEQ ID NO: 448768 - DNA, 582 bp, Homo sapiens
taaccatataacactgtaatatggggctgggtgaggatatagatctatttgcttctacgctaagtggcctcatttagtgctattttggggtctgctcttggtacttcctaggctgtctttatcatcgtcaatcacgtactgtgcctgcttcaaacaaatcttccaacatctgcttccccacacactgttgaaagtacattagtaatttaattttatgtaacacttcttccaactctmtagaaatcttgccaatgcagtcttgcccgctccccctgaggagccactttctcttctgcattctctgggccttctgtatcccttgtggacaatgcattgttctagaaggaagcaacctactgttttgggaagaacagggcccaaatcctgttactaacagtgtggctgtggacaaagtcctttgcctctttgagcctgagttaactctctgcactaacatgtgtctttcagggagagtgggaggcttaaatgcctgcatagagctgtcttttaacaaatgctagtttcctctcttgtttagaggcatgctccaccttctgccttacattgtggttggttccaggc

SEQ ID NO: 448769 - DNA, 604 bp, Homo sapiens
cccttctcccaagagggaataagattcagggaaccaacttcaaagcccatgcaaaatgagccagtctgctccatccctgtgggcacagtcaatggggcaagagcccccagggctgcatctccttccttcccagggaagccatgattgtgggtgactttcagtgtttcttagcatttgggcagtctcttgattcctttgcagaaggttttgttgtcagatcaagagcacctgctccctttatgcccarttggttgtatagattcagagggagcaggtggagggagaaagaagtggtgagaaaagccttgagaatggagataagggtgctcccagagagagggaaaagtggataaaagcctggctgtgctccctgcacctaagttccttaagattcttcccttcctgacaacaaatcttctttctccttgaatcaatttgggtgggccttggtacctgtcaataaataggctccaactaacttctgttttaaatccactggggtcacatggtaagttttttgagagtggaaccacatttctgttcttatcttcccctgaacacacaagtaatgctggaggcatagtatttgttggtttaatgaata

SEQ ID NO: 448770 - DNA, 602 bp, Homo sapiens
cctggtcctttaaatatgtcataagccccatttatggtgtgttctgcagcagttttgcaaacacaggaaaatccatttgaatccaatattctcagattgccctgttcatttggtagttagaatatattatcctcatagaytatttgagctcctggttttcagccctctctgaacctcctccagatcactgctagtgagacatttgggtaaagttgtaaatgcatttgctgtatcttttagcctaagtatttccagcaggctttatggagcttgtaaatatgaactgattttttttacatatgtgaatcagccttatttttgtctaaagtggactttatgaacctgcacgaattagaataaacactgaacccagcaatcagttctatatttagttcttaatagctaggccgagtgtgtgtgtgtgcgtgcacacgcgcatgtgcacgcatacagaatattaagaaaaaaattaaaggtgagtgcttctgtgatgtgtgaagctggttaacccatatatgtggcctggagagaattcctgggcaggtagaactagggccaatggctgagggatctctttctctgctgaaagtcactgtttcttt

SEQ ID NO: 448771 - DNA, 617 bp, Homo sapiens
gcatagtactattgagaggaggtattggttgaatattttagagctgtgttcactataattcattaaaaaaacaattaactagaaagggaaagatagagatttcccargatttctacaatgctgatgtgttacttttattagcaggtcaaaaaatatatttttagaaataatgactatcacagtgaaacttacacagtgattattgcatgccaggttttttttttaaaattctttctacatattaacttctttaatcctaacaaccagcttctggttaaaagatactatcattatctccagtttccagatatggatactgtggcacagaaatgttgactgttaataacttgcccaacgtcaatgtctggccaatggtagagattctgcccaagaagtcaggtgctagaatctaattctttttagccaaattccatatcactttctagactaaaagcctgggatagggagattgagacacagaaaggttaagtaacttgctgaagtcacacagctaagaagcaagggagcaggggatcaaactcagctctttctaggtccaacgaccgtacccttaggagttattcatgttttttctctttcctcattgagtttcctaa

SEQ ID NO: 448772 - DNA, 530 bp, Homo sapiens
agaactaaacttctcttatcaagaaacaaggaaagtcatgcctgttggttagtcagccaagcacacctgccacattaattatccacatacatgctgtggagcagaaacgaaaggtctgcctgcccacttttcaatggcacgggactctcagtccctccggggtttgttcacacagttgttggttacaccccatgccacatgaagagtccttccttttcaaccctctctcaaagcctgaggagtaaggcacatgctgtaattcttgatagaagcagcgagkgttacctgttttcttatcattttattgttaaatgcagcaaaagaaattttccatttattttattttattttattttaagacaaactcttactgtgtttcccaggctggagagcagtggtgtgatctcagcttactgcaaccttttcctcccaggttcaagtgattctcctgcgtgcccaggcctccagagtagctgggattacaggggctgagtcaccacgccaggctaatttttgtatttttagcagag

SEQ ID NO: 448773 - DNA, 617 bp, Homo sapiens
tctataaagttatttaaatgagtcaaagccaaataaccctgcctgccatgtttttgaataatgaaatagcaagcagtcttctttcccgatgattgatataactgtacatgttgtctttcataagtaccatgacaaccactagctaatctttcatatcagctttcaatataaattccaacacaaatatactagcttaccaacaagtcttttgagagttttaatagcacaatttgaaaggacagaaacaaatttttgctttactgcattttttagtttatttttttaaaaattagagataatataaaatcaaaatttaaaaaatcaaaaaataaaagaatgcaaaaacaaacaaatggaagttmtctgtctttctataatattcttttttaaattatactttaagttctggggtacatgtacacaacgtgcaggtttattacataggtatacatgtgccatgttggtttactgcacccatcaactcatcatttacattagtatttctcctaatgctatccctcccccatccccccagcccccaacaggccccagtatatgatgttcccctccctgtgtccatgtgttctcattgttcaactcccacttattagtgagaa

SEQ ID NO: 448774 - DNA, 617 bp, Homo sapiens
tctataaagttatttaaatgagtcaaagccaaataaccctgcctgccatgtttttgaataatgaaatagcaagcagtcttctttcccgatgattgatataactgtacatgttgtctttcataagtaccatgacaaccactagctaatctttcatatcagctttcaatataaattccaacacaaatatactagcttaccaacaagtcttttgagagttttaatagcacaatttgaaaggacagaaacaaatttttgctttactgcattttttagtttatttttttaaaaattagagataatataaaatcaaaatttaaaaaatcaaaaaataaaagaatgcaaaaacaaacaaatggaagttatctgtctttctataatattcttttttaaattatactttaagttctggggtacatgtacacaacgtgcaggtttattacataggtatacatgtgccatgttggtttactgcacccatcaactcatcatttacattagtatttctcctaatgctatccctcccccatccccccagcccccaacaggccccagtatatgatgttcccctccctgtgtcyatgtgttctcattgttcaactcccacttattagtgagaa

SEQ ID NO: 448775 - DNA, 636 bp, Homo sapiens
ttaatgcagtccattgctatcagcttagtgggtatttatgtgactgatttttctgagtctgtaggatttttatttcatcttttgaatattaaattgctttattcttctgttctctgatggtgagacatttttactgttcagtaacatctttcttcaaagaatattgaaggtaaagaaagaaaaatgaatgatatctaaaaaaactaaatgttgggttaaagtgaaaattgaagataatagttaagagatatatttttatattaattttagctgatgatatgttctttggctcacaacttaatttaaaatataggattttgacctgaatttaggttctatgaaaatggcagtctaaggaaaaaaaatgtagacagagcctgctgtaataattcctttttttttttttctgcctgggttttccctccgaagctcaaagatctttawgtctttgatggctttgcaaaagaagcaggcagagccctcctctgcctgtatttttttttaccatgccttctagccattctatgttttgatctgtgtttccatctgggcttactaacatagcaactctggcatgtagtccatccagtttattatctattgaaatacctactgcctgaagtgaatttattttgg

SEQ ID NO: 448776 - DNA, 610 bp, Homo sapiens
tagactatatgattgaaaaagttttttttttcatgagttaattctatttagatggtgtttgagatgtactttaatycattgatccattaatctatttgttcattcttctctttcacctatttgaaaatatatttggttccaggcacaaaagatgacctgtacctccaataaatttgtgagctgatatagaagagagatcatagaatgatgcaatgaattaaaatagtaaatgaggaagaaacttttacgagtggttagatattcagtgtgacctcactgtgggtgaggagagagggtgacaaagaataacacatagtaggaaagggccagattatgaggttcttttgtgctatagtccaggacatacagactttatgtaatagaaaagtggtctccaaagtttggtgcatgtccccagggtgaacgcaaattgactcatgggtcatttggtcttaggttgtgcttcctcagaggcagaccctgagaccagcgtgtaagcaaaagtcttctggggaagtgatcccagaaagcaacagtaagaaagctaggaagcaatattttacttcctagtaaatagggatgagaaggaattccataaacaatgttatat

SEQ ID NO: 448777 - DNA, 607 bp, Homo sapiens
tagactatatgattgaaaaagttttttttttcatgagttaattctatttagatggtgtttgagatgtactttaattcattgatccattaatctatttgttcattcttctctttcacctatttgaaaatatatttggttccaggcacaaaagatgacctgtacctccaataaatttgtgagctgatatagaagagagatcatagaatgatgcaatgaattaaaatagtaaatgaggaagaaacttttacgagtggttagatattcagtgtgacctcactgtgggtgaggagagagggtgacaaagaataacacrtagtaggaaagggccagattatgaggttcttttgtgctatagtccaggacatacagactttatgtaatagaaaagtggtctccaaagtttggtgcatgtccccagggtgaacgcaaattgactcatgggtcatttggtcttaggttgtgcttcctcagaggcagaccctgagaccagcgtgtaagcaaaagtcttctggggaagtgatcccagaaagcaacagtaagaaagctaggaagcaatattttacttcctagtaaatagggatgagaaggaattccataaacaatgtta

SEQ ID NO: 448778 - DNA, 631 bp, Homo sapiens
tacagggaagaaaactcaggtttgttctgaagaaaaatgattcacttgaagcaacttaagggggttataaaccttcccaaagacaaataactttgtgatgataaatacttaaactggtatcatagaaattaacacaaaattttgactgtcaggagtttttcatgtgctcaaaaaactggaaaaaaatatagtagcctaaagcaaaactgtcttacaaaataatataaataagtatatyggctaggctcaaaaaattctttcaattcttttgaataaacagcatgcttttcttttctactttaaatatgtcataactgtttttgacaattaatatttttcttctgtgcctgaattatgtaaactggatgtgtaaggtcctcaaggtccaggtaggcatttaggaagctacaaaaataatgaaataaatcaacaaagaaaccttaagtttctttaatcttcttggtttattttgaaaattacaaaaaataaattattttagcatcaattttgctattatgttattcatattttattttgctcaaaacaagtataaagttgcatgatttgcaaatgatacatgtttagaaagtatacagtggtgacacattactctataagctttatgatggaa

SEQ ID NO: 448779 - DNA, 631 bp, Homo sapiens
tacagggaagaaaactcaggtttgttctgaagaaaaatgattcacttgaagcaacttaagggggttataaaccttcccaaagacaaataactttgtgatgataaatacttaaactggtatcatagaaattaacacaaaattttgactgtcaggagtttttcatgtgctcaaaaaactggaaaaaaatatagtagcctaaagcaaaactgtcttacaaaataatataaataagtatatcggctaggctcaaaaaattctttcaattcttttgaataaacagcatgcttttcttttctactttaaatatgtcataactgtttttgacaattaatatttttcttctgtgcctgaattatgtaaactggatgtgtaaggtcctcaaggtccaggtaggcatttaggaagctacaaaaataatgaaataaatcaacaaagaaaccwtaagtttctttaatcttcttggtttattttgaaaattacaaaaaataaattattttagcatcaattttgctattatgttattcatattttattttgctcaaaacaagtataaagttgcatgatttgcaaatgatacatgtttagaaagtatacagtggtgacacattactctataagctttatgatggaa

SEQ ID NO: 448780 - DNA, 631 bp, Homo sapiens
tacagggaagaaaactcaggtttgttctgaagaaaaatgattcacttgaagcaacttaagggggttataaaccttcccaaagacaaataactttgtgatgataaatacttaaactggtatcatagaaattaacacaaaattttgactgtcaggagtttttcatgtgctcaaaaaactggaaaaaaatatagtagcctaaagcaaaactgtcttacaaaataatataaataagtatatcggctaggctcaaaaaattctttcaattcttttgaataaacagcatgcttttcttttctactttaaatatgtcataactgtttttgacaattaatatttttcttctgtgcctgaattatgtaaactggatgtgtaaggtcctcaaggtccaggtaggcatttaggaagctacaaaaataatgaaataaatcaacaaagaaaccttaagtttctttaatcttcttgstttattttgaaaattacaaaaaataaattattttagcatcaattttgctattatgttattcatattttattttgctcaaaacaagtataaagttgcatgatttgcaaatgatacatgtttagaaagtatacagtggtgacacattactctataagctttatgatggaa

SEQ ID NO: 448781 - DNA, 542 bp, Homo sapiens
gagaaatcatatattagaacatgacattgatttcattccaaaacaagcaagccgccttattggagaaacttttttggagccacttaagctgttttgtgcctttgagttaacaaaaaaatgcctttgttaacaaatgtcatccattctagaagtcctgatatgttttttactattttaaagcaagtcttgaaagaatggcagctgtgtcatttgcattctgaatgcaaatggacaaaaatatagatgtccctttagtgaagccaaatcttggtttgcacatatcgtgtgcacactgttgccatctaagaagaatttgtgattgggagctawttttggaaacaggaaaagatgtcagtgtctttgaaatggcaaaaagtttctttgccagggaaagtgtccactggaagacaaatcttggtgttctatgaacaggtggagcacctgtgatgcttggcaacacatctggtttggctgctttcttgaagaaaggcactccacatgtcataatgactcactgccttttacaccggcatgcaatttca

SEQ ID NO: 448782 - DNA, 609 bp, Homo sapiens
aaaatggcaaaaacttgagtttcctgatactcatgttcccagctgaggttgaataagacaacactctaccttctcatttaaattatcataccataagcaaccttgtgccatatttttcacacttttgtgcctttttttggtgcttttctgtttaaaatggtctccaagcataatgctgacatgcagtatagtgttcttaattgcagaaggctgcgatatgccttatggaaaatacatgcattagataatcaccttcttccaaacatgagttatagtgctgctggccttgacttcagtgttaatgaatcaataatatgtataaaataggtgtatctaaatggaaacatatataaaacgagcttatgtattgatcagttgagaaaaggtcctgactacaggtttgcaraaacctaattctgaacttcccctagcagcatggttcagtgtccactaattcattgttcactataacttcatataacctaactactgcaaataatgagactttcttatgtagtatttctgtcatacagatagacatagataacttcaagatcatagaaaatggtaaaatatagtgaaattcttagaaagtgattagtttttagg

SEQ ID NO: 448783 - DNA, 478 bp, Homo sapiens
caacctgcacaatgtcatctatcttttattcttaccacttattgctataaaagagtctctttttcctacttaaatctaattcctgtctcaatttcttgagaaatgtaggtattgaactttctccctcttgatatttcacctctctttcaaatagatgtttttccttcattaaaagaaaaatttargaaaaaagtctcaacctgactgtacatttctctacttatatattctttctctggttccctttagaagtgatctcatgaaaagttcttatgttaagattctccaattccataattcccatggcctcagataatattctctactccctgggcttccatagaactttatattccttactttcttctcaactctctggtattgtttttctgtcttctttggagattctttattctctctagccattagacattggtgcttcccaatactcaatcagaccctcatctcctcattctac

SEQ ID NO: 448784 - DNA, 533 bp, Homo sapiens
tgttagcagggggtgataaaatctaacttcttgccaggtttgctctgttgggaataaattacagctgggcaaatatggaatctgggaaaccagttaagttactattactgttttccaggtaagacatgagtatggcttatctaaggatggtggcagtgcaaatggaaagaattggtcagaatttagatatgaattgaaaataaaacttataggactagctgctagaattaatgtggtataagaaattaaaaaagtcatcaagaatgatacmcattattttagtctgaataattgaaaagtagagagaggaaattttcagaaattctatgtatgggggtgaagggaaagataacagaaactcagctgtgaatatattaagtttgtaatttctagattatattgtgcatatattaagtttttggtttctagatttcattcaagtagagatgtcaggtggacattggatatatgaatgaatcttttagtcagtggagcattttaagtttgagagtcatcagtacatattctaggtg

SEQ ID NO: 448785 - DNA, 560 bp, Homo sapiens
ccatatgtattcagaattcaacaaattgttttagaataaaacttctgattctggaacttcttagtgagcatcccagagataatagagagataagtaaccctataaagagacagactaagaaggatgaagagcctaaaaaagatagacaacctggttctgttaatttgaccagagaaaattagaaaatactattagagttttcaactatctattacaccaggtcatgagcctaaaacagccatttcaaattatacatgtaagaaaacttaggaaatttgtcragtattatcaggatgatggggggctccagaaatattccaaagtattggtcattaattagttcgttacactacacagatattcactgatgtccattaagcaccagacattgtttatggtgctgtagatatagcaagggagaggtaagtcaagatttctgctgtcttagaatttgtataattggaggtaagatattaaacaagtaagcaaggaaatgaccaaaataagtttacatagtaatatgtgttgttaaggcaaaaatattaaagtataacagaaga

SEQ ID NO: 448786 - DNA, 560 bp, Homo sapiens
ccatatgtattcagaattcaacaaattgttttagaataaaacttctgattctggaacttcttagtgagcatcccagagataatagagagataagtaaccctataaagagacagactaagaaggatgaagagcctaaaaaagatagacaacctggttctgttaatttgaccagagaaaattagaaaatactattagagttttcaactatctattacaccaggtcatgagcctaaaacagccatttcaaattatacatgtaagaaaacttaggaaatttgtcaagtattatcaggatgatggggggctccagaaatattccaaagtattggtyattaattagttcgttacactacacagatattcactgatgtccattaagcaccagacattgtttatggtgctgtagatatagcaagggagaggtaagtcaagatttctgctgtcttagaatttgtataattggaggtaagatattaaacaagtaagcaaggaaatgaccaaaataagtttacatagtaatatgtgttgttaaggcaaaaatattaaagtataacagaaga

SEQ ID NO: 448787 - DNA, 560 bp, Homo sapiens
ccatatgtattcagaattcaacaaattgttttagaataaaacttctgattctggaacttcttagtgagcatcccagagataatagagagataagtaaccctataaagagacagactaagaaggatgaagagcctaaaaaagatagacaacctggttctgttaatttgaccagagaaaattagaaaatactattagagttttcaactatctattacaccaggtcatgagcctaaaacagccatttcaaattatacatgtaagaaaacttaggaaatttgtcaagtattatcaggatgatggggggctccagaaatattccaaagtattggtcattaattagttcgytacactacacagatattcactgatgtccattaagcaccagacattgtttatggtgctgtagatatagcaagggagaggtaagtcaagatttctgctgtcttagaatttgtataattggaggtaagatattaaacaagtaagcaaggaaatgaccaaaataagtttacatagtaatatgtgttgttaaggcaaaaatattaaagtataacagaaga

SEQ ID NO: 448788 - DNA, 560 bp, Homo sapiens
ccatatgtattcagaattcaacaaattgttttagaataaaacttctgattctggaacttcttagtgagcatcccagagataatagagagataagtaaccctataaagagacagactaagaaggatgaagagcctaaaaaagatagacaacctggttctgttaatttgaccagagaaaattagaaaatactattagagttttcaactatctattacaccaggtcatgagcctaaaacagccatttcaaattatacatgtaagaaaacttaggaaatttgtcaagtattatcaggatgatggggggctccagaaatattccaaagtattggtcattaattagttcgttacactacacagatattcactgatgtccattaagcaccagacattgtttatggtgctgtagatatagcaagggagaggtaagtcaagatttctgctgtcttagaatttgtataattggaggtaagatattaaacaagtaagcaaggaaatgaccaaaataagtttacatagtaatatgtgttgttaaggcaaaaawattaaagtataacagaaga

SEQ ID NO: 448789 - DNA, 514 bp, Homo sapiens
ttagagttggtgtcaaaagtaacgatggtcttgtggagtattacgtaacatcacagtaggggtaaggaaaaataacccatttgacacacctgctaggcatcttgaattaaggcctaattatacgtcgttgcatgcctttttccaggtctackaggccgagctgtgtgtattacttccttctgcgttttcactatttccccagagtagactctcccacttgaagatatttaagggagcataagagagcatcatgataagcccaccattatagttgaagaagtagagtatatttgcaatttgtttcatttttaaaattcacacttgcacatatgctgtatgaaattcaagtatttataggggagatttgttatggtctatgaactctggtaagaaaatatgagataaggacaagaaaacaaatgtggatagctgtaaaacaacaacaataaaaaatactgctgtggaaatgttgctctttgggtttagaggagagctaatctaaggtagctggtag

SEQ ID NO: 448790 - DNA, 514 bp, Homo sapiens
ttagagttggtgtcaaaagtaacgatggtcttgtggagtattacgtaacatcacagtaggggtaaggaaaaataacccatttgacacacctgctaggcatcttgaattaaggcctaattatacgtcgttgcatgcctttttccaggtctactaggccgagctgtgtgtattacttccttctgcgttttcactatttccccagagtagactctcccacttgaagatatttaagggagcataagagagcatcatgataagcccaccattatagttgaagaagtagagtatatttgcaatttgtttcatttttaaaattcacacttgcacatatgctgtatgaaattcaagtatttataggggagatttgttatggtctatgaactctggtaagaaaatatgagataaggacaagaaaacaaatgtggatagctgtaaaacaacaacaataaaaaatactgctgtggaaatgttgctctttgkgtttagaggagagctaatctaaggtagctggtag

SEQ ID NO: 448791 - DNA, 633 bp, Homo sapiens
ttcccgtgggctctttttgttgggggagggagagagaaaaggctatttttataacgttttgcaagtcaaatgacaaagttcagaagagggaaaatgctggaaaaaaatcaatgcaatgtccttatttggcagcgcttagtttggctaattactggttacaggtaggaaacacagctaatggggcttagcaacagatggggagccagcacaaagctgtaggttcttcctctgcctcggctgtgacttcctgcagtgttgaacaagtcattcaacctgtttttgattcacttccctttcactaaattatagataataatgcctactagctatgtcatacattgttgagaagaatagctcataggaagatcacaaaacactttcaaagagttgaaatgctctataggcacaggctccactgaatcaagctgaacaggaggcaatgcccctttctgtcaagtcctctgttccccatttaaaaccaaaacgaatgcaaatctgaaagtgactttgcatttgccatgcatcccttctgcctctcaggcattctatcactaactgattgtaactatgcaaatgatactgttatctgtggcacacactgtcrtttgtactgcagcaccagcagtttaaaat

SEQ ID NO: 448792 - DNA, 603 bp, Homo sapiens
ctgcaggattttctggatgttaatgagcattggcttcaacttcaagtcaccagctgcattaacccctagtcagggaatcagcctgtcctttgaagccttgaagccagccattgacttctccttttgattatgaaagccctaaatggcatcttctttcagtattaggctattttgctaccttgaaaatttgttgtttagtctagccaccttcatcaattacatcagctagatccactgagtaacttgttacaacttctccatcagcaggtgccgcatcaccttacacttttatgttatggagttgacttcttttcttaaaagtcatgaaccaagctctgttagcttccaacttttcttctgcaggttcttcatctctctcagccttaaagtattgaagagagttaggaccttggatcaggcttttgtttaaggaagggcacatctggtttgattttttatctaggscactcaaactttctccatatcagtaataagactgtttcactttctatcatttctttctgttcactggaggggcacttttaatttccttcaacaaattttgtttacattcacaacttaggtaacatgtgcaagaggcct

SEQ ID NO: 448793 - DNA, 581 bp, Homo sapiens
  misc_feature (1)...(581): n = A,T,C or G
taattaaacctcttttctttagaaattacccagtctcagatatttcyttatagccattcaagaacagcctaatacaggtattaaacaactatcaaaattttgaaatatgtttgaaaataaatcaagagtaaaattaaaggaaagtgcacctttattcagatcttcaaaaagaacagagccagattgctaccctggaataaaaatgattcatttagggagtcaggtgagcaaataatgatgagaggattatttgtctaagaacattagtccacaagaaagactgagcatcccattattctttcatttcaatttttccaacttttctaattttacaaagggtgatnggcagttcaaaaatcccagacccaaaccaattactgtgggggaaaaaatatttaaaaatcagatggcatacagtaaatcttataatctaagttgaaaataccagcctagatgctgggtattttcattttctagtgatccttgcaccatcaaataaacacattcttcagtgtgggtacgaattatacaaattatgtgaattggaaggtttatgtagatattgttattacccgaaaggt

SEQ ID NO: 448794 - DNA, 581 bp, Homo sapiens
  misc_feature (1)...(581): n = A,T,C or G
taattaaacctcttttctttagaaattacccagtctcagatatttccttatagccattcaagaacagcctaatacaggtattaaacaactatcaaaattttgaaatatgtttgaaaataaatyaagagtaaaattaaaggaaagtgcacctttattcagatcttcaaaaagaacagagccagattgctaccctggaataaaaatgattcatttagggagtcaggtgagcaaataatgatgagaggattatttgtctaagaacattagtccacaagaaagactgagcatcccattattctttcatttcaatttttccaacttttctaattttacaaagggtgatnggcagttcaaaaatcccagacccaaaccaattactgtgggggaaaaaatatttaaaaatcagatggcatacagtaaatcttataatctaagttgaaaataccagcctagatgctgggtattttcattttctagtgatccttgcaccatcaaataaacacattcttcagtgtgggtacgaattatacaaattatgtgaattggaaggtttatgtagatattgttattacccgaaaggt

SEQ ID NO: 448795 - DNA, 601 bp, Homo sapiens
aatgttgatagctataatataaattgtctaattaacttagcttctgatttatacaatgccttattaataataaaatgacataactattaaataaataattatcttttaattttaaataattctgccttttacaaacttaattttgtaacctttgaaatccttaaaccatgtacttaactgactgactgactaccatggtgttactttttaaaatcaccatagatttctcatttatatttgtcagttctcattgttattggtcacaatagtttatatgcaagttactttattataaaaacagtgcatacacattggagaaaatctgtagtatcaaaktataaattttaaatcacccatagtctcaatttctctaacaccccagatataactatcttgaacattctaatagttttttagttctgtgtttctgtgtgtatatatgtacatatattaatgttagtattggattccaactgcatgtccccccactcctttgtttttcctattggagttttagtgatttttaaaaactgattggtaatagttactatatctgctttcccctgctatttctcaaagtgtgatttccatgtgttaaaat

SEQ ID NO: 448796 - DNA, 558 bp, Homo sapiens
ttagtttgtttcctcactgctaataaagacatacctgagactgggtaatttacaaaagaaagaagtttaattcgactcacagttccacgtgcctggggaggcctcacaatcatggtggaaggcgaaaggcaagtcttacatcacagcaggcaagagagagaatgagagccaagcaaaaagggtttccccttatcaaaccatcagatctcatgagactcactcactatcatgagaacagcacaggaaagacccacccccataattgaatcacctcccaccagattcctcccacaacacgtgagaattgtgagagttcaaattcaagatgagatttgggtggagacacagcgaaaccatatcaggatsttacttgttgctcaccctggagcatagtgatgctattataactaattgcagctttggactcctaggccctagtgatcttcctgtctggcttcccaagtagcagggactacaggcatgcaccacgacatctggctaattacataaaaaatttttacagataaaatcttgctatgttgcccaggctggtttcaa

SEQ ID NO: 448797 - DNA, 527 bp, Homo sapiens
tggcatgatctgacttaggtgtgacattggcagccagagagtcatcttagtacagcacagctctaatcaaccaaacttttctccagcctttggcgactccctactgcctaaaaaagtaaaaattcattctctctaggctactctttagggaccttcagaatcttgcagtaatctgcccctgcttttaacaagcctaaaacactatttaaacttaaatatttgctctttcctaaacattgccaagtcactggcctatatgactctgctctacaccttttytccatttaaaatggcccgtctacttcctttaatgtcatcttgaacctcatctcctccagtgtaatctttgaagctctcagttagaaacaatctgcatcacctaaagaggcttgcacttcagccccacctacatcaaatatcttctttttccctttatcagaattattatcctcaaaccttagctctttcactattgagtcaaaaccctgctttattctgctttgtatttatttcagtatgttgaacct

SEQ ID NO: 448798 - DNA, 478 bp, Homo sapiens
gcatgttccttttgtgacaacctttgtcctttgagtcttaacacaaaatcagattgtcctcttctttaatcctatatatattttttgagatagagcctcactctgtatctcagactggagtgcagtggcatgatctcwgctcactgcaacctctgcctcctgggttcaagtgattctcatgcctcagcctactgagtagctgggattacaggtacacaccgtcatgcccagttaatttttgtatttttagtagagacagggtttcaccatgttggccaaactggtctcgaacttctgacttcaaaagatctgcccatgtaggcctcccaatgtgctgggattacaggcatgagccacagtgcccagcctaatcatatttttaataaaattgtattttatttgttggataactagttgagaagcagggaaggatcatagttttacagattgaagacaacaaaattacttcactcaacta

SEQ ID NO: 448799 - DNA, 478 bp, Homo sapiens
gcatgttccttttgtgacaacctttgtcctttgagtcttaacacaaaatcagattgtcctcttctttaatcctatatatattttttgagatagagcctcactctgtatctcagactggagtgcagtggcatgatctcagctcacygcaacctctgcctcctgggttcaagtgattctcatgcctcagcctactgagtagctgggattacaggtacacaccgtcatgcccagttaatttttgtatttttagtagagacagggtttcaccatgttggccaaactggtctcgaacttctgacttcaaaagatctgcccatgtaggcctcccaatgtgctgggattacaggcatgagccacagtgcccagcctaatcatatttttaataaaattgtattttatttgttggataactagttgagaagcagggaaggatcatagttttacagattgaagacaacaaaattacttcactcaacta

SEQ ID NO: 448800 - DNA, 602 bp, Homo sapiens
gaaaccatgatgttaaaactggatccaatattctagttgaggtctgactagtactaaatatgtgaacaatatttttatattaattcaatatagaaatatgtagctggcatcttggaagaaggatttggtggtgaccatcgttaaatgatatcatctttggtttggttgctgaaagctgtggtcaactaagcactccaatttctttttcaagtcaactggtatcaagactgtatttttcactctgttttgtgcattcttttgttgctgttgttgtcatttttaatctccaagcaggaatagaatgttggtatttttaataaagcaaaattttggttctattaaggccattttgaatgtgaattttgtttwattatatgttgactgtcaccctcagtttggggctctgcaagtttgataaataagtcttctttcttttcacaaaattcaccaataggaagttcaacatgaaaatctgtctctgggtctaatcattagtatgagcctggctttgttatttaccttgtttccacttctctaaagcagagatgatgatgatgaaagaacttatatcatagcttattttaaggatcaaatgaattaac

SEQ ID NO: 448801 - DNA, 575 bp, Homo sapiens
ctgtgagagagaacatttgtctgttcacaaatttttcacaaaaagttggataacttactacatttttatatttgtgtatctgaattgctgctgccataggttaaatggaatatgatcacggcaaattgacagtcaaacctagcctgaaaatgaataaagaacgtcagtctacagaacgttttccatcccagaactcaggcaagtcagggttcaaagatactgaatgagtccaatgcctgaacayaggctgaaagttttagcagaaaactactattaaaagcaaattgtagctgattcatcagagatttgcagatttaaattgaggtaactgctgccctacctttggggaactggtgagtagtgtagtttagcagtaatgaaaataaaatgactcaaaatataagttaaaatgtgaaaataaagagctaataagcatcttaaatgatttgtagtataaaatatttggaacttactgacactttgaaaataatgtctattccacgacaccaacagctgttaaattttgtggtgattgctgaaatggaaaagaacgggcttgtaaaggtgaagagagt

SEQ ID NO: 448802 - DNA, 560 bp, Homo sapiens
ctctttacttgttataactctgttcagattttctatttattcttgagtcagttttggtagtttgtgtgtttctaggaatttgtctattttaatgggtttacttaaattgttggtgtacaattgttcatagtgttttcttataatctttttttaaaacttctgtaaggttagtggtaatttgtctccaccttcatttctgattttagttatttctgtcttttctccttttgtcttagcctagctacaagtttgtcaattttgcttttaatttcaaataactaaattttggtttccttgatttttctctgttgttttattttatttatctcctctctaagctttattgctttctttgttataccagttttgggtttagtttgttattttctgtctagttccttaaaatgtaaatttaagtcattgatttgagatcttttctygtgtttaatgcctgcattgacaactataaatttttatctgaacactgctttctctcacttctgtaagttttgttatgtttacttttgttttcattcctctcaaagtatttttaaacttct

SEQ ID NO: 448803 - DNA, 360 bp, Homo sapiens
tgtacattgaaaatctagaagcattttataaacttatttggttatgaaaacattttataaaataaaatacttagggaaaaatttggaatatatttttaaaagcctatttttgtttacattaaaaatgttattttacgatttgcctttgattattctatcctaacatagacttctctatcatacatcagcattatatgtaagtcaataaattaaaaagatgtaaattaaatttaaattttaaagrtaaatagataaatatggttttggtagtacagcattttccccaaaaaaattataagtgaaacctcaaaatgtataagaataaaataaaattaccctctttggtccaacctgtctctc

SEQ ID NO: 448804 - DNA, 474 bp, Homo sapiens
ttttcaacactcaacttcatggaaataactatgcgcaattttttttctagtaatgttatacaagtttatggtgtctaaggaaaattatatttaaaagaagaaaacaaaatgacatgactatgacatgacattactatcctgtttggaacaataaaacacatttacatttgatagcaaattccaactgcaatttgcctagatgaatctgcttttctaaggaaagataagacaattaaatttttgtgtgagtgagataagtgactctctagaagctcaggtatagaaaaatagttaatattctaaagaaacaaatatgtaatctggaaaaagagatataaaatactacaagttaagctataatgcttaaaatttaaatccatgactataataaattatcaaaatttatacaactgatgaaattttgtgtcatattmaattcaatataacaaaaatagaagttgcaaacctaacact

SEQ ID NO: 448805 - DNA, 480 bp, Homo sapiens
tgtaagcatctttatgactatttgaaatttcctatcaggtaaatcatataccttcacttcacccaggttgatttctggagatgtatcttgtttcttttttttttgctttgtgtgtggaatatatccccgtttcttcatttttcttgactctttgtattggtttccatgcatcatatgagacaaatacctctcccagtcttatcagactgacttcttgttgaagaagttgaccaattcatctggcttcccggattttatggtgcctctcaaatatgtgtgtttgtccagaatactgtctctgtttttggtggcycctggagtttaggatgtgtcacggcctgtctgcaccctgaaactgatagaagtcagactccatagacataactgaaaaggtttgggttacatgtgtgttcccaattccttctatctttatgattaagctaatgtgggcttttgtctccccctcgctctgcactaacc

SEQ ID NO: 448806 - DNA, 540 bp, Homo sapiens
cttttgcctcctttctttaaacattagggaagagctagtctaagtagtccattatgcttcctggtaccaggactccaacctgatcccrctcaatcatttgagctgagggggtcttcaaaatgaaaggcacaaccccactattcagtagtgaactgtaaaagaaaataaatgtaaaaagagtatttacaggagttgggaaagagtttttgtgtctgcaggagttgggaaagagtttttgtgtgtaagtaataccctctgctctatcaggtattacttataatacctgatacaatgtaaatgctctaaaataattgttatactaaatatggagggtcagttttattctggtacttatgtattttctcagggcatccagagcacttgccattcctagttccccaggtccagttggcatgatgtcatcagtatgtgcatcagtgggacatgtagcagcttgctcggctgaccaaaagttctgtagactatattacaagcagagagcaggaaaatttcacataacctagggcaagacggtgaatg

SEQ ID NO: 448807 - DNA, 541 bp, Homo sapiens
tgctattaaatattagaacttcttctgtctaactgtatgttagtactcataaccagtttctcttcattcccctttcctcatctactcttcccagtctctggtatctatcattctattctctatgtccacaagatcaaattttctagccttcacatatgagtgagaagatatgatatttgtctttctgtgcctgacttattttacttaacataacctctagtttcatccatgttgctgaaaatgacatgatttattttttttaatggcttaatagtattccattgtgtatatataccacattttcttcatccattagtctgttggtgagcgcttaggttgcttccaaatcttggctactgtgaataatgcygcaataaacatgtcagtgcaggcatccctttgatatagctgatttcttttccttcggatagctgcccagtagtgagattgctggattatatggtagttctatttttacttttcttgagaaatctccataccattttccatagtgatgtactaattcacatttgcaccaaca

SEQ ID NO: 448808 - DNA, 541 bp, Homo sapiens
tgctattaaatattagaacttcttctgtctaactgtatgttagtactcataaccagtttctcttcattcccctttcctcatctactcttcccagtctctggtatctatcattctattctctatgtccacaagatcaaattttctagccttcacatatgagtgagaagatatgatatttgtctttctgtgcctgacttattttacttaacataacctctagtttcatccatgttgctgaaaatgacatgatttattttttttaatggcttaatagtattccattgtgtatatataccacattttcttcatccattagtctgttggtgagcgcttaggttgcttccaaatcttggctactgtgaataatgctgcaataaacatgtcagtgcaggcatccctttratatagctgatttcttttccttcggatagctgcccagtagtgagattgctggattatatggtagttctatttttacttttcttgagaaatctccataccattttccatagtgatgtactaattcacatttgcaccaaca

SEQ ID NO: 448809 - DNA, 599 bp, Homo sapiens
tattctgcagttgttggatataatgttctgtaaatacctgtaaggtctatttggtctgaagtctaatttaagtccaatgtttaatgttgattttgtgtctagttgatctgtctaatgctgagagtgaggattatatatctttctttagatctagtgatattttctttattaatctgggtgctccagtgttgggtgcatatatatttagaattatatccccttgctcaattgatccatttattattataaaataacttttgctttttaaaaaccgtttttgacttaaattctgttttacctaagtgtacctactcttgcttgcttttggtttccattggcatggaatatctttttccatctcttcatattcagtctatatgtactttacaggtaaagtgtttcctgctggcagcatatatttggatactgtttttttttaaatatgtatatatagtcaatctatatctttcaagtrcagaatttaatttacttacattcagagttcctattgatatgtgagactttgttcctgttacattttgtttcctagttgtttcatatgttcttttttccttccttttttcttgcatatattttta

SEQ ID NO: 448810 - DNA, 562 bp, Homo sapiens
aagaatatacacaggaagtagaaaactgccaatggaaatgccaggagaatatcagcatgcttgtcagctctttggaatttaagtcatcaccatctcaaaggccaagattctatacttctagggttcatcatatacgtakttatttatttatttttattttttcataagttattggggtacaggtggtatttagttacataggtaattctttagtgctgatttatgagattttggtgcacccatcactcaagcagtatacactgcaccatatttgtagtcttttaccctcgccctgctctcactcttcccctcaagtccctaaagtctattgtatcattcttatgcctttgcatcctcgtagcttttctgccacatatcagtaagaacatacgatgtttggttttccatttctgagttacctcacatagaataataatctccaatctcatccaggtcacagcaaatgtcattaattcattcctttttatggctgcactgtattccatcgtgtatatataatatatacatcattattatattatattatatatattacatataa

SEQ ID NO: 448811 - DNA, 562 bp, Homo sapiens
aagaatatacacaggaagtagaaaactgccaatggaaatgccaggagaatatcagcatgcttgtcagctctttggaatttaagtcatcaccatctcaaaggccaagattctatacttctagggttcatcatatacgtagttatttatttatttttattttttcataagttattggggtacaggtggtatttagttacataggtaattctttagtgctgatttatgagattttggtgcacccatcactcaagcagtatacactgcaccatatttgtagtcttttaccctcgccctgctctcactcttcccctcaagtccctaaagtctattgtatcattcttatgcctttgcatcctcrtagcttttctgccacatatcagtaagaacatacgatgtttggttttccatttctgagttacctcacatagaataataatctccaatctcatccaggtcacagcaaatgtcattaattcattcctttttatggctgcactgtattccatcgtgtatatataatatatacatcattattatattatattatatatattacatataa

SEQ ID NO: 448812 - DNA, 562 bp, Homo sapiens
aagaatatacacaggaagtagaaaactgccaatggaaatgccaggagaatatcagcatgcttgtcagctctttggaatttaagtcatcaccatctcaaaggccaagattctatacttctagggttcatcatatacgtagttatttatttatttttattttttcataagttattggggtacaggtggtatttagttacataggtaattctttagtgctgatttatgagattttggtgcacccatcactcaagcagtatacactgcaccatatttgtagtcttttaccctcgccctgctctcactcttcccctcaagtccctaaagtctattgtatcattcttatgcctttgcatcctcgtagcttttctgccacatatcagtaagaacatacgatgtttggttttccatttctgagttacctcacatagaataataatctccaatctcatccaggtcacagcaaatgtcattaattcattcctttttatggctgcactgtattccatcgtgtatatataatayatacatcattattatattatattatatatattacatataa

SEQ ID NO: 448813 - DNA, 589 bp, Homo sapiens
agttcatttgttacaaggtatagtttaaatctattgtttctttgttgactttgtcttggtgacctgtgtagggytgccagtgttttgaagtcccacactattattgtgttgctgtttatctcatttcttaggtctattagtaatagttttataaatttgggagctccagtgttaggtgcatatatgttaggagtataatattttcctgttggacaaagccttttaccattatgtaatatctgtctttgtcccttttaatttgctcttgctttaaagtttgttttctctaatataagaatagctgtccctgctcacttttggtgtccatttgcatgaaatgcctttccccacccctatactttaagtttatgtgagttcttatgtgttaggagagtctcctgaaggcagcagatagttcgttgataagttcttgtccattgtgcagttctgtatcttttaagtggagcatataggacatttacatttattgttagtattgaaatgtgagggcctgttgcattcatcatgctctttgttgtctgtgtactttggtgtttttgtttttgtctttgcttttaacttgtaatgg

SEQ ID NO: 448814 - DNA, 610 bp, Homo sapiens
tgattgtcgttcaattcaaagaactttttaattttcatcttgattccatttttgatgaaatgatcattcacgagcaggttatttaatttccatgtgttttcatggttttgaaggttcgttttggagttgattttcagttttattccactgtggtctgagagagtgcttgatacaatttcaattttcttaaatttattaaggcttgttttatggtctatcttgagaaagttccatgtgtgttgaatagaatgtgtattctgcagttgttggatgaactgttctgtatatatctgttaagttcatttgttacaaggtatagtttaaatctattgtttctttgttgactttgtcttggtgacctgtgtagggctgccagtgttttgaagtcccacactattattgtgttgctgtttatctcatttcttaggtctattagtaatwgttttataaatttgggagctccagtgttaggtgcatatatgttaggagtataatattttcctgttggacaaagccttttaccattatgtaatatctgtctttgtcccttttaatttgctcttgctttaaagtttgttttctctaatataagaatagctgtccctgctca

SEQ ID NO: 448815 - DNA, 565 bp, Homo sapiens
tttaagaacccaacttccatttctgataatatagcagacagataatctgaacaacccttgtgtggcaaatcaactaacagtgttcattttatcatactattttatgtcattcacatatgttagttataaatatttttatatagtttatattagctttttaaaattaaattaaattcacagagctaaaggaggcattgcctatattcaaactacaatctgtcaaaccaaaaatttgcattttttgctaattatttgctttgagkgggactgttttaaaaactaaaatagtaaaagtagcaatttaaaatgccagaatatgtcagacttttcttctctggacctatttcatgtcatttttcaagtgttgaaatcacaactgaacactgttctctaaccataatctgaacaacatcaattacagttgctccagatgactgcaaatctactgtgagtctttttgtctagcatcttttgggaagctaagtgagccaattccttaatgctcagggtctgtataactataagattgaggctacagttgcactgaaaagttgacgtgaagctc

SEQ ID NO: 448816 - DNA, 565 bp, Homo sapiens
cagacttttcttctctggacctatttcatgtcatttttcaagtgttgaaatcacaactgaacactgttctctaaccataatctgaacaacatcaattacagttgctccagatgactgcaaatctactgtgagtctttttgtctagcatcttttgggaagctaastgagccaattccttaatgctcagggtctgtataactataagattgaggctacagttgcactgaaaagttgacgtgaagctcaactaacttcactctctgagaagtcgtactctcaattaatggtggggctctcaaatctctgtatctttgcaatagctatgcataattaggataggcctaaaggttgcataggcatcccagaaaattttattttggttcaaactacaggttgtagggggccatgtattgattaaaacatttgtaaaggagtacagaaaaagagagaatgactctttacctcatttacacaacatagaaagatgctggttaagatacaacagatttcacccaaagcattggccatgactgcctgctaactacctaaactataattaatccag

SEQ ID NO: 448817 - DNA, 647 bp, Homo sapiens
tagtgcctggcacagtttgttcaggcccgtttccactagccaaggtatattagcaatgaatgcccaccccaaccttccttccccctctgttgtgacttcatgttagttaacatttagatctaatgttagccaaagactctctagattgtacttggcatttctatgagccaagctgtagagtccatatgacaaagaatttgaactttcttgatgattgaagtttctccttgaaaagatatgttctcacctcacagggggcctttttaaaaaaatatgcacaactgaagtaacacccttttgattcctaaaatatgccccataatcatcagatcagtgatgtttcctgaatactaaaggaatttctaaataaaaagagattctgctgaaaagccttaaaaaataaaaaactatttctcagtgataaaactggaaaatgaggtgtcctgcctttctccatcgaaaacaaatgcaaggcacaggacttggactggtataaggaatgtgttattttcaggaacattaatcaaaatgcattctaaatgtcatccttrccaagtaaatattaatgtacacgagtctcctcagaggcaatagaggtctatttcagcttggtgcaatgtgattattcttaccacagtaatgttagt

SEQ ID NO: 448818 - DNA, 439 bp, Homo sapiens
ttaggatagtagcctctagctgaatccatgttatacaaaggacatgatttcatttttatggctacagartatcccatgatgtatatgtaccacattttctttatccaatacactggtgatggtcacctcactgattccataagacctttttttcatttgttccccaaaaacgttttcaataaaaagaagcaaaaatagggagaagtaaaaatcagtaaagattcaatgtattatatgcagcagttattatcaactgcccaccaaaggtatccttcctttttcctgactaggaaattctaatttaattcaggattcagtagagatcatttgatttccaggaagatggtcgtcctactgcaggggataaatcagattaagccagacagaactctcatgtcctcttgtcagtaactgttctaaggatgggcatgtggtccca

SEQ ID NO: 448819 - DNA, 618 bp, Homo sapiens
attctattagaagaatgcattaatttttctgattagagcacaacttccttttgaaaagtttggttcatttttactgtttatagacacaaatctcacattgagaccttggtcataagacagggcaagtccttccacatctaaattacagcagattagttaaggcagttctagcygctataaaggtaaatccccaaaatctcaatccctagcacaatcgaatttactctagtaaaatctaatagggcatgcagtggatagtttttcacaaagtgatacagcaatccaagatccttccattcaccatcccctttaatacgcatcatcaaacttttgctgtgaagaagagctagaaatattttaggcataatgagccagtccatgcctgttgaaactactcgagtttgctgttgtcatttgaaaatagtcatagataatacctaaattaacaagcagaactatgtttcaggataagtgtatttatgaaagcaggtggtaaattggatttcacccacaggctacagtttgccaaccaccaccctagaacctcagagtgctttgcttctaactaactggaaaggaaagagacagcatagatgtgtgtgtgtgtgtgtatgtgtg

SEQ ID NO: 448820 - DNA, 618 bp, Homo sapiens
attctattagaagaatgcattaatttttctgattagagcacaacttccttttgaaaagtttggttcatttttactgtttatagacacaaatctcacattgagaccttggtcataagacagggcaagtccttccacatctaaattacagcagattagttaaggcagttctagctgctataaaggtaaatccccaaaatctcaatccctagcacaatcgaatttactctagtaaaatctaatagggcatgcagtggatagtttttcacaaagtgatacagcaatccaagatccttccattcaccatcccctttaatacgcatcatcaaacttttgctgtgaagaagagctagaaatattttaggcataatgagccagtccatgmctgttgaaactactcgagtttgctgttgtcatttgaaaatagtcatagataatacctaaattaacaagcagaactatgtttcaggataagtgtatttatgaaagcaggtggtaaattggatttcacccacaggctacagtttgccaaccaccaccctagaacctcagagtgctttgcttctaactaactggaaaggaaagagacagcatagatgtgtgtgtgtgtgtgtatgtgtg

SEQ ID NO: 448821 - DNA, 618 bp, Homo sapiens
attctattagaagaatgcattaatttttctgattagagcacaacttccttttgaaaagtttggttcatttttactgtttatagacacaaatctcacattgagaccttggtcataagacagggcaagtccttccacatctaaattacagcagattagttaaggcagttctagctgctataaaggtaaatccccaaaatctcaatccctagcacaatcgaatttactctagtaaaatctaatagggcatgcagtggatagtttttcacaaagtgatacagcaatccaagatccttccattcaccatcccctttaatacgcatcatcaaacttttgctgtgaagaagagctagaaatattttaggcataatgagccagtccatgcctgttgaaactactcgagtttgctgttgtcatttgaaaatagtcatagataatacctaaattaacaagcagaactatgtttcaggataagtgtatttatgaaagcaggtggtarattggatttcacccacaggctacagtttgccaaccaccaccctagaacctcagagtgctttgcttctaactaactggaaaggaaagagacagcatagatgtgtgtgtgtgtgtgtatgtgtg

SEQ ID NO: 448822 - DNA, 547 bp, Homo sapiens
cctctgtctttgtgataaggaagggggtctaattgagctgattaacacaagctccctataggcaaactaaaagaacaccctgtggctgggcgtggtggctcatgcctgtaatcccagcactttggaatgctgaggcaggcagatcacctgaggtcaggagtttgagaccagcctgaccaacagggtgaaaccctgtctctactaaaaatacaaaattagccaggcgtggtggcgcatgcctgtaattccacctacttgggakgctgaggcaggagaatcacttaaacccaggatgcggaggttgcgatgagcagagatcatgccattacactccagcctgcgcaacaaaagtgaaactccatctcaaaaaaaaaaaaaaaaaagaaaagaaaagaaaagaaaaagaaagaacaccttgtaacacacacccactggggcttcaggagctgtaaacactcactcctagacactgccatggggttagagccccatagcctgcccatctctatgctcccctagaggttttgagcagcaggacactgaagaa

SEQ ID NO: 448823 - DNA, 547 bp, Homo sapiens
cctctgtctttgtgataaggaagggggtctaattgagctgattaacacaagctccctataggcaaactaaaagaacaccctgtggctgggcgtggtggctcatgcctgtaatcccagcactttggaatgctgaggcaggcagatcacctgaggtcaggagtttgagaccagcctgaccaacagggtgaaaccctgtctctactaaaaatacaaaattagccaggcgtggtggcgcatgcctgtaattccacctacttgggaggctgaggcaggagaatcacttaaacccaggatgcggaggttgcgatgagcagagatcatgccattacactscagcctgcgcaacaaaagtgaaactccatctcaaaaaaaaaaaaaaaaaagaaaagaaaagaaaagaaaaagaaagaacaccttgtaacacacacccactggggcttcaggagctgtaaacactcactcctagacactgccatggggttagagccccatagcctgcccatctctatgctcccctagaggttttgagcagcaggacactgaagaa

SEQ ID NO: 448824 - DNA, 517 bp, Homo sapiens
ggctcgcattgtaaattttcgctccagaaccactgcaagaacaaaccagcaattccaagagaacccataggccctctgaaggaagcagactgctccttcagggacctgggagacaccctaaatactgtgagtgccccatttgcagaagtgggaaagggagatcctcgtatcccaaacacataccccctctaaagaaactgaaggtctgtttgcgggagaagtttccaaccttacctggagctgagtcartttagacagccgagcaaaatacaggggtataggaagcagcgagaaaggatccgggaggttgctgggtccccaagtaggccattcctgcctggcaccatggggtcccattgggaggggagccagagaagcggggaaaaaaaacacaggaagaaggaaatctccagctgaacttcgtaacaacttgaaccaggcaagaacactcctggccaaaactcgggggagggcatgaatctggtgtgcagactccacaggcagaggaagaaccaaa

SEQ ID NO: 448825 - DNA, 517 bp, Homo sapiens
ggctcgcattgtaaattttcgctccagaaccactgcaagaacaaaccagcaattccaagagaacccataggccctctgaaggaagcagactgctccttcagggacctgggagacaccctaaatactgtgagtgccccatttgcagaagtgggaaagggagatcctcgtatcccaaacacataccccctctaaagaaactgaaggtctgtttgcgggagaagtttccaaccttacctggagctgagtcagtttagacagccgagcaaaatacaggggtataggaagcagcgagaaaggatcygggaggttgctgggtccccaagtaggccattcctgcctggcaccatggggtcccattgggaggggagccagagaagcggggaaaaaaaacacaggaagaaggaaatctccagctgaacttcgtaacaacttgaaccaggcaagaacactcctggccaaaactcgggggagggcatgaatctggtgtgcagactccacaggcagaggaagaaccaaa

SEQ ID NO: 448826 - DNA, 517 bp, Homo sapiens
ggctcgcattgtaaattttcgctccagaaccactgcaagaacaaaccagcaattccaagagaacccataggccctctgaaggaagcagactgctccttcagggacctgggagacaccctaaatactgtgagtgccccatttgcagaagtgggaaagggagatcctcgtatcccaaacacataccccctctaaagaaactgaaggtctgtttgcgggagaagtttccaaccttacctggagctgagtcagtttagacagccgagcaaaatacaggggtataggaagcagcgagaaaggatccgggaggttgctgggtccccaagtaggccattcctgcctggcaccatggggtcccattgggaggggagccagagaagcggggaaaaaaaacacaggaagaaggaaatctccagctgaacttygtaacaacttgaaccaggcaagaacactcctggccaaaactcgggggagggcatgaatctggtgtgcagactccacaggcagaggaagaaccaaa

SEQ ID NO: 448827 - DNA, 557 bp, Homo sapiens
ggatagctattcttataccagacaaaacaaactttaaagcaacagcagttaaaagagacaaaggggacattttataatggtaaaaggccttgtccaacaggaaaatatcacaatcctaaacatatatccacctaacactggagcttccaaatttataaaacaattactaatagacctaagacatgagacagacagcaacacaataatagtgtgggacttcagtactccactgacagcactacacaggtcgtcaagacagaaagtcaagaaagaaacaatggatttaaactatacattggaacaaatggacttaacagatatatagatatataaagaagatttcatccaacaaccatagaatacacattctattcaacagtgcatggaactttctccaaaatagaccatatgatargctataaaacaagccttaatacatttaagaaaattgaaattatatcaagcactatctcagaccacagtggaataaaacaaaatcaactccaaaaggaagcttcaaaaccatgcaaatattaggaaattaaataatctgctcc

SEQ ID NO: 448828 - DNA, 612 bp, Homo sapiens
  misc_feature (1)...(612): n = A,T,C or G
nnnnnnnnnnnnnnnnnnntgtaccttttggtcaacttctcctcagcaggcctctagtaacaaccattctactttctactttaataagtttgactttttgaatgtggaatccaaanagtcactttcacttactgcataagtgaattgtgcagtatttgtatttgtgtgcctggcttatttcacttaacataatgttctccaggttcatccatatcattgaaatgacaaggttttcttttctaagactgaatagtattctgctgtgtamatgtgtcacatttttaaaaattcattcatacatttttggacccttaggttgatttgatatcttggctattgtgaataatattgcaataaacacggcatttagatagctctttaacatactgattaccattcttttggatatatagccagaagtgagatggctggatcatatggtaattgtgtttttgtttttttgaggggcctccatacttttctccataatgactgtaataatttatatacctaccaacagggtacagggttcccttttctccacatatgcaccaacacttattatcttttatcttttttatcttagccactctaacaggtgtgaggtgatag

SEQ ID NO: 448829 - DNA, 589 bp, Homo sapiens
catagagaattagtagcaggtattttatacatgggagaatatgggagaaaataacactcattagcaatgcaatgcattagaattattctaatgtgaactttaaacatttgcagattatattttaaaaatcagtaaatagtagaaagagcatgaattatgaaagcaatacttctgcctgaaaacccatgacaagaacgatatggagtaaaagaagaaagttggcaaagtctggacaatacagcaaagaaagtcatcctgggctatggtagaggtaacctggttgagcatttccactgattttttcagtgggaataaactggaagttaatatcagaactccaacakgtgattgataaatgtaaagtctgctgaagcaaatgctttagtaaaaacatgttaaacttctggtccttattgcagttgtggtcattctccacaaatcttttattttcaaaatgctaaataatcattataggaagcttcatagacaactatccaaattgcatagattgagattctggtcaatacactgggggaaaaaacaaaacaaacaaaataaaacaaaggatagaattggaaaaaaaatatgc

SEQ ID NO: 448830 - DNA, 670 bp, Homo sapiens
tgtgctgtggtttgaatgtgtcccctaaagttcatgtgttggacacttactccccagtgtgacagtgttgaaaggtgaggcctaatgggatgtgtttaggtcataggggctcaacctttatgaatagattaatgctrattacaaaaagttttgaggttgtgagttagatcttttgctgtctcacatccttttgcttgtcttctgccttctgttatgggatgatgcagcatgaaagcactcaccagaggcagtccctcagtcttggacttctcagcctccagaatcatgaaccatatgaactattgttcataaattgcccccagtctgtggtattctgttatagaagcacaaaatgggttaagacagcttctgagagcattttgtgctttcaatctagaattaaatgccaatatagtgtgatctcagaagactgcattgctaactctggaagtagaatagtcctaaggaatggagtaattaattattcaccatttagctcttatatccagaatattctaccaaatcagactccaatctgttaaaaataagtattatgggtgacatacaaagactttctaacctgttctctttcctgcaaactttccttttaaagtcaggtatcaggtagaatattgggtactatgagaaactcttaaacaaaacaaacttg

SEQ ID NO: 448831 - DNA, 410 bp, Homo sapiens
atcagggaaatgcaaatcataccagagagaaatattacttctcatccactgatggttaaaattaaaaagtgagactaaaaactagtttgggcaaaaatgtggagaaatcagaaccctcatacactgctggtgggaatggaaaatggtacaactactttggaaagcagtctgcaatttttcaaactgctaaatacatagttaccattttatctagcaattacattcctatgtgtatatccaagagaaatgaaaacacatgtccacagaaagacttgtataagaatgtatatagcagcatttttcaatagccaaaagatraaaacaactcaaatgttcatcaactaacaaatgaatagacaaaatgtggtatatatatacaataaaataatattgttattaaaacaaatgag

SEQ ID NO: 448832 - DNA, 586 bp, Homo sapiens
tacagccttgcactggcatttactggtttaagtatctgtccttgtaggaacaacatcttatgttayacttctttatatctttctttttaatgagcacttaatctttcttataatgaaaataaacctggctagatgatagagattttcgtgggaagggtgtcagaaaaactaccaaagtaaatatctaagggctacacacaggtagcaagttgcataaaagggcatattggttatttcttcctatagtacctgacagaagttgatgttgttgtcaatattctcccagacttggtcataattgccctgatgcaaaccttgggaagccacaaacgatggctgatgtggagccagcatgactgtctttgcagcgtgatcttggagcacttgcattactcactcagggttggaaatctcatggagaatagagaagagaaggaatggttatgagaagcatattccctttttctcagcaagactttggtcacatacacgtgaacaaggaagaaaatttaagtaggactttattcaattaaaaaataaaattaaagtccagcatcatgattccccaaatatgtttgtccattta

SEQ ID NO: 448833 - DNA, 610 bp, Homo sapiens
ttggctgccaggcagggaagggctccctgtccagtggacacgtgacccacatgaccttacctatcattggagatgactcacattctttaccctgccccttctgccttgtatccaataaataacagcgcagccagacattcgtggtcactaccagtctccgcgcattggtggtagtggtccaccgggcccagctgccttttcttttacctctttgtcttgtgtctttatttctacactgtctcatcgccacacacagggagagacccaccgaccctgtggggctggtccctacactcaaaagcattttttgagcacttaatgagatcattgatgggkcattgtttggaaaagttgaaagtgctgaagaaatgtcaacaatcagtccaccagtcagatggtaaaaacagaaggtttacaatacacagaatgaggctcaaatttcacctcagcctcttactaaatgtgtgaacctgggttccttaaaatttccatttcctcatcttcaaagtaagtctcatagcttccttgtcatgcttccagatttattcaataaataatcatttttattagtgctcttcatataaatggactttctacctgttctgcaaat

SEQ ID NO: 448834 - DNA, 607 bp, Homo sapiens
  misc_feature (1)...(607): n = A,T,C or G
agtccgtcatggcttcccttggctaggggagggaattccctgaacccttgcactttttgggtgaggccatgcccaccctgctttggcatgtgctccatggactgctccccctgtctraccagtcacaatgagatgagccgagtatctcagttggaaacgtagaaatcacccaccttctgtgttgatctcactgggagctgcagactggagctggttctattcaaccatcttgcctgaatattgtgttttttttaatgagtactgnnnnnnnnnnnnnnnnnnnnnnnnnnnnnnnnnnnnnnnnnnnnnnnnnnnnnnnnnnnnnnnnnnnnnnnnnnnnnnnnnnnnnnnnnnnnnnnnnnnntgcattcccaccaacagtgtaatggggatcttttttccacacctcaccaacatttgttattgcctgtcttttggatataagccattttaactgggatgatataaaatctcattgtagttttgatttgcatttctttgatgatcaatgatgttgagacatattcaaatacctgtttgccatttgtatgtcttatttgagaaatgtgtattcaaatcttttgcccatttttaagtcagattatta

SEQ ID NO: 448835 - DNA, 564 bp, Homo sapiens
gattctgttgctgtgagcaaccaaccaaccctgcaacagagggtgaacctgcattccaaggcctaagtgccacaatakgtttgtcagactctgaacctagcatcgtcagccccacattgtccaagcacctgtatctgctggaatcctgctgtttggaaactgtaagacataatgagaaaagggatctcttcaattaagtctctccattgtgaggaaagtgagaatagaaggatctcaggagctttcatgacagagaatattaatagcctacactgccaccatgactactacaaacttccagagcctaggacactgaggacctccagttattgatgataatgaaaacagctgaagaaactgcatggagactatatcactgcagctatgcagaaacagaataaccataccctttctaactagcacactaagatcccactgcaggcaaaaatctttttctatgaaatccactcacatgttgaaagaggtgattgttccaccagatacacagacatcaatgcagggacacaaaaaaaaatatgaaaaagcaaggaaatatgacatcac

SEQ ID NO: 448836 - DNA, 401 bp, Homo sapiens
gggaaaattataagaggcgcaataggtgcctcttataaggaggcacctattgtgaattgcctaattcctttttgctttctgctgtttctgaggacattgtctggtgaaaaccgagtagtttcttattagtccatgagcagtgccttcaactgttttgtgttgctataaaggaatacctaagactgagtaatttataaagaaagtaggttaatttaactcacagttctgctgactggaaggttcaagattggtcatctaatgagggcctcaggttgattccactcttggaagaaggtgaaaggcaatgrgcatgtgacgagatcacatggcgagagtggaagtaagagaaaggtgggtggaggtgccaggttctttttaaccactaggtgtcagaataacta

SEQ ID NO: 448837 - DNA, 461 bp, Homo sapiens
gagaattccctgtctttctctatcttttggaatagtgttaataggattagtaccacttctttgaatgcttgatagaattcagctgtgaattcatctggtcttggactttttttgttggcaattcttttattacgattttaatcttcctgctagttattggtctattcagagttcctatttcttcctgtttaatataggagggttgtatattttcaggaatttgtccatcttttctaggttttctaatttgtgtgcatacaggttttcatagtagccttgaaggatcttttgtatttctgtgatattggttgtagtatctcccatttcatttctgattgatcttatttggatcytctatcttattttcttggatcatcttgctaatggtctatcaattttgttgatcttttcaaataactagctttttgtttcatttatcttttgtatttttttttgtttcg

SEQ ID NO: 448838 - DNA, 566 bp, Homo sapiens
tatgtgcaaataattagctttactcactattccttttgatggcttacattgccagaaattgtcatgttccattgtattattttgtttttaataatattttgatttagcttggttatgaaagccaaaaaatgtgccattatgctattcttgattcaaatttaatacatacatattatttggtggcccttaatatgtttttgtctgtagactgctggttagagtccttggatattaactttcctactagaaattcaagatttttttaaatctggaaaacataataatgagtayaggaaataattagaaatgtcttttttttggtcataagagaaatcaacaattgaagtttttaccatgattttaatgcaggattaattgttgctccattaggaatacagatatacccctaaacaaatgattactttgattcaatccattttgctgtttctcttaaatgagagcagaaggagtggtgctggatttgcagatcactgtgattctgatctgcaccaggtagaaagtgggagaacagagtggttaggcacactcatgcctagccatgctgc

SEQ ID NO: 448839 - DNA, 498 bp, Homo sapiens
ctcatgtggaatactgttaggctaccactgatgttcctttaaagcacaaaggctcttcagtcattttgtggcaaatgatgcctgaagtggagctcamccttcagggcagtgtgctcccctctggaccagaacaggtccagaaatgctgttcaagagccaaggcctggaatcagggaccccaagagctcacttggtgctctaccctcctgtagctgagctagtacctaagatgcaagacaaattccccttttcttttctctctgcttttctcaagcagaaggaatctctctatatagctaccatagctgggaatgtgctgaggctcacctaacgtcagcaagtctcagagtttcactgaagagccacagtatactacctgggtattatacgtaagtgctctttagtcagcaggtgatgggtcctgccaggactgggttcttccttttaggaaattgggttcccttcaatgcaaggtgtgtctggaaatatcatctggga

SEQ ID NO: 448840 - DNA, 522 bp, Homo sapiens
tggttcctagccattatcccccctctacattggctaatgctcatagtctggatcatcttccccgccactcatgtcctctcacctagtctgtgaagaccctttagttctaccagctgtgtcctttgagattatttccagtcactagggcactatggtagtctgaggactgcctccagccctgtgtgtctagacactctaggcagcacgtcattctgccgatgcagtgcaaggatctctagagcctcagtttgtttgtctgggccacatccagatatcaagcacagatcccctctgacctcaggccatcaaaattacataagattggccaagggatggtgacagagagggcaggtcacaagctaattttcagcagtccattgtcttttatctgctctctatctctcttctgtcttcaactcattacacttggacaaatttagttcaggaaactgactctgaartcatcatgcttcccaaatgtattatttataccacaaactttgacttttgcagcttaaaaac

SEQ ID NO: 448841 - DNA, 586 bp, Homo sapiens
tgttgaatctgtagattgctttgggcagtatggccatttaacatatcgagtcttccaattcatgagcattggaagtttttccatttgtttgtgtcatctatgatttaaaaggaaagctcttacatgacttctaacaatgtttcccatggaatctaaatgcyatagcaatttcatatcaaacataattcaatttaaacatacacgaacaagctcatctttaacaggcaaaaaattactccatttactgcttaaacttgtatttccattctactttccctacattatattatgttaatgtgatatattcaatgcctgaaattcttttattgaccactcataattatctacgacaaaagcatgcatataaattgaaattaatttttaaaattttctgtgaccatatggctccaggtatcaaagaaatctctctggactgaattaccattataggtagtgttaatatgcaatttatcaaaataacaaatatatttttaagaaattattggctgggcgcggtggctcatgcctgtaatcgcagcactttgtgaggtcaaggcaggcggatcacaagggcaccatcctggct

SEQ ID NO: 448842 - DNA, 637 bp, Homo sapiens
tgcagtcttcttgatgaaaaggaaagggatagctggggctcrttattgtgtctcttcagtggattagagagattagatgcctaagatgtcccaaagcctgtatcgagtcaggtgatctgatcctcattcccatgaacaacttaggaggcctccctctccagttgtgacacttggaatttgtatgctcatcttcatcatgactatgtagccaactcttggtgttgtgcaatgaaaaatggaaaatataagccagatgattaaaaaaaagaccacgtggctctaggtatgatgaaagacaggcatatgttttcagacacaatctccctctctcttacacacactccttactcttaaatatttggattttttactttacatctaattttaatcccttctcagctggcaccatactattgatgaccaggggacccacagggacagctagcgacctgccaagttgactcatctgcttgtggaggtaacacttaggaaacaccttcaagttcctgtctgcagtgggtgttgcccaaagtgaatatcatagaaacctcccaattatatgagagtctccatctaaaagtgaatggcatcaataggaaagtagcattttctgaataggtaacagaatccgtaaagt

SEQ ID NO: 448843 - DNA, 361 bp, Homo sapiens
atcctttatcagatatatgatttgcaaatattttcatccagtctatggcttgatatttcattcttttattagatattttgatgatgtctaagttttgtctaactcaagttagcagaggtttcctcctagatgttttatagttttaggttttatatttcgagttaatttttgtgtacagtgataggtatgggctgaaatatttttccctcaattgttctagcaccatttgttcaaaaggtcrttctttttccaatcaatttccaatgaattatctctgcagctttttaataatcagttatctatatatttatgggtttatttctggacttcattttgttcctttgacataggtatttgtgtt

SEQ ID NO: 448844 - DNA, 639 bp, Homo sapiens
gcagagatctttgacagtggatagttgatcatgatgtctcttgaaagtaaatatgtgggcaacctgtgrgtgtagtgcctgatctatgtaacagcaaaaactctggtagctgaaaacctgacttgaattcccacagagaggaactgaagccccttacctagcttttagacataagtaaatttatagacacagagccttttgactgaaaggtaagccaggtgcccttgaggaaggaccctgcaccattgccacatgcacacaccataaatcctcctctaagacttctccaaagggaccaaagttgacaactgacaaacccccacattttctctctgacccatgggtgatggcttttattgttggaaggactaagcagaagctcctagaactttcatttctaccaagagaataaatcagaagcaatattgcatccctgaggggattgcaaaaatccatgctgccatcaaagacttgaaagaagtggcgatagttatcacatctccactgaactcatcagttgggctgtgcaaaagttgcatgggtcttgaagaatgactgaagactactatgaacttaatgaggtggtggctaaaattccagctgctgtcctagatgtagtatctttcctggagcaaattg

SEQ ID NO: 448845 - DNA, 511 bp, Homo sapiens
aaaagttgcatgaaaaagagcatggatacaagggtgcagaattgggccattaacacaatttgtcacatttgccaaacacagaatgcattctgcagatataacttgatagattctctgctcattcccatattctgtgtttttcatgactctgttctaactggctcaaggaatttcccactgccagtccacgcacctgttcctttagttttaagtaagatgagataaatgaacgacttaagatggccccacttatcctcacctcctgatatttgcatccttgtataatcccttcttgaccgtgggctggacttagtgacttgcctccaagaaaaatagataaatggatgccacttgaagattagattatttaaaaactgtcacttccatctagttcccactttttttcattgttgttgttgttttcttccttastgtaatgaagaaagccaccatattttccgctgccctgtgaaggggcccatatggcaaggaactgagagtggcctcaata

SEQ ID NO: 448846 - DNA, 580 bp, Homo sapiens
ggttaagcagatttgcatatcgataacattaggtagttttacttaaactagccctcacaaaatggatttgtggctctatattactgcaaagaaacctgaagttgaaaaacctgaagataatactaaaaatgtaagtataaacaaacaagaaaatagtcaagctgatgcctcccatgcacacacttcaacattccttttgcaagagaaaaaaaaaaaattacaaaattagatctgacagtaatatgtcacctagcatttctgtttgaaaaaataaccattgatccccataagggtaaagatgatgctttcaaatgaaacgttcaatatgkagagggcatactggaaatcaacatgactcttgtatctgcatatgcgagttggaaaaaataatttttaaaatatatcaactgtatgtaccactaaaaaaaaggatgccaattaaatgacaccctgaattacatgatgcatccatatatcagaaatgctaaaacatttttaaagtacattttaaaattgataaagtataataaatattgcatacataaaataggagcatttgggtgaaatttttgctgttagg

SEQ ID NO: 448847 - DNA, 635 bp, Homo sapiens
ccatatagccactgtgcttgttgtgacctttttgttattataatcagcatgaccccgactgacactcattgagcgtttattctagacagactatgttatgctaagcactttacctatttaactcagtcttcagaaaattgggttgtaatagagaatctgactgcatttttttgatgtttaaatagtgatccctcatcctcccctcgtgccccacacttggcaaactgataagaaagcccgggtgtttccttctgtggcacccatgggtgattcaaaccacacaagcctccatctatacacagaaattcttacccccagccccactctctaatcacaataaaaaccccaagatagcctcttttctctgtttactcaaggctctcagacctgcttggaaagcatgccctgctctttccagaaaacttcrtcatgtaagtaataaatcttctcagaccccctgtgagtgtgtcacatccaaaccaaattttgggtagggaatccatcctgactctgaagggtgcttggagccaggatagatatcattacccccgccccctttaacctagaaataaacaggcatacagctttacccatggtcacacaggcagtaagttcatccagtcagcagactctga

SEQ ID NO: 448848 - DNA, 587 bp, Homo sapiens
taacttcgccattcccaggcatatgcctgacagaaatatggtcatgtgtttatcaaaaattaagggcaataaatagtggtatattcacaaagtgagatattatacagcagtaagaaagaacaatctccagctgaacacaaaaacatggatgtatcttaaaaacacaatgttgagctaaggaagccagacatataagagtgcaaatggtatggtcccgttgatataatgtactaaataagtaaagtcaatcacctctgccaaaagtcaggatagtggtttctctgagctgatagtgacttgaaagggacacacaaaaaatttgtggggtgttggcaatatctgcctcttgatcttgggactagttgcacagtatacctacttatcctaggtatacactctgtgaattttcacgaatacctacttatcctaggtatacactcagtgaattctatgcactcaattctaggtgtatacctagaattgtctctatttctaattcagtgcaaaatgtaaaaagctgtacattaaatacattagaatggttgcctattaagtgrggcgtgagagtgggaaacgaaagagtaatt

SEQ ID NO: 448849 - DNA, 481 bp, Homo sapiens
cacagtccataatcagtgacatgggaggtggaaaagtcttaaaatccctcaagaggaaaaactgtggccaacacaattcatagttaaaagatcaacctgatattgctcacaaagttctaagtattcttttagatgtttatgtgaatgcattaataatattctattatttgcctttgtccagttcagatagttttcttgctcttatcagcattgataagatgaagtaaatcagatgtgagagaaagcacgggaacccatcatctgtgcctcagcsaccgattgttctcctctggctgtgctcatcttgccagtctgctggctcacaaaggccccagctttgatgtcagtctgactgtttgacaaagccagttgcagatgctcttcatggagacagcagattacagacaataccatgctaaagaaatgctatcgtctagccatgtatacactgaaagttatctcagtgtatacatgggatatg

SEQ ID NO: 448850 - DNA, 585 bp, Homo sapiens
tatggccattaaattccattttaacaaatttagcttaaagtaatctttactactagatacatatggtttcaggttaccatgaggtacaaasttcttctctttacaatttgaaattatactatcagaattcagcaaatgactttgttgatgtcagaagaatacactttgagttttatcctcatgtttctatcgggacactgcacactggtcaagtctctctgtctcagcagccctggaaacatcaaataaaatgacatctctgtccagtcacatttttttcaggcttcgacttgaaaatcttagtctttgtctcttaaaagttaatgaataaaatgaaatctcttacttagctttactttcctttaaaaactgaaagaagatatacttatctttgagacccagacaatctcatactcagagtgacatcattctagggctgtcttcaggcttctcatgacctttcatccttccaaacactccttttgtcattcagacttgagagcttcccacattccaagtttatttatttaccttcattagacacagtctccaaaacccttttcttgttcaaattaaacagctatg

SEQ ID NO: 448851 - DNA, 585 bp, Homo sapiens
tatggccattaaattccattttaacaaatttagcttaaagtaatctttactactagatacatatggtttcaggttaccatgaggtacaaagttcttctctttacaatttgaaattatactatcagaattcagcaaatgactttgttgatgtcagaagaatacactttgagttttatcctcatgtttctatcgggacactgcacactggtcaagtctctctgtctcagcagccctggaaacatcaaataaaatgacatctctgtccagtcacatttttttcaggcttcgacttgaaaatcttagtctttgtctcttaaaagttaatgaataaaatgaaatctcttacttagctttactttcctttaaaaactgaaagaagatatacttatctttgagacccagacaatctcatactcagagtgacatcattctagggctgtcttcaggcttctcatgacctttcatcmttccaaacactccttttgtcattcagacttgagagcttcccacattccaagtttatttatttaccttcattagacacagtctccaaaacccttttcttgttcaaattaaacagctatg

SEQ ID NO: 448852 - DNA, 458 bp, Homo sapiens
ccctggaaacatcaaataaaatgacatctctgtccagtcacatttttttcaggcttcgacttgaaaatcttagtctttgtctcttaaaagttaatgaataaaatgaaatctcttacttagctttactttcctttaaaaactgaaagaagatatacttatctttgagacccagacaatctcatactcagagtgacatcattctagggctgtcttcaggcttctcatgacctttcatccttccaaacactccttttgtcattcagacttgagagcttcccacattccaagtttatttatttaccttcattagacacagtctccaaaacccttttcttgttcaaattaaacagctatggttttaattctggtttggaaaagtacgaatagtctactatattttgactttcattttgctttggmcaattacaacaataactcttaaatttactgagtgcata

SEQ ID NO: 448853 - DNA, 586 bp, Homo sapiens
tactacacatggccagatggcagaggtggttgtatggatctctgcatatctgaatcctcaaggtttcaatatgaagtcatgaagaataattgttctctgrctctctttctacatccattcttttcacccctcactctcttcttccttatgcctatcttagcatccagatttttttttctatgaacatattgcatgacatttttaattttagaagtttgaatttgttacaagagattatcatttactctacagtaagagtaaacaaatgtattgtgagctgttttcaactcatctaattgtttttttaatgaagaatgtggacacatgaaacatgcttgccttcagatgatatgcaaatttacataatatctatcttgtctaagtcttctttctatttttctgtctttctctcccttccttctctcactgcagtaagcagggcataagggcagctggaacatgtggtcttttatttgatcaaaggtaatgatcaaccaagccagaggaaggtaggtcagctttcctagttcacctgctaaatagaatctttttacattctctccaattgtgagtccatctgtgccac

SEQ ID NO: 448854 - DNA, 546 bp, Homo sapiens
tggttgtatggatctctgcatatctgaatcctcaaggtttcaatatgaagtcatgaagaataattgttctctggctctctttctacatccattcttttcacccctcactctcttcttccttatgcctatcttagcatccagatttttttttctatgaacatattgcatgacatttttaattttagamgtttgaatttgttacaagagattatcatttactctacagtaagagtaaacaaatgtattgtgagctgttttcaactcatctaattgtttttttaatgaagaatgtggacacatgaaacatgcttgccttcagatgatatgcaaatttacataatatctatcttgtctaagtcttctttctatttttctgtctttctctcccttccttctctcactgcagtaagcagggcataagggcagctggaacatgtggtcttttatttgatcaaaggtaatgatcaaccaagccagaggaaggtaggtcagctttcctagttcacctgctaaatagaatctttttacattctctccaattgtgag

SEQ ID NO: 448855 - DNA, 586 bp, Homo sapiens
tactacacatggccagatggcagaggtggttgtatggatctctgcatatctgaatcctcaaggtttcaatatgaagtcatgaagaataattgttctctggctctctttctacatccattcttttcacccctcactctcttcttccttatgcctatcttagcatccagatttttttttctatgaacatattgcatgacatttttaattttagaagtttgaatttgttacaagagattatcatttactctacagtaagrgtaaacaaatgtattgtgagctgttttcaactcatctaattgtttttttaatgaagaatgtggacacatgaaacatgcttgccttcagatgatatgcaaatttacataatatctatcttgtctaagtcttctttctatttttctgtctttctctcccttccttctctcactgcagtaagcagggcataagggcagctggaacatgtggtcttttatttgatcaaaggtaatgatcaaccaagccagaggaaggtaggtcagctttcctagttcacctgctaaatagaatctttttacattctctccaattgtgagtccatctgtgccac

SEQ ID NO: 448856 - DNA, 586 bp, Homo sapiens
tactacacatggccagatggcagaggtggttgtatggatctctgcatatctgaatcctcaaggtttcaatatgaagtcatgaagaataattgttctctggctctctttctacatccattcttttcacccctcactctcttcttccttatgcctatcttagcatccagatttttttttctatgaacatattgcatgacatttttaattttagaagtttgaatttgttacaagagattatcatttactctacagtaagagtaaacaaatgtattgtgagctgttttcaactcatctaattgtttttttaatgaagaatgtggacacatgaaacatgcttgccttcagatgatatgcaaatttacataatatctatcttgtctaagtcttctttctatttttctgtctttctctcccttcyttctctcactgcagtaagcagggcataagggcagctggaacatgtggtcttttatttgatcaaaggtaatgatcaaccaagccagaggaaggtaggtcagctttcctagttcacctgctaaatagaatctttttacattctctccaattgtgagtccatctgtgccac

SEQ ID NO: 448857 - DNA, 573 bp, Homo sapiens
agtccctagtgcttagcaatacttgttggttggtattttgatggatcatttcagaaaaggcttctagaatgactgctgaaaggtagtgatagttggccatggagtaggggcagaggataaagaattgtcatatcagccatagacttcaagaggcaaagatgggaaaagaaaaaaaaggagatggtcattgatagaaagtatgattatttgaagaatgaggaaaagctagaactgagtaatctaaggaagtcacgtgtccttctgacaaggctgctttcatgcaattttcacattgtgaccattttaaatttcacatacattaatgaaattaaaatgacaaagcactaaactttcagcttataaaaatgatcatgtaatagctggacaccttcatgcatttctaaacctcactcagtcctccaggttactcctgggggtatatgagtgaatctgagaagtgggctgggggttagcaatggaggaaatgcacctactgtgcatttcactaggtaattaaaaagccaaaaatktaagatctacctttagactagcctaaatgtgtctgtgccttat

SEQ ID NO: 448858 - DNA, 546 bp, Homo sapiens
cattaggggggatacacaactgattaggtcacttgattgccgatatagcaattaaaaagcacacaaccaaatagagaaatacttctggtgtagattctgctttcactcaccaatcaccaaggctatcccatttttcttcttcaaggattttgagggagggcttggaagaataatgctcataaatggataagtartgttgcagatgctaccaaggaatctgatggaatagatggtgaatagcatgtgaatagagagtgccatgggaaggcagtgagaagaaaaatattagcaagtcctgctgatgcaaccaaagatactgcttcctgtctgccaccccatccactacctctgtctctcttataccttcaatgccttcctctgccagttgtttctctgtagttcataagcatgcttaaatttcttccagtcaaaaaacaaaataaaacatccctctcttaaccctgtagcccatgttctcaagtgcaagaagttcagaaaaagtttttaacgagtgttctatactcatttgtctaccttttctcactt

SEQ ID NO: 448859 - DNA, 546 bp, Homo sapiens
cattaggggggatacacaactgattaggtcacttgattgccgatatagcaattaaaaagcacacaaccaaatagagaaatacttctggtgtagattctgctttcactcaccaatcaccaaggctatcccatttttcttcttcaaggattttgagggagggcttggaagaataatgctcataaatggataagtagtgttgcagatgctaccaaggaatctgatggaatagatggtgaatagcatgtgaatagagagtgccatgggaaggcagtgagaagaaaaatattagcaagtcctgctgatgcaaccaargatactgcttcctgtctgccaccccatccactacctctgtctctcttataccttcaatgccttcctctgccagttgtttctctgtagttcataagcatgcttaaatttcttccagtcaaaaaacaaaataaaacatccctctcttaaccctgtagcccatgttctcaagtgcaagaagttcagaaaaagtttttaacgagtgttctatactcatttgtctaccttttctcactt

SEQ ID NO: 448860 - DNA, 618 bp, Homo sapiens
ggggcggcgaatttaggccaacaaggttattttgctatgtctaccctaaaactatcaaaaagcaggttcttctgacattcatcatgaatagaaatatattaatagagttgttgtaaggactagaggaatacatccattgatcaatattattaatattttggaaagaattcccatttaagaatatttaaacaatttaattatcccctaagaatttcactttgaacagttttagtgtggcaacccttttccctatctccaaagtaggcagataaaaatcactgtggggatgtagtcctaccctagggatgccaacttccagacatgctaataggtggccagggtgttatastggttttgtctcctggacataagacatgctgaaaatacataaaaaatttagctcatcacctggatgactccttatgttaaaaaaaatcaactctgtgtatttatatgttggggctcaataaataaaatgtggggattgaaggatcttctaaaccatattatttccaatgaaccaggaaatcactacatttatatatttttaagtctagaaaccacttaaatatccaacagtagggaattggttaagtaagttataaatatccatattta

SEQ ID NO: 448861 - DNA, 639 bp, Homo sapiens
gcatagaatcatgttgttaaatcatatgtgcacataggcttatatgtgtatgtgtgtaaaattatgttttatagtttttacttatgagaggtcagtttatgcatttctragcatcttttgcttttgtattatagttagaaaaaatatgtattttgtcaaaggaaaaacagtcttctccatcttctctaacaaaacatttattactgactaattagcctccctggagatataaacgtttgctaatgagacttaaataaccccttaacttcaatagcatatattttactccacttactgctgtactgttcaactaatatcaatgggtaaattatatttgaatttttgaaactgaataggatctcttttcttatggcttatttttattttaccttaataaatcattatgaaatattttaagttaccaaaagtacacagaaaaatataatagatatcaatgtatccatcatcgtacctgaacaagtatgtaacattttgttatatttgctttgcatctttttaaaaatgaaaccaagtctttcacatacaaatggaccctcatccaatctcatccccctgcctcctttcccaaaggtaatcatgtactgaaaataatacatataactatacatacctcccaat

SEQ ID NO: 448862 - DNA, 639 bp, Homo sapiens
gcatagaatcatgttgttaaatcatatgtgcacataggcttatatgtgtatgtgtgtaaaattatgttttatagtttttacttatgagaggtcagtttatgcatttctaagcatcttttgcttttgtattatagttagaaaaaatatgtattttgtcaaaggaaaaacagtcttctccatcttctctaacaaaacatttattactgactaattagcctccctggagatataaacgtttgctaatgagacttaaataaccccttaacttcaatagcatatattttactccacttactgctgtactgttcaactaatatcaatgggtaaattatrtttgaatttttgaaactgaataggatctcttttcttatggcttatttttattttaccttaataaatcattatgaaatattttaagttaccaaaagtacacagaaaaatataatagatatcaatgtatccatcatcgtacctgaacaagtatgtaacattttgttatatttgctttgcatctttttaaaaatgaaaccaagtctttcacatacaaatggaccctcatccaatctcatccccctgcctcctttcccaaaggtaatcatgtactgaaaataatacatataactatacatacctcccaat

SEQ ID NO: 448863 - DNA, 579 bp, Homo sapiens
catgtactgaaaataatacatataactatacatacctcccaatcacatatttatattttcatcacatatgtatgtttataaacaatagttttattttatggttttatttttaaatttatataaatactggactttaatcttttgaactkgacttccactcaacatgatcttttcaaaatttattcctaatatgtagagatttcattaattttgcctcaagtatagtattccattggatgaacacttactcattttgaaaatccatccgttgatggtcatttaagatgttctaattttttgctttgagaatacagtgaacatcctatcatctgtctccttgagcaaaagtacaatcatttatttaggatgtacacttgggtttcgtgacttacaaaggcatcttccagttctccccaatcaatcaatcaatcaattactgcattaatcaatatttgctgagagcgtagtctatgaaaataaataactagacattagttcttagaacccccttgtgtttcaaccctgccgttgattcaaaataaaatcaaatctaaagacaaaaagtaagtagacaaaatt

SEQ ID NO: 448864 - DNA, 520 bp, Homo sapiens
gaggaacactaacctggagtttagagtttcaggagagacttctttgggaacaagacacctataccggaagattaaaaaatcagccaagcacaagaggggcagaagagagagtttattaaattcctgtgtattaattttcttatctcagcctttgcctcaattaagtctcgatatrcctttatgtcatgggggtctatcaaggtatttcctcagcttttcaatatcactttgtcacaaattaaagagactgagaattgagccagaaacgtccattaaataaggtttctttcaatgttgtttgtgtcaaatgctaatgtcctgaaatatttaaagccattaaagctattgatttttataagcaatttcatctctattgatcctttatcattatattcctacactttctactctgacaacaaaacacaaaggaaatcccagtacctacggtgattatttttgccatctaaaaattctataagccttccaattgcagatgaagtcctcaaaagtgtatacatta

SEQ ID NO: 448865 - DNA, 520 bp, Homo sapiens
gaggaacactaacctggagtttagagtttcaggagagacttctttgggaacaagacacctataccggaagattaaaaaatcagccaagcacaagaggggcagaagagagagtttattaaattcctgtgtattaattttcttatctcagcctttgcctcaattaagtctcgatatacctttatgtcatgggggtctatcaaggtatttcctcagcttttcaatatcactttgtcacaaattaaagagactgagaattgagccagaaacgtccattaaataaggtttctttcaaygttgtttgtgtcaaatgctaatgtcctgaaatatttaaagccattaaagctattgatttttataagcaatttcatctctattgatcctttatcattatattcctacactttctactctgacaacaaaacacaaaggaaatcccagtacctacggtgattatttttgccatctaaaaattctataagccttccaattgcagatgaagtcctcaaaagtgtatacatta

SEQ ID NO: 448866 - DNA, 571 bp, Homo sapiens
caatgctttacaaatagggtagggaaatcctttgcaaacagggttagagaaaatccttaaatacattcttttgaaatgatgcttctttctctctccctgatctcattccctctgcttccaagtattctctgtgtttatccaccggacatctagatgagagaaacaacctccaaatagcccccttttcagactaatttctccgctatccawttcagcccctctctccaactagtgttagatattccctaaacatcactttccccacgttgcttttctactcaaaaatcctctaggagcttctattttctatcacattacccctacattgttacacaaaaatgtataaggtatgacagtgtcttttccatctttgtatcttccatgttgttatataatgaagtgtctgacacatagaggctgaacatgtatttaattagtatacattaaaattttggttaactttcaagacttatggccaaacgctttttaaagctgttttgtttactacttaattccaagttttattaattttctcctctgtatttctacaatatttctagatcaaagaata

SEQ ID NO: 448867 - DNA, 571 bp, Homo sapiens
caatgctttacaaatagggtagggaaatcctttgcaaacagggttagagaaaatccttaaatacattcttttgaaatgatgcttctttctctctccctgatctcattccctctgcttccaagtattctctgtgtttatccaccggacatctagatgagagaaacaacctccaaatagcccccttttcagactaatttctccgctatccatttcagcccctctctccaactagtgttagatattccctaaacatcactttccccacgttgcttttctactcaaaaatcctctaggagcttctattttctatcacattacccctacattgttacacaaaaatgtataaggtatgacagtgtctttyccatctttgtatcttccatgttgttatataatgaagtgtctgacacatagaggctgaacatgtatttaattagtatacattaaaattttggttaactttcaagacttatggccaaacgctttttaaagctgttttgtttactacttaattccaagttttattaattttctcctctgtatttctacaatatttctagatcaaagaata

SEQ ID NO: 448868 - DNA, 525 bp, Homo sapiens
caagcacacgtttttcttatttttacttacatgatatgttagagagcaataaaaatggcaacattttctacagaggtgttgaatcacattttacataagaatgagaaaatgctagtagcacccatcacaggacaccagttttttttaatcttggagtgatttttggatactgatggagatcatgaggcctaaagatatctsttggcactacaactgggtccaacactaatcaagagtgagaaaaggatattattactgcccttttaaaacttacagttttagactgcatttgacaggtcatattaatcttttgcatacttaatagatatcagctattttttttgtaaaaagtaacagatctagcagtaggttgcataatagagatatacagaataagaaatgaaaaactgttactaactgtgtagtcagatacaaaaaatataactttagatccaaggtaataaatcaaccgtggaaacatgcttgctcagttcacctcagcatatctccctcaagtaatgttgc

SEQ ID NO: 448869 - DNA, 567 bp, Homo sapiens
ttcttatttttacttacatgatatgttagagagcaataaaaatggcaacattttctacagaggtgttgaatcacattttacataagaatgagaaaatgctagtagcacccatcacaggacaccagttttttttaatcttggagtgatttttggatactgatggagatcatgaggcctaaagatatctgttggcactacaactgggtccaacactaatcaagagtgagaaaaggatattattactgcccttttaaaacttacagttttagactgcatttgacaggtcatattaatcttttgcatacttaatagataycagctattttttttgtaaaaagtaacagatctagcagtaggttgcataatagagatatacagaataagaaatgaaaaactgttactaactgtgtagtcagatacaaaaaatataactttagatccaaggtaataaatcaaccgtggaaacatgcttgctcagttcacctcagcatatctccctcaagtaatgttgcatacctgaagttaacaacttcttaaaatgttttcaagaactgctaaaataattta

SEQ ID NO: 448870 - DNA, 567 bp, Homo sapiens
ttcttatttttacttacatgatatgttagagagcaataaaaatggcaacattttctacagaggtgttgaatcacattttacataagaatgagaaaatgctagtagcacccatcacaggacaccagttttttttaatcttggagtgatttttggatactgatggagatcatgaggcctaaagatatctgttggcactacaactgggtccaacactaatcaagagtgagaaaaggatattattactgcccttttaaaacttacagttttagactgcatttgacaggtcatattaatcttttgcatacttaatagatatcagctattttttttgtaaaaagtaacagatctagcagtaggttgcataatagagatatacagaataagaaatgaaaaactgttactaactgtgtagtcagatacaaaaaatataactttagatccaaggtaataaatcaaccgtggaaacatgcttgctcagttcacctcagcatatctccctcaagtaatgttgcatacctgargttaacaacttcttaaaatgttttcaagaactgctaaaataattta

SEQ ID NO: 448871 - DNA, 390 bp, Homo sapiens
gaagaaatattatccactaaaaatgttttcaaaagacagaacattcttctttggggctattaaggtaggtctcaaacatatgatttaactatctttttttttttttttaacatatgcggtatttaggaggacagctttaggccgggggtgktggctcacacctttgggaggcacctcagcattttgggaagccaaggagagaggattgcttaaagttggtagtttgagaccagcctgggcaaacatagtgagactttgtctctagaaaaaatttaaaatatagacagggatggtgatgcatgcctgtagtcccagctacttgggaagctgagataggaggattgcttgagctaggggtttgaggctgcagtgaatcatgatcctgccaag

SEQ ID NO: 448872 - DNA, 434 bp, Homo sapiens
tcagaatagtagtggatttgtctgctcaagctgctgtcacaaaatatcacaggctgtggggcttaaacaacagaaatgtatttcctcacagttctggaggctagaagtccatgatcaaggagccaacaaattcagtgtctggtgagggctttcttcctgcttgcagatagccaccttctcactgtgtcttcacatggcctttcctctatgtgcacatggggtagggggtggagagatctctggtatctcttcctttttaagaggacactaactattaggttagagcccccacctttatgaaataattcaactttagttactacccaaaagtcctatcttcaaatacagtcacattgtggattaagccttctacctatgaatatggggggcacaagtcatgtcatttagtrtatacaatagagcacagccaggta

SEQ ID NO: 448873 - DNA, 570 bp, Homo sapiens
tatagactggctgaatggattttaaaaaaagcacaacccaactctatgctgcctacaagaaactttacctcacctgtaaagacgcacatagatggcaagaaaagaaatggaaaaaaaatattccatgtaaacagaaacaaaaagcaaacaggaatagctgtacttatgtaagataaaacaagagaatataataataatatctacatatatagaataaagaattgggtacacatatatacatatatatgtatgtagggtgagatgataaatagatgaaagaaagaaagaaagagaaagaaagagagaaagaaaaagaaagatttgggtgtctttgtgtgtttatacactgaacatcagatcacccagatgtataaaacaaatattatcagatttaaagggagagataactctaatacaatagatggacctataacgtatayaggacatttcatttaacaactgcagaatacacattctttttaccagcacatggtacattcttcagggtagaccatatgttaggccacaaaacaagtctcaatcagtttttaaaaatccaaattatatcaa

SEQ ID NO: 448874 - DNA, 626 bp, Homo sapiens
ccattgaattttcaaatgggagaataaaatatatacaatgcattttagagaaaaattactttgaatattccagggaagacccacatttgtaatttgtctgaaacattgtacaagagtcatacaatcaaaccattatagaagccatcaggaaatataaccacaaagaatgaggtttggtwtaagacaataagggcagggggcgggtcactgaggcccacatgcaagggcatgccgcatttaaaggagcaactaactgctgcttagctctcaaatggtctgtgcatggcatttcggaaggcaagcttattttaagacagtatctcctgacttttaaagatacaatggaaactcatgagttcctgaaaattttctgatgtcctaaatcaaaatcttctaaaatcttggacagaccagacaaaatatgctgactaaattataactgtagggcaccaaattgttatctttatacagtaacacagtgtgaaaaatgcagccactcagaagttaaccttaagatcatgacaatgaaaagaaatcccaagaggtcactggcccagatcttctatgtaggcaagtctacactaaaactattgatgatgcttatatggccaatgaatactcactgt

SEQ ID NO: 448875 - DNA, 524 bp, Homo sapiens
tacaatggtttattgtacacttaacaacttattcagtgattagtttgtagttccagatatgtcatccttcctggagcaaakcaatccagaacctgtcatctaacatatacttgttgatttgataaaggattttctctagtctaatattcagaaaacaccaaacactgtttctttcacctggtcagggcaccagcaaatcttcgtgttctgagtcaggacaacatcaactgtccacatctctgacacaatgtaatccattggtactttaaccatgtcaaccagcatctttccagatataacacttgttactgaagtgatattaaaaaaaatgtcatgatcactcttttgtggtctgctgcctgtctgatccactacagctttcttaatcccagcaaaaccattacatctgagaagtacactcaacaaatggatgagatgcaccgaaaactgcaatgcttgcagccgacattggtcaacagaaagggcccgattcttctccatgacaatgcccaatcgcatgtcgc

SEQ ID NO: 448876 - DNA, 524 bp, Homo sapiens
tacaatggtttattgtacacttaacaacttattcagtgattagtttgtagttccagatatgtcatccttcctggagcaaatcaatccagaacctgtcatctaacatatacttgttgatttgataaaggattttctctagtctaatattcagaaaacaccaaacactgtttctttcacctggtcagggcaccagcaaatcttcgtrttctgagtcaggacaacatcaactgtccacatctctgacacaatgtaatccattggtactttaaccatgtcaaccagcatctttccagatataacacttgttactgaagtgatattaaaaaaaatgtcatgatcactcttttgtggtctgctgcctgtctgatccactacagctttcttaatcccagcaaaaccattacatctgagaagtacactcaacaaatggatgagatgcaccgaaaactgcaatgcttgcagccgacattggtcaacagaaagggcccgattcttctccatgacaatgcccaatcgcatgtcgc

SEQ ID NO: 448877 - DNA, 592 bp, Homo sapiens
acaaaaattgcctattcctgctgtattgccactccttcctcaagctacaactttggcctttttgggaagttcctaagtccggtaaattaaagaggacaaccatgtctagagatgtctttatataagtttctgtaaaatatgctcaattcagccaaactggacttctgtgacattacagccttctttgaggaaagaaatgaagatgttgaaagacaaaaaaaaaaaaaaaagagaaatcatctctggggcagaaattcaagaataaatcttcttgtctatgttgccaggyaggaaaggtgaccagaaataagaatctgcattcaatttatgaactcgggctagtagagttggtctctactagccagatggtcatggacccagaagaagagtaacatggaagtttgggtcaaatgtatatggattgatcttttggaataggtccaggatttgaggatatttttgtctcatgtaaacctccgccttaaagtccttctctattgaggaacactttaatgagtaccactttaatgagatgtcagaaaggatgactttctccttacatgtcagttagtatccttcctagcctctttgg

SEQ ID NO: 448878 - DNA, 592 bp, Homo sapiens
acaaaaattgcctattcctgctgtattgccactccttcctcaagctacaactttggcctttttgggaagttcctaagtccggtaaattaaagaggacaaccatgtctagagatgtctttatataagtttctgtaaaatatgctcaattcagccaaactggacttctgtgacattacagccttctttgaggaaagaaatgaagatgttgaaagacaaaaaaaaaaaaaaaagagaaatcatctctggggcagaaattcaagaataaatcttcttgtctatgttgccaggcaggaaaggtgaccagaaataagaatctgcattcaatttatgaactcgggctagtagagttggtctctactagccagatggtcatggacccagaagaagagtaacatggaagtttgggtcaaatgtatatggattgatcttttggaataggtccaggatttgaggatatttttgtctcatgtaaacctcckccttaaagtccttctctattgaggaacactttaatgagtaccactttaatgagatgtcagaaaggatgactttctccttacatgtcagttagtatccttcctagcctctttgg

SEQ ID NO: 448879 - DNA, 649 bp, Homo sapiens
cacggtgtcctacctaatttagctttcaattgacagtgaaagaagtatagaaatagcctgatgtccatggaatttactcatcttatgtgccatgtcatccagaagtggctaccctaaaaaaaatggaggaatgatctattgaaacctcacttattttgcctcctggaagataatgtcttgtgagattgtgggtgttctataggatacaggatattctctgaggtagccacacacaaaagcatccttttcccctgattcacrctctaagaaaatgtatgattctgtttctgtcatagtcagaatatatcaatccaagaaacaaggatagaagtaggaataacaattcccaaggttagacctaatgttcaaacctgcaaaatttgtgctatcctatcttcatatctacagcctttgataatttaaagaaataaatgtttcccctaacggaccctcaaaaaataattctgctaaactagcagatgagacttccagctagctttttatatctccccacggcactagaaaaaataaaataaaataaaagggtgaggttatagtgcagccaagagtgattgatcctgattgttaagaaatagggttgtttcttcctgatggcagcaaagagatgaatggaacttaacggcagatt

SEQ ID NO: 448880 - DNA, 567 bp, Homo sapiens
cacttgatttccaggatatgtagcctcttgattttctgtcttcacagttgggaccttctcagttgttctcttccagctctttctcatatcccagacttgcaaatattcgagggcctgcagtttagtcctcttaccttttctccatctgctctcagtccctcaaggaactcattgagtctgacatattmcatactcatttgtttgtaaactccatgaaagtaatgacttgacctgtgttcccttgtaccttccttgtcaactaaagacccaacacctggaacttacctggaagataataattactgaatacatcttgggtgcatgaacatttaagtattcttttttttgcaggcaccacatttattcctattattactccttcctccaagaccattttgctatacagacatggctcttaatgctacagtgggcatatttcatggtacttgccccctcacagtctcaaaggaaagcttatttatgtcactcaactcccctatccagcagagccaatagaccccttttgagtggatacacaaaggtctaagtcttaatcaactaatgggg

SEQ ID NO: 448881 - DNA, 524 bp, Homo sapiens
tcggtgtctgcccaaatggctgcctagttttgtgcttgaaacccaggaccctggtggcataggcaaccgagagaatctcctggtctgtgggttgctaagaccatgggaaaagcatagtatctgggccggagtgcaccattcctcatggcacagtcactcaaggcttcccttggctagggaagggagttccctgaccccttgcacttcctgggtgaggtgacaccccactctgcttcagctmgccctccatgggctgcatccagtgtctaaccagtcccaatgagataagctgggtacctcaattggaaatgcagaaatcacccgccttctgcattgatctcgctgggagctacagaccggagctattcctatttggccatcttgccagccctgttcaatattcttaatatttaaagagttactttatatgaatagaaaagataaaaactaataaactgagcaaaagataggagtaaaaagtgattgcttaatatattaaaggatgcccaatctcattcataaga

SEQ ID NO: 448882 - DNA, 542 bp, Homo sapiens
tgaaatattacacaacttttaaaaggatgtttgtcatggaactgacatggaattgcctctgtaatgtactaatttttaaaagraaaatacaaaatagggcatagaatatgctatcaattgtgtggggaaaaaaacctcagatacttgtatatgtgcttagagcattcctgaaaagataagcagaaagaaataacactagtagacttcaggtgggaaaaatggcaactaagaatgaaatagaagagaaccatctgttactgcatgcttttgaattttgaactatgtgagtaaattacttattaaaaaaacaaatatcagtcagttctgacataaaaggaacctatgagtcatcattcccatgcttataacaagaaaaaaagctgaacaaataaaaattcagttactttccctggagtcctgaaaaaattgagatcacagaacaaattgctaccccaaaatctggaaagaagggtaaataaagaaaatcacagccacagtcagcttacctggagcacaagttgatagagccaaaattggtagga

SEQ ID NO: 448883 - DNA, 542 bp, Homo sapiens
tgaaatattacacaacttttaaaaggatgtttgtcatggaactgacatggaattgcctctgtaatgtactaatttttaaaagaaaaatacaaaatagggcatagaatatgctatcaattgtgtggggaaaaaaaccycagatacttgtatatgtgcttagagcattcctgaaaagataagcagaaagaaataacactagtagacttcaggtgggaaaaatggcaactaagaatgaaatagaagagaaccatctgttactgcatgcttttgaattttgaactatgtgagtaaattacttattaaaaaaacaaatatcagtcagttctgacataaaaggaacctatgagtcatcattcccatgcttataacaagaaaaaaagctgaacaaataaaaattcagttactttccctggagtcctgaaaaaattgagatcacagaacaaattgctaccccaaaatctggaaagaagggtaaataaagaaaatcacagccacagtcagcttacctggagcacaagttgatagagccaaaattggtagga

SEQ ID NO: 448884 - DNA, 429 bp, Homo sapiens
aaaaatgctatatgctgtataattccaattatattacattctaaaaaaggagaaattgtaaagccagtaacaagatcaatagttgctggggttagaggataggggaagtgttgaacaggtgaaaaacaaggaattttaggayagtgaaactatcctgtaattatggacacatgacatcatacatttgttaaaacccataaactttacttaaaaaggagtaagctttaatgtatgcaaattttcaaaaaagcatttaggatgtgaggggatcctgggaaaaaaatgcagacaatgacaagagaatctatctattacaagtgtgtggaacctcactgaaaggggtgggtggaaaggtatgatctaagtaactttgaaatgagtagaatttctaagacttaaggcaaaggaacttacttacatacctataaa

SEQ ID NO: 448885 - DNA, 616 bp, Homo sapiens
ccatatatcatgccaacccttctcttaatcaacccatttgccccctccatcaggcagccataatgggtgcccccgtatataacccatgaggccatagatgtgaatcgaacaacaggtactggtagatgacacaggtctctggatcatctgctcatgctgctttcttgtgcttcccactcttgcttttacccagtcccagatataccactcccatcttatgatggactactacagggcccatttaaccctatgacttggtgaaactgacataacacrgctcatggtagacagttgtgctccttgtctctactagggagctgttttgtgaatgatatataatcctctgccgtggaaggcattgtcctactctggatcctagacaactacatgacaattcttctgttggggcttgtaaatagcatgttaataacatctacatggcaattcttctattgagacttctattggaagagacacttcatgcagtgtcatttctcaccacagagtctgccattgccacaggctgtgcatgtaccatctatcaggactgcttatacaacaggactgactttcttcagaaggctttcctgcagtagaccctactcaaagtgaagct

SEQ ID NO: 448886 - DNA, 542 bp, Homo sapiens
ccacaaatttttatatttaaacagaactatgtttatatttaatgtttatatttaaacatatctaaaacagaaatgtgtacaataataaaatcatagtgctgaagggaaattcattcaactctaattcatctcaaatttcaaktggaaacaccaactaagcatcagagagaggcaaaactctttcccttttataaatccaatagaagtccgttaaccaatttctctaaccatcggtcactttaagattattaccaccttattgtatactatacattacacctttgaaatgaagacagaatattttatattagaaggtgaaaaatctttttttcaggtatgttcattttagtccacatttgtggaaatggcaggctctggccattttagagcaggtgttgcctgatgaaatacacatttgtaaacagattcttgtcctcttcgttaccggtggttgttattgtccaacagaaacctgtgaaagcgtctgcactttagcttgtttactgtgcattcttaatgcctatgaatgcaaacaggcagat

SEQ ID NO: 448887 - DNA, 496 bp, Homo sapiens
caaaatgtcaatcttaatggactaaggtaagctcatttgcctcggaagtgaagggaaacccttaacaatgaaacattcccaaaaaccaggaaatttaaggcaaatatcagaacacacaattatttattgaatgaaaaggaaactggtagacaagggcaacgaaccttctgatacataacaaagatgaatgcttttttttttttttctatgctttaggacacagagggagggagaaatccaaggtctaragttaggcttgaagtgggtatgttggaaaaggagtgtaaagtatacacatacattgtaactgctgacttcctttattaaaacctgtctacaggcaacacttgaaacttacatatggggagagacttcttgaagctgatgtcagatgcctaaaaaggaagtgcaaatggccatcatcctgggttgcactggggatgacttgttgaagcacgatgtcaccaaagagcagtttcgcatcaatagctttctt

SEQ ID NO: 448888 - DNA, 607 bp, Homo sapiens
ggactgtttaacacacacacttctctgtttagtgattatctgtgtagtaatcctggcctattctgattcgttccagaggatgagtgaacatctctcagtgtagactaagtacctggctcagtgcccggcacattggtggctccatgccaacagcagggagctttcctaggtgagtgggcatgtggatcacagaagaatttgtacacatgggttactagtaaaccaggtgtagaaatgtgggattctatagccccatcagattaagaatgacaattacatgatgtgatgaatgcaacagggctttaattccgaaagtcaatttaattttttgaaataactgttctccatagcttccttacaaaaatgggtaccctttgcacttctagaatttggtaacatgtraatacataagctgcttcagtgcaaataataggacaactgacaaaactatttcttaatactgtgttgcacagttaggcataaaaaatgtgcaagtataatgaaactgatgacttttgttctaaccttttacattattcactttctctactttgctttttaaaaatgttatttttctgtgattacaataatattatatgtagatcat

SEQ ID NO: 448889 - DNA, 530 bp, Homo sapiens
agaatgaaaaggtaaaaatccctgcttctgtggggwttacagtccaatagggaaaaagcaatggaaaagataaatttataaaatatatacgatgttgaatcctaaaattcatatggaaccaaaaaagagcccacatagccaaagcaagactaagtgaaaacaacaaatctggaggcatcatattgcccaacttcaagcaaaactacaaggctatagctaccaaagcagcatggtactggtataaaaataggcatgtagacaaatggaacagaatagagaacacagaaataaaaccaaatacttacagccaactgatcttcaacaaagcaaacaaaaacataaagtggggaaaagacaccctattcaaaaaatggtgctgggatagttggcaagccacatttagaagaatgaaactggatcctaattctcatcatataaaaaaatcaactcaagatggatcagagacttgaatctaagacttgaaaccataaaaattctagaagacaacataggaaaaatttttctagatc

SEQ ID NO: 448890 - DNA, 560 bp, Homo sapiens
actgaaacattttttttaacttacattggatgaagcccaggcagcatgtatgaatggcttctgggaattcttgatgagatagggtggaacgtaaatacagttcccaggaatcttggatttagtgttcaagtttcagggtctagaaattattttaattgcttgttcagctggtaaaccaaaagtgaactcaacagtggcttaagctgaatcaacatgagayaccagacattattcgctttaatgtaaataacaactacaaatgtttaggtgttttaaggacaaggaagatggggtagatttatcatgtataactatgtcctcctccaatcctgtcccccagtaggactcaggagacacactcttcatcaagacacagacaggtacgttagataaggggaatgccagttgcctagaaaagtgctgtagtgctgctctctgaggctagaatgaaaggagatgctgtcattgaaatatggtccctattttcaacgggaatgatgagatcaatgatgttgatccttaacctcaaggatcaggtagatgtggttactgtaatatgc

SEQ ID NO: 448891 - DNA, 560 bp, Homo sapiens
actgaaacattttttttaacttacattggatgaagcccaggcagcatgtatgaatggcttctgggaattcttgatgagatagggtggaacgtaaatacagttcccaggaatcttggatttagtgttcaagtttcagggtctagaaattattttaattgcttgttcagctggtaaaccaaaagtgaactcaacagtggcttaagctgaatcaacatgagacaccagacattattcgctttaatgtaaataacaactacaaatgtttaggtgttttaaggacaaggaagatggggtagatttatcatgtataactatgtcctcctccaatcctgtcccccagtaggactcaggagacacactcttcatcaagacacrgacaggtacgttagataaggggaatgccagttgcctagaaaagtgctgtagtgctgctctctgaggctagaatgaaaggagatgctgtcattgaaatatggtccctattttcaacgggaatgatgagatcaatgatgttgatccttaacctcaaggatcaggtagatgtggttactgtaatatgc

SEQ ID NO: 448892 - DNA, 557 bp, Homo sapiens
acagggactgcttagacaaagctgtatctttggataaatgtatcaacagaccgaagtgaaagtaagagataggagaaaaatcattgatagctagtgatagctaaaaatggatttattttaaggaatagcatgtttatataaatttatcaaatagattagcaagacaggtaataataaaccctactaattcccaagaaaatttactattagatagtgaatttactaccagagagttaattgctaaagcaatgacacaacaatataattatttttaaatatcttatttgtgccaaagaaatcaggctaaaaacatgtcttctttttgcataacatttgaacacaatgccaccaatgcaaggyatggttaagtcttcacacttcaaagaaatgacgtttcagcaacacttagggaaagtaagctaaaatctgcggggcattccagttgccaaggacacttgtaatcatttccctaattgtccttgacaatcttatcattaaagatgtgggacattaattaatgatggaacatctattcccgggaaaacaggccttggagg

SEQ ID NO: 448893 - DNA, 488 bp, Homo sapiens
aaataagagaaaagaatatttagagaagaaatgaaatgaaaaattcattgataatgtttggcaggtggcaaaatcaatcacatacctattttataattattkcaagttacaaatgaagtattctaattcatgtctggctaatttgaccataattgtcttgtctatattatgtattttaggtcttagttacttaaagtctacaatattctttcattcctatattttcacacaacaattaaacagataacaattaaataaaattctaaactttaaatctagaattctcatcccctattcacttctgaatccacatgtataagcttattttttatctaaggaactgaaaactgctcatgtcaaggtcatcaatgttcttcatgttgccaaatccaactgacatctctctgccctcttagttgatttattaatagcattcaacacagctgactatttcctcttttcttaagcacttacctttcttaccatct

SEQ ID NO: 448894 - DNA, 488 bp, Homo sapiens
aaataagagaaaagaatatttagagaagaaatgaaatgaaaaattcattgataatgtttggcaggtggcaaaatcaatcacatacctattttataattatttcaagttacaaatgaagtattctaattcatrtctggctaatttgaccataattgtcttgtctatattatgtattttaggtcttagttacttaaagtctacaatattctttcattcctatattttcacacaacaattaaacagataacaattaaataaaattctaaactttaaatctagaattctcatcccctattcacttctgaatccacatgtataagcttattttttatctaaggaactgaaaactgctcatgtcaaggtcatcaatgttcttcatgttgccaaatccaactgacatctctctgccctcttagttgatttattaatagcattcaacacagctgactatttcctcttttcttaagcacttacctttcttaccatct

SEQ ID NO: 448895 - DNA, 554 bp, Homo sapiens
gctcatctcatgattttcagttactgtttaaaacaaaaaatgttttaataaggcttttaagctccactttataatttagaaatgttatttaggaatgtccctttcagacggtaattttctggagtgattttaaatagaaagtctcatccatttctggttgatatttaataatgaatatttaattttatttaattatttttaacagctttggtgagttataattgacactcaataagttgcatatatttaaagtatacaatttgataggctttgatatatgcatatattcacgaagctaccatcaaaatcaagataatgaacatgtctattatccccaacatgttcttcacacctttgtaatttctttctcctgctcctccctatcccctcatccccgtgcaacaattgatttggtttttattacagtagattagtccatatttttaagaattttatataaataaaataactatgataagtattctttattgyatgacttctttcactcagtataattatttcaagattattcatattgtgtgtatgaagagttc

SEQ ID NO: 448896 - DNA, 566 bp, Homo sapiens
ttgtttggaaaacataattaacactatataattcattaagatgtttcaagcctagttcccaagaaagctacatttcaaattatcccaaaggattaartatttaagaaggactgcaaataagaccataaaaattcattaagctactgaatttctagcagagtcttattcatttgcagaagcagagtcaaattacagtgatgttctataaggccagtgtgtgtgtgtgtgtgtgtgtgtgtgtgtgtgcgcacgcatgtgtgtgtatgtgtgatgtacatacacagagcattcatttgtaaatgtagtgattaatgtcaatctcccaggctcaaatacactttccttaaaagtatatatcaataatagctgctgattagaatatatattgtgtaacctagtaatcacttcgttgttaattcccctgtttgaggagttaaaatggattacaatgtagtagttatcattcaatagtatcaacattgaaatactaccatagtcaatattttggtatacattatttttggtaaattcaatcttaatatttcattaatacaatatactgcaga

SEQ ID NO: 448897 - DNA, 565 bp, Homo sapiens
aactgtaatccatcatggtagaagaaagactaaattatctttctattctctctatggaattgtattcctaaaacattatcatatgaagatgaaactaaagaatttgctttcagaaatggaagggaaaaawtatcaaagaagtctgaaagtaggaaattcgattaaatattaggctaaataaaatgtattcatttacttttaaaataaaaaatattctattacttttcaggatgttgttttttgtgctgtttgtcattaagtatctgtcatttcttgtcagtccttttcttagtccaaataaatggttttgatacttaattttacatttataatgtggtattcttttcttaaagaaagcctcctaaattatataagcttccaggaccatttcttcccaaagcttcctctaacagtgaaggccctttttcctgtaacaaaaaaaaagaagcaaaatgctctatgttccacttaatacacaagaaaaggacatacaccacaagactcccaaaaagccaatgcatataagagagtgggaaaatagtacacaacttttctcacaggacac

SEQ ID NO: 448898 - DNA, 575 bp, Homo sapiens
taattattataataagttttgtaacaatcactttttaaaaggcaaatagtttagaaaatagtttgtaaaagattgcatcacacatatagaatgttttatcaaacttttaaatgtgtgggtgggtgggtgtatayatagggttacaatgtaaaaggcatttcttactgtgggtcatggtctaaaaagtttgaataatacatatgagaaataaagggttggggccgggtatggtggctcatgcctgtaatcccagcactttgggaggccgaggtgggtggatcgcttgaggtcaggagttttcaagaccagcttggccaacagggtgaaaccctatctccactaaaaacacaaaaattagctaggcgtggtggcacatgcctgtaatcccaactactggggaggctgagccaggagaattgcttgaacctgggaggcagagattgcagtgagctgagatcacaccattgcactccagactgggtgaagaagcgagactctgtctcaaaaacaaaaaaccaaaaaaaccgttggctgtagatcgaagcacaagagaataagaataacagggacagtta

SEQ ID NO: 448899 - DNA, 575 bp, Homo sapiens
taattattataataagttttgtaacaatcactttttaaaaggcaaatagtttagaaaatagtttgtaaaagattgcatcacacatatagaatgttttatcaaacttttaaatgtgtgggtgggtgggtgtatatatagggttacaatgtaaaaggcatttcttactgtgggtcatggtctaaaaagtttgaataatacatatgagaaataaagggttggggccgggtatggtggctcaygcctgtaatcccagcactttgggaggccgaggtgggtggatcgcttgaggtcaggagttttcaagaccagcttggccaacagggtgaaaccctatctccactaaaaacacaaaaattagctaggcgtggtggcacatgcctgtaatcccaactactggggaggctgagccaggagaattgcttgaacctgggaggcagagattgcagtgagctgagatcacaccattgcactccagactgggtgaagaagcgagactctgtctcaaaaacaaaaaaccaaaaaaaccgttggctgtagatcgaagcacaagagaataagaataacagggacagtta

SEQ ID NO: 448900 - DNA, 559 bp, Homo sapiens
ttgagacagagaaagaaaaggcgatagccagctgaagagtgggaggtgatcatcccaggcagagaaaaactgcatatgcaagaaaagagaggaagcaagcacttggcatgtttgaggaactgaaagaggaccagcatggccacagcttatctccaggaaggtggatatatatgaggttggacataggttttttagtccatagcgagcgattagatttttattttaaatgcaatgggaggcccccgaagggctgtatgcagataagtgaagtgatccaatttccacttttaaagatcattttgctgctgaatataaatgtattgtagaayaagactgaaagctgttgcaggaatgaaagtgaaagatgctggcagcagaactggagaggtcaagtgtgagatctgttgtggagataggattttgggaatcgatgatggtatgggatacaggtgttgaggggatgaagagatcattgatgaatgtggtgatattaaataatagattttcaatgtagacaaaacagccttatattggaagaacatgccatttaggactttca

SEQ ID NO: 448901 - DNA, 559 bp, Homo sapiens
ttgagacagagaaagaaaaggcgatagccagctgaagagtgggaggtgatcatcccaggcagagaaaaactgcatatgcaagaaaagagaggaagcaagcacttggcatgtttgaggaactgaaagaggaccagcatggccacagcttatctccaggaaggtggatatatatgaggttggacataggttttttagtccatagcgagcgattagatttttattttaaatgcaatgggaggcccccgaagggctgtatgcagataagtgaagtgatccaatttccacttttaaagatcattttgctgctgaatataaatgtattgtagaataagactgaaagctgttgcaggaatgaaagtgaaagatgctggcagcagaactggagaggtcaagtgtgagatctgttgtggagataggattttgggaatcgatgayggtatgggatacaggtgttgaggggatgaagagatcattgatgaatgtggtgatattaaataatagattttcaatgtagacaaaacagccttatattggaagaacatgccatttaggactttca

SEQ ID NO: 448902 - DNA, 635 bp, Homo sapiens
cgtcccgccctcctgggcgctctccccatagctcgcccaggagaagcctagtccacccggctctaaccccgctctcacaggcggaagccgccgaccacccagcctgcccttctcgcggcaggacttakcgcatgcgctctcagcacgccgggaatttcctgtccgcggtcatcgcttccggtgggataggtctgaccaatggggctgactccgaggcgggccttaggtctcgcaggttcctcccctgcgcgtttctttcggagcggcggtgaaggtcctgggtgaggtaggggtggatggtgcttgccgcgtatcatggctgcctccggaaaactcagcacttgccgtctccctccgttgcccacgattcgagaaatcattaagttgttaagactgcaagcagcgaagcagctatcacagaatttcctcctggacttgaggctgacaggtggatggcttagcagtgctccccggatgtctccccagtgtccgtgggggcgtgggccggggggtcttgcacgtccccgcgggcgggtgtccaggcactggcgtgcgacgggcttttggtcaggtccttcgacctctttgtatcagaactccggtcccaccgcccaggagacacgtgaagtgcgttg

SEQ ID NO: 448903 - DNA, 635 bp, Homo sapiens
cgtcccgccctcctgggcgctctccccatagctcgcccaggagaagcctagtccacccggctctaaccccgctctcacaggcggaagccgccgaccacccagcctgcccttctcgcggcaggacttagcgcatgcgctctcagcacgccgggaatttcctgtccgcggtcatcgcttccggtgggataggtctgaccaatggggctgactccgaggcgggccttaggtctcgcaggttcckcccctgcgcgtttctttcggagcggcggtgaaggtcctgggtgaggtaggggtggatggtgcttgccgcgtatcatggctgcctccggaaaactcagcacttgccgtctccctccgttgcccacgattcgagaaatcattaagttgttaagactgcaagcagcgaagcagctatcacagaatttcctcctggacttgaggctgacaggtggatggcttagcagtgctccccggatgtctccccagtgtccgtgggggcgtgggccggggggtcttgcacgtccccgcgggcgggtgtccaggcactggcgtgcgacgggcttttggtcaggtccttcgacctctttgtatcagaactccggtcccaccgcccaggagacacgtgaagtgcgttg

SEQ ID NO: 448904 - DNA, 635 bp, Homo sapiens
cgtcccgccctcctgggcgctctccccatagctcgcccaggagaagcctagtccacccggctctaaccccgctctcacaggcggaagccgccgaccacccagcctgcccttctcgcggcaggacttagcgcatgcgctctcagcacgccgggaatttcctgtccgcggtcatcgcttccggtgggataggtctgaccaatggggctgactccgaggcgggccttaggtctcgcaggttcctcccctgcgcgttyctttcggagcggcggtgaaggtcctgggtgaggtaggggtggatggtgcttgccgcgtatcatggctgcctccggaaaactcagcacttgccgtctccctccgttgcccacgattcgagaaatcattaagttgttaagactgcaagcagcgaagcagctatcacagaatttcctcctggacttgaggctgacaggtggatggcttagcagtgctccccggatgtctccccagtgtccgtgggggcgtgggccggggggtcttgcacgtccccgcgggcgggtgtccaggcactggcgtgcgacgggcttttggtcaggtccttcgacctctttgtatcagaactccggtcccaccgcccaggagacacgtgaagtgcgttg

SEQ ID NO: 448905 - DNA, 510 bp, Homo sapiens
agctactatgaaaagtagtatagaggctcctcacaaaactaagaatagaaccaccatatgatccaacaattccactcttgtatatatatctacaagaaaggatatcaatatattgaaaagacatgtgtacatcatgtttactgcggcaccattcacaatagtcgaaatatggaatcaacctaatttctcatcaacagataaatgtataaagaaaatgtggcaaatacacacaatggaatattattcagctataaaaaagaatgaaattatatcatttgcagcaacacaaacggaactggaggttaagtaaaagaattcaagcacagaaagacaaatattgcatgttctcattcatgtgagagctaaaaaggagaattgtggatgtcatgaagatagagtrgattgctggttaccagaggccaggaaggtaagtgaggaagaggcatgaagagaagtccattattggatacaaatatgtggcttgggccaggtgtgggcaacctgtaatcc

SEQ ID NO: 448906 - DNA, 595 bp, Homo sapiens
ccccggttaggaatgctgagaaatggattcctagctcaggctagtgaggaaggaccattcctttttgaagccctttctagagcaccatgtgaattaccaatatctctttggtaaatctgtggtacacacggaaatgcttgttgttttcaaaaagaaaaacttccattcctcttgcttctatttaaatagataattccaggttgggggtggtgactcatgcctgtaattctggtgctttgggagactgaggcaggaggatcatttgaggccaagagttggaggctgcagtgagctaggatcaagctgctgcactccagcctgagygacagaacaacacactatctctaaaaaaatttttttaaaataggtaattcatttcatattttctggccctgtttttacttttcctgtacttcacaaataactatccatagtcacatatttgaatataggctgttatgaagtgccagccttttctttgctaggtcttaacctgaaataatgtagatttcaagggtgttagaacaaaaagccctcatggatgctatcaagacttgctttcaaattggaggccagtctctgaaagtagtaatat

SEQ ID NO: 448907 - DNA, 594 bp, Homo sapiens
tctgtcaacatttgcttatctgaaaaggatcttttttctcctttgcttaagaagcttagtttggctggatatgaaattcttggttgaagttttttctttaagattgttgaatatatgcctcatactctcttctggcttgtagggttttagctgagagatccrctgttagcctgatgggattcccttggtaagttacctgccctttctctttaactgcccttaacattctttctttcatttcaaccttggaaaatctgatgattgtgtgtcttgggggtgaacttcttgtgtagactcttgcaggggttccctctatttcctgaatttgactgttggcctctctagcaaggttggggaagttttcatgaatgatatcctgaaatatgttttccaagttgttttctttcttcccctcccattcagggatgccagtaatttgtagatctggcctctttacataatcccatacttcacagaaggtttgttcatgcctttttttctgactgtcttagttgtgggagccagtcttcaagttctgaaattctttccttagcttggtctattctgctgtcaattcttgtgtttgcattgtga

SEQ ID NO: 448908 - DNA, 633 bp, Homo sapiens
cctgtctttggtttcataggggggtatattagcaaggtaattttgggttgaagctttggggtgtgatccagtaggtggttcttagatgtattggtcagttggtaggttgtatggcctccctatattttctcacagttgcagccatgttccctctcaatgccctgaaagtgtgggctcctcttccccttgagtgctggctgtagatcacagcttggcactcctgggatgcccactgcagctctgggatgatctcagggtttatgttccttctccaacctggaggcagcagaggaagggaccttagtagtggttgtggccaagggtcttctgcttgtttcttgggggctccacctcagatgcaggtcagcaattgctcaatgcaatcagcccaggatggagggtctgtgctatggacccaagcccagggtttcctgtctgatgatgagcaggaggcatgggacccataggagactggcttcttctccttgggttgacatagcytgttggaggtgtggataagggtctttatccttacctacaaagaccttagggtctttgctccttcgttagtctgcgggtagcaaaggcagtcccactgcagtggcagtggcagagagggggatctctctgggg

SEQ ID NO: 448909 - DNA, 586 bp, Homo sapiens
aacttgtcctgaaaagtagtaaatattttaggccctgaagtctagatcatctttgacacaaggattcagttcttccattgttcagtgagagcagccatggacaatgtataaaggaattagggtagctgtgtttcaatcaaactttatttacaaaaacagatgcaggcctgtgggttataagtttgctgacccctgacctaagggatttaatcttctcatttccagatgaaaatatgagttccggagtatttcattaagctatccagagcctcacaactcagtagtgggaagcaaaagttggagaataagatgtgtttagttatacattctgaacttggagagatacagatctttttaagcaaaataacatgaactgtaatttgtgctctcagacacyttctgaatgcttcactctagataatcaaggcttctgagtagcttagggggctactgcatgaagcaaccaagccatccacgtcaattactttggatgggtcatctttctaagatctattacatatggtcatgccttttattttattttttttggcatttatttaataacatttattttatttttccgtaa

SEQ ID NO: 448910 - DNA, 551 bp, Homo sapiens
aactgttaggtaatttgtacaagggccgggtgctttaggtgagaatagaaggtgccaggtggctgggacacagggttagtccttgggttcacaagcttccaccatcttctggaacagagaagggtcctttgttgctcttctgtactggggatctgtatcactgctcacacttaatgaaattggggatttggaagggtctgtctttaagaccagcactttctcttaatttctctgtgttaatattctggggactttttttttcttttcaatttggcgccattcaattycgtttttcttgctatggttgttccttgggtgaaaattccacccatttgcccctttctcacctctctcccagcctccaaccagtgtgggctagaggctgaatgatgtgttttttcattcctgtgcacttatcgaggctggccatttgtgagccagctgttgggtgggacagcagctgcagtgcatgcaaactgaatggcaggctctcttctgaaggggtaattagagctgctccctcacatggcactggaggcacccttagagag

SEQ ID NO: 448911 - DNA, 581 bp, Homo sapiens
ggtaaactttcctagaagcaccacatcaatttttccttcccttttcacatttaaatttttctttgcatgttttgggtgttttcaactgttttgtcttcagttgcactgcttcctcacactaaatgcctttttttccccttttggtttaattagaaaaatgtatatgtaatgttgaaaaaaaaaatggtcactgctgagtgtgtgtgcccctgatgtcatgattgggtttgacttcttggctcattcttcagcttcagagttttagaaatgacagcagtctctgattaccgtggttctctgaatgcagtatccagcagtgatgagaatgttatttcttgaatgccactgtgatttctgttttgggattgcaggggttgtatggttttgttaagagcctttcttttcttccaggcagccagaggctaggctatttgataggaggatatcctcgcttctcattctatcctgatgtcaattctggagtatttgccagatgattatatgttttgtggattatctatayattggacatgaatctttttcttttcaaagaagagaactttttggtcactaagtgcagt

SEQ ID NO: 448912 - DNA, 598 bp, Homo sapiens
ttcttttcttggtacaaattgagtgtgctttgtgggctgcccatccatgttgcccctggaaatgccgtattcagttaaccagcctcagagctttctgcagatcacacccctgctcccctgcccccagcccatcttagttacacccaccagggtctagctattaagtgccaccacctggctttgtcatgcttttattggcagtattttttttctgtcaataataatgcatcatactttcattgaaaggcaacayaggagacagccttgttcaagttatttcaggaaacagatttcaattcatcatcatacagccctagaatatcgctctccacctctttattatgtgttctggtttgcccagaagaagagacatggtctgtgacacatcttttgggagttctccaacagtaacttttgcataagccttttaataaaataactttttatagctattgtaaatatagattacatcgtcatgtattcatttcctggtttatttaatgcattctaatatattgccaatgtttttctgataccctatgcaataacaatattattattactgataataatagctaatatttatttgttccagata

SEQ ID NO: 448913 - DNA, 576 bp, Homo sapiens
acttatccatgactcatctttctaaaaaatgcatacatcttgctctgacaaccataaacaaccactctagagcaatagctctttctgtgcctggacggtagttacggaacactatcttccgctgtcaagaatccagagctccatggagaartggatgttctcagggctgagagaagataaggctaaggcagtttgtgacacttaaagcaacaaccctatcaaataccgtgaaggccatgtccagtggcagagaagtccactggaaggcgtctagctgggaagaggcggagtcacatgtgcatccaaaagacaagagccacagcagatgagaacccatcccgacagattcaatactgtgagttcatgttcatgccaaaaacacacacagaagcaaaaaatcagaggccacttttggagcttgccagagctccacacattactctaaaacctgaaaatgcacctctcatatcttggattacagggagggaactccacaaaaggctgcagcctctgctttttgaaaccccttgctgtattcccaccagttgctccctcaaggactgcaagctgcaggat

SEQ ID NO: 448914 - DNA, 576 bp, Homo sapiens
acttatccatgactcatctttctaaaaaatgcatacatcttgctctgacaaccataaacaaccactctagagcaatagctctttctgtgcctggacggtagttacggaacactatcttccgctgtcaagaatccagagctccatggagaagtggatgttctcagggctgagagaagataaggctaaggcagtttgtgacacttaaagcaacaaccctatcaaataccgtgaaggccatgtccagtggcagagaagtccactggaaggcgtctagctgggmagaggcggagtcacatgtgcatccaaaagacaagagccacagcagatgagaacccatcccgacagattcaatactgtgagttcatgttcatgccaaaaacacacacagaagcaaaaaatcagaggccacttttggagcttgccagagctccacacattactctaaaacctgaaaatgcacctctcatatcttggattacagggagggaactccacaaaaggctgcagcctctgctttttgaaaccccttgctgtattcccaccagttgctccctcaaggactgcaagctgcaggat

SEQ ID NO: 448915 - DNA, 620 bp, Homo sapiens
gccaggtctccatttgcataggagtataactttgtaacttcacttcggcctctgattggtcactttctgcaaccaatcagatgtttgcatagggtgtgactttgtaacttcacttcagcctctgattggtcccctcccacaaccaatcagagtgatcctgggcactacttcatttacatagggggtacamcaagtaaccaatgggaaacctccaaagggtatttacaccccacagaaactcaagagtaattgggctcttgagccacttgctctgggtgcacccaccctgtggagtgtgcttttgttttcaataaatctctgcttgtgttgcttcgtcctttccttctttagtgtgttttgtccaattatttgttcaaaatgccaagaacctggacagtctccaccagtaacaaaatcattcaaggagtgagtgcagatgagaaaaactccaggactgaaagctggacagtccaaaatttggaggtagagaggcacagaggattgagaaaccgaaatgatttacggcagagaaacatcaggagagtacaaatccaaggcaaagacggggaggaggagtaattgactgcaccgcctgctgctggcctgcccggtagagtggg

SEQ ID NO: 448916 - DNA, 472 bp, Homo sapiens
tgactgtgtagcaacatatcttattgaagaaatcaacatgtagcttgttaacagagcataaagtaaggcatttctctatagagtatgcaaatattgttgtattttattagaatgaccgagcattacctgcagacaacattttaccaactggtttctctctagcgtctctccctcttctcggatgcttaccttttgtgtatataatatgagctaacgtttaaattagaaaagtttagttaatttgatcattcaatttgtcagtggttttgtcacttatttaggtacaagtcttgttttatagacaagcttraaaaatatatcaagctatacattattatactacacatttttacataaacaaaaaagcctactacatatcaacaatttttgggggtgttaggagaagtgtgtgttctgtactctagagaacttaaaattttagattacataagagggaaaatacattttatga

SEQ ID NO: 448917 - DNA, 571 bp, Homo sapiens
taacaatttacttggtattttgtggataaataacctagaagtgtttttttattgtatatgaaattcaagtgaagaaatacatcagaatttctgagctaggtaagttggcacacaagcactctcagggcctaaaattgtaaccatgtatctttcctccaagaatgctttcatttggtcatagatttgatgtctaaatcttctaattaagtgctcagctttaaatgtatgcaaatgcaatggaacaggcatttccaaaaaactcaaattatatcaaagtcacaaagatggtacacctatcttcttcaaccccttccaagatacaactgaagaaaatatctctgtcccaagttcaaataatgaagctattatccatttttgcccttcagggaaatagtcatttattacattaagaatgtataaagaagtgagaaaataaatagtttgggggaaaaatggccatatcttgtcctgtgcagacacatggacaactgcaaggcaggttcgtggtrtctgcagtactcattccccacagtacagtatgtcagcctgaaattggaccattcaattatta

SEQ ID NO: 448918 - DNA, 564 bp, Homo sapiens
aaataaatgaataaataaataaataaatacaaagttaaaaatttaaaaaatgtttattttatttttattttattattatcatttttttttkagatgggggtctcactctgtcagccaggctggagtgcagtggtgcgatcaccactcgctacagccttgacctctgggctcaagccatcctcctacttgagccttctgagtagctgggaccacaggcgtgtgccaccacacccagctaatttttctattttttgtagagacagggtgttgccatgttgcctagactgatctcaaattcctgggcccaagcaatccgcccacatcaacctctcaaagtgttgggattacaggagtgagccactgtgcccagccaactttttttttttttaaagaataaatctggcttaaaaagtgaggaaaaaatggcatattatctataattcctgatcacaaaagagaaacattggtaaaatttatgttcaccttggcaatatattttgaggattttgaaaaaatgattttatgagatggagctcatctttcagagtatgaattgaattgttt

SEQ ID NO: 448919 - DNA, 564 bp, Homo sapiens
aaataaatgaataaataaataaataaatacaaagttaaaaatttaaaaaatgtttattttatttttattttattattatcatttttttttgagatgggggtctcactctgtcagccaggctggagtgcagtggtgygatcaccactcgctacagccttgacctctgggctcaagccatcctcctacttgagccttctgagtagctgggaccacaggcgtgtgccaccacacccagctaatttttctattttttgtagagacagggtgttgccatgttgcctagactgatctcaaattcctgggcccaagcaatccgcccacatcaacctctcaaagtgttgggattacaggagtgagccactgtgcccagccaactttttttttttttaaagaataaatctggcttaaaaagtgaggaaaaaatggcatattatctataattcctgatcacaaaagagaaacattggtaaaatttatgttcaccttggcaatatattttgaggattttgaaaaaatgattttatgagatggagctcatctttcagagtatgaattgaattgttt

SEQ ID NO: 448920 - DNA, 564 bp, Homo sapiens
aaataaatgaataaataaataaataaatacaaagttaaaaatttaaaaaatgtttattttatttttattttattattatcatttttttttgagatgggggtctcactctgtcagccaggctggagtgcagtggtgcgatcaccactcgctacagccttgacctctgggctcaagccatcctcctacttgagccttctgagtagctgggaccacaggcgtgtgmcaccacacccagctaatttttctattttttgtagagacagggtgttgccatgttgcctagactgatctcaaattcctgggcccaagcaatccgcccacatcaacctctcaaagtgttgggattacaggagtgagccactgtgcccagccaactttttttttttttaaagaataaatctggcttaaaaagtgaggaaaaaatggcatattatctataattcctgatcacaaaagagaaacattggtaaaatttatgttcaccttggcaatatattttgaggattttgaaaaaatgattttatgagatggagctcatctttcagagtatgaattgaattgttt

SEQ ID NO: 448921 - DNA, 548 bp, Homo sapiens
tctacagtttcaagccacccagtctgtgttaatttgttacagcagccacaggaattaatgcagatgctaacaccaagtgcccactggakttgcagcatggctgccatgggaagcctgataacagcgttttctctggacttggggtgaactctgaggagaatgagagaagtgagtcagtgagtgtggacaactctttcaagaaatcgttccataaaaggggacagaaaaatcagatatcatatggaaaggggtgcaggatcaaagtctctttagagatgagtaatataatctgtctgcacagtgatgggaaaatccagtagaaaggaaggaacgggttctgtagtggacggggaccagccagagctacagagctgaggaggctgagaggcgatgatgagattctacacacacaggggagtgtggcggccgtgggaggaggatgggccttgcactctgctgggacaccagcatctccaggggccagaatagcagcgacagggtccctgatcagcccatacagggtcactgcagaatatagacattcaact

SEQ ID NO: 448922 - DNA, 548 bp, Homo sapiens
tctacagtttcaagccacccagtctgtgttaatttgttacagcagccacaggaattaatgcagatgctaacaccaagtgcccactggagttgcagcatggctgccatgggaagcctgataacagcgttttctctggacttggggtgaactctgaggagaatgagagaagtgagtcagtgagtgtggacaactctttcaagaaatcgttccataaaaggggacagaaaaatcagatatcatatggaaaggggtgcaggatcaaagtctctttagagatgagtaatataatctgtctgcacagtgatgggaaaatccagtagaaaggaaggaacgggttctgtagtggayggggaccagccagagctacagagctgaggaggctgagaggcgatgatgagattctacacacacaggggagtgtggcggccgtgggaggaggatgggccttgcactctgctgggacaccagcatctccaggggccagaatagcagcgacagggtccctgatcagcccatacagggtcactgcagaatatagacattcaact

SEQ ID NO: 448923 - DNA, 634 bp, Homo sapiens
ttatatcttcttgttgtattgcaccttttattaatatatactgtcctttgttttatataaaattttaatttacaagttgattttgtctgacattcatatagccatctctgctctcttttggttactattttcagaaaacattaaaaaaatcctattacttttaatttatttgttcctttggatctgaagcgagtcttttgtagatagcatacagttagatcaygtgtttttaaattctgccaatctcagtctttgatcggagaatttaatccatttgtatttgaagtagtgctgataagaagggactaacttgtcattttactgttttctacatgttgtatagctttttgtccctctccctcatttttacattaccgtcttattttgtatttagttgattttttatagtgaaatgtttaaatttgttgtgtttatattcatgttttttatcaaatatggaaagcattagccattattttattgaatattctctctccccttttattcttctttttctgagacttcagcaatccatatgctcgtgttggtggtgtcccaaatgtcccttaggctctgtttacttttctccaatcttttaatttctgttcctcagattcaataatttaaactgtca

SEQ ID NO: 448924 - DNA, 634 bp, Homo sapiens
ttatatcttcttgttgtattgcaccttttattaatatatactgtcctttgttttatataaaattttaatttacaagttgattttgtctgacattcatatagccatctctgctctcttttggttactattttcagaaaacattaaaaaaatcctattacttttaatttatttgttcctttggatctgaagcgagtcttttgtagatagcatacagttagatcacgtgtttttaaattctgccaatctcagtctttgatcggagaatttaatccatttrtatttgaagtagtgctgataagaagggactaacttgtcattttactgttttctacatgttgtatagctttttgtccctctccctcatttttacattaccgtcttattttgtatttagttgattttttatagtgaaatgtttaaatttgttgtgtttatattcatgttttttatcaaatatggaaagcattagccattattttattgaatattctctctccccttttattcttctttttctgagacttcagcaatccatatgctcgtgttggtggtgtcccaaatgtcccttaggctctgtttacttttctccaatcttttaatttctgttcctcagattcaataatttaaactgtca

SEQ ID NO: 448925 - DNA, 588 bp, Homo sapiens
cagtgtaaataggttctattaattgggggaggagagaggcatatgattgtttcaagtcctgttttcagttaaattcagcttagctaattggattgatcatgcagttacccaccctggctgctaacatggccaaaccaccaactcaaccacatccctacccagtgctttctgctctgtgaaatatgtgctaagttgacgtagcaaaaaaacccctgaccagactttccaaggaacaagtgatgttaaagatggtgaattgcttrtttcctcctgtataattaaacaccacagctgaaactatttgaagggtataatagcctcagtaaaatttatattttaatgtagttctattcacgtgctaaaaagaaaaaaacaaaaatgaaagcaaaaaacaaaacagaacaaaaacccacagggtttttttgatgtttctaccattagctcttgattttcagactggatggaacagtgctaagaatgtatgtctaaagttctttggttaaattagaaagtaaatactgtttgctacatcccaacactttttgaagatggatttcatttctggtccaatttacacctatttgcgta

SEQ ID NO: 448926 - DNA, 588 bp, Homo sapiens
cagtgtaaataggttctattaattgggggaggagagaggcatatgattgtttcaagtcctgttttcagttaaattcagcttagctaattggattgatcatgcagttacccaccctggctgctaacatggccaaaccaccaactcaaccacatccctacccagtgctttctgctctgtgaaatatgtgctaagttgacgtagcaaaaaaacccctgaccagactttccaaggaacaagtgatgttaaagatggtgaattgcttatttcctcctgtataattaaacaccacagctgaaactatttgaagggtataatagcctcagtaaaatttatattttaatgtagttctattcacgtgctaaaaagaaaaaaacaaaaatgaaagcaaaaaacaaaacagaacaaaaacccacagrgtttttttgatgtttctaccattagctcttgattttcagactggatggaacagtgctaagaatgtatgtctaaagttctttggttaaattagaaagtaaatactgtttgctacatcccaacactttttgaagatggatttcatttctggtccaatttacacctatttgcgta

SEQ ID NO: 448927 - DNA, 448 bp, Homo sapiens
agagtccaccaaagaaataaatagttagaaataataaatgaatttatcraagtagaagaatacaaagtcaagaaacaaaaatcagtttaatttctacccactgacaatgaacaatctaagaaggaaattacaaaaacaatatttacaatagtatcaaaaatacttagaaattaactaggagatgaaagacttgtaaaatttatttcagcaatgctctataaaaactagagagcattaaaaactatagagcattgctgaaataaaatttaaaagacataaataaacagaaattcattccatgttcatgggttggaagatttaatattgttaagtagtcaatactacccaaagcaatctacagatttaatgcaattcctatcaaaatctcaataaaatgttttacagaaaaaaatcctcaaattcatattgaatcacaaggagccctaaa

SEQ ID NO: 448928 - DNA, 448 bp, Homo sapiens
agagtccaccaaagaaataaatagttagaaataataaatgaatttatcgaagtagaagaatacaaagtcaagaaacaaaaatcagtttaatttctacccactgacaatgaacaatctaagaaggaaattacaaaaacaatatttacaatagtatcaaaaatacttagaaattaactaggagatgaaagacttgtaaaatttatttcagcaatgctctataaaaactagagagcattaaaaactatagagcattgctgaaataaaatttaaaagacataaataaacagaaattcattccatgttcatgggttggaagatttaatattgttaagtagtcaatactacccaaagcaatctacagatttaatgcaattcctatcaaaatctcaataaaatgttttasagaaaaaaatcctcaaattcatattgaatcacaaggagccctaaa

SEQ ID NO: 448929 - DNA, 522 bp, Homo sapiens
acttacttcctgatttcaaaacttaccgcaaagcaacaataatgaaaacattgyggtattggcataaacacagacatatgaactaatagaataaagagctcagaaataaatcttcacacgtgtggttaaattatttttgacagtgtgccaagactattcaaaaaaggaaagaaaggaaagccttttcaacaagtgatgctgggaaaactggatatccacatgcaaatgaatgaagttggatccttccctaacaccacatgcaaaaattaaatcaaaaatggaccaacgacctagaggtaagacctaaaactataaaactcttagaagaaaacgtagggcaaaaccttcatgacattggatttggcaataattttatgaatatgacaacaaaagcacaggcaacaaaagcaaaaatagatgaatgtaacttgaaaacttaaaacttttatgcatcaaaaaaacagtatcaacagagtaaaaagacaatccacagaagaaaatatttcagatcatacatctgaa

SEQ ID NO: 448930 - DNA, 603 bp, Homo sapiens
tgttttacagaaaaaaatcctcaaattcatattgaatcacaaggagccctaaatagacaacacaattttgaaaaggaattcagctggaggacttacttcctgatttcaaaacttaccgcaaagcaacaataatgaaaacattgcggtattggcataaacacagacatatgaactaatagaataaagasctcagaaataaatcttcacacgtgtggttaaattatttttgacagtgtgccaagactattcaaaaaaggaaagaaaggaaagccttttcaacaagtgatgctgggaaaactggatatccacatgcaaatgaatgaagttggatccttccctaacaccacatgcaaaaattaaatcaaaaatggaccaacgacctagaggtaagacctaaaactataaaactcttagaagaaaacgtagggcaaaaccttcatgacattggatttggcaataattttatgaatatgacaacaaaagcacaggcaacaaaagcaaaaatagatgaatgtaacttgaaaacttaaaacttttatgcatcaaaaaaacagtatcaacagagtaaaaagacaatccacagaagaaaatatttcagatcat

SEQ ID NO: 448931 - DNA, 603 bp, Homo sapiens
tgttttacagaaaaaaatcctcaaattcatattgaatcacaaggagccctaaatagacaacacaattttgaaaaggaattcagctggaggacttacttcctgatttcaaaacttaccgcaaagcaacaataatgaaaacattgcggtattggcataaacacagacatatgaactaatagaataaagagctcagaaataaatcttcacacgtgtggttaaattatttttgacagtgtgccaagactattcaaaaaaggaaagaaaggaaagccttttcaacaagtgatgctgggaaaactggatatccacatgcaaatgaatgaagttggatccttccctaacaccacatgcaaaaattaaatcaaaaatggaccaacgacctagaggtaagrcctaaaactataaaactcttagaagaaaacgtagggcaaaaccttcatgacattggatttggcaataattttatgaatatgacaacaaaagcacaggcaacaaaagcaaaaatagatgaatgtaacttgaaaacttaaaacttttatgcatcaaaaaaacagtatcaacagagtaaaaagacaatccacagaagaaaatatttcagatcat

SEQ ID NO: 448932 - DNA, 603 bp, Homo sapiens
tgttttacagaaaaaaatcctcaaattcatattgaatcacaaggagccctaaatagacaacacaattttgaaaaggaattcagctggaggacttacttcctgatttcaaaacttaccgcaaagcaacaataatgaaaacattgcggtattggcataaacacagacatatgaactaatagaataaagagctcagaaataaatcttcacacgtgtggttaaattatttttgacagtgtgccaagactattcaaaaaaggaaagaaaggaaagccttttcaacaagtgatgctgggaaaactggatatccacatgcaaatgaatgaagttggatccttccctaacaccacatgcaaaaattaaatcaaaaatggaccaacgacctagaggtaagacctaaaactataaaactcttagaagaaaacgtagggcaaaaccttcatgacattggatttggcaataattttatgaatatgacamcaaaagcacaggcaacaaaagcaaaaatagatgaatgtaacttgaaaacttaaaacttttatgcatcaaaaaaacagtatcaacagagtaaaaagacaatccacagaagaaaatatttcagatcat

SEQ ID NO: 448933 - DNA, 298 bp, Homo sapiens
gcacttgggccacatgactagtttggtcattggaagagggtcgggtgttatataaattctgctcatgtagaagacgtccacataatggcctggcttacttggcctctctcctcttctgcctccctgccacaagaygggtgagattcggatcagaatgctcctttcctgaagtgccagagccccacaagagctgggaacagacccacaatttagagcaatccaccagtgagccggggcagagcctttgtctgaagcagacccatggccaacccatggcccccatgtaaagtgagtgata

SEQ ID NO: 448934 - DNA, 632 bp, Homo sapiens
ctggcgttatcttgcgccctggctcctctctttatttcctgactgcgctattaaaaaatgaatcacgcacacctacatagcattttgtcaggataatgataagcctttttaaaattactcacggcagctctgggtcagccacacagacggccctaagtaccacggtggaggaaaaatgtccttgtgacggcttcgttgtgctgggagatggatggggcagagaggcrggtgtgctttttgcagaaggtagcagtttcctgaaagcaagaactgtacctgatgggctaatagcttgcattttatttacagattcagtatacttttaatttctctttgattacataatacggcctccattttacacatcatttagtgatattttttttttcagggaagctgtaagccacaaggatttgcctagatcatttaattaaatgactcattttgtaaatgacctataacaacaactaagttgtttttaaccttgtctctggaaataaaaaagctgtggagatattctagacaatttgaagaaattatttagattgcttatacgtataaaaatagtatgtaggatttctcagtgtgtgggtctttagaatatcgatttgccattcttattttgaattcac

SEQ ID NO: 448935 - DNA, 525 bp, Homo sapiens
gctttctattggaagaagttgccatctaggacttttcattgctggagaggagaggtaaatgcctggcttcaaaggttaggctgactctcatgwtaggggctaatgcaggtagtgactaagttgaagccaaatgctcactgaccattccaaaaatcctagggcccttaagaattatgctaaatctattctgccggtgctctataaatggaaaaacaaaacctggatgacagcacatctgtttacagaatgctttactggatattttaagtgcacttttgagacctattgctaaggaaaaaagattcctctcaaaatattactgctcattgacaatgtgcctagtcactcaagaactcttatggagatgtacaaggagataatgttgttttcatacctcttaacacaacatccattctgcagcccaccgatcaacgagtaattttgactttttaagtcttatcattggagaaatacattttataaggtcatcaatgccatagatatggattcctctgattgatctta

SEQ ID NO: 448936 - DNA, 604 bp, Homo sapiens
taaagacacacatagactaaaaataaagggatggaaaaagataccccacgccagtggaagccaaaagagaggaggagtasctatacttatatcagacaaaatagatttcaagacaaaaactatttaaaaagacaacagaaggtcattatatagtgataaaggggttgattcagcaagaggatataacaattctaaatatatgtgcacccaacactggagcacccacatatataaagcaactattaaagagagagatagacccccccaatacaaaaataactatagacttcaacaccctactttcatcattggacagatcaccccaacagaaaatcaacaaagaaacatcagacttaatttgcactgtagacaaaatggacctaatagatatttacagaacatttcgttcaatggctgcagaatatacattcttctcctcagcatatggatcattctgaagaatagaccatgtgttaggccataaaacaattcacaaaaattgaaattatgtcaactatcttctctgatcataatggaataaaaccagaaatcaataacgaggaattatggaaattaatcaaacacatggaaattaaacaatatg

SEQ ID NO: 448937 - DNA, 575 bp, Homo sapiens
cttgaagtttcagacaaacctggatatttgcccacgcacctgaaaggcccttccttattacacagcagatgactcctttcaagtagaaactcctcctagatgtgctgtaggtcctgagtggggagattaactccttcaggaggattctcattccctctccacaagagtcacatggagttcttggtaaaatacacacctagacccatacagcctggttgaaccaggacatttcctgtcaccccagcacaccatttggaagataaattktatccaccaccctcccagcacacactacagaagcatattctgcaggcgcagagtctagaaacttgtggttttaatacgcacccagatgattcttattagcaaagtagagggttagcacagaatctactataccagtatttgacttaccagcatatagcaatgattgtccaaaagtaggggactttcacttgcctaagcaggaacagtgtgaatatgatgaaactatgtctttagttggggcttaaattcattgtttacagtaggatttattctactacagtggggtatgctattattctgattatgca

SEQ ID NO: 448938 - DNA, 559 bp, Homo sapiens
tttcactcttgttgcccaggctggagtgcaatgatgcgctcttggctcactgcaacatctgcctcctaggttcaagctattctcctgtctcagcctcctgagtagctgggattacaggcacccactatgacrcctggctaattttttttgtatttttagtagagacagggtttcactatgttggccaggctggtcttgaacttctggcctcaggtgatcctcccatcttggcctcccaaaatgctgggattgcaggcataagccaccacacccagctgagatctgatgtttttataaggggtttccctttctcttggctctcattctgtcttgcctgctgccatttaagaggtgactttcgcctttcaccatgattgtgaggcctcctcagccacgtggaactgtgagtccattaaacctctttttctttataaattacccagtctcaggtatgtctttatcagcagcataggaacagactaatacaggttctatggacagagctctgatctctccctgggatagagttcctgggtagagggatagccaccatctctgt

SEQ ID NO: 448939 - DNA, 559 bp, Homo sapiens
tttcactcttgttgcccaggctggagtgcaatgatgcgctcttggctcactgcaacatctgcctcctaggttcaagctattctcctgtctcagcctcctgagtagctgggattacaggcacccactatgacacctggctaattttttttgtatttttagtagagacagggtttcactatgttggccaggctggtcttgaacttctggcctcaggtgatcctcccatcttggcctcccaaaatgctgggattgcaggcataagccaccacacccagctgagatctgatgtttttataargggtttccctttctcttggctctcattctgtcttgcctgctgccatttaagaggtgactttcgcctttcaccatgattgtgaggcctcctcagccacgtggaactgtgagtccattaaacctctttttctttataaattacccagtctcaggtatgtctttatcagcagcataggaacagactaatacaggttctatggacagagctctgatctctccctgggatagagttcctgggtagagggatagccaccatctctgt

SEQ ID NO: 448940 - DNA, 575 bp, Homo sapiens
aaaatacaggaaaaaaaaagttgggtgtggtggtgtgcacctgtagtctcagctactggggaggctgagatgggaagaccacctgagcctgggaagtcaaggctacagtgaacctgatcatgccactgtactccagcctgggtgacagagtaagatcttttctcaaaaaawaataataataataataataaatatatatatatatatatatatatatatatatatatatatatatatggaacatggatttttttgaattattggtatgcatttctctagggaaaatctagattatgattctaatggtggcttttttttttttttaacagaaatcttaaagacatttgtagaattccaaagaaaaaaagggttgctatcagttaactcctgcaaataagaacctaagttaaatctcagctcagcactgaatataagctcacaaagcttctttgaagataattagtttgcctgtttttgaaacttcttcattccatgcaaatggtttttcaggagaatgtatctgtgttttagaatgccgaagttgtttataccttgtctgctagtcctaacccatg

SEQ ID NO: 448941 - DNA, 402 bp, Homo sapiens
aaattctccaccagccacggcatagttgtgtgggtttttcttttcaattttggtataatcacccagattacatttctctatgagaaacattcacctcgcattttgaaaagcatagaaaaattcactgccaaggactagctggccaacagtagccctagggagatatatttccgttctcccacccagcctctctgcacccatcctcacaatgrcatacaccatagtggaagtaacatatgacttatggtgggaaaaaaaataacaaatgataaaatgggaaggggggcaaggggaaaatagagagactgctaccccaccacctgaatggaaggggaccccagcacaaggaggaggcttcagctacactgcacacatgtcccccgggtgtctgaacctgccaga

SEQ ID NO: 448942 - DNA, 492 bp, Homo sapiens
aatatcccaggttttgtccttctcaagttatttctgaaccagcattatggaaagggaatcagactggaaaacactagagttttggtcttgactttgcaactaattatacaactttggaagatactaagtctctctggaattaattttcctcatctgtaaaatgcagaagttgaactagctaacagagagctataaaaatgaaaaatggaatataaagagcaataaattctccacgtaatcttaacctgaaaaacagcttccccctgagatatcaagaaaatcagggcaaatatggtggagatgattcctaagacttttctagataaatgcatacattcacctctttatcttacaygtttatattacaatcaatatacagtaaaaattttgttgatgaaaaaaatatatgacactagacagacctgtccctgaacatttgtggagcctgggctgagaataggaatggaggccaaataccatatgtctaagtat

SEQ ID NO: 448943 - DNA, 434 bp, Homo sapiens
taaacagagttcactgttgttattaatagcattcacagcaacttatttgtgtgagccagaatttttaagcaacaaaactaaaaacattggaaagaaataggcatcacagagcaaacsactgtgattgtcctcatgcccgcaacccagaatgaatttaggaacaggcaagtatgcctgctgcagtgaatgaaatcatgcttagtagtaactattctagttaacagtatgtactgttttatacctaaaactgttgtttcagttttttaacatatctatacatgtatgtaaacactggatgataatgtaaagcatattttctactgtgagttatagaaaaaaagtagaaaggtgtttactttccttcatagccatccactgggttgtttatccgtgtgatttcaccagctcttaatccactgcaaccaggctgcagt

SEQ ID NO: 448944 - DNA, 479 bp, Homo sapiens
tatacatgtatgtaaacactggatgataatgtaaagcatattttctactgtgagttatagaaaaaaagtagaaaggtgtttactttccttcatagccatccactgggttgtttatccgtgtgatttcaccagctcttaatccactgcaaccaggctgcagtcatcatttctcccgggtctggcttccacgggatcctaactctctcacattcattacatcattttctgtgtttatctttgtcctttctctggatgttgaccttgttgcctggatactacttttatttcatttttgtgccacttttttttttagaataacacttctgattataaaagtaaaaatatttaatgaaaaataaactaacctataagcccatcaaagataatcacttaatattttgtatgtacttttgatagatatgtatgtacatatatgyatgtatttttgaacttatatatacatctacatcaaatattta

SEQ ID NO: 448945 - DNA, 541 bp, Homo sapiens
tcctttttctttgaaaatgttcctgtggtggaagtgaggatgatggactgcagaggggcagactggcagctgggagaacaaaggttctgcaggaatctagaaaccaattaggccaagggtgggtagaaggggaataaaggaaagtatgtcaagagatattgaagggtagaaacaataggatttaatgacacaataggggagagacggtgtatatgggatggcttccaggttacttgtttaggaaattgggaggatggtggccccattctttaaagaagagaagataaaaagggtttggattaggggggatatatgagttcagttttgaacatgttcagattgaaatgataatgagatacttgtagattttttttatggacaggaactcaggatagagytctgggagggatgccagtatttgaagggtggtaaatataggagttgttgatgcctcgagtttgacaaaggttgcacaagagagggagtgacggcccccctaattctcaaatcatgggtacaggagcaagggcccagggaggag

SEQ ID NO: 448946 - DNA, 608 bp, Homo sapiens
ctttcagttgtttacatttatgtatgatgttaactatgggtttttcatatagagtagtcctcccttatttgtgatttcactttgcatggtttcactttgcacratttcagttgcatatggtcagccgtggtcttaagatattatatactgtaaaacattttgagaaagaaagatagatcctactcacatagttttttattacagtaaattgttataattgttctattttattcttagtatggcttttaatctcttactgtgcctgatttatgaattaaacttgatcatagttatgtatatgtaggaaaaaacatagtgtatatgtagggttcagtactatccacagtttcacgtcttcactggtggtcttggaacttatctttcatggataagggggtactgtcgtatgccctttttcagattgaatttccattctattcctagtttgttgaatttttttttatcataaagggaagaaagttttgtcaaatgcctcttctatgtctatagagagaattcgtgaatttttttccttattctattaatactatttattaccttgtttgatttttgtatgttaaccagcattgcattcctggataaatcct

SEQ ID NO: 448947 - DNA, 554 bp, Homo sapiens
cttgtctctctggctgagtcagcactagaacagacatgccagagtgttggcttatctctctttatgggatttcctttgttgatctgtcttggccactgttgaggcgggcaggggtcagggaatgagctgaatggaggtaatggcccttgacacaggtacaactaaaaggctgagatatttactgcagyagaactacactaatttcttatttgtcactacactgccaattttcctttttgacgttaatcctttaaaatcattttaatttctttattctattagaaaaagcaaagctctgatctagtagactttcattaagttatattgaatgaacgaatatatcatctctatgcctgtttaaggcctaagtatttcttcttcttctctagaatatacctgatctctgataggttgaagtattgttaaagactattttgtaattcctatagagagacatccaatgagttcttaaaagtcttccaagtttgaattaaattaaactatgaatggaaacctgttctaatgcagtatcctgtccagctgagcctctcttt

SEQ ID NO: 448948 - DNA, 554 bp, Homo sapiens
cttgtctctctggctgagtcagcactagaacagacatgccagagtgttggcttatctctctttatgggatttcctttgttgatctgtcttggccactgttgaggcgggcaggggtcagggaatgagctgaatggaggtaatggcccttgacacaggtacaactaaaaggctgagatatttactgcagcagaactacactaatttcttatttgtcactacactgccaattttcctttttgacgttaatcctttaaaatcattttaatttctttattctattagaaaaagcaaagctctgatctagtagactttcattaagttatattgaatgaacgaatatatcatctctatgcctgtttaaggcctaagtatttcttcttcttctctagaatatacctgatctctgataggttgaagtattgttaaagactrttttgtaattcctatagagagacatccaatgagttcttaaaagtcttccaagtttgaattaaattaaactatgaatggaaacctgttctaatgcagtatcctgtccagctgagcctctcttt

SEQ ID NO: 448949 - DNA, 554 bp, Homo sapiens
cttgtctctctggctgagtcagcactagaacagacatgccagagtgttggcttatctctctttatgggatttcctttgttgatctgtcttggccactgttgaggcgggcaggggtcagggaatgagctgaatggaggtaatggcccttgacacaggtacaactaaaaggctgagatatttactgcagcagaactacactaatttcttatttgtcactacactgccaattttcctttttgacgttaatcctttaaaatcattttaatttctttattctattagaaaaagcaaagctctgatctagtagactttcattaagttatattgaatgaacgaatatatcatctctatgcctgtttaaggcctaagtatttcttcttcttctctagaatatacctgatctctgataggttgaagtattgttaaagactattttgtaattcctatagagagacatccaatgagttcttaaaagtcttccaagtttgaattaaattaaactatgaatggaaacctgttctratgcagtatcctgtccagctgagcctctcttt

SEQ ID NO: 448950 - DNA, 592 bp, Homo sapiens
tgaaaaattcctatcacctagtgatgccttagccacatgctgcaaggcattactcacatgtttgtggtgatgctggtgttgacaaacctactgcactgaaagtcatataaaagtagagcacaaaaaagagagtacaattatgtacagtgcacaatatttggtaatgataataaatggctatgttctggtttatgtatttactgtattatacctttaatccattattctaaggtgtactccttctccttataaaaaggaagttaattgtgaatcagcctcaggcaggtccttcaggagtattccagaagaagacattgtcatcataggagatgacagcttcatgcatgtaattgcccctgaagatcttcaagcaggataggatgtggaggtgaaaacagtgatattgatgatcttaaatctgtgtaggcctaggcaaatctgtgtgtytatgtcttcgtttttagcataaaatgttaaaaagtaaaaaaaaaaagaaaaataggaaaaagcttatagaataagcatataaagaaaaaatatttttgtatagctgtacaatatatgttttaagctaagtgttattacaaaagag

SEQ ID NO: 448951 - DNA, 613 bp, Homo sapiens
ggggcaggtttctttatcttttttctttctttctttttttttttttttttacaaatgaaaaacctgaggctgaggttattgtatgcagagccaagatttgagttggatttgtctgactcccaaagcactttaacactaataatttactaagtattgaatattaaaattattttttctgtttttagagcactgttattcaacatacagtttgaggaccacctatgacaacattgcttggggttgtatgctaaaaattcagattcctgagctttatccagaaatatggaatcagaaactttgggagtagagttgaatcatatgtctctcacatrattcttactaaactctgagaatcattgttcagggagtagaagatttcccatcttcatgactgtcttcaattctttggtcacgtccttataattgttctcacaatagccataatttttataagctaagcaatatggtatatggtgaaatcaaaagagagctactggagaagggagaagccaggaacaggcatggccaaggtcaggagaagcaatctatgaagttcaaatttgtgtttataatgtgtgagaaactcaagctcatttggaaaagctctaaatta

SEQ ID NO: 448952 - DNA, 570 bp, Homo sapiens
ggaagacaaaaaatggagaaaaataattcagtcaactgagaagaaaagaactttttccagaaaaaacaagatccaagaagcgaaaaaygtaaaagtcttttaaatatatctgtagcttgtttatccacttttaatttagctgactttttaaccatagctgtcttaaaaaaaatccttttaaatcttttattacgtgactttagccacgtcaagcagccaatatatttggcttttgaattctaccacaggcaacttcccacatgaaattagtaagttttaactaaggttataacttaaccatggacacacaggtgtctcaaagagatgataagcagtttctttctttctttctttttttttttttttttttttttttttttacaagatttagaatctcccccagggtagtttagagaaaggaaaattcaagacgggaaatcagaagctatccgtgctggggggcaggagggggaaccttaataaatggcaaagttacacaaataaaaaaccagaaaggaatcattctggaagccaagaatagaacccagggtgccattgtcaaaaggcaaa

SEQ ID NO: 448953 - DNA, 575 bp, Homo sapiens
gctggggggcaggagggggaaccttaataaatggcaaagttacacaaataaaaaaccagaaaggaatcattctggaagccaagaatagaacccagggtgccattgtcaaaaggcaaagccttagctactgagttacagcagtgagcaatttttattgttctccccagaaggagcctagaaaagccaataccaagcttgcaaaggcttttaactgcttaaaaacaatcttagggctaactatgacatgaatccccaaattcctgtcttctaggtgccagaaaccaagagaaaatatccccacatgggcacggggttaagctcttagagacacaaaacaagacagagaaatttcttccggtgttggtttcagggacccrctgcaaagtttgtaactgaccagcgcactgggctggcttaaaaatcaggcttataggggtcctaaacccacattctattctgtgatgctccttttttaaattacagaacacagaaaggcaaattcctagcacaaagtgcactaggatttgctactgcttaagcctagtcttacaaatcttttttctattaatcaaacc

SEQ ID NO: 448954 - DNA, 547 bp, Homo sapiens
tatattcctttgggtatataccccaaaatgggattgctgggttgaatggtaattctgttttaacttctttgagaaatcacaaaactgctttccacaatgacggaactaatttacattcccactagcatggtataagtattcccttttctccacaacctygccagcatctgttgttttttgactttttaataatagctattctgactggtatgagatggttatctaatcgtggctttgattggcatttctctaatgattagtgagtttgagcattttttcatgtgcttgttggctatgtgtatgtcttcttttgagaagtgtctgttcatatcctttgcccactttctaatcgagttgttggttggtgtttttgcttgttaactggtttaagtttcttatagattctacatattacacctttgtcagatgcatagtttgcaaatattttcccctgtctgtttaatctgttgaaattgtattttgccgtgcagcagctccttagtttaatttggtcccacttgtttatttttgttttgtgcaattgctt

SEQ ID NO: 448955 - DNA, 586 bp, Homo sapiens
tgggggtctggagataatgaggcatttctgtaggcaacaataagactcttttattcttggcgacagagwtccttctctttccttctttagagctttccatggccctggctcctgctcttgatgagagtttctggagcaggtggtgtaaaaaaatttttggctgatactaaaacaccttccacaaatactgaaataccacaccaggtgtttcaatgattttgtgtctcagcaacggaattttaaaaggttttagttctgcttctcatttctaactattctctacttctaaaaatttattggtggagatttcaatataaaatgaacacatgcttattaaaatatttagaaaatatagtaaattagagaggcaaaaatagcattagtaattctataccccaaaataactactgctaatattttggcttattatcatcctgcaattttattatgaatagcttttaaatatttttgtttgatttacttagtagtaatcatgctgtatacacaattttgtatccctaagtataaaattataatgataacgcagcagaagcttttccccatatcattataagcagttcataaa

SEQ ID NO: 448956 - DNA, 620 bp, Homo sapiens
acaatatgctccaatggattggataggtttgcagtcttcagacactgggccacttaagagactaaacattggagttcttggatgaataagactgaagtataagaagcagagagaaattttgatcctgttttgcaacagggatgtgtggtggagactgaaactacagatccccttggaaagaaaggatttggatggggccagtgtcgtttagtcttgctcagtttagtctaacatttattgagtattcagcactggggctggtaggcagtaaaactctgctttacctgtccagatgctaagagtttagtagctagatgtggagggaacactctgttggtggcagtaaataatccatcaaggcataattaccttgctagggataagtctctgggtggaggtctttgaagggtcaagaagagaagagaggagaaagtaaatgtcctccccttyttcttccttttctcatcttttcctcttcagttcttatacttttttctttcttttttaaaactaaagctattttttaaaagtattttataaaatttagaaaaaagaaagaggagaaattttactcataatcttactatacaaagacaagcaataataacatttgagccatt

SEQ ID NO: 448957 - DNA, 569 bp, Homo sapiens
atttaatttatatgcatacaaatgttagcatttatttgcatatttattttctcaccaaattagtctatagcttcttaagggtagagacttggttattcttccactatctgtcccacatctaaactagcatctgaaacagagaaagctctcaataaatacttgttgtctgactgcctgacaagtataattaaataaaaggtaaagtttgtaatttagcacctgatcctaaggaagctactacttatactactttatgttgaaatgatgcttgaattttctaatttttttggcccatgcatagagattttgcagctttgaaaaagcacagaatcatactctctcaggttgttaagacctaagaggaaaatcacatatttaaagtgaaatttactcagcatactcacacattcayctcaaccaggggcgggcccttatatgtatagatacacttaacacccctgaaagctgatttttcccactgagacgcagtaactgtttaaaaagtaccagtttcttaaacaaatagaccatataattactaatttgcagggcatttatcattcccatgg

SEQ ID NO: 448958 - DNA, 569 bp, Homo sapiens
atttaatttatatgcatacaaatgttagcatttatttgcatatttattttctcaccaaattagtctatagcttcttaagggtagagacttggttattcttccactatctgtcccacatctaaactagcatctgaaacagagaaagctctcaataaatacttgttgtctgactgcctgacaagtataattaaataaaaggtaaagtttgtaatttagcacctgatcctaaggaagctactacttatactactttatgttgaaatgatgcttgaattttctaatttttttggcccatgcatagagattttgcagctttgaaaaagcacagaatcatactctctcaggttgttaagacctaagaggaaaatcacatatttaaagtgaaatttactcagcatactcacacattcacctcaaccaggggcgggcccttatatgtayagatacacttaacacccctgaaagctgatttttcccactgagacgcagtaactgtttaaaaagtaccagtttcttaaacaaatagaccatataattactaatttgcagggcatttatcattcccatgg

SEQ ID NO: 448959 - DNA, 523 bp, Homo sapiens
atttcaaatgaagtaggccaactcccatactcgagttctccccaacacactgggcaatagagaaaaatatgcagactgtgaaagccctgaccttctcaaagcggaaggcctgccagacacagaaaaagtgggttctgctattaaagccatccaattagaggattttttctcacagattgctacctgcatagggctcattggcattttaaagtcaattgtcccttatatgtgtatggtgccaccttctgggctgyggcacacacaggagcctcagatttctccagtaagaagtgacagccaccctggtggttatttgtacacagtgctctgtgttcaaacaagatggcttggatgtgctaatggattcttatcagttaattgaatcagacactgctcatttacctgggcacctctgatggggtctacaaacagcccttcacaatcaagatcttcccaaaatcacagggaggactggatggcttccctcacactgttgtccaaccacagtgggaaaggaaagttc

SEQ ID NO: 448960 - DNA, 558 bp, Homo sapiens
atggccttggaagaagcagctttctccatctgtaggcaactttcacaggggcctgacagccacagaaagtaataatttcagccctaaagtgggatttgggccacacatcacagcatccactacaccaaggggggacatgtagacagggaaggaaagaaatacrtcgggtaccagattatttcaaaaccggggatagagtctgggcatatcatgtgtagtcattggaaagtttgaggacacatattttcaatggattgtgctagctgttggtttgagactagactgcatgggtgggaagtaggggtggaaggttaagaataatgacatcattggcacagagcttaaaggaaacaaaaattgcaaaaagagaataaattttcaataagggcagcaaagtcaccacagtatgccaggtatcattggggagcccctgccagtgcacacaaatatggaaagagaaagctgacagcagacctagacagagaagacacaagcacaggactcagccattcacatctggaaagacataaaaacaaggagattctttgatgcctatga

SEQ ID NO: 448961 - DNA, 576 bp, Homo sapiens
tgggagggaaggaggcttcagtaacaaatgagattraattttttgttgacaattattttcttaccttttcaaaactatatttaaatggatgtgaagaccaattaataacaatagggaatagaaagctgggtgaggaaaggtatttggatccccaaaagatgaaggccttcaggaggagatcagttgagtaggatttctggttcatcttttggcttctatgtcttcgagattttataacagaaccttctggggaagtcagtgggaaaggccacacaggaggctccagggcctgcaggggcatgtagcaagggtgcagtgtggacaaagtgctgggtgttctcaggaatgtggttaggaggattggactgctctcaattttctgcttttaaatttaccatggccagtgacaggctttcagggtaaggacaaagcagaacacttcagtgggggtgacattaaagtcctaatgagagaacttcatcatctcttgattctgtaaagtaaaataagaataagaatctgggctaggctcagccaaacattatcagttaaaaacatttaagaatcgacagcaac

SEQ ID NO: 448962 - DNA, 576 bp, Homo sapiens
tgggagggaaggaggcttcagtaacaaatgagattgaattttttgytgacaattattttcttaccttttcaaaactatatttaaatggatgtgaagaccaattaataacaatagggaatagaaagctgggtgaggaaaggtatttggatccccaaaagatgaaggccttcaggaggagatcagttgagtaggatttctggttcatcttttggcttctatgtcttcgagattttataacagaaccttctggggaagtcagtgggaaaggccacacaggaggctccagggcctgcaggggcatgtagcaagggtgcagtgtggacaaagtgctgggtgttctcaggaatgtggttaggaggattggactgctctcaattttctgcttttaaatttaccatggccagtgacaggctttcagggtaaggacaaagcagaacacttcagtgggggtgacattaaagtcctaatgagagaacttcatcatctcttgattctgtaaagtaaaataagaataagaatctgggctaggctcagccaaacattatcagttaaaaacatttaagaatcgacagcaac

SEQ ID NO: 448963 - DNA, 576 bp, Homo sapiens
tgggagggaaggaggcttcagtaacaaatgagattgaattttttgttgacaattattttcttaccttttcaaaactatatttaaatggatgtgaagaccaattaataacaatagggaatagaaagctgggtgaggaaaggtatttggatccccaaaagatgaaggccttcaggaggagatcagttgagtaggatttctggttcatcttttggcttctatgtcttcgagattttataacagaaccttctggggaagtcagtgggaaaggccacacaggaggctccagggcctgcaggggcatgtagcaagggtgcagtgtggacaaagtgctgggtgttctcaggaatgtggttaggaggattggactgctctcaattttctgcttttaaatttaccatggccagtsacaggctttcagggtaaggacaaagcagaacacttcagtgggggtgacattaaagtcctaatgagagaacttcatcatctcttgattctgtaaagtaaaataagaataagaatctgggctaggctcagccaaacattatcagttaaaaacatttaagaatcgacagcaac

SEQ ID NO: 448964 - DNA, 550 bp, Homo sapiens
tcctaaggtttttcagggatgtagttaaattacttggaagtagtttgattcctttggttcttgctttcaatctttgttaggtaggaccagacagatcggaatttattctagggctaattgttcccaccgctgaggtaaaattcttctgtgtactctactgatatcttatgaattacaagcttgacctcaccctggtgggggtgcatcctccrgtagtttactaagaagggaaggtatttgagaacttacatatcttaaaacaacttttatcctacccttatatttggttgatagtttttctgagtataagctctggtagaagttgaaaaaaaatttctttcaagatctgaaggtatcatcctattgcttctagcttcttgtaccgcttgtaaaaattccaaactcatctgcttcctaaccctttgtgtgtgacctgctatttctttctgaaatgttttagaattgtctatttgttcgaacttctctaaaattttattatgctgaatatagaggtgtttctatcattatccatttccttgggcatttggta

SEQ ID NO: 448965 - DNA, 661 bp, Homo sapiens
tgctctggctcagaggcagatatgagttaactgaaaatagtataggatgagacctgggggaagtgattaaacaatggccaggcctcctcctgatcacagttcttgagaatggagaattcacctctagcttcctgggttcatctcactctaacatacataaatgtccaacagtacctttatttgtaataaccccaaactggaaacaatccaaatattcatcaatagataagtgtgtaaacaaaatggrgtacacccatacaatggaatactacttagcaatagcaatgaataaactactgatccacgggacagcatggatgaattgcaaagtaattatgttgagtgaaggaagccagacaaaaagagagtacatagtctgtgattctaattagataaagttatagaaaatgcagactaagctactatgacagaaggctgggaatgacagggaccaggaaagggatggaggaataaattataaaggagcaagaagaaactttggaggatgttgagatgttgaatatgttcataattgtgatgtggtgttggtttcatgggagtgaacacttgtcaaaacttatcaaactatattttgaacatgtgcaacttatggtatgtgaatgatacctcaacgaaagtttgttttaaaatccaacttgaa

SEQ ID NO: 448966 - DNA, 661 bp, Homo sapiens
tgctctggctcagaggcagatatgagttaactgaaaatagtataggatgagacctgggggaagtgattaaacaatggccaggcctcctcctgatcacagttcttgagaatggagaattcacctctagcttcctgggttcatctcactctaacatacataaatgtccaacagtacctttatttgtaataaccccaaactggaaacaatccaaatattcatcaatagataagtgtgtaaacaaaatggggtacacccatacaatggaatactacttagcaatagsaatgaataaactactgatccacgggacagcatggatgaattgcaaagtaattatgttgagtgaaggaagccagacaaaaagagagtacatagtctgtgattctaattagataaagttatagaaaatgcagactaagctactatgacagaaggctgggaatgacagggaccaggaaagggatggaggaataaattataaaggagcaagaagaaactttggaggatgttgagatgttgaatatgttcataattgtgatgtggtgttggtttcatgggagtgaacacttgtcaaaacttatcaaactatattttgaacatgtgcaacttatggtatgtgaatgatacctcaacgaaagtttgttttaaaatccaacttgaa

SEQ ID NO: 448967 - DNA, 616 bp, Homo sapiens
gatccagtttatgatatttgtgctatagtagcccaaacagactgaggcactgagtcacctccaaccccggctgactccacaccttcctgggtgggggatcatgccttcattagtggcccctggcactaatcctgatcttgccttggtttaaagtcctgaggatgggccaggtcttatgaaacatgcacattcccgaggaaggcaaagtgactgagggagggcaaaggggagctgagcyctaccgcaagtggaactgaagaggagggtaatgggcccttcacatattatgacagacaaatcaatatcttagcacttttgttcctcctctatatctgagatcaatggagagaaaaacacttcaaattatattattactatacacctaaaaggggaaatacaaaataattctgagataaagtatttctggttattttaagataattttctgaaacccaggtaattactgggtcactaatagataaggaaaaccagggtgatgaaagatattacataacttaattctggctctgttctgattttggatcgttatagcttaaacagtaaatcctgaataactccatgaatttccactgttaagtagaagaacagagagaaa

SEQ ID NO: 448968 - DNA, 579 bp, Homo sapiens
aacatttttattacctcaagaagttatcctgtgcccaataaaatcaatataaagaacatttctgtcacctcatagtcaatttctccccatacctccatatcctgacaatcagcgatctgttttctgtaggtatttttgactttaaaaagggtaataaatggaatcactctgtatataaycttttgagcttgtttttttaatcaggtagcataatacatttgagattcatctatgtcatgtttatcagacatagatgaatcctttttagtaggcattgtattccattaaattgatgcattccattatataatgaaccactgtttgtttgtgcattttcctctttaaagacttttgggcatttcctggttttggtgattatgaatgaagccactataaacccttgttaccagtttttctatgaatatatgttttcatttctcttgggtaaatatctaaggatgaaattgcaaggctgtttatcaaatgtgtttcattttaaaagaaatggccaaaccattttctaaagtggctgtgtcattttggatttccactaatggtgcatatgtgttctagttgctt

SEQ ID NO: 448969 - DNA, 579 bp, Homo sapiens
aacatttttattacctcaagaagttatcctgtgcccaataaaatcaatataaagaacatttctgtcacctcatagtcaatttctccccatacctccatatcctgacaatcagcgatctgttttctgtaggtatttttgactttaaaaagggtaataaatggaatcactctgtatataatcttttgagcttgtttttttaatcaggtagcataatacatttgagattcatctatgtcatgtttatcagacatagatgaatcctttttaktaggcattgtattccattaaattgatgcattccattatataatgaaccactgtttgtttgtgcattttcctctttaaagacttttgggcatttcctggttttggtgattatgaatgaagccactataaacccttgttaccagtttttctatgaatatatgttttcatttctcttgggtaaatatctaaggatgaaattgcaaggctgtttatcaaatgtgtttcattttaaaagaaatggccaaaccattttctaaagtggctgtgtcattttggatttccactaatggtgcatatgtgttctagttgctt

SEQ ID NO: 448970 - DNA, 588 bp, Homo sapiens
tagccgccaataaaaccaagataaggaacatttttattacctcaagaagttatcctgtgcccaataaaatcaatataaagaacatttctgtcacctcatagtcaatttctccccatacctccatatcctgacaatcagcgatctgttttctgtaggtatttttgactttaaaaagggtaataaatggaatcactctgtatataatcttttgagcttgtttttttaatcaggtagcataatacatttgagattcatctatgtcatgtttatcagacatagatgaatcctttttagtaggcattgtattccattaaattgatgcattccattatataatgaaccactgtttgtttgtgcattttcctctttaaagacttttgggcatttcctggttttggtgattatgaatgaagccactataaacccttgttaccagtttttctatgaatatatgttttcatttctcttgggtaaatatctaaggatgaaattgcaaggctgtttatcaaatgtgtttcattttaaaagaaatggccaaaccattttctaaagtggctgtktcattttggatttccactaatggtgcat

SEQ ID NO: 448971 - DNA, 586 bp, Homo sapiens
gtatcttctgacttccatctccccatttccttcaaacctccttccatctccaccccggtaatcactgttttgttctctatctctgcatatttgaattttttttaaagatkccacatataaatgagatcatacaatatttttctttctgtgtccagcttatttactatttcacttagtataatgtcatccaggcttatctatgatgtggcaaatggtaaggtctcattctttatatatattagagtttcagtttctttatccattaattcctcaacagacatttaggctatttccacatcttggctattgtgaataatgctgcaatgaatacaggagtccagttatctttatgatgtgggaggatttaatttcctttcggtataaacccagaagaaggattgctgggtcatatggtggttctgtttttgatttctttaggcacttccatactgttttccatcatggctgtaatttgatatgttgtgttttcatcatcattcagttttaaactaccaatttcccatttcgatcttttttttacccatgcattatttagaagcacaattcagagacagaattaaatgca

SEQ ID NO: 448972 - DNA, 619 bp, Homo sapiens
attgatcggactgatctataagtactcacctctttccyggcccagcatacgtgttcctcacaccaacaaaaaccatttctgtttgtagtttgccatagtatatgtagacttatttgaaaagtactttgcatagtatgtcctcagaataataaaatattaataataataacaaatggggtaacaaggaaatgaggaaagggtagtgtccaagatagggttatcaatacgtgtttgctccaatggacaaattgtagtaggcctaatgagctaccagtctggagcaaattaaagaaaaaaagtttattgtatatacacaataaacagccagctgaaagtatttcagaacacttactccaattttccttgtgaaatccaagaagcttttcaaaaagcagtctcttcttttattaaacaattgtactaaaaatattgtctgtcttttcccactaaaagttaatctccctgagaacaggaactttgttttgctgtattcctggtgctgggaaatgtaagcattttggaggtgcttaataaatatttgttggataaatgagtgggagaacctgaagcaagcagacagatgaattttccctagttgtgtagaaagcatacagttggt

SEQ ID NO: 448973 - DNA, 619 bp, Homo sapiens
attgatcggactgatctataagtactcacctctttcccggcccagcatacgtgttcctcacaccaacaaaaaccatttctgtttgtagtttgccatagtatatgtagacttatttgaaaagtactttgcatagtatgtcctcagaataataaaatattaataataataacaaatggggtaacaaggaaatgaggaaagggtagtgtccaagatagggttatcaatacgtgtttgctccaatggacaaattgtagtaggcctaatgagctaccagtctggagcaaattaaagaaaaaaagtttattgtatatacacaataaacagccagctgaaartatttcagaacacttactccaattttccttgtgaaatccaagaagcttttcaaaaagcagtctcttcttttattaaacaattgtactaaaaatattgtctgtcttttcccactaaaagttaatctccctgagaacaggaactttgttttgctgtattcctggtgctgggaaatgtaagcattttggaggtgcttaataaatatttgttggataaatgagtgggagaacctgaagcaagcagacagatgaattttccctagttgtgtagaaagcatacagttggt

SEQ ID NO: 448974 - DNA, 590 bp, Homo sapiens
taatctccgactttggacctccaccctccaaaatggtgagaaataaatgcttgtcatttaagccacccagtctaaggtatttgttatggcagccagaacatactaagaccatttccctgccacagctgcccacagctctctgctrggttttctgctccctgccctgcactcctggactcctcctccagtgtcaatcatgacgcactttgcagggaaggaagttctcaccctcaattgctctcctcactcacatatgttcagagctctctttacaactgctggagcactcacatatcccaagggaaagcttctgtgttccatcctggaccttctaggggctaccacgcttccaccagggccgctgctctcaccataagcttcagactctcatctcccgagatcttgctcacagcgcagctgccttccgctcacacaggccagaggggccaccttgtctcttcttagagcaacttcccaccactcccttggggctcaaccttcgctttatgttctgtaaaagccagcagttctcaaacttgagactgcatcaggcacacctggagggcttgtgaaaatccagaatggtgagt

SEQ ID NO: 448975 - DNA, 661 bp, Homo sapiens
caatagggccaaagcctcattccagattccaaatgtcattctgtagccctcgtgctatcaactgctgcctgctggctgcagccaggtccctgggtccatacacagcctgcatcaagagcctgcagagactcgggggctggagatgggaaacagatggtggcctgcgctttgtctttcccaagtttacagcctcacctgggggtggaggctgttctgaggggcccccaagaggtaagttcacgcatcactactgaccctctccctgtgaaagcagaaagtcagcacgcatcctaccccagaccagaccagccacacctgtagattcaaggtcctgggggaacagtattcaaatgcctctgctctcagccttttacttctgactgtggttcccagcgagtctaaaatttgagaagtgaaactgaacatccmactgccttggtgaggggagaggaagaaattttacaggctttttattggccggttatttttctgtgtgtcccatacaggcccccaccatgaagggtttcacagccactctcttcctctggactctgatttttcccagctgcagtggaggcggcggtgggaaagcctggcccacacacgtggtctgtagcgacagcggcttggaagtgctctaccagagttgcggtaagccctt

SEQ ID NO: 448976 - DNA, 626 bp, Homo sapiens
gcagaaaaatcaattagtaacatagaaaatagagttgagaaacatatagaatgtcaaagaaattaacacagcggaaaataatatgaataagtatttttgtatccacatgytgcctggctgttctggctgctgacaacataaacatgaagaaaccgtttccacctgcccttaaggtggtcacagctcagtaaggaagatagagaaataaatagatagcaatctagatgtcattaattgataccaactcactatcccagaatcacaaaaatataatttttattatagtagccacagatggtatacaaaaagaaagataaaaaacaagacacattaagaatatcctattgctcttaaaagaaactatgtataggctttattctcaggatactcactagcacatccaaaaatcaggaaatattagcattagtctcctaaataaaaggataaaaattcaaattgttaacaatctattttgacagaaaagatgaaatgtataaaactacatatcactatatgtgagataaagcacagccatacacagagagaaacatagatgccttcaatgtttttgccatttcaaatactatggtcccattaggatatggggtagtaaataaagtattgga

SEQ ID NO: 448977 - DNA, 626 bp, Homo sapiens
gcagaaaaatcaattagtaacatagaaaatagagttgagaaacatatagaatgtcaaagaaattaacacagcggaaaataatatgaataagtatttttgtatccacatgttgcctggctgttctggctgctgacaacataaacatgaagaaaccgtttccacctgcccttaaggtggtcacagctcagtaaggaagatagagaaataaatagatagcaatctagatgtcattaattgataccaactcactatcccagaatcacaaaaatataatttttattatagtarccacagatggtatacaaaaagaaagataaaaaacaagacacattaagaatatcctattgctcttaaaagaaactatgtataggctttattctcaggatactcactagcacatccaaaaatcaggaaatattagcattagtctcctaaataaaaggataaaaattcaaattgttaacaatctattttgacagaaaagatgaaatgtataaaactacatatcactatatgtgagataaagcacagccatacacagagagaaacatagatgccttcaatgtttttgccatttcaaatactatggtcccattaggatatggggtagtaaataaagtattgga

SEQ ID NO: 448978 - DNA, 618 bp, Homo sapiens
gctgtttctctctagatgcagaagcatatatggagaagcaactaaatccccagttttctgacataataattaaaaatcagaggcccaggaaactatatagaaaataataggcaggaaatcakagagagggaatagcttgggaaagaggcaccataaagatttgttaatgaatttctgttctcaccccaaagttgaccatgggtagatctgatttaatcaatacagcaaagaatttaaggatggaactcacagattattgcccaggtctcagagtggccactgggtggcacacacacaggacaactaaaaataacattgcaaagactctgaaaactgaattaactttgggactgcagtccacagaaggtgggctggactgtgtgtcctaaacctaaacaggttgattgcttgctgaaacaaaaataacatttaacataaatatttttaaagactcagtacctcatgacataatattcatgcccaggaacaaatccaaaagtactcaatatatgaagaattagaaaaatatcacttcacacagggcaaaaaaaaatcaacagatgctaatgtaaaaataaaatatattaaaaatatctgacaaaaaacgtaaagcaattg

SEQ ID NO: 448979 - DNA, 527 bp, Homo sapiens
tagactaaatataaagttaagtaattctctagagcaattactaaaataaatttcaaggagatatagtcaaagactcaatgggcaagtaaaatagaatacyaaaaaatattcaaaaagtgcaaaagaatgcagaaaatagagaatggagatacaaaaatgaagagaacaaacaaaactaaataataaaatggtaaagtggaatacaaatatatcaataactgtattaaatgtaaatggtctgagcacaccaattaaaagacagagatcattagaatgggtagcaaaacataatacaactatatgttgtccatgtgaaatctaatgcttcaaataggttataaggaaaaggatagaaaaagatataccatgcaaactcttacaaaagaagttggagttgctatattcatatcagacaaagtagatttcagcacaaagaaaattaccagaaataaagagaaaccttacataatgattcaacagtcaatttgtcatgaagatataacaaccctaaatgtgtatgcacctaa

SEQ ID NO: 448980 - DNA, 527 bp, Homo sapiens
tagactaaatataaagttaagtaattctctagagcaattactaaaataaatttcaaggagatatagtcaaagactcaatgggcaagtaaaatagaataccaaaaaatattcaaaaagtgcaaaagaatgcagaaaatagagaatggagatacaaaaatgaagagaacaaacaaaactaaataataaaatggtaaagtggratacaaatatatcaataactgtattaaatgtaaatggtctgagcacaccaattaaaagacagagatcattagaatgggtagcaaaacataatacaactatatgttgtccatgtgaaatctaatgcttcaaataggttataaggaaaaggatagaaaaagatataccatgcaaactcttacaaaagaagttggagttgctatattcatatcagacaaagtagatttcagcacaaagaaaattaccagaaataaagagaaaccttacataatgattcaacagtcaatttgtcatgaagatataacaaccctaaatgtgtatgcacctaa

SEQ ID NO: 448981 - DNA, 603 bp, Homo sapiens
ctggcttctaaattcacctacaattctcataacataaaacttgttttaataagaatttttttaatctggcagcaattaaccatcagagcagatatgatatttttagaactgatagggacacatgtctttcttgagcaagtctttatttttttggtaaaaaaagaatacagacaggttctcaactcaaattaaaaaaaaaaaaaattcccaccatagtgactccttacaattcctgatcattttctcgatgttgaaagagtctaatatattcttatagttctgatgacatctgtttgacagtagcagttcccctccgtgaggaattacctcagtctatttcaaaaatgcctttatgagtggtggtatttgagcctggtggcaacaacctaacggtcattatactcctgtaaaaatgttagctagatcatatcatttctcagttcacagycctccaatgacttcctatgccactcaagggagaagcaaaaatttttagagaggccttaaaggcccccacaatgaccccacctcttcacccccatcccttctgctctatagatactagcctgtgctgttactaagtcaaccacagacactcctgct

SEQ ID NO: 448982 - DNA, 525 bp, Homo sapiens
gagatgaaaatgcaatcctggcaacttgatcaaaacaaagacgggttttcctacagcatgtctcccaccacatgagccacatgagcctccaaggttgagtaataaactcctatgtattacagaagacatgcattgattgactgggctggctagaaggaatcccagctagaamcacagtctagtttgcctcacagttaggaatgtgctctggagcctcattatttaattaagagtagaaattaaaacagcactaaatgcaatgaagcagcacaatttgcaagggctctgaatttatggtttccattaattaacaaaaagtagtgtaggcaagtgaaatcaagtgatctgctcagctattagaattttgaaagttaattaatataacagcacagatcattgaacttagaaattatgagtaacatatagaattttaaagagtatcatgatgttttataattacaggatactcctctgctccttcaaattgtattcttttgaagcttggttccttaactcaattcaaga

SEQ ID NO: 448983 - DNA, 534 bp, Homo sapiens
aaactgttcacaaaaccaccatttccaatggcaaaatttatattttgatttctaacgaaaaattccaatgaactaaaacattttcattcttttgtttaattcaattaattcaaacttcttagccttggaggcatcaaaaactagtaaaatccaaaataaagaactacagaaaaaaacagtggggggtgctgttgcctggtgtcactataagctagggagcatctagactttggaagagaaaaaatgttgcagtcagccaaagccgtttcttgctgtctgatatttaacrttattctttacttttccacttttcatagcagaccaaattcaaatttactgaattctaatttatcaaataaactcccctgagaatttaaagatgaggtcaagtattggataacacttaatgttaggtttttgtttttgtattcttgttttcataccctagactgcaactatcccttctacctagtcatttcagaaatctaagtgtttccagggtgggtacaagtagagaagacaaaaactgagctt

SEQ ID NO: 448984 - DNA, 534 bp, Homo sapiens
aaactgttcacaaaaccaccatttccaatggcaaaatttatattttgatttctaacgaaaaattccaatgaactaaaacattttcattcttttgtttaattcaattaattcaaacttcttagccttggaggcatcaaaaactagtaaaatccaaaataaagaactacagaaaaaaacagtggggggtgctgttgcctggtgtcactataagctagggagcatctagactttggaagagaaaaaatgttgcagtcagccaaagccgtttcttgctgtctgatatttaacattattctttmcttttccacttttcatagcagaccaaattcaaatttactgaattctaatttatcaaataaactcccctgagaatttaaagatgaggtcaagtattggataacacttaatgttaggtttttgtttttgtattcttgttttcataccctagactgcaactatcccttctacctagtcatttcagaaatctaagtgtttccagggtgggtacaagtagagaagacaaaaactgagctt

SEQ ID NO: 448985 - DNA, 601 bp, Homo sapiens
tggggagtgaaggagggtttttattcaaattaaatgttcctagaggtacgaatatctacttggaagaaattagagcattctgaagttgtcaatcccttatgtaaaatgctccatggagtgttaagcrtggtgtccacgcatccacagaacacatcaaaaagggaatgggggcaagaagactgtgagtagagaaggaaataaatgaggatgaaaaaaatcagcagaactcactcaccccataactacctgtattacacacctgtgtatgtgaacgaatgcctaaaaacacttctgctctcttccactgtgcaccttgctgtccagtttgagcccacaatttagaagtaacgttatctttcttgatgagcacctatagagataaatcaagtaaaaggcactgaagtattttatcttgagaaattgcaaacatgtagaattcttccagtgatttttttttttttagttgcaatatcaacatgaagtcctggagagaagagctaagatattttttattagatatctttgttttctacagcattgtgcccctagcgtacctcacaagctttctacaataaagatgtgcatgaatatctgtcagtca

SEQ ID NO: 448986 - DNA, 521 bp, Homo sapiens
gagcaagaaggaaaaaagtgaagttgattaatgggtgcaaacatacagtttaatggaagaaaaagatctagtgtttgataaatcagtagagtgactatagtttacaataatctactgtacacttctaagtggctagaagggaatagttcagatgtttctaacaaaaagaaaagacaaatatttaaggtgatgaatatcccaggtatgctgattagatctttatgatttagttaaatgtattaaattatcacatgtactctggagctatttacatctatcatgcatcaattaaaacatagttttgaaataaytaaaaatatatatttaatatggcttacaaatctctacataacttatctctgtctcccagtaggaatgggagttgggaagagatgattcccatcatccttcctgagccaatacaatctgactccagtacaacactgcatgtgtgaattatcaaacaaattgatttaaagattaaatgaaatcccaacacattcccaacagactttattttt

SEQ ID NO: 448987 - DNA, 621 bp, Homo sapiens
tcatctgtaaacagagacaatttaacttcttcactatcaagtatgatgttaactatgagcttgttgtatacggctttgacaatcttttatttgtccataggcctagagagacacctagaaagttgtctattgaacatcaacgttgatttgagaaactgtggtgattttctaaattccctgttataacttgatttattcgtgagcaggcatcacttttacaaaaacaatgcattctttatttttcaatttgtttattgctttaagtatggtgattgcaaagaatttgtgcttagacaaaatatcacctagagagtaattttgttttgtgtgttttaatcagacatattggtgaataaggaatcaacccttagctacttttaaagtataagtaatttggatattggaaatgaactctctgctttgaatccaactgaagagcaaggtttaccaaatctctgctctctccattagtgggaagaatgacgaggcagcccagggcatgttcwtggaaagcaaatgatatgatttccccatttagccacagttgactaattatgttaattgtaagactgcaggagagctgcagggagtaagcaactccccttcagcatgaagacttaa

SEQ ID NO: 448988 - DNA, 592 bp, Homo sapiens
cttcctatgactttctatctcattcagagcaaacctcaaactaatgatagcttccaaggaataaatgactaaccccttatacctcttgaattcacctttcaccagtgtatatctcattcacttttccctactacaaaggcctcttagctaatacttgagcayttcagccaatttatggtgtattagtccattctcacactgctaataaagacatacccgagcctgggtaatttataaagaaaggtgatttaactgactcacagttctacatggctgtgagggcctcacaatcatggcagaaggtgaaggaggagcaaagtcacgtcttacaagttataggcaaagagagtgtgtacagggtaactcccctttataaaactatcaaatcttgtaagacttattcactttcacaagaacagtgtaggaaagacccgcccccgtgattcaattacctctcaatgggtcccttccatgacatttgggaattataggagccataattcaagatgagatttgggtagggacacagccaaaccatatcatatggttagggcttttccatctgctttcccctgttcctggaacaggtttc

SEQ ID NO: 448989 - DNA, 499 bp, Homo sapiens
tatattttcttcagctgaacatatatgacaggaattttctttcttgcaccaaggattaatagtgagatagctagtttatttagaaaaataaaacactgactacatcacaaaatactgtctgcaaattgaaaaataatttatgtgctctttattctcttttaaattttcagatatcagcatgcacattagaattgttactaaaattattagttattacaatttaagtattatatgaatatccatgtttacattattagtaatattttattttccccaggataactgttactaaagcagtggcacattgtacaactgatgatgccttcaaattgataaaatatgatgactattttaaggaygcttaacataatttttatgatgtcctcccccacccctcacacattaaatgtgttgttttgttgttgttgaactgggttgattacatttttggcatcccttctcgttagcctcagtgtctcaccagctttatttacaaatg

SEQ ID NO: 448990 - DNA, 638 bp, Homo sapiens
gtgtagcagaaatcttgccagccttgactttcgaggctgggctgtaaagggtaacatgacttccatttgaaattcctctcatgatgctcagtctaygaagccccggccacatgaagaggacattgttaagtggctgataatctcagctaagttctcaactaacaactaggatcaacgatctgacatgagtaaaggagtcttcccctcactccagcctcgagatttgaaccttcctaagctgacaccctgtggagctgagatgagctacccccacccggccccagagtcttgttcaaattgcggatgtgtgagtaaaataagtagataactgtaataggtagctgcaactctgctttaaagattaaagagcggatgtgctcaaaattttctgaagattccagaggttattctgaaacaaaagttgttttattgattattgctgcttatgtatttttcttgcctaattagacatgggcaccaatctcttgtcaaaattcactcctttccaccaaagtatataccccattctctaattttctagatagcatctttgtggtaaaatgtgaactcaacattgctaaattgacaatctgtagatttttgttatttttggcagtctgtgtcctagaattctttac

SEQ ID NO: 448991 - DNA, 614 bp, Homo sapiens
aggcatatgaacttgagtttcttggtaagccttgccaacatgggccaaagcattctggggtcataggtaagctcaaaaggcagtctaggacacaaatactatatagtactatayagaattataattcctaggcaactcctagtgctgggctgggcttagaaccagtggactagggtagcacatgacctaggaagactccagccagggtggccaagggagtgcttgtgccacctctccttcaaccccaggcagtgcagctggaagctacaaaagtgactccttccttctgcttaatgagaggagaatgaagaataaagatgactttgtcttgcatcttgggtaccagctcagccataggaggatagggcactgggcagagtcatgaggcctccaatccaggccccagcttacagatgacatttctagaaacactatgggacagaagggaacccactgccttgaagggaaggacccagtcctggtgagattcatcacctgctgactaaggagcccttgggctctgaataaccggtggcaataccaaggtaatatactatgggccttgggctctgagatgtgctggctttagatgccatgcagtacattcccagctg

SEQ ID NO: 448992 - DNA, 611 bp, Homo sapiens
gaaacatagtttttaaaaagttaaatacaccgacaccagtttttcacattctttgggctgctttaatgctgccattaaataattgatttagttgtgacatagaacctatgttccatggagtctaccattcataaagatgtaatgtaaggtaacaaaaatataaattgtgtgtgtggcgggggagaagtcaagagtatttttatgtgacagaagttaagttgttatcagtttaaaatagtctgttacaaatacaggactctgtatgttagtttcactaaccagaaagaaataaattacagcrgatacacacacacaaaaaaaaaagggaaaagaaacaaagcttagcaccacagaaaaccaccaaactagaaagataaacaataagaaaggaagaagtgaacaagtaatctaaaaaacaactaatgaaatggtagaaggaagtcctaatttatcaataataaacttgaatagaagtggattaaactctaattaaaagatataaagtggatgaatggattcagatagcaaaacccacctatatgctgcctacatgatacttacctcactattaaagacaaatagactgaaagtgaagagatggaaaaatatat

SEQ ID NO: 448993 - DNA, 621 bp, Homo sapiens
aagaattttttaaatgagacgtcaaaagcacaggcaacaaaagcaaaaatagataaatggggtttcatcaaactaaaatgcttttgcacagcaaaggaaacttaacagagtgaaaagacaacttacagaatgggatacaatatttgcaaactatacatctgctaaggagttaatgcccasattatataagaaacttaaacaactcaacagcaaaaacacaaataacttatttaaaaatgggcaaaactgggaggctgaggcgggtggattgcctgaggtcaggagtttgagaacagcctgaccaatatggtgaaatcatttctctactaaaaatacaaaaatttagccaaacatgatggcgtgtgcctgtaaccccagctactcagcaggctgaggcaggggaattgcttgaaccagggagatggaggttgccgtgagccccgactgcaccactgcactccagcttgggcaacagagcaagactccttctcaaaaaaaaaaaagaaaaggacaaaataaactaaaagacatgccacaagagaaaatatagaaatggtcaagacgaatatataataaaatcatgttcaacatcactaaccatcagggaaatgcaaatcaaaa

SEQ ID NO: 448994 - DNA, 603 bp, Homo sapiens
gagcaagtttataacaataaacttgacaactttggtgaaatacatcaattccttcaaaaacaaattaccaaatccaactagaggaaaaaaaaggtgaacagccctacaactattacatggatagaarccataattaacagtcttgtcacaaagaagactctagggcaaaatttggctgatgaattctacaacacatgtaaacagaaagaatagtaacccaacatgtactcttccataaaatagaggaagagggagcactctcacgtgtattttatgatgtcaatattactctaataccaaaaacagaaaaatacatgacaagatgatagaccaatatgtctcatgaacataggcacaaaattttgtactaaattagccaataaagttctgcacataagacagtacgtcatgatcatgttcatgtcagagtgcaaggaattcacttgaatatcaagtaatataaataaccataaacaaaatgaagggaaaatcacaagatatttttaaatcagaaaaagacataaacaaaaaatatttgtcttctgaaatatctggcacacatcagatcaagaggtagaccatatactgattgatcacaggccc

SEQ ID NO: 448995 - DNA, 556 bp, Homo sapiens
gcaaaatcgagtctctacaaaataaacaaaaattagccaggatggtggtgtgtccctgtagtttcaggtacccaggaggttgagacacaagaatcacttgaacccaggaggcagaggttgaagtgaactgagtttacaccactgcagtaaaccctgggcaacagagccagtgagactgtctcaaaaacaaaacaaaacaaaacaatatgtgaatttagcaaagctgtaaaatacaaaagtatcatataaaaattaattgtasttttaatacagcaaaaaaaccagtatgacttaacgataacattaaaaaataaagtagagacaatttttttaaaaatatagacaagatctatacaatcaaactaaaaagcagcactgagacaaatgaaagaatacttgaacaattgaagagatatatcatgcccatggataggaaaagtcaatataattcatacaccaatcctcccagattaacagatttaataatatgataatcaatatcccagtagggtctcacatttatataaaaatatataggtcacaaaatcggtagtaa

SEQ ID NO: 448996 - DNA, 487 bp, Homo sapiens
tggtaaaaatatgcaatgcaatcttattcagccataaaaaggcaagaaatcccatcgtgagcagcaacatggatggaactgaagacattatgttaagtgaaataagccaggaatagaaagttaaacaacacatgttctcactcatatgtagaagctaaaataaagttgatcgcctagaagtaaacagtagaacagaggatactagaggcttggaagggtagaaggaagaggagratagggagagtttgctaaaggtataaaattacagctagagagaaggagtaagatctagtgtattacagcacactaggatgactatagctaacaataatatattacagtttcaaatagctagaaggaggatactgaatgtttccaatacaaataaataatacacatttgaaatggatatgcaaattaccctgatctgatcactatacattgcatgtattacagtatcactatgtaccccataaataagtacaat

SEQ ID NO: 448997 - DNA, 501 bp, Homo sapiens
gtttaacccagcagcaacatctgacgtagtcactcctgggtaatactcattttcttttggcttccagaacactgttcacctgatcgtcttcctttcactctggtctctctatgtctgttttctttgttaccttttctttatctcttgacctcataatgttgaatgtcccagggcttagttcctggttctttatttttctctggatcttctcttatcctttattattcattcttcaaggaataaatgtctattcattctttgatgattttatatgcatatgactttaattctgacaactcctagattaatgtctgcctctcaggcctccctcaaagcttagatttgtattcaaatgctgagttgacatctgtacgtgcctagacgatggacatttaaactgagcatgtccaaattgaatgcctgaactctcccccatgaaatctgctcctcccacagtctycctcacttcctctgatggcaaattcatccttcaagggcctc

SEQ ID NO: 448998 - DNA, 503 bp, Homo sapiens
attcctctttttacctctcacctcacatctagtctttcacttaaccacctcttgctatcttctttgccaccatactagtctatggtattatcatttcttgcttgcataacttcaacgtcctcctaagtagtcctgctgctcttacctggttattctgaaatctctctacattacagccaaaaagattctttctaaatataagtcagatcmcatcacttgcagggttttatccattttgctcaaaattaaaaccaaagcccttgtagtaacctacaaaacctgcctccccatctcctctctgacctcctatcccactaccttcttccagctttagtttctcagctacattggcctcttctttgtcaggcatgccctgtcttggtaccatcacctgggatgcttcctatgtgtgggattctctcttctctgatgtctgcttagctaatttccatatctccttcaagtctgctcaaataacctcccatgaaattactttttgtctt

SEQ ID NO: 448999 - DNA, 439 bp, Homo sapiens
tgctatgatagccctaaaagaatttcttcttgcttgtaggcacaaagctgacgcaggcaaaaatcagacacaggatttgactcatcagattgcagaattagaataaagattaaaaccaagcctggaarggtcctataagtaaaatttggggcactttcttgggaaaaaaatttgaatctttagaatcagaatgtcacatctagaaaatttatacaaccacaagtgattcaaacaataaaaccgaacttttgataagaaatactggggttagtcagggtttaaatgcagatgatctaaatcaccataaatattttaagcagaatgtaattttatggagagaattttacatagataaaatgttgaaatggttagaggagtgagctctattgaggtcttccagaaatggctcccagaattggctctccatgaaaccgactac

SEQ ID NO: 449000 - DNA, 439 bp, Homo sapiens
tgctatgatagccctaaaagaatttcttcttgcttgtaggcacaaagctgacgcaggcaaaaatcagacacaggatttgactcatcagattgcagaattagaataaagattaaaaccaagcctggaagggtcctataagtaaaatttggggcactttcttgggaaaaaaatttgaatctttagaatcagaatgtcacatctagaaaatttatacaaccacaagtgattcaaacaataaaaccgaacttttgataagaaatactggggttagtcagggtttaaatgcagatgatctaaatcaccataaatattttaagcagaaygtaattttatggagagaattttacatagataaaatgttgaaatggttagaggagtgagctctattgaggtcttccagaaatggctcccagaattggctctccatgaaaccgactac

SEQ ID NO: 449001 - DNA, 660 bp, Homo sapiens
catggtggttcatgcctataatcccagtacttcgggaggccaaggcaggtggatctcttgagccccagagtctgagaccaacctaggcaatacagtgagaccccatctctgcaaaaaacacaaaaacttgccaggtgtggtggagcatgcctgtaaacccagctattcaggaggctgaggcgggaggatcaattgagcccaggaggaagaggttgcagtgaacttagattgtaccactgcactccagtgtgggtgactgagctacaycctgtctcaaaaaaagaaaaaaagaaaaaaaaagtagtatctatcatatcactggctaagaaaatttactcctttgtctcgttaataatatttattgcatttattttcatctcagacctttaatattatatgggttaatggtgcttgctaattctactacttacaacattgtatctgtaggaattatactgaacatctgccaactcaacatttgagtaaaattctttcaacaaattatcaaaagttattttaggttaaaaggacatatggacacatttaatcatctgctttgtttcaatatcaaattggcatgctcatggtccatgaagaaggtggcaaatatcataaccacaaaaatgtctaattaaaattgaataactctgtcctcaattt

SEQ ID NO: 449002 - DNA, 660 bp, Homo sapiens
catggtggttcatgcctataatcccagtacttcgggaggccaaggcaggtggatctcttgagccccagagtctgagaccaacctaggcaatacagtgagaccccatctctgcaaaaaacacaaaaacttgccaggtgtggtggagcatgcctgtaaacccagctattcaggaggctgaggcgggaggatcaattgagcccaggaggaagaggttgcagtgaacttagattgtaccactgcactccagtgtgggtgactgagctacatcctgtctcaaaaaaagaaaaaaagaaaaaaaaagtagtatctatcatatcactggctaagaaaatttactcctttgtctcgttaataatatttattgcatttattttcatctcagacctttaatattatatgggttaatggtgcttgctaattctactacttacaacattgtatctgtaggaattataytgaacatctgccaactcaacatttgagtaaaattctttcaacaaattatcaaaagttattttaggttaaaaggacatatggacacatttaatcatctgctttgtttcaatatcaaattggcatgctcatggtccatgaagaaggtggcaaatatcataaccacaaaaatgtctaattaaaattgaataactctgtcctcaattt

SEQ ID NO: 449003 - DNA, 560 bp, Homo sapiens
cagtgagctgaaatcacgccactgcactccagcctgggcgacagagtgagactgttgaagggaaggggaagggaagggaagaaagtttctggatgtaatttgtttgctttttggaggtcaaacattggggaacactctagtcagaatacatgtgttcagaaattacagactgcatttcttattgtaaatgtatttatttctgtayccatctcttgtaagcaagagatctctgagtgcttgtgatctctgaacacttaatttggactatatgtaaaggtaaatttagttcctagcctagctaactcaagtcttttatggaatataaacaaacaagcaaacaataaacaaaggaaggtggaaaaccctgtaaatacatagttatcgtatgaggctgctgcttttcccaaagaaccatacaaccttatttatacttttaaatctccatagatgttttcatgattttttcacaggctaatgaccaagtcatgttttcttcctgcttatagaaattattctacttcttttaggaataagttcagggtcctttttgttttgttttt

SEQ ID NO: 449004 - DNA, 560 bp, Homo sapiens
cagtgagctgaaatcacgccactgcactccagcctgggcgacagagtgagactgttgaagggaaggggaagggaagggaagaaagtttctggatgtaatttgtttgctttttggaggtcaaacattggggaacactctagtcagaatacatgtgttcagaaattacagactgcatttcttattgtaaatgtatttatttctgtatccatctcttgtaagcaagagatctctgagtgcttgtgatctctgaacacttaatttgsactatatgtaaaggtaaatttagttcctagcctagctaactcaagtcttttatggaatataaacaaacaagcaaacaataaacaaaggaaggtggaaaaccctgtaaatacatagttatcgtatgaggctgctgcttttcccaaagaaccatacaaccttatttatacttttaaatctccatagatgttttcatgattttttcacaggctaatgaccaagtcatgttttcttcctgcttatagaaattattctacttcttttaggaataagttcagggtcctttttgttttgttttt

SEQ ID NO: 449005 - DNA, 473 bp, Homo sapiens
tttaataagtactaagcttcttaagagaaaacaactgatatcttacttcttctgtattatacatggttgtgaataacaaccatggaattttccaacagtttcccaaacttcagtatctatggaatttatccataggagaaattcttccaacagttatagcaatccttccccttcattctgaacttcattttttcccyccttcacatatccaaagttgaataaattcaaactcatcttttctctggccccagccactctgttttccgtatgtcaatttataaacttgctcacaataattctgtgtttgtttggttggttggttcgattttccccataccttgcagtttttgcttctcttacttataactggacttgaaattctggcagctctcatgggctgctgaggaaacaaactctttataaagatgtaatgaccagatgaatttcccaaagtgtgatctgctgctggctct

SEQ ID NO: 449006 - DNA, 473 bp, Homo sapiens
tttaataagtactaagcttcttaagagaaaacaactgatatcttacttcttctgtattatacatggttgtgaataacaaccatggaattttccaacagtttcccaaacttcagtatctatggaatttatccataggagaaattcttccaacagttatagcaatccttccccttcattctgaacttcattttttccccccttcacatatccaaagttgaataaattcaaactcatcttttctctggccccagccactctgttttccgtatgtcaatttataaacttgctcacaataattctgtgtttgtttggttggttggttcgattttccccataccttgcagtttttgcttctcttacttataactggacttgaaattctggcagctctcatgggctgctgaggaaacaaactmtttataaagatgtaatgaccagatgaatttcccaaagtgtgatctgctgctggctct

SEQ ID NO: 449007 - DNA, 605 bp, Homo sapiens
tattctgtgaagtaataatcataaatacattaaacaaaatttttcacactgtgatatacagaatgaccgtcctataaagggcatatttgtgttcctacaaagaaaaaggcagttttgagggtaaataatttagaaaaactctatgtgcatcaaccttttgaaaattcataaggcatattatatatcaaacatttggaaaatatggattatctcatgagtgattcagagaggtccttcayatataatttttccttctctgtcaacgacctgattttataatctggaaaatattatcctaagacttgccacttaagacactgccacagagagaggagggaccactgctggtaattttggaaagacaatgaatgtggtcttagctcctgtcactcagctgcagtcaggacagctgatccttcccagaaagcctgccttaataacatcatgatacctgacctactttctaacataatttctcaaagaaaacaaaagctattctcagtccatgcttaataacatctctgaaaacacactggttgttttcaaagcaatgtgttactttcatgaaagcccacgttgggattagtatttatatatgactaaat

SEQ ID NO: 449008 - DNA, 643 bp, Homo sapiens
gcttctttcgttaacttgtgtatctttctttctcctgctagaaggtaagctatagaaacagggactttactggtcttgtttagccttgtgtctccagtaactaaaaagtcctagacacataataggtgctaaataaataagtgttaaataaacaaattaggtccacactctttctggctttgttttttctcaatagcttcaaagatattgttcaaagccctattgtttttttaaaaagctatagaaactaaaacaaaagtgtaatttccagatggatttgggttaaatcaaaagtaatacagacaaacataaataaatatactagaagaaaatgctaaatatatgtacaattatttaatggttgcaattttcctcagcaacaaaggaaattaaagctactaaagaatagacaggaatatttatctctaatacacagaaaattttattatgcagaataaaacacacttaaattttaaaaattatattgggaaaaatattcagagtatgtatgataagattaaaagtaacacttctggcygggcgcagtggttcatgcctgtaattctagcactttgggaggccaaagcaggcggatcacttgaggtcaggagtttgagaccagccaggccaacatggtgaaacc

SEQ ID NO: 449009 - DNA, 564 bp, Homo sapiens
ttgacaaggaaatctacaatgggaatggagcagaggagccatagcgaagagacagtgcagtggcaaaaatcactgaaccttactgactaatatgggaaattgtagaaaggagggatgatgacaatgttttccaacctggtttattgggaaaattgaggtgccattagcaggaatagggaagtagcaatgatagttttaaatggaatggtgacaagtttattttaatttagtttccaacaatctggggttgggaagccaaataaacacgtgattcatgagctaaagaagatgtctgacctctagttataagctttgggagacatgagtataagaattagactcagatataagtttaattatatatgagaggtcagatatgaccatctatggaaagagtaaagttacagaaattagtaagaaawacatggtggtcattagagcctgttacaggtactccagttctcacctccttccaggtacataacaacattgccatgtgattgcttttgccaactaaatgtcagtaaaagtgacttattcacatccaggcaaaagcttgaagaa

SEQ ID NO: 449010 - DNA, 269 bp, Homo sapiens
aagtctgctctgctagcgtgtgctttggggaaaactgctgttcccttatgcrccacagcttctacatctgtaacatgtgggtgccataccggatggccttaaaggtcctcatttggatacagaaatggcatcaggatattaagttggcttccagccccattcctgatcatcctcaactgacattaggaatacatccttggacacttctgtagctgaagccatggtgccacctacttaggcaaacctctgaaggactggctgatccttgg

SEQ ID NO: 449011 - DNA, 631 bp, Homo sapiens
cccttggcttgtacagcccatgagctaagaatggtttgcaaatttctaatggatgtaaaaaaggcaaagaaaaatgtttttacaaagactgtatgtgtcatacaaatccagaaatctttactatctggccctttacagaaaaaaaaattgcagactcgtgcagtaagtaagtggtgggtaatcactgaaggttttgagcaagtcagtaaaatgttcagaattgtgctttagaaagttcactttcacaacaartgtgaacaattgattgaagagatgtaagactggacatagggtaatatgattcgagcaataatctgagagctgatgtggacctgaactgtgctatagcaatagagatttggaaaagacctgtatcatagagtaccccttccttttttatttttacatgcaatttcatgcacattccagatacgttttctcaaaagcagcacagatataataaggagcttcagggataaggcaatctcaccttcaacatcactcatttctttcctaaaactaaatgagcacagagagatatggagggggatagggtctaaaggcacatagctgtgttttattcacatagtgcagccccttttctattccagaatagctctgcatgagttat

SEQ ID NO: 449012 - DNA, 552 bp, Homo sapiens
ttgcgtgtgtctctttcattcctgttctgcagatgttttctgtagcaagcctacatcaccatttctttcagtagccattagtttaccccagctgtttcttgctgccccctcagttttactatattcttttattcctttctctacccctacctaacatctatttttattcttctccatcacgtaaacctctcatccacacattttactgcctgaatctcttaactccctttcatatagacccttcctgactagtaaatactatagctagcgatgactacatttttcaggaggttgaactgtgataggaaatgatarccagagaagggatagcatagtggggggaaaaaaccttgaacaagtttacaatataaagaaaaggagtcagtagaaaaaaaagagggagatgttaaaaacaaaataaaggaaataatttgattccagagcaggtaggaagaaatggaatccagagcacaggtaaaatgataatcttaggcatagagacactcctgctgaggcgggaaggaggaagtaataataggtcaagtgcataca

SEQ ID NO: 449013 - DNA, 552 bp, Homo sapiens
ttgcgtgtgtctctttcattcctgttctgcagatgttttctgtagcaagcctacatcaccatttctttcagtagccattagtttaccccagctgtttcttgctgccccctcagttttactatattcttttattcctttctctacccctacctaacatctatttttattcttctccatcacgtaaacctctcatccacacattttactgcctgaatctcttaactccctttcatatagacccttcctgactagtaaatactatagctagcgatgactacatttttcaggaggttgaactgtgataggaaatgatagccagagaagggatagcatagtggggggaaaaaaccttgaacaagtttacaatataaagaaaaggagtcagtagaaaaaaaaragggagatgttaaaaacaaaataaaggaaataatttgattccagagcaggtaggaagaaatggaatccagagcacaggtaaaatgataatcttaggcatagagacactcctgctgaggcgggaaggaggaagtaataataggtcaagtgcataca

SEQ ID NO: 449014 - DNA, 573 bp, Homo sapiens
tataattctagcaatgaaaagtggatcatcattacagatacagcacagattagagtataaggtactactatgaacaaatttatgtcaaaaattaaaatctagacrgacaaatttctggtcacatgtaaattaccaaaacgtattagaatatacagtcttagtaattgtatgagtccactctcatgctactatgaagaacttcccaagactgagtaatttataaaggaaagaggattaattgactcatggttctgcagggctggggaggcctcaggaatcatggcagaaggcatctcttcatagggcggcaggagagaaaatgagtgcccagcaaagggggaagcccttataaaaccatcagatctcgtgagaactaactcactatcaggagaacaggatgggctaaaccacccccatgattcaattatctccaactggtccctcccacaacatgtggggattatgggatgtacaattcaagatgagatttggttgaggacacagccaaaccatatcagtaatccaataactattagcaaaattgaagcagtgattaagaactttcccaaaaaa

SEQ ID NO: 449015 - DNA, 577 bp, Homo sapiens
cagctatgaatccatctagtcctaggtttttgggattggtaggctttttactactgattcaattttggaactcgttattactctgttcagggtttcaatgtcttcctggttcagtcttrggaggttatatgagtctaggaatttatcgatttattctagattttttagtttgtgtgcatagaggtgtcacaatagtctcaggattttttgtatttcagtggagtaagtggtaacatctcctttgtcatttctaattgtgtttatttggatcttccctcattttctttgttagtctacctagtggtctatgcatcttactagtattttcaaaaaaagtcaactcctggattcgttgaccttttgtattttttgtgtgtgtgtgtgcttcaatttccttcagtccagttcagtttttggttactttcttgtcttctgctagttttagggttggtttcttcttgcttctctacttcctctagttgtgtgttaggtttttaatttagatctttctaactttttgatgtgggtgtttagtactgttaacttccctcttaacactgctttagctgtgtcccag

SEQ ID NO: 449016 - DNA, 594 bp, Homo sapiens
gcctttcacttgtctcttggggtttcgccccagagacatgtggagctaccatcaattggtgcaatgggcccaggatggggtggctgcactgtgggcccaagctggggggtagaggaggtgagggggcctgcctggtaacaagcgggcggtgcatgtgggtaacaagggagacaaactggcctcttctcttgagaggaactgcagcttgctggaggtgtggttaaagcacttagggtctttgctccttacccagtccgagggcagcaagggcagtaccactgcagtggcaaaagcccagaggggcttttggttgcctctgggagctccacctcagggaaatgcagattgttcagccagggggtggggcgactgcactgttggcctgagctggggccccacttgttgaggagcacggggtcaagggctcacagggagtagagactgaactcctctccatatggtgactgtggcctattgggaggttgggtgaaactctcaggctctttgtttcttccccagactgaggacaacaggggcagaaccattgctgtggtagtagcagasgggctgtccgttacttctgggagcccctcc

SEQ ID NO: 449017 - DNA, 366 bp, Homo sapiens
tattttctcagacctcagtggaataaaattggaaatcaactccaaaaggaacctttaaaaccatgcaaatacatggaaattaaataaccttctcctgaatgatcactaggtcaacaatgacatcaagatgaaaatataaaaattctttaaactgaatgataatastgatacaacctatcaaaacctttgggatacagctaaggtggtgctaagaggaaagttaatagcattaaatgcatatatcaaaaagtctgaaagagcacaaataaacatctagggtcacacctcaaggaactagagaaacaagaacaaaccaaactcaaacccagcagaagaaaagaaataaccaaggtaagagcagaacta

SEQ ID NO: 449018 - DNA, 565 bp, Homo sapiens
gggccaggggtggaatgatatggtctggctatgccctcacccaaatttcaactagaattgtatctcccagaattcccacaagttgtgggagggacccagagagaggtaattgaatcatggggccgatttttctcatgctattctaatgatagtgaataagtctcatgagatctgatgggtttatctgtggtttctgtttctgtttctgtttcttcctcatttttctcttgctgccaccatataagaagtgcrttttgcctcccactacgattctgagccctctccagccatgtgcaactgtaagttcaaataaacctctttttcttcccagtcttaggtatgtctttatcagcagcatgaaaatgacctaatacatatgtctttctggagctctgctagtacacttgtcatttctggtgtcttgtctcttctttgaatttgtgtacatcatctttgaggtcctgtttcaggcatcccatattttctttaatttattccatttcagagaaagatctttgttcaatgttttctgatgctttgtggcgtattttttgatgtatatact

SEQ ID NO: 449019 - DNA, 532 bp, Homo sapiens
tgccctcacccaaatttcaactagaattgtatctcccagaattcccacaagttgtgggagggacccagagagaggtaattgaatcatggggccgatttttctcatgctattctaatgatagtgaataagtctcatgagatctgatgggtttatctgtggtttctgtttctgtttctgtttcttcctcatttttctcttgctgccaccatataagaagtgcattttgcctcccactacgattctgagccctctccagccatgtgcaactgtaagttcaaataaacctctttttcttcccagtcttaggtatgtctttatcagcagcatgaaaatgacctaatacatatgtctttctggagctctgctagtacacttgtcatttctggtgtcttgtctcttctttgaatttgtgtacatcatytttgaggtcctgtttcaggcatcccatattttctttaatttattccatttcagagaaagatctttgttcaatgttttctgatgctttgtggcgtattttttgatgtatata

SEQ ID NO: 449020 - DNA, 617 bp, Homo sapiens
cagtatttcattttaattccaatattgtttattttatgatatttttgagctatatactcagtggttgcattagasattacaattaacatcttaacatatcacaatctactttggataagtaacacttaaattccaatagttatatataaacttagcttttatattactcagtttcttcctcattcctttgtcataatgatgtcagatggattttataaacccattaacacagatttgtaatgatttccttaggaaattgtcttttaaatcaggaaggagaagaaaatagttaaaaatcatttatacatttttattctatatttatgtatgcagtcattttaacagtgttttttatttcttcacatggatttgagttactgtctagtgttcttttatttcagcatgaaagacaccctttaatatttcttgtaagtcagggttgctggcaacaaattctgtcagtttctgattatctggaaaattttttattttctccttcattttccatctagcaaaggatagctctgctagatatagaattcttcattgacagcatctcttctgtatattttaaatttgttaatccactgccttctgggctacatgatttctgatgg

SEQ ID NO: 449021 - DNA, 670 bp, Homo sapiens
ttattaaaataagaaccctggcatcttcctggtaaatctgtaccaccgtttccttggtcttctcaatttcagctaggtgttccttgaagtcaattttatttataggcaaatccaaataaaagtgattcttatgccttttcttatccccgaatttgacccagctcttgatctgagtaacaagatgtagttttttaactttgcaaaaatactttgaaccagctgcaggatatttagtgaaatgactgccttattctgaggtttgggaatacagaagatgggtttctgtgtaaatattaaaattattttttctttggatcagattaattacagaagtgaaagatttattactaaccacttcygcatataagacacagaaaaatagaaatctgtagtagaagtctaaaatttggagtagctgagataataagaacttacaaagtgcatttttttaatgtttagctctcatttttttccacattaaagagtacttttccataaatgtgtttatatatatatgcacatatatacacacatatgtgtgtgtatatatatatgtggtattggaacatcagtatattttttagacaagaacatttttgtacttcaaggaaacttagaggttaccttatttagccctcaatttatagaactgaaaaagaatcctcaaata

SEQ ID NO: 449022 - DNA, 556 bp, Homo sapiens
aaaaaaattccaagtacacataacctccacggatatacatttacatgtatctttggtcatattatttcccactaatccaaaaggcagttgatcgtaaaataaactattattttatgtaccaccaagaaaatcaccactgattaacctatgatataaagttactgataaaacaaatatmtggggagctatgctaaaatttttaccaaagggtcagcagtaactattttctctccctgtgtgaaagaacattctagaaaggcttaaaagaaattttttttgagacagggtcttgctttgttgcccaggcttgagtgcagtggcgcaatcacgcctcactgaagcctcaacctcccaggctcaagcaatcctcccacctcagtctccagagtagctgggactacaggcatgtgcattaaaaaaaaaaaaaattgttgtagaggagtctccctatgctcccccagctgacctcaaaatcctgagttgaagcaatcctccccacttggcctctcaagttctggggtcacaggtgtgagccactttgcccggcttcaaatga

SEQ ID NO: 449023 - DNA, 556 bp, Homo sapiens
aaaaaaattccaagtacacataacctccacggatatacatttacatgtatctttggtcatattatttcccactaatccaaaaggcagttgatcgtaaaataaactattattttatgtaccaccaagaaaatcaccactgattaacctatgatataaagttactgataaaacaaatatatggggagctatgctaaaatttttaccaaagggtcagcagtaactattttctctccctgtgtgaaagaacattctagaaaggcttaaaagaaattttttttgagacagggtcttgctttgttgcccaggcttgagtgcagtggygcaatcacgcctcactgaagcctcaacctcccaggctcaagcaatcctcccacctcagtctccagagtagctgggactacaggcatgtgcattaaaaaaaaaaaaaattgttgtagaggagtctccctatgctcccccagctgacctcaaaatcctgagttgaagcaatcctccccacttggcctctcaagttctggggtcacaggtgtgagccactttgcccggcttcaaatga

SEQ ID NO: 449024 - DNA, 548 bp, Homo sapiens
caaaaacaggggctcttagaatttcaggggacttcaaaagcatagccccaaagctcaacttttccaaggatcatcttggtccaattgtgttactatgaagggatactttataaattactgggtaatttataaagaagataagtttatttggcttatggttctgcaggctttacaagaaacatggtgccagcatctgcttctggtgagggcctcaggaagcttccactcatggtagaaggtgaaaggaagtaggcatcacatggtaaaagaaaggaagcaagagagggkagggaggtgccagactttttaaaagacttttaacaatcagttctggtgggaactaatagaccaagaagaactcactcattacaaagctggcaccaaggcattcataagggatcagcccccatgacccaaactcctcccattagaccccactccaacactggggatcaaatttcaacatgagatttggaggggaaaatatccgaactatctcaatgatgttatagatgtcaatagtctcatacatttgtcaatgacaaaat

SEQ ID NO: 449025 - DNA, 602 bp, Homo sapiens
gtaaccagccttaaaacaatcacacagtgggaatatctgtctcggaataccartgagaatataccttcagaaatcacacatcccaggcatgtttcaggaaagcgttcatttcaaatactctgttccactgagctcttaaagcatgagaatattgtagaggataagaactgcggaagtggagaacggagagacagtagagacagggagtcttgtatttcaccgtataccaatttgtaatgcttgagattttcaaccacgtacctgtgttaactattttaataaacagaaattataatgtttcatcttccaaaatacgtctcacaggattgccttttacactgggaaagatcccattaatttacaattcaacagatgtgggttcaatcctgatatatcataaagtaaactgaggcaaaggtggattgtattgctcttagcctttctttttatttttatatttaggaagagagttggaatttgaactccacccacagtaatgtacagtctatttaatgaggaggtagatagtgcagtggttaagggtataacttggaataaaatagacctatgtttaaattctatttctatccataattaaatat

SEQ ID NO: 449026 - DNA, 602 bp, Homo sapiens
gtaaccagccttaaaacaatcacacagtgggaatatctgtctcggaataccaatgagaatataccttcagaaatcacacatcccaggcatgtttcaggaaagcgttcatttcaaatactctgttccactgagctcttaaagcatgagaatattgtagaggataagaactgcggaagtggagaacggagagacagwagagacagggagtcttgtatttcaccgtataccaatttgtaatgcttgagattttcaaccacgtacctgtgttaactattttaataaacagaaattataatgtttcatcttccaaaatacgtctcacaggattgccttttacactgggaaagatcccattaatttacaattcaacagatgtgggttcaatcctgatatatcataaagtaaactgaggcaaaggtggattgtattgctcttagcctttctttttatttttatatttaggaagagagttggaatttgaactccacccacagtaatgtacagtctatttaatgaggaggtagatagtgcagtggttaagggtataacttggaataaaatagacctatgtttaaattctatttctatccataattaaatat

SEQ ID NO: 449027 - DNA, 636 bp, Homo sapiens
ttaccggtcacctggtagctttcccaacagcaaggtggaagctagatgccctgtcatgccctgacctcaaaaatcacaatgcattacttctatcatactctactggtcaaagcaggcacaaaggcacactcagtttcaaaggcagagggcacagacccccatctccatgggaggaatggcacattcaagtgctgccatctttggaaaatgcaatctgccactgaacaaaaaatatcaacctccttcctttttaaaaatagctgcatagtattacattttatggatgcattaaattttagttaaccagttctcccatcatccatcatccatttgtaatcatttttcatcatttttggaaagtcctttcagatgtccctgctctctcattcatctgtagcaggagtaggcaagctatgccaggcaggccacactgtttgtaaataaagttttattgaaacacagccacatccattcatttacatactgtctatggctgcttttctgctacaatggcaggaaaaacatggagaataattcagctgagcccagctgctcctgccaaggagcccggctcatgcaggaagctscactgccccctccagagcagccatctgccaactgaacaccccagagcaa

SEQ ID NO: 449028 - DNA, 554 bp, Homo sapiens
aagattcaagttataaaagatatataactcaataaaacaaatcaatattttctctaatcaaatgtaaatatgtaatcagctgtaggtagccaaaaattaattactacattgctctggatatgactacacaataaagagcaacaatgaaattgtactgatattttaataaatatttctgwactcattatttgcaaagaattaagatgtcttttctgtcctcaattagtttatacacttattgacaaatttagtcagtttgatttgtaactaaaatctaagacagaaagccatacataatatgagaagcacacaagtaatttctatgagcactgacttcattatttttttactggaaggaagtagggcacactgaaaaagggaaaaagtgaattttcccaagaaggatttcaaaacatcctcatttttctaaaaatttaattttaagtaaatgcaaacatatagtcttaaattgcttttgcttgatgatatggtttggctgtgtcctcacccaaatctcatcttgaattgtagctcccataattcacacatgtcct

SEQ ID NO: 449029 - DNA, 629 bp, Homo sapiens
ttgctcctccgttcaccttatgacatgattgtgaggcctctccagccatgtgaaactgtgaatccattaaacctctttttctttataaattacccagtctcaggtatacctttattagcagtgtgagaacagactaatacacttaagaaaggaaacattgacaatccactgtgaaatgacttttaaaatagctagagtaattaagggaaggtataaggggttaatttaaaaatttcttaacatatctgtataatttaagctcaattctaggcatctacaatggaaagaactagtattttrgatggggtaagatttgatagtgaagataaggataacaccaaatatctacctcagtgaatcatatatccctggtcccagagaaaaacaatttgcaatctgaacattttcctgttaatggattgcaggagagttgatggatttttttggattgaagattaacttcatactaatcccaggtcttctgggagtgttggcaatagggtggtaggatttggtcacagaaagattagagcaaaaaatatcatggaagacagtaaggaagcagcaggtctgggttttgtgaaacatgaagctcatacaatttccaatattctacaaaagcaaaagaa

SEQ ID NO: 449030 - DNA, 520 bp, Homo sapiens
aaaaggcaataagagcttataaaaacaatgacaggttcatgcactccaataattatactcggtttttactttgaaagaaaccacaatgtctaagtaattgaatttgccagcaatgtctttgaatctggagtagacaattctggtaggagaacgtaaatgatgatttaactctactagtgttaaaagcaccgcattcttaaattacttctactgaaactgtatatcctctccacaaaacatgctaggacattcacttgaaaacaaaaactgagagattttagactaacgaaaaaccmggtgtttagttttatacagaaaaaagtgtttaaagagataatctagtacaataaagggtggggaaaataacttgctgaaggagagcgtccaaagagctattttgtccttcaagaaagaggatggcaaatacataaattaattacactttggcgatccatgggcattaaataacatattttaaatctgcttgcaactacatttaaagcctccaaatgaggaccaa

SEQ ID NO: 449031 - DNA, 540 bp, Homo sapiens
ataatccatctgtcagaacccagttacttcatttattaaaaaaaaatgagtcaattcctaaatattttccctttgctaatataagactctaagacataggtgtgtctttaaaaaaacaaggctttttaaaatttgaataakaaacactaccaccactagtgtgggtgcctatcatattcctacagaagtgactaaattcaaggatatgaaagtaaactcctggtcaaaattttccagaactcatcattattattaatgttgggtagcaaataaatattgaatttttatttttttattcagcattaacatcacatgtcatgagttccactattgattttaaaaattcatctaactgaagactcaactgaaactaaagacaattcttaaaaatagataagaacaaagttaacaatgtggcataaaaatggtctaaaaataaaaacaaaaaagttcaggaaagaaaaaatggataaaaataatcataggaaaatggcaattaattccatacaacattattgttttgatcttttgggatagtga

SEQ ID NO: 449032 - DNA, 492 bp, Homo sapiens
cataggtcactgaggctctgttcactttttaaaaactttttttttctctgtttttcaagtaggttaatttctattgccctatctcaaagatcacttaccagtttgtgttgccattgccaatctgcttttaaggygatggagttgtcttttcatttatcatactttactctttagttttacttttttaaaaaatggtttacatttctctgctgagatatcccaatcttttcattctttataataatatttacctttaagttcaaacctttttataatatttgctttgaagtctcatttcctaatttcaacacttgggtaatgtcaggtttgattatcattgaccgcttattctcttatctaaggatcacatttcccttctatttatgtatttaatgtgtttgtgttttactttcttgtgaggtgggtatactaggcactgtgaataaggcgctattgactctgaggtctgttagcttcttttaaagaatgatg

SEQ ID NO: 449033 - DNA, 492 bp, Homo sapiens
cataggtcactgaggctctgttcactttttaaaaactttttttttctctgtttttcaagtaggttaatttctattgccctatctcaaagatcacttaccagtttgtgttgccattgccaatctgcttttaaggcgatggagttgtcttttcatttatcatactttactctttagttttacttttttaaaaaatggtttacatttctctgctgagatatcccaatcttttcattctttataataatatttacctttaagttcaaacctttttataatatttgcwttgaagtctcatttcctaatttcaacacttgggtaatgtcaggtttgattatcattgaccgcttattctcttatctaaggatcacatttcccttctatttatgtatttaatgtgtttgtgttttactttcttgtgaggtgggtatactaggcactgtgaataaggcgctattgactctgaggtctgttagcttcttttaaagaatgatg

SEQ ID NO: 449034 - DNA, 520 bp, Homo sapiens
caggcattcatctcatccttgctttatcttatattacgaagtgaagtatatctatatctggatatgttttttttcttgccatcaagatagatttctatttatcattcctgtcattcattagagtcagacaggaaaagaagaaataggtatctttattacatctcaaagccgccagaaatccatttaagggtttaaggttgtgggttatcacaatcatgattgtattttagaaagataaccacaartatataaaaccattgccatatgtcaggagtggtggctcacgcctagaatcccagcactttgggaggctaagaaggctggattacatgagcttaggagtttgagaccagcatgagcaaaatggcaaaaccctgtgtctacaaaaaatacaaaaattagccggatatgatggtgtgcatctatggtctcagctactgggcaggctgaggtgggaggatcacctgagtctgggagattgaggctacagtgagttgagatcatgctactgcactgcagc

SEQ ID NO: 449035 - DNA, 520 bp, Homo sapiens
caggcattcatctcatccttgctttatcttatattacgaagtgaagtatatctatatctggatatgttttttttcttgccatcaagatagatttctatttatcattcctgtcattcattagagtcagacaggaaaagaagaaataggtatctttattacatctcaaagccgccagaaatccatttaagggtttaaggttgtgggttatcacaatcatgattgtattttagaaagataaccacaaatatataaaaccattgccatatgtcaggagtggtggctcacgcctagaatcccagcactttgggaggcwaagaaggctggattacatgagcttaggagtttgagaccagcatgagcaaaatggcaaaaccctgtgtctacaaaaaatacaaaaattagccggatatgatggtgtgcatctatggtctcagctactgggcaggctgaggtgggaggatcacctgagtctgggagattgaggctacagtgagttgagatcatgctactgcactgcagc

SEQ ID NO: 449036 - DNA, 309 bp, Homo sapiens
tatagggattgtgttgagtctgtagatcactttgagtattactgatatcttccagtgaacactggatcgctttcaatatatttctgtcatctttattttgtttaagygatatttatagtttaaagtgtacgagtcttttgcctccttggtcaagtttattcctaagtattttattctttttgatgctactgtaaataaattattttcttaatttccttttcatgttgttcattgttagtgtagagatacataaattacttttgtatgctgattttatatcctgcaatttagctatttttttttttactc

SEQ ID NO: 449037 - DNA, 620 bp, Homo sapiens
ttgtttacccttttgtaatttttaaatgccctttgtctcttattacagtttttgatttgatgatattttttctgttataattatggctacccctcctctcttttggttatcatttgcatggcatatctttcttcatctttttacttttggcaaataaatgtcctagtatctawagtgagtcttttatagacttcataatagttcataatagttgaatcttgtttcttgtttgttttggattttctagctattcagccaatctatgtctttcaactggataatttaatttattcacattgaaagtaacaactgatggacaagaattactactgtcattttaatcttttaataattaatattttatatctaagattatgtgaattaatcaagggtgaaaattttataataaagcaaaaaattcaaaaaagccttcaaaatgacccatttcttcatcctgcctttccacctggctggtggactaatataaatttgcatatatcataattattgggctgactcagctaaggtatattaataatattaattattaaaacatttaaaagaagagttaaaattacttgtcattctgctttaacccttgacaaaagtggtagggcaaa

SEQ ID NO: 449038 - DNA, 576 bp, Homo sapiens
tagggtgctcccctgatgttgtggtcacccctrtcccctaaagatggggctttctaagagccaaactgcagttattggtattcctcttctgggtctagccacccagtggagctaccaggctctgggctgatactggggaatgtctgcaaagagtcctgtgatgtgattaatcttcagttttctcagctgtagatacctgtgtctgctctggtagaggtagcagagtcaagtggtctctgtgagggtccctggttgtatttttaagtgtgcttttttttttattgttgttgtttggcctctaaccgaaaggtggtgctttcaagagtgcctccagtcaggaggtggtgctttcaggcagtcggcagggcctttaggcacccaagatatatgtctttcatcttcagctaccagggcaggtagagaaagatcatcaggtggaaacagggttagatgtgtctgagctcagattctccttgggtgaggcattctgtggctgctgtgatggatgggtgtgtgattttcaggccaatggacttatgttcccagggggattatggctgcctctgctgcatcaca

SEQ ID NO: 449039 - DNA, 576 bp, Homo sapiens
tagggtgctcccctgatgttgtggtcacccctatcccctaaagatggggctttctaagagccaaactgcagttattggtattcctcttctgggtctagccacccagtggagctaccaggctctgggctgatactggggaatgtctgcaaagagtcctgtgatgtgattaatcttcagttttctcagctgtagatacctgtgtctgctctggtagaggtagcagagtcaagtggtctctgtgagggtccctggttgtatttttaagtgtgcttttttttttattgttgttgtttggcctctaaccgaaaggtggtgctttcaagagtgcctccagtcaggaggtggtgctttcaggcagtsggcagggcctttaggcacccaagatatatgtctttcatcttcagctaccagggcaggtagagaaagatcatcaggtggaaacagggttagatgtgtctgagctcagattctccttgggtgaggcattctgtggctgctgtgatggatgggtgtgtgattttcaggccaatggacttatgttcccagggggattatggctgcctctgctgcatcaca

SEQ ID NO: 449040 - DNA, 523 bp, Homo sapiens
gggattatggctgcctctgctgcatcacacagatggccaggaaagcaggggcaagctggcagccacaggccttacccagctcccatgcagcccacagcccgaaaggctagtctcactccaactgtgtccttccaacagcaccaagttaatttycttgcagctggtgagcagagctgaggacttgcccaagggtacaagcctcccagctgagaaagcaagcagactcacagttcctggctgtcacatggagcctgcaggggcaatacacctccttcaaaggttctgtggattctctagactttcttgatatgttcctgcagtagttcttcaagcaaaagttcactgtgtgagtctccatacactactgtctttgttcgactggaagctgcaagttagtcctccccccatctgctattttccctcctatatttcatctctgatttctttgagcagtgctttgtaattcttgtagagattgttaacctatctggttagcagtattcctaggtattttattcttttt

SEQ ID NO: 449041 - DNA, 517 bp, Homo sapiens
ttggaacaattagcttgttcacattcaaggctaatattaatatgtgtggatttgatcattctgtcatcatgttgttagctgtttattgtatgcacatgtttgtatcattgcttaatagtgtcaatggtctatgtacatcagtatttttgtaatggctggtaatgttcttctattttcatatacagcattcccttcaggacctgttgaaaggcaagtccagtggtaatgaattcccttagcatttatttgcctgaaatggatcttatttctccttagcttatgaagcttaatttgsctggatatgaaatgttggagtttgctttatttaagaatgctgaatatatgcccccagtctcttctgacttgtagcatttctgctgagtggtcttcttttagcctaatggggatcccttgtatgtatcatgcttcttctctctagctgccttgaacattttttctttcattttgaccttggagaatctgattactatgtgtctcgggtatagttttcttatgt

SEQ ID NO: 449042 - DNA, 517 bp, Homo sapiens
ttggaacaattagcttgttcacattcaaggctaatattaatatgtgtggatttgatcattctgtcatcatgttgttagctgtttattgtatgcacatgtttgtatcattgcttaatagtgtcaatggtctatgtacatcagtatttttgtaatggctggtaatgttcttctattttcatatacagcattcccttcaggacctgttgaaaggcaagtccagtggtaatgaattcccttagcatttatttgcctgaaatggatcttatttctccttagcttatgaagcttaatttggctggatatgaaatgttggagtttgctttatttaagaatgcygaatatatgcccccagtctcttctgacttgtagcatttctgctgagtggtcttcttttagcctaatggggatcccttgtatgtatcatgcttcttctctctagctgccttgaacattttttctttcattttgaccttggagaatctgattactatgtgtctcgggtatagttttcttatgt

SEQ ID NO: 449043 - DNA, 496 bp, Homo sapiens
gagtttgctttatttaagaatgctgaatatatgcccccagtctcttctgacttgtagcatttctgctgagtggtcttcttttagcctaatggggatcccttgtatgtatcatgcttcttctctctagctgccttgaacattttttctttcattttgaccttggagaatctgattactatgtgtctcgggtatagttttcttatgtactatcttctgggggttctctgcatttcctgaatttgaatgtcagcctctttaatgaygatagggctattttcatgggtgatattctcaaatatgtttttcaagttgcttgctttctctcattctcttcagggatgccaacgagtcatatattttatctctttacataatcctatatttctcagagttttgttcattcttctttaattttttttcttaatttttgtctgagttatttcagagaactggttttttaactccaaattgttttctcagactggacaattctgct

SEQ ID NO: 449044 - DNA, 465 bp, Homo sapiens
aagaatacactctggttttttgagttgccagagtttcttgttctggttctttctcgactatgtgggctgatgtttctttaatctttaaaattgctgttctttagataggtttttttttaaattttatcttctttgatgccattgagggtttcattgtagtataatgtgkgttcagtcagttgactttgtttatggaagattataggggcccaagtctcagttaacgctcctgggctgcatgccataaatttttggggctgatattgggcaagtagctttgttctctggtctgtttaggttagaaagctgttgtgctggaaaggccatggtggtcctagactacgggccacagtgctctaatgtgtgatgccaaccaatgtgctttgtttgtgcaatggcactgagatctctgcttatttgcacattccagcaggagcaacagcataacggggtacatacaggttg

SEQ ID NO: 449045 - DNA, 465 bp, Homo sapiens
aagaatacactctggttttttgagttgccagagtttcttgttctggttctttctcgactatgtgggctgatgtttctttaatctttaaaattgctgttctttagataggtttttttttaaattttatcttctttgatgccattgagggtttcattgtagtataatgtgtgttcagtcagttgactttgtttatggaagattataggggyccaagtctcagttaacgctcctgggctgcatgccataaatttttggggctgatattgggcaagtagctttgttctctggtctgtttaggttagaaagctgttgtgctggaaaggccatggtggtcctagactacgggccacagtgctctaatgtgtgatgccaaccaatgtgctttgtttgtgcaatggcactgagatctctgcttatttgcacattccagcaggagcaacagcataacggggtacatacaggttg

SEQ ID NO: 449046 - DNA, 575 bp, Homo sapiens
actttgtttatggaagattataggggcccaagtctcagttaacgctcctgggctgcatgccataaatttttggggctgatattgggcaagtagctttgttctctggtctgtttaggttagaaagctgttgtgctggaaaggccatggtggtcctagactacgggccacagtgctctaatgtgtgatgccaaccaatgtgctttgtttgtgcaatggcactgagatctctgcttatttgcacattccagcaggagcaacarcataacggggtacatacaggttgactgggatggggagctagtgggcgtggggctgccagcctccctgtgcatgtttgcagtggcagtggtggcaccatggggccaggggcagggctgctggcatttatgtgcttgtccatactggcagcagtgtcggcacggtggttgggcactggtaggctgcagggctgctggactccatgcacacgtttgctcccacggcagtgaaagtgcaggctggggagcaaggcctctggcatctgtgcacatgcacatcagcaatggccgctcaaccagggtacacaaggatgtgct

SEQ ID NO: 449047 - DNA, 575 bp, Homo sapiens
actttgtttatggaagattataggggcccaagtctcagttaacgctcctgggctgcatgccataaatttttggggctgatattgggcaagtagctttgttctctggtctgtttaggttagaaagctgttgtgctggaaaggccatggtggtcctagactacgggccacagtgctctaatgtgtgatgccaaccaatgtgctttgtttgtgcaatggcactgagatctctgcttatttgcacattccagcaggagcaacagcataacggggtacatacaggttgactgggatgggragctagtgggcgtggggctgccagcctccctgtgcatgtttgcagtggcagtggtggcaccatggggccaggggcagggctgctggcatttatgtgcttgtccatactggcagcagtgtcggcacggtggttgggcactggtaggctgcagggctgctggactccatgcacacgtttgctcccacggcagtgaaagtgcaggctggggagcaaggcctctggcatctgtgcacatgcacatcagcaatggccgctcaaccagggtacacaaggatgtgct

SEQ ID NO: 449048 - DNA, 575 bp, Homo sapiens
actttgtttatggaagattataggggcccaagtctcagttaacgctcctgggctgcatgccataaatttttggggctgatattgggcaagtagctttgttctctggtctgtttaggttagaaagctgttgtgctggaaaggccatggtggtcctagactacgggccacagtgctctaatgtgtgatgccaaccaatgtgctttgtttgtgcaatggcactgagatctctgcttatttgcacattccagcaggagcaacagcataacggggtacatacaggttgactgggatggggagctagtgggcgtggrgctgccagcctccctgtgcatgtttgcagtggcagtggtggcaccatggggccaggggcagggctgctggcatttatgtgcttgtccatactggcagcagtgtcggcacggtggttgggcactggtaggctgcagggctgctggactccatgcacacgtttgctcccacggcagtgaaagtgcaggctggggagcaaggcctctggcatctgtgcacatgcacatcagcaatggccgctcaaccagggtacacaaggatgtgct

SEQ ID NO: 449049 - DNA, 623 bp, Homo sapiens
actttcactcaattacatttaatattcttcatttttcccccttgggggggaaatgaagcattttgaaataactcacatattctttttgattaaaaagagacaagaawattttttcttgtttcttggaaaacctgatctaaattaagtctcacaccttcataaaatataaatcttcctcccatgttatatcctcctctacaatttcacacctcctctttgccagttgctaagccattgtctcctagctttaaatctcccttcccatttctacactcaggtttgtaatatggctgttagtagtctacaaatcatattttggcttttctattagattctacccaaaggggttgctagatgaaactggaatactgaggaagaaagaagggaccatattatttgctatctctttgcttcctgtccctctcagtatcacttgagcattacttcttcattaagcattaagagttgattcctgtttgcagtttttttggcacttacagattcagacttattgtatactcctttgggacctctgacaccagctggccagtgtttcttcctcagatacctgagtccagccccacaggaatcatccttcaagtttttaaattgtaataattcca

SEQ ID NO: 449050 - DNA, 623 bp, Homo sapiens
actttcactcaattacatttaatattcttcatttttcccccttgggggggaaatgaagcattttgaaataactcacatattctttttgattaaaaagagacaagaatattttttcttgtttcttggaaaacctgatctaaattaagtctcacaccttcataaaatataaatcttcctcccatgttatatcctcctctacaatttcacacctcctctttgccagttgctaagccattgtctcctagctttaaatcycccttcccatttctacactcaggtttgtaatatggctgttagtagtctacaaatcatattttggcttttctattagattctacccaaaggggttgctagatgaaactggaatactgaggaagaaagaagggaccatattatttgctatctctttgcttcctgtccctctcagtatcacttgagcattacttcttcattaagcattaagagttgattcctgtttgcagtttttttggcacttacagattcagacttattgtatactcctttgggacctctgacaccagctggccagtgtttcttcctcagatacctgagtccagccccacaggaatcatccttcaagtttttaaattgtaataattcca

SEQ ID NO: 449051 - DNA, 623 bp, Homo sapiens
actttcactcaattacatttaatattcttcatttttcccccttgggggggaaatgaagcattttgaaataactcacatattctttttgattaaaaagagacaagaatattttttcttgtttcttggaaaacctgatctaaattaagtctcacaccttcataaaatataaatcttcctcccatgttatatcctcctctacaatttcacacctcctctttgccagttgctaagccattgtctcctagctttaaatctcccttcccatttctacactcaggtttgtaatatggctgttagtagtctacaaatcatattttggcttttctattagattctacccaaaggggttgctagatgaaactggaatactgaggaagaaagaagggaccatattatttgctatctctttgcttcctgtycctctcagtatcacttgagcattacttcttcattaagcattaagagttgattcctgtttgcagtttttttggcacttacagattcagacttattgtatactcctttgggacctctgacaccagctggccagtgtttcttcctcagatacctgagtccagccccacaggaatcatccttcaagtttttaaattgtaataattcca

SEQ ID NO: 449052 - DNA, 610 bp, Homo sapiens
taattgctttaaaagccaggggaatggaaaacagttaaagtgttatactgccatacatcttacagggattaaaagttatcatttttcagayttgtgcagggcagtttgtttcggcatggtactctgccacatggtgatatatttgcctgcagagatcacactgaggtagtataatacccagtcctgctttggattttccctaaaggcagacacaatcactacaataatgtgataaattgtgtggcattttgctgaacagcaagagactccccccagttttgaaacagtttgaggcagtttgactgtgttttctttttttttttttcagttattcgattatgttttccaaagaaaatactggtaccaggatttcactgtaaatgccaataacataaacattttgttccatgacctttaaaagtttttgccaaaactttttgcattccaaatcatggttcggttaaggcaaaagataatgtattttcatattttagtagaaattggactttgaattatatctatttcttagtgagatataatgtgtttgactaaatcagttcatttcagacaaccaaaaatgttgagtcccttcaatgtgccagataatgga

SEQ ID NO: 449053 - DNA, 610 bp, Homo sapiens
taattgctttaaaagccaggggaatggaaaacagttaaagtgttatactgccatacatcttacagggattaaaagttatcatttttcagatttgtgcagggcagtttgtttcggcatggtactctgccacatggtgatatatttgcctgcagagatcacactgaggtagtataatacccagtcctgctttggattttccctaaaggcagacacaatcactacaataatgtgataaattgtgtggcattttgctgaacagcaagagactccccccagttttgaaacagtttgaggcagtttgactgtgttttctttttttttttttcagttattcgattatgttttccaaagaaaatactggtaccaggatttcactgtaaatgccaataacataaacattttgttccatgacctttaaaagtttttgccaaaactttttgcattccaaatcatggttcggttaaggcaaaagataatgtattttcatattttagtagaaattgractttgaattatatctatttcttagtgagatataatgtgtttgactaaatcagttcatttcagacaaccaaaaatgttgagtcccttcaatgtgccagataatgga

SEQ ID NO: 449054 - DNA, 539 bp, Homo sapiens
atcagtgtatctctttaaataatagctcactgaatattttgattccattgttaaggctcactgctcagaaaaattctatgacartattgcttgttttttgttgacaatgcacctaatcacccaagagctttgttggagatgtatacagagattactgttgtctctacctgccaacacagcatccattttgtgtcccacagattgtggagttaattttgattttttttttctactcttgctgttcacaaaatatatttaataaagctatagctgccatagatagtgattcctacaaagaatgtagacaaagtaaatggaaaacctggaagggatttattctaaatgccattagaaacattcatgattcatgggacgagggccaaatattaacattaatgggagttttggaagaaattgatttcaactcttctggatgactttaagggattgaagacttcagtggagaaattaaatgcagatgtggtagatatagcaagagaactagaattagaattggagcttgaatgttatggaattgt

SEQ ID NO: 449055 - DNA, 539 bp, Homo sapiens
atcagtgtatctctttaaataatagctcactgaatattttgattccattgttaaggctcactgctcagaaaaattctatgacaatattgcttgttttttgttgacaatgcacctaatcacccaagagctttgttggagatgtatacagagattactgttgtctctacctgccaacacagcatccattttgtgtcccacagattgtggagttaattttgattttttttttctactcttgctgttcacaaaatatatttaataaagctatagctgccatagatagtgattcctacaaagaatgtagacaaagtaaatggaaaacctggaagggatttattctaaatgccattagaaacattcatgattcatgggaygagggccaaatattaacattaatgggagttttggaagaaattgatttcaactcttctggatgactttaagggattgaagacttcagtggagaaattaaatgcagatgtggtagatatagcaagagaactagaattagaattggagcttgaatgttatggaattgt

SEQ ID NO: 449056 - DNA, 586 bp, Homo sapiens
tcctggtatgacataggaatgagccttactaagaaaggaaagaaagaaaaatatattctctggaccccatactcactatgtcagaaggaaagttaagcttggtaatggagtcatccaaaagctgccttccttttatttccaaacagatatctgtaattttgcatgcttactatatcctatataaaatgtagatttattgagcgcaagacaaatgcacarttttttccctactgctttgttttcacgtgtaagatagtagattcagtgagcactaataagaggctcacaagaatgtaatcacttgcctcattctgtacctgacctgcatttttttatcctcaaatatttgttctttaccctttaaatattgcagttcccaaaatcctctttgaaaaaagttcaggtcaaagatcttactgtgacttgcatttttctttcttgggtgtgtcctcaaccttgccaaaacaaacctctaatagattgatatctgcctgggttactttttggtttacaataagatcaattatttatttgaggcacatgagtgttattgctgactcaaggatgccctgcatctctcctcccc

SEQ ID NO: 449057 - DNA, 587 bp, Homo sapiens
ggttacacaaaggacaggggcatttctatgttgggtcttgttctcttattagtgtagtyatgggtatgtcttaggcttaaaggacaaaggcgtttttatgttgggacaaaggcatatctgtggtgagtcttgttctcttattagtgtagttgttggtatgtcttaggcataaaggacaaatgtgtttttatgttgggcctttgtcttttatccgaatgggccagagatttgtggaagtttccttatctgtgtctgcagcctgatttttcaggccatttctctgtttaaaggagttttaccaagaacccaccctaacttactaacttttttatcttaattctacacattaggaagtgagaagggaagacttaggaggcatagtgtcataatggggactagattgtgcttctcatgaaatacactatttgccatccactcagtttactgaagggaatttaaagtgtcacactggtcacagggaggtagggtgagctttggggttgctttgcaagaattgctctaaaaatgatagaacaatgtgcttaatcttggtagaactataacatgagaagtcaatttacaacagc

SEQ ID NO: 449058 - DNA, 587 bp, Homo sapiens
ggttacacaaaggacaggggcatttctatgttgggtcttgttctcttattagtgtagttatgggtatgtcttaggcttaaaggacaaaggygtttttatgttgggacaaaggcatatctgtggtgagtcttgttctcttattagtgtagttgttggtatgtcttaggcataaaggacaaatgtgtttttatgttgggcctttgtcttttatccgaatgggccagagatttgtggaagtttccttatctgtgtctgcagcctgatttttcaggccatttctctgtttaaaggagttttaccaagaacccaccctaacttactaacttttttatcttaattctacacattaggaagtgagaagggaagacttaggaggcatagtgtcataatggggactagattgtgcttctcatgaaatacactatttgccatccactcagtttactgaagggaatttaaagtgtcacactggtcacagggaggtagggtgagctttggggttgctttgcaagaattgctctaaaaatgatagaacaatgtgcttaatcttggtagaactataacatgagaagtcaatttacaacagc

SEQ ID NO: 449059 - DNA, 587 bp, Homo sapiens
ggttacacaaaggacaggggcatttctatgttgggtcttgttctcttattagtgtagttatgggtatgtcttaggcttaaaggacaaaggcgtttttatgttgggacaaaggcatatctgtggtgagtcttgttctcttattagtgtagttgttggtatgtcttaggcataaaggacaaatgtgtttttatgttgggcctttgtcttttatccgaatgggccagagatttgtggaagtttccttatctgtgtctgcagcctgatttttcaggccatttctctgtttaaaggagttttaccaagaacccaccctaacttactaacttttttatcttaattctacacattaggaagtgagaagggaagacttaggaggcatagtgtcataatggggactagattgtgcttctcatgaaatacactatttgccatccactcagtttactgaagggaatttaaagtgtcacactggtcacagkgaggtagggtgagctttggggttgctttgcaagaattgctctaaaaatgatagaacaatgtgcttaatcttggtagaactataacatgagaagtcaatttacaacagc

SEQ ID NO: 449060 - DNA, 587 bp, Homo sapiens
ggttacacaaaggacaggggcatttctatgttgggtcttgttctcttattagtgtagttatgggtatgtcttaggcttaaaggacaaaggcgtttttatgttgggacaaaggcatatctgtggtgagtcttgttctcttattagtgtagttgttggtatgtcttaggcataaaggacaaatgtgtttttatgttgggcctttgtcttttatccgaatgggccagagatttgtggaagtttccttatctgtgtctgcagcctgatttttcaggccatttctctgtttaaaggagttttaccaagaacccaccctaacttactaacttttttatcttaattctacacattaggaagtgagaagggaagacttaggaggcatagtgtcataatggggactagattgtgcttctcatgaaatacactatttgccatccactcagtttactgaagggaatttaaagtgtcacactggtcacagggaggtagggtgagctttggggttgctttgcaagaattgctctaaaaatgayagaacaatgtgcttaatcttggtagaactataacatgagaagtcaatttacaacagc

SEQ ID NO: 449061 - DNA, 584 bp, Homo sapiens
ctatgactgtgagttggttttttgctatcctaatctcaacagttttccatcattttttcttaataggataatcacattctcccagtattgtgacttaaatgtgtcttttatgtttaatttagtgtataagtcttgcagaggatactgattgacccagtgcaggtaatattccaattcatgaacaaatcacagcagccttggaaatagaagattcaaaytgaccagtacagatcacgttttctttagtgaaggaagagtggtgtgctgaaattgccagttccacaaaagagaataaatgatttcttaaggaaatgtaccttgggcggtaaataacataggtctactgtaattgtgaagtgaaggtgaaaggtgaattggtagctagaggggaatataaggctgaaggaaagcacataaaataaaatgttgtgtatgagatttgtgaattacccaaagctaagatgaactataaatatagttgatgaaaagattggattcaaaatgatctcaataggcagaaacaagaagaataaaacaagatgtgatttcacaggagcaaatacaaattcttacactttggttcg

SEQ ID NO: 449062 - DNA, 434 bp, Homo sapiens
aaagcattttacaaggtcccccatgataagcattaccgtmtgattaaacacatgattttgaaaaaagatagttcattcataaacagtgtttgatgtagataaaattaggatggaaactatcaacagattaatggtacgttgtaccagcaaatcatgtgttctgcaaattgtaggtttcatttttcttctgcctctcattacacacatacttaaaatatctcagtttctttcctaaaggaaaacatgagttatctagaaataaaaatttcttcaaatttcctttccttcttttttaaatacatatattatgggtctcttcttttgagtcagtggtacatggggtcttctattaaactttcctctttccttttctttctcctctcctctcattgtctctcctctcttttctctttctttacaatgttatgattttt

SEQ ID NO: 449063 - DNA, 591 bp, Homo sapiens
agtgatattgatgcttctgaccctgtgcagacctcaactaatgtgtgcgtttctgtcttaggttttaacaaaaaagtttatttttttttcaaattttaaaatagaaaaaagcttatagagtaaggatataaagagaatatttttgtacagctgcacaatatgtttgtgttttaagctgtgttataacaaaagagtcaaagagttgaaaaaagttaaagatcataaaaaaaagttacagtaacctaaggttaacttattagtaaaaaaaaaaatgtttttttcattcagtgtagcctaagagtacagtgtttataaagtctacagtagtatatagtaatgtcctaggccttcacattcactcatcactcacgcaccaactcaccaagagcagcttccagttctctaagctcyattcacggtaagctccctatacagataaaccatttttaagtctttttatacagtatttttactgtacctttttatgtttaaatgtctagatgcataaatacttggcattgtgttacaattgcctacagtattcagtacagtaacatgttgtacaggtttatagcctaggagcaataggat

SEQ ID NO: 449064 - DNA, 604 bp, Homo sapiens
ttgtaattttgtggtatttagcactcaactctaggtatataaatcccaaaagagtgaagtttagatagaatgggtttacattcattcattaaaaaaatagacattgagttcttactatgttatacataattttcttgaattcattgaagtagcaaaaaagcaatgtaccatgcatcctatgcagagaaaaaggggatatgaaaaagaaaggaaacagtatcagacttttgatcaacctcttagatayctgcattttaaccatgccagattcacgcaggctttgcagcatcacctactaggacaagagagtcataatatctgagcctggaaacagtataccaggtgaataacactcttaacctctacctgttgcctgggttcttcccattggcttctagacatactcaaatctttaccattgaaaacagatacaccttgttatagccacttttcccctcattctcctccagctactttgctagctttctattctgcctcttagctcaaattgtaggaagttttctaaaatgctgtctccatgtttttcaacatactctcattacgatattatctatgtactggtaagagtgtaagtctggttgct

SEQ ID NO: 449065 - DNA, 619 bp, Homo sapiens
tgaacattcaggaatgaagccctcaaaatacattatttaactggcctgccagaagaacatctacctctgtcacaatgggaatggagggggcattgggagactgctccttagacagtcagactcaggtacataccgctgcagcagtgacccagggaccaaggaactgccaccagtgtacttacctcttaacaaccccaaagctagtgaatggagcatggccctgggaaaacattccacacatccatggccagtttgccagcagcaacagcagaagcaacctacttcttccctctcttgggaatgtatttaattggcagattaatttgcatccatgactctggctatcagatagactgtgaaaagtattcagttttccaggctgttgcagttcagataggcaattagaggaggctgcaatggctgatggttgccacttcaattcaaccactacaaggtggtcctgagctcctaggagtgagcmtcctggagtcacactttatgtggaagaaaggcactgtcctctgcccaagactgtattgtggtcaccagcaattatcacacaagaagccaactctctgggccaggcagctgtaggaagagaagccccatagtaaggatg

SEQ ID NO: 449066 - DNA, 468 bp, Homo sapiens
ggtgggattacacgcacctgccactacgccccgctaatttttgtatttttagtagagatggggtttcgccattttggtcaggttgggcttaaactcctcacctcagggagtctccccgccttggcctctgaaagtgctggattacaggcatgggccaccacacccggcctgaattaaatatttttaatttgaattttagatgcttgactcaagttaaggttattataaattgacacagactaaattttagtgtgattattcttcacttcctcttccttcttaactcctgaaataacttataagccatattgaggaacaaccaacrcaattaacttataaaaactgcatattaaattaaataaataacatgatattattttttctctgggtacttgctttgatgcagttacttccctcttaatttggtatcacagattattcttttttttgtttttttgtaactcatcc

SEQ ID NO: 449067 - DNA, 468 bp, Homo sapiens
ggtgggattacacgcacctgccactacgccccgctaatttttgtatttttagtagagatggggtttcgccattttggtcaggttgggcttaaactcctcacctcagggagtctccccgccttggcctctgaaagtgctggattacaggcatgggccaccacacccggcctgaattaaatatttttaatttgaattttagatgcttgactcaagttaaggttattataaattgacacagactaaattttagtgtgattattcttcacttcctcttccttcttaactcctgaaataacttataagccatattgaggaacaaccaacacaattaacttataaaaactgcatattaaattaaataaataacatgawattattttttctctgggtacttgctttgatgcagttacttccctcttaatttggtatcacagattattcttttttttgtttttttgtaactcatcc

SEQ ID NO: 449068 - DNA, 585 bp, Homo sapiens
gaaaggggctcctagggtatgattgatgttctgattcttcacttgtgatgctgtataggcatgtagctattgggactattcttttgtgatttgtatacttttctgtgtatatgatatgtttggataaaaattgtttaaaaataaaggttagcattgagattgtgagttatacttatacaccgcaagtccttacgcatgtgaactgacaggattggtgtgtcatgcaaacgtgttcagttccctagtaaagaggatacgtgtatttccctaagkttaactaattgccatataatatgaagatcatcttagatgctttcagaggccttgctttgctactgggacaaagttaaaactccattatatgctacaagtcctacattatctagtggcccagtcattctggcattctttcccattttgcttcatactctggataaacttggactctttatgccccttgcacactacaacatattgacatctgctgttccacctgtctgcgatgctcttcctcctccatcttagttaattctcactcagcattttgatttccacaaggaaggctttcctgattttctaactagt

SEQ ID NO: 449069 - DNA, 585 bp, Homo sapiens
gaaaggggctcctagggtatgattgatgttctgattcttcacttgtgatgctgtataggcatgtagctattgggactattcttttgtgatttgtatacttttctgtgtatatgatatgtttggataaaaattgtttaaaaataaaggttagcattgagattgtgagttatacttatacaccgcaagtccttacgcatgtgaactgacaggattggtgtgtcatgcaaacgtgttcagttccctagtaaagaggatacgtgtatttccctaaggttaactaattgccatataatatgaagatcatcttagatgctttcrgaggccttgctttgctactgggacaaagttaaaactccattatatgctacaagtcctacattatctagtggcccagtcattctggcattctttcccattttgcttcatactctggataaacttggactctttatgccccttgcacactacaacatattgacatctgctgttccacctgtctgcgatgctcttcctcctccatcttagttaattctcactcagcattttgatttccacaaggaaggctttcctgattttctaactagt

SEQ ID NO: 449070 - DNA, 620 bp, Homo sapiens
agttactttgcctgattcacagcggtgcaaggggctgctgcataaacctttccaggactgagaaaagaggtcagagacaattggtaactaaaagtagaatctataaagagtttggtaatgatctaattctatactgaagatgtgaaaaaatatgtaaacagctaaaccatataaattagggggaaaaaaactatgttttcagaatcaaaagcatttgaatcttgctccttgtaagtggcactataatgagcaagatgacagtttttattttataatgagaagttaggtgtttgtaatttgaaatctatgagataaaaaggatgtttttttattagaaaaccttactgaataagtttcaattatgtgtaagaaaaaaatatgaaaatattcttctcatttcttctccacaggatattttattgagtcatgatctgkaataacaagttaatagtaagttaataacagttttacgtgagctaattgggaatctttcttatttaaaataatattggtaaaatagaaattggttatagaatctactaacacagaataacatagaaatagtcaaacataaagaaattgtgacatgataagcacatacacagagtaatatgtggaca

SEQ ID NO: 449071 - DNA, 594 bp, Homo sapiens
aacaggtcgtttgtatgaaattatttaaagatgtaaaatattatacatatatttatatgcacaagataagacagaggaagacgtagggagggagagaaagagaggaatgttttgattaaataacagactgctgagtcacgtttcctgagtttaaatcccacttctgttactggstgtgtgaccttgggcacagttttttgatctctttaattctcagtttttggtgaaatgtgaacaagaatagtcttcttcatggtattattgtaaatatgaaataagatgtatgtaaagtactggacacacaactcatatgcacggaattttaaggtttttttttttttttttttgagacagggtcttcctctgttgtccaggctggagtgcagtggtgcaatcatagctccctgcagcctcgaactcctgggctcaagtcatcctcctgcctcagcctcctgagtacctggaactacaagtgtgcatcaccatgcctggctaatttaaaaatttttaagagacagagtctcctttgggagggcgaggcgggtggatcatttgaggtcaggagttcgagaccagcctgaccaatatggtgaa

SEQ ID NO: 449072 - DNA, 621 bp, Homo sapiens
agctcattgagaacgggccatgatgacgatggcggttttgtcgaatagaaaagggggaaatgtggggaaaagagagatcagattgttactgkgtctgtgtggaaagaagtagacatgggagactccattttgttctgtactaagaaaattcttctgccttgggatgctgttaatctataaccttacccccaaccccgtgctctctgaaacatgtgctgtgtccactcagggttaaatggattaagggcggtgcaagatgtgctttgttaaacagatgcttgaaggcagcatgctcgtcaagagtcatcaccactccctaatctcaagtacccagggacgcaaacactgcggaaggccgcagggtcctctgcctaggaaaaccagagacccttgttcacatgtttatctgctgaccttccctccactattgtcctatgaccctgccaaatccccctctccgagaaacacccaggaatgatcaataaatactatataaaaaaaataaataaataaaaattaaaattaaaaaaaagtttctttgaaatacacatagatttatcaatacttcctttctataaactttcaaaggttcctgcagtcatagacattttgaaaaatgag

SEQ ID NO: 449073 - DNA, 588 bp, Homo sapiens
acatcccttgccgtctcattctaattggttagaactcagtcatatgaccacacttaacggcaaaaacggatggaaaacggtttaactgcgtgcttagaaggagagcagaggttttcctaatcagctagcactctcttccacaacctacttattagttcagcaaaattatggttattctttcaagcccagcttacatgtcactcctaggattataaattcgaatgtccccatgatatactattttacgttctttgctttttctagtgcatattacggtatgattagttatggcataaaaatcattttttcctcatcaatttctgggacagttcctggtaggtggtgggtatatatttgtgagaaaaaacaatgagtagtatttaattatatatttaatatyatctcatgaaaatgcctcaaggacacactgaattttattgtcgttgttgttgctcttctagactctggtctacgcacctgcactaatacaaaagtgagccagaattatttgcaatttctggcaggactctagcatcatctgaggcctaggagaaaaaggatgaagttccttttagagacctgctttcc

SEQ ID NO: 449074 - DNA, 588 bp, Homo sapiens
acatcccttgccgtctcattctaattggttagaactcagtcatatgaccacacttaacggcaaaaacggatggaaaacggtttaactgcgtgcttagaaggagagcagaggttttcctaatcagctagcactctcttccacaacctacttattagttcagcaaaattatggttattctttcaagcccagcttacatgtcactcctaggattataaattcgaatgtccccatgatatactattttacgttctttgctttttctagtgcatattacggtatgattagttatggcataaaaatcattttttcctcatcaatttctgggacagttcctggtaggtggtgggtatatatttgtgagaaaaaacaatgagtagtatttaattatatatttaatatcatctcatgaaaatgcctcaaggacacactgaattttattgtcgttgttgttgctcttctagactctggtctacgcacctgcactaatacaaaagtgagccagaattatttgcaatttctggcagkactctagcatcatctgaggcctaggagaaaaaggatgaagttccttttagagacctgctttcc

SEQ ID NO: 449075 - DNA, 415 bp, Homo sapiens
atggaaatgttaataccttgtatttgtagagtgcattggagcttgtgagtcaccttcayacacaagaactcatctattaggctcctcatctgtgaaggttcccaggtgggtattattctcatgcatgagacaatggaggttcagcaaggtaaagtgactcagctagtaggtaggagaactgggtttaaaatctaggtgtttaggttggtcacggtggctcacacttgtaatcccagcactttgagaggctgtggcaggaggatcacttgagttcagaagttcaagaccagccccacccacataatgagaccaccatctctactaaagatttttaaaatacatattttgccaggtgtggtggtgtatacctgtagtcccagccacttgggaggtcaaggggggaggatcgcttgaa

SEQ ID NO: 449076 - DNA, 415 bp, Homo sapiens
atggaaatgttaataccttgtatttgtagagtgcattggagcttgtgagtcaccttcacacacaagaactcatctattaggctcctcatctgtgaaggttcccaggtgggtattattctcatgcatgagacaatggaggttcagcaaggtaaagtgactcagctagtaggtaggagaactgggtttaaaatctaggtgtttaggttggtcacggtggctcacacttgtaatcccagcactttgagaggctgyggcaggaggatcacttgagttcagaagttcaagaccagccccacccacataatgagaccaccatctctactaaagatttttaaaatacatattttgccaggtgtggtggtgtatacctgtagtcccagccacttgggaggtcaaggggggaggatcgcttgaa

SEQ ID NO: 449077 - DNA, 607 bp, Homo sapiens
tggtgctatgtgactttcagttacatggaagtgggcaaagtgcagcctgatgaatgcttaattgtaaccttatttctgtccagaacctgccatggaattcttgttaaccctgtgatgatggtttcatgcccagtatattcttctcagaaaagtgtttctacctcctcttagacagagtgaataagagacggtgagaggccagatgttatattaatgtcttgatggtcatccttttcatggaggaagcaccagaagttccccttgtggagttctaattagagaaaaggagttgggctggtgggaccaaaggaatgcaaaaagaagcagataagctacaaatctgcccttcttcatgatccaagacacataaccstcctgcacaagtaacttacaatcttcctgcactcagctatcaccagaccctcagctgatagaaaaatgcaagttagctcgctgcaaccttggcaatatcagtactgcataaagccctcttcagcacaagcacaaacactattgtttaaaatccccagcaagcctttgtctcctgacagtcagctcctttttgctggcctgcctgttgctcccctgcaacgtatttttctacttc

SEQ ID NO: 449078 - DNA, 607 bp, Homo sapiens
tggtgctatgtgactttcagttacatggaagtgggcaaagtgcagcctgatgaatgcttaattgtaaccttatttctgtccagaacctgccatggaattcttgttaaccctgtgatgatggtttcatgcccagtatattcttctcagaaaagtgtttctacctcctcttagacagagtgaataagagacggtgagaggccagatgttatattaatgtcttgatggtcatccttttcatggaggaagcaccagaagttccccttgtggagttctaattagagaaaaggagttgggctggtgggaccaaaggaatgcaaaaagaagcagataagctacaaatctgcccttcttcatgatccaagacacataaccctcctgcacaagtaacttacaatcttcctgcactcagctatcaccagaccctcagctgatagaaaaatgcaagttagctcgctgcaaccttggcawtatcagtactgcataaagccctcttcagcacaagcacaaacactattgtttaaaatccccagcaagcctttgtctcctgacagtcagctcctttttgctggcctgcctgttgctcccctgcaacgtatttttctacttc

SEQ ID NO: 449079 - DNA, 607 bp, Homo sapiens
tggtgctatgtgactttcagttacatggaagtgggcaaagtgcagcctgatgaatgcttaattgtaaccttatttctgtccagaacctgccatggaattcttgttaaccctgtgatgatggtttcatgcccagtatattcttctcagaaaagtgtttctacctcctcttagacagagtgaataagagacggtgagaggccagatgttatattaatgtcttgatggtcatccttttcatggaggaagcaccagaagttccccttgtggagttctaattagagaaaaggagttgggctggtgggaccaaaggaatgcaaaaagaagcagataagctacaaatctgcccttcttcatgatccaagacacataaccctcctgcacaagtaacttacaatcttcctgcactcagctatcaccagaccctcagctgatagaaaaatgcaagttagctcgctgcaaccttggcaatatcagtactgcataaagccctcttcagcacaagcacaaacaytattgtttaaaatccccagcaagcctttgtctcctgacagtcagctcctttttgctggcctgcctgttgctcccctgcaacgtatttttctacttc

SEQ ID NO: 449080 - DNA, 607 bp, Homo sapiens
tggtgctatgtgactttcagttacatggaagtgggcaaagtgcagcctgatgaatgcttaattgtaaccttatttctgtccagaacctgccatggaattcttgttaaccctgtgatgatggtttcatgcccagtatattcttctcagaaaagtgtttctacctcctcttagacagagtgaataagagacggtgagaggccagatgttatattaatgtcttgatggtcatccttttcatggaggaagcaccagaagttccccttgtggagttctaattagagaaaaggagttgggctggtgggaccaaaggaatgcaaaaagaagcagataagctacaaatctgcccttcttcatgatccaagacacataaccctcctgcacaagtaacttacaatcttcctgcactcagctatcaccagaccctcagctgatagaaaaatgcaagttagctcgctgcaaccttggcaatatcagtactgcataaagccctcttcagcacaagcacaaacactattgtttaaaatccccagcaagcctttgtctcctgacagtcagctcctttttgctggsctgcctgttgctcccctgcaacgtatttttctacttc

SEQ ID NO: 449081 - DNA, 561 bp, Homo sapiens
tctctacaatgaaaactaaaaataaatctactcaacatatcaatctgtaattcaaatgatcccacccaaatggaaagcccctattcttcaacagacttcaatcatcaagaaaccaaaacattaatttgtagtaatcagattcattgaaattatccccttgtgctatttccatggcctggaaaagacccagtcagaaccttcacctggtagcgagtttgcagtaactacagcaagttcaactcaatgcttcttcaaataagaaaaacgtgtagtaaaatagacagctcgaagctatactctatttttctccctttcttttttttttttgagatggagtctggctctggcaccgaggctggagtgcagtggcatgatctcggctcactgcaacctctgcctcctgggttcaagtgattcccttgcctcagcttcccaggtagctgggattacaggcgcccaccamcatgtccggctaatttttgtaattttggtagagacgaggtttcaccatattgcccaggctggtcatgaactcctgacctcaggtgatccacccgcctc

SEQ ID NO: 449082 - DNA, 561 bp, Homo sapiens
tctctacaatgaaaactaaaaataaatctactcaacatatcaatctgtaattcaaatgatcccacccaaatggaaagcccctattcttcaacagacttcaatcatcaagaaaccaaaacattaatttgtagtaatcagattcattgaaattatccccttgtgctatttccatggcctggaaaagacccagtcagaaccttcacctggtagcgagtttgcagtaactacagcaagttcaactcaatgcttcttcaaataagaaaaacgtgtagtaaaatagacagctcgaagctatactctatttttctccctttcttttttttttttgagatggagtctggctctggcaccgaggctggagtgcagtggcatgatctcggctcactgcaacctctgcctcctgggttcaagtgattcccttgcctcagcttcccaggtagctgggattacaggcgcccaccaccatgtccggctaatttttgtaattttggtagagacgrggtttcaccatattgcccaggctggtcatgaactcctgacctcaggtgatccacccgcctc

SEQ ID NO: 449083 - DNA, 579 bp, Homo sapiens
atcacacatgaaaagatggagggagaatgaaaaaaagactggcctgataggaaaggtttagctcaggagagtcttttttgccacaaagcagaagcataaactttgttgactcattagtgggttttaaaaaaatttttaatttttgtgggtatataggtgtatatatttatggggtacatgagatgttttgatacaggcaagcaatgcataataatcacatcatggagaatggggtatctatcccttaagtatttatcctttgtgttacaaacaatccaattatactcttttagttatttttaaatgtacaattattattggctatagtcaycctgttgtgccgtcaaagagtagatttttttttttttttttttgagacagagtctcactcttgttgcccaggctggagtgcaatggcgtgatttcagcttactgcaaccttcacctcctgggttcaagcgactctcctgtctcagcctcccaagtagctgggattacaggcactctccaccatgcctggctaatttttgtatttttagtagaggcaaggtttcaccatgttggccaggcaggtccaaa

SEQ ID NO: 449084 - DNA, 623 bp, Homo sapiens
acaccctgttctgggggccggtagccactgcatatctccagcactggggcgctccatcctcattatgccaagcccacaccacacggttggctgaatgccatacgtcagctgcacagagcttgggcctaggatcagctgtgactctggtcctgcacagcaagaaaacaaacccctgcttactgcacttccagccagatgaacagtctgccagtcctgcccagggccaacctgccttgagctggccaaactgctctgcaccctcccacaagagagagaggcccctgagcctcctagtagctaatatgcacccaggccagtggagtggctatgctcccatgctcaggaccggagaaacagccccacagcacccctgcctctgcagacatgcccctggcctgcctaatggccctgcatttcccataaagacctgggaaatactcctkcaggctgcccccggtaggcacgaccccaaaccagctaagcagccaagagcccacatccaggacttgagaaacagctctgtgggccaccactagtgaacatgccctgggctggccaggaagccatgtgcctgcataccaggcctaagaaacagccctgtgggccatctccagcagaagtat

SEQ ID NO: 449085 - DNA, 601 bp, Homo sapiens
ctcggcttcttcctgtgaagttctcctagctgaagaaacagaagatagtgagtgttatgtggaactggagaggattcagggacatcctataagaagctgaaggccttttaatgagaagatactgaaaaccccagagtcagaacactaagtcacatctgtgtataacttaaccgtttacgatgtgttgttctgcaccttgtctcatttgtccttcaccatcacactgggagtgaggaaggatcatcacatgcccattttatggagaacaagactgagagttgaagagacttccacaggtttgtaaaactagtaaatgacagagttgaggacttctgccctaattcctcattctttattctcaggaggataagatagagaattttttaatgtgcctaggctctgattttccacccaaggaagtcttccatgagaaattgtccctggggggtactagagtctgcagtggttagagcacctgctgttagcagcaggggtcatagagggtcaggatccgtgggaacctcactcacagcagaagygaattagaggagagactgggactttacctcttgatgttctatctccagacttttgttggact

SEQ ID NO: 449086 - DNA, 585 bp, Homo sapiens
ttaattagccaatgccagagctatacacaagtcagactatactgattgccactttgcctctactgtccattactgtaactatgcccaccttgcctttgatggttgagtgccgccacttggcccctgccacctcaggatccaattattcccattgtatttaaattttgtagttgagtgactgtggttcccactgttagatctgacatacatagaagaacaattacagggctcttcaaagatgcaggtgctgccctcacaaatctatttcacaggcattggtcaagggtaaatcttctggaccctcccagctgggatgagtagatccaaagtgactaatccactccaccatcccaatctccctaagcctttggatcccttcctctacattaaaccaagggagatcaggcatttccagctcgctcacagtgggcratcttttaatccatatttcagctaaccaagcaaataaactattagaaccttttttaactccccaagctgcaacattaaatgcagactctttacttggtgggccgaaatcaatacattcagcctgatccaactctctgttccttccaccattat

SEQ ID NO: 449087 - DNA, 559 bp, Homo sapiens
tccatactattagaagtagagtccttagcattttgggttctaattgtattaagcagccaactccagaaaccccaaaaccaacaaaagaagtctatccttaatattctgytcctctagaaccactcctagtatcaaaatctatactagtcagtgttctctagaaagacagaactaataggacagatagatatataaaggggagtttattaagtattaactcacatgataccaaggtcccacaataggccatctgcaagctgaggagaaaggagagccagtccaagtcccaaaactgaagaacttggagtctgatgttcaagggcaggaagcttccagcataggagaaagatgtaggcttgaaggctaggctggtctagtcttttcacgtttttctgcctgctttatattctagccatgttgacagccaattagatggtgctcactcagattaagggtgggtctgccttcagctcactgacttaaatgttaatctcctttggcagcaccctcacagacacatccaggatcaatactttgcatccttcaatccaatcaagtt

SEQ ID NO: 449088 - DNA, 617 bp, Homo sapiens
tgataaggcctttaaggaggtaattaacgtaaaattggtttgcaagggaaggctctaatctactatgaccaatattcttataagagattaggacatagtatgtatgcaaaaggaaagacgatgtgacgacacagcaagaagacttctgtcttctaaccaaggagagaggcctcagtagcagttactgtactaaaaaatggggcaggactttaacacaagtctgcaagctctgaatgtcttgctcgtaatcattatgttggcaggtgcccctaaaaaacaaaaaggaaaaaatttccaccacctaactgtgtgacaggttacttagccttcttatgcctagttttcttttctataaagtaatgttagttatcaagtttaccgcagaaagttgtggtatgaattaagygacataatgtaagtaaagccctctggaacagagcttggcaagtgtaaactgttcattatatgttaggtattgcttctattaccatatctacatcttttcatattctttagcaaaatcagtcctattcaaaccatataaatgatgggaaaatgtactttcctgtgaaacatttcacaaatatacctcacttggaatgcaggcattactgaaa

SEQ ID NO: 449089 - DNA, 619 bp, Homo sapiens
taggggaacaaactgtcttttggaaaagaatctggtactgcagactgtagatcagcctggggatgtggagtagggtagacaggggaagtggcagatgcagtttgggatcacagtgtgagcagaggggtgattaagaaaaacaaaagaaggtaaaaggtacaaaatgataagagttgctattttgttaagggcatatgtggagagaacatccacagagattattctaaattattccattgggagagaacctgtagaggattggtaaccaacccatctgtctctcagcagaattgatttcattatkgtgaaaaaccattctccataaataggacaaaagctttagccttgagtggatccagcaaaacaaattctttcttgtactttggcaactcgtctggctcttgactggtgttagaggcggcatcactccccctccccctgccctctctcaccttaaataacctgaattttcttttcctgaaggagcttacgcttaatgcttctggcttggtctaagctgactaatgggaatactgtctcctttatattatctttttaatgtatttatagaccattataatgactccctcagccttcttctttccagtctataccatct

SEQ ID NO: 449090 - DNA, 598 bp, Homo sapiens
agctcaggctgtggcttcagagggtgcaagcccaaagccttggcagtttctacatggtattcctgtgggtgcccagaagaattgagatttgggaacctctgcatagatttcagaggatctatagaaattcctggatgtccaggcagaagtttgctgcaggggtggggacctcatggagaacctctgctagggaaatgtggaaggaaaatgccaaaaccatgggaactcacctcttgcatcagcatgacctggatgtgagacatggggtgaaaagagataattttggagatttgactgccttgctggattttggacttgcatgggacctggagccccctttgttttggccaatttctccaatttgaaatggctrtatatacctaatgcctgtaaccccattgtatctaggaagtaactaacttgttttgattttacaggcttataagttgaagggacttgcattgtctcagaagagactttgaactgtggatttttgagttaatgctgaagtgagtcaagactttgggggactgttgggagacatgattggttttcaaatgtgagtacatgagatttaggaggggccacaggaggaata

SEQ ID NO: 449091 - DNA, 523 bp, Homo sapiens
ttcaagtgttagatggatcaggactaggattagtcatcctcagaaagttgtgacatttaaagagcagctattatgccagagtaatcccccccccctgctgccctctagtgagcctgtgtcccatccaagccccatctgcatgcaagtatgccaggtgcccctggctgacattaaaccagcttaaggcactgtgttcagagatttggcccttctttgcaaacagaaaatgyttctccagcacttacaggaaggaaaaattttccacaaagaataatccagttcttgtagagcctctcagttttcatgatagtatatcctctgatgagagcaatctctttttagcataaccaagaatattgaccctccccaataaatgtttcttttaatatagagtggtgttctccatgtactgctctggaggtgtggattttgggtattccagagcttgtgctcagggaaaggaaggaattagtttaggtcttactatttttctcttttggcttctaaaagatgaccagtccct

SEQ ID NO: 449092 - DNA, 582 bp, Homo sapiens
ttccttcctctccaagaaaaacttcatgatccacacttaaccacaaacctggttaagatctggactttatggtctactccaaacaacctatcccagtgtcttttcatctttcctgcctgggaaaatccaacttgctamctttactagacctgtcttctaaaaacaagctgattctttttggataaaatcacacaattaagtgtttggtgccaccattaatttattatctacaactaatggccagtttctaacactgcctgaaaataatccattcattcctccagtgagtactttgtgctaggcagtcttctaagcacttgggacacaccagtgaggaagcaaagctctctgtcttgtggagtttatcttattattttcttagtaaatttctttgcttttctactcaaaattacaatttcactttcctaattttctccaccccactcacccattgaacatatgtgctggaccacatatattacaaaggaatgagaagacaacagatgggaacctttcatcataaaacttaaaaatatcccaaacaccttgaactcccatcaaataactttgctctttccttcc

SEQ ID NO: 449093 - DNA, 582 bp, Homo sapiens
ttccttcctctccaagaaaaacttcatgatccacacttaaccacaaacctggttaagatctggactttatggtctactccaaacaacctatcccagtgtcttttcatctttcctgcctgggaaaatccaacttgctacctttactagacctgtcttctaaaaacaagctgattctttttggataaaatcacacaattaagtgtttggtgccaccattaatttattatctacaactaatggccagtttctaacactgcctgaaaataatccattcattcctccagtgagtactttgtgctaggcagtcttctaagcacttgggacacaccagtgaggaagcaaagctctctgtcttgtggagtttatcttattattttcttagtaaatttctttgcttwtctactcaaaattacaatttcactttcctaattttctccaccccactcacccattgaacatatgtgctggaccacatatattacaaaggaatgagaagacaacagatgggaacctttcatcataaaacttaaaaatatcccaaacaccttgaactcccatcaaataactttgctctttccttcc

SEQ ID NO: 449094 - DNA, 603 bp, Homo sapiens
  misc_feature (1)...(603): n = A,T,C or G
tgaagtttttcttttatcaaagtagagtgttcatttgggtcaagcttgaggattacaacctgggaacacagatgcaagtcgacctaaatatacactccaattagcagcagttacaagtgggtttttaaagtcataaaaggggacaaggagtgggctgatacaaagttgttatcacgaattctcattggtttacagaaatgacattggttagtgattggctatacgttgttaagctatagggggtgggttatattgtcaggtgtggcattatttgattaatgtctagctacatgtggcaataccargcagtttcaagagatgaatacatagctcaaggaggaagtagggccatgattcctgcctcattttaatgtctctctaggcctgataacttaagaggactcacagtcctcagataaaagttcttttctttacaaacacacccacacacccatcctgtgacaaatctatcagtattttcaaatccagaatcaattagttcctccttttatttcaatctcttgtcatttttaccccacattttctaactctacctcaaacacaaccaggcccagccctccacatcatttgtnnnnnnnnnnn

SEQ ID NO: 449095 - DNA, 582 bp, Homo sapiens
taagaggaaagttcatagcattaaatacctacatcaaaaaatctgraagagcacaaatagacaatgtaaggttgcccctcaaggaaccagagaatcaagaacaaaccaaacccaaacacagcagaagaaaaaacataacaaagataagagcagaactaaataaaattgagacaaacaaaataaaaatacaaaaaagaataaaacagaaagctggttctgtggaaagataaatgaagttgatagaccaatagcaagatgaaccaagagatgatccaaataagctcaatttgaaatgcaacaggagacattacaactgataccacagaaatacaaaagattgatgcacacaaatcagtagctcttctatacactgacagcgaccaagtggagaattaaatcaataactcaaccctttttacaatagctggaaaaataatacttaggaatatccctaaccaatgagtcgaaagacctctacaaagaaaactataaaacattgctcaaagaaaccacagatgacacaagcaactgaaaacacatcttatgttcatggatgcatagaatcaatattgtgaaaatgac

SEQ ID NO: 449096 - DNA, 582 bp, Homo sapiens
taagaggaaagttcatagcattaaatacctacatcaaaaaatctgaaagagcacaaatagacaatgtaaggttgcccctcaaggaaccagagaatcaagaacaaaccaaacccaaacacagcagaagaaaaaacataacaaagataagagcagaactaaataaaattgagacaaacaaaataaaaatamaaaaaagaataaaacagaaagctggttctgtggaaagataaatgaagttgatagaccaatagcaagatgaaccaagagatgatccaaataagctcaatttgaaatgcaacaggagacattacaactgataccacagaaatacaaaagattgatgcacacaaatcagtagctcttctatacactgacagcgaccaagtggagaattaaatcaataactcaaccctttttacaatagctggaaaaataatacttaggaatatccctaaccaatgagtcgaaagacctctacaaagaaaactataaaacattgctcaaagaaaccacagatgacacaagcaactgaaaacacatcttatgttcatggatgcatagaatcaatattgtgaaaatgac

SEQ ID NO: 449097 - DNA, 582 bp, Homo sapiens
taagaggaaagttcatagcattaaatacctacatcaaaaaatctgaaagagcacaaatagacaatgtaaggttgcccctcaaggaaccagagaatcaagaacaaaccaaacccaaacacagcagaagaaaaaacataacaaagataagagcagaactaaataaaattgagacaaacaaaataaaaatacaaaaaagaataaaacagaaagctggttctgtggaaagataaatgaagttgatagaccaatagcaagatgaaccaagagatgatccaaataagctcaatttgaaatgcaacaggagacattacaactgataccacagaaatacaaaagattgatgcacacaaatcagtagctcttctatacactgacagcgaccaagtggagaattaaatcaataactcaaccctttttacaatagctggaaaaataatacttaggaatatccctaaccaatgagtcgaaagacctctacaaagaaaactataaaacattgctcaaagaaaccacagatgacacaagcaaytgaaaacacatcttatgttcatggatgcatagaatcaatattgtgaaaatgac

SEQ ID NO: 449098 - DNA, 503 bp, Homo sapiens
gcattatgtgccctggtcatgttaatgcttcattaactaaggtagtgagtggttttatgtcactggaagacaaagcgaaagaatgagccatatgtgtagaagaaatgagtttaactctcagttttcaagtgcactagctttgttaggcttggataagtacttactctctctgaacttacatttcctcatctatctagtggagtaagtaactgcaacctcaaggggttgtggtgcacatagtgaaatggcaaaaatgaaaacaaacactgggcttgacacaccagaagcctaatacagagccatacattttatttttcttccccgaggattcgaagggcaagactctcagaaagtgggagtcaacatrtgtaaattgggaaggagataaaagtgtagtatgaagcaagaaagccaagaaaacatgggctgtggacctgggggatgaagaaaggaaggggaagtattgctttctagtattgcatgctctgagtttctcagattca

SEQ ID NO: 449099 - DNA, 558 bp, Homo sapiens
gccaagtgtgtctgattttaaagcctatatcctctaccatgctgcctctttcagagatttgggagaatggtacagagaggatgaatgaggctttcaaaggagtgggtcctcttaatggctttaggaacagcttacagactttacctactcaatctaagatattatattcctaggaggcaatgacaaattcatggtaygaaattaggtggttgcgatgtttgaatctcagaggacggattagtccttcatgcctaccctactttctagaaatatttgagtacaatgaaattgagacagactggtaaactgaagggcctctcgctggggtcaaactaagctggaatctctttggggactgaagatcgtttcctcccctagagaggtttgctccattgtgcttccaggggatgctgccctggagtgaattgttataaataaggacacatgttactggttttctactacttctattaaactggttattttccatctgtaaagcattatctattgtcccagcttgcataggaacagttcaaatcagaatcatgtcaactgtgg

SEQ ID NO: 449100 - DNA, 624 bp, Homo sapiens
atgtgccatggtaactttgcctagtgcccagctccaaatcacacttaggaggtgctacataaattaataaaatcaacttcatraagtagttccatgtctgttgtctagtaggtaaagggaggcaaagcagaagctcagggcttgacaaaatcctcaaagtcagttcatccaattcctaccttatttcttctaatcatcttactcaatcagtctttcaagctctgcttgcatacttctagttacgggagcttatgagtaggcagctcacttaaaaatgttctctttgtgctgagtgaactctgtttctttgtggtttctacctatgggtagtagctgtattccctggattcacacagaccgtgtcttctcctccatctaccctgttgcaaagcccaagctccagttcattcaatgactccacacagaacctgggctgttgcctcttctctgtacccacactagtttttccatgttatttgaagaatgaggacaaatctgaaaacctactgggcagtaaagaatagagaagaatgtcaacttctctgttctgataaataatagctctattaatactctagtgaaactagtttatttgtttgcttgtttgttttggaagccacttac

SEQ ID NO: 449101 - DNA, 534 bp, Homo sapiens
aagtacaaaactgggccactgtttcggcagacatcgagctaacttgggcagtttttttcataccccagtggtgccttggactccagcaaaataaaactgtccactccccttgaaagggggctgaagcctcggagccaagtggtcttgatcagtgggtcccactcccacggagcccagctagaagcactggcttgaaattctcactgtcagcacagcagtcggaagtcaacctgggatgatcaatcttggtggggggaggggcttccgccattactgaggcttgtgtagactgtttccccctgacagtgctaaggaggctgggaggttttgactgggcagaaatcaccacagtgtggaaaagttcctgtggcyagaatgcctctctagatttctcctcactgggcagggcatttctgaaagaaaggcagcagccccagtcagaggtttatggatataactcccgtctctctgagacagagcacctgggaaaaggggacgctgtgggcacaacttcagcggacttaaacttttctg

SEQ ID NO: 449102 - DNA, 489 bp, Homo sapiens
ttgttttcttcccttactctctcttgaacagagtttctctctctctctctctcctctctcctgagccacctaaagctgagaatagagtgacacaagcacccctgtgaccaccaccactgtgactgtactgagtcaaatccgaagccactatgggggtttcacccaaggcctactataaccacttcctggctactgcttatgttagctctaggccctgggcctctacaatcagccagtagcaaaaccagctaggcttgtgattttttcctccagggcagccaagtccccaggccctgggtgtatctaaaagtgccttatgacactcagggactagagtmgaaaaccttagaagtctacttggtgttctattgtattgaggctgtgctggcactcaaaccacaaggttcagtccttcccatttttcctcccctttccaaaggcagaggagcctcactccatagctaccaccactccaggtgacagggagta

SEQ ID NO: 449103 - DNA, 562 bp, Homo sapiens
tcatatctcagaaaatacatctatgattcagattcttctcctgggatttatacccttatgctactaaatatctccatttggctggatttttatgcacctcaaagtcaatgagtccaaaaaggaactcatcctttccctcaaatcagctccatattctgtgtttgcttgcaataaatgtcatcacatttccactcagttgccaagatagaaacctgacattcatcatggactcctcattcttccatatcccccacataaaatcacactaacatctgatatttctaccctatatttgttggatctgttcattttgcttgtttaaagttttgagctattgcttggtaaagctgccacgaacattcttatacattttggtgaagaaataaatgcatttctgagagtatgtaaatwagagtggaatttctggataataaatagccaactatttggatttagtagatactgacagatttccaaagtaattgtaccaaattacactctttccaacagtatatgggaactccagtgctctacatattgtccaacatttggtatcatcagt

SEQ ID NO: 449104 - DNA, 645 bp, Homo sapiens
tgaggtgggaagcatcgagtataattttcccataagtagaattataggggtgatgatgttactttgctctctccagaatgataccttggagagggttcaaaaatcccatccctcggcagytatggtatctcccagccatgggcatagaggatgggagatgctgcaagttgtgaagaaatcattctacttagtctactgctgacacttgctcttttggtttataatgcacaaaagaggattttctttgttatctccctagagctctctctcattttttagagaatgcgaaagttcaaggaaggtttttaatattttaatactattcgtttaatacattttcaccctttttgcagaaggttcatagaataggacgtatagatggcctcatctgtttgtttttaatttttagataaaaccaggtagatttccaatataatgactgtttaaaaatctccctctccatgtattttatcaactttatataaagacatttgtcttttatattacagatgagacattatagatttccgcaatttttttaatgttacatgggatttagtcatttcaattatgacttaatatttgagtaatgccactactctccagatcttctataattacaattcaatttgtcagaatttactt

SEQ ID NO: 449105 - DNA, 645 bp, Homo sapiens
tgaggtgggaagcatcgagtataattttcccataagtagaattataggggtgatgatgttactttgctctctccagaatgataccttggagagggttcaaaaatcccatccctcggcagttayggtatctcccagccatgggcatagaggatgggagatgctgcaagttgtgaagaaatcattctacttagtctactgctgacacttgctcttttggtttataatgcacaaaagaggattttctttgttatctccctagagctctctctcattttttagagaatgcgaaagttcaaggaaggtttttaatattttaatactattcgtttaatacattttcaccctttttgcagaaggttcatagaataggacgtatagatggcctcatctgtttgtttttaatttttagataaaaccaggtagatttccaatataatgactgtttaaaaatctccctctccatgtattttatcaactttatataaagacatttgtcttttatattacagatgagacattatagatttccgcaatttttttaatgttacatgggatttagtcatttcaattatgacttaatatttgagtaatgccactactctccagatcttctataattacaattcaatttgtcagaatttactt

SEQ ID NO: 449106 - DNA, 645 bp, Homo sapiens
tgaggtgggaagcatcgagtataattttcccataagtagaattataggggtgatgatgttactttgctctctccagaatgataccttggagagggttcaaaaatcccatccctcggcagttatggtatctcccagccatgggcatagaggatgggagatgctgcaagttgtgaagaaatcattctacttagtctactgctgacacttgctcttttggtttataatgcacaaaagaggattttctttgttatctccctagagctctctctcattttttagagaatgcgaaagttcaaggaaggtttttaatattttaatactattygtttaatacattttcaccctttttgcagaaggttcatagaataggacgtatagatggcctcatctgtttgtttttaatttttagataaaaccaggtagatttccaatataatgactgtttaaaaatctccctctccatgtattttatcaactttatataaagacatttgtcttttatattacagatgagacattatagatttccgcaatttttttaatgttacatgggatttagtcatttcaattatgacttaatatttgagtaatgccactactctccagatcttctataattacaattcaatttgtcagaatttactt

SEQ ID NO: 449107 - DNA, 589 bp, Homo sapiens
ttcaattcttttaaatgtactgagtcttttttcatgaccccataaatagtacatcttggacagtgtatcatgtatcatgtgcacttaaaaaaatatgttttgtagtttcttgtcaagttagctgatagtgctgttcagatcatgtaggtctttactgattgttttgtctagttgtcctgttaagcacaaagagataagggtatggtttcatccttttgtaaatggatatccagttttctcagtactatttattgaagagacagtcctttccctaatgtatgttcttggtatctttgtctagtgcagagaattgggagttgaaatctccccctgaggtctggtggaaatcttcatttctccttgcatttctgtcaatttttgctttcaatatttttaggctctgttattaagtaaatacatacatayggtcatgacttcttcctaattcattagccctcatcattattaaatgcttctttttatcttttggtaatattcactgttttgacatttattttacttgatattaatatagatattccagtcttcttatatttattcttgatatatttttcccatgcactttcag

SEQ ID NO: 449108 - DNA, 596 bp, Homo sapiens
tcttagagagcagggtaggtccctcaacagaccattgtaaagttctgagaatatgacttctgtgttcccctgtagacacctggattttgcttagacatgacgtgctagtgtatcaacatgtgcaaatgtcctgtggttgcaactttacatatgctgatttttgcacggttcttcctagtgggtggaactcagtgggtagaattttagcatctagctatatatttttcctttttgttacatgttccctcaaactggagtattttgactctgcattgccagagaatttcatgaatccctgtaggctaaggtttcttagagcaaggtttctcaatctcaacactattgaaatttgcatgggataattgttgtggggagcgtcctgtgccctctagggtggtttggagcatccctctcctccacctattaggtgccagtagaaaacctagcccaattgtgacaactaacaatatctctagatattgccaaatatcctctgggaggggagcaaaattattccatamccccatttaggaccactgccttagagggagggtcttctttcttattcaaggactttgcaaagaatattaacagag

SEQ ID NO: 449109 - DNA, 506 bp, Homo sapiens
atatggaagaagtcacactaaattatcaggtttcatttaaaacccaggtctctacctattgaaaagaattctttatgtctatatttttgactaattaaaaataacaagaaataaaaccgctaatctagaaaagtttctcaaataggaatcaccacccttaagaagtgtatgagrtttttatgaaaatccattagaagcagatccatttccactagctccaccttcagtcttaagatcatctagatctgcttattattattattattattattattattattattactatttggtagtaacatggtaaatgcagagccagcaaaagatggtgggaaaaggctgagacttaccaaaccacagactttgagatacaattgagctttcatttcttctcagtctgtgcctgaggggaataaaggtcagaatgaccctcatagaaaattccagctcccattctgcctcagaaaaggggaaggtaccattgttggagctggaaatggggggtt

SEQ ID NO: 449110 - DNA, 403 bp, Homo sapiens
ggcaggaaaggatgaaaagctaaataagtatgtgttagtcaatagtttaccaccgtggaaaactgggcctcacttccactggaggaaatctttaactaaaacaccctccaccatccttgcctttgtacacatacatgaggttgtttttcttcaatacatagttcaattttaggaaattrattttctatgccaaaagcatatttgcagattgattagtttattttcctctaaagcatttctgaaactctttcttctttctaataatagttgtttaacctgaatgcattttcattagtgcagtccacctctaagaattgtcacacagtgagacagggaagcttggatattttaaaatatattttgactttccttgattgatgattgtctatgaaagtattaaatt

SEQ ID NO: 449111 - DNA, 566 bp, Homo sapiens
gctgtattctgtaactcaccttctattttatcacaacgatttttttaaacacatgcctctttctatcctgtggccccacagatgtcagggcccactctgtgtrtgtgtatgtgtgtacacaggcatgcatattttcatctcagaatctcaggcaccaagaaataaatgatggagaacttgttaagtctctcatatattactttctttataaaatattagtaacagtttttacctgcctcacaggagtgtcttaagaattgattcacatttacaaagcactcagaaatccttggatttgagatgctgtagaagtgagtgcattattattattatcaacctgaggcagataaattgtaaggagaaagcagaggattgggcttgcttgatatttacaataatataggtctctttgctgggaatgctatctccccagaaatgtatattatgaattacattccctttccctggaaaacagttcttaaaatcaggccagtaactctgtgctggttacattttgcttcatctttggatttatctacctcagggcaacatattatacagcctgc

SEQ ID NO: 449112 - DNA, 586 bp, Homo sapiens
ataaaatagcaactgattaataaacatgggcaggagaagtgtatatttttcagactcaatggaatttttactgcttaacaattccacagccaatttgtaaagctgtctgggagtgttcagtctgtgtgaggcaracacaagaaaggggagggagacaattaggaggtaaaagatgcttcagacaaggaatgggctgcaagtgacaactgaatgaacccccctctctcacttctggcagctcttattcttttcccaacaagctcctacttgctgctttgtcttatgaatgcaaaactaaagtgcttgggtgaataaacaagaactctttatcaaggagagacagtgcccagtttctctgggcttggtgtctgttcctgtgtgaggcccattgattggaagctggtgagagatgcgagggcacattgcctccttgatgacaaagcaaccaagtctgggatcgcagactgaactcatcagaaattgtccatctacttctggcgtcatgatgtgaacctaagaaatatatttctgaagcaggggcctgcctagataaggccaaaaaaccacctcaggctttcttgattga

SEQ ID NO: 449113 - DNA, 628 bp, Homo sapiens
atgatggtactggtaaaggaccttacactttactgaaagagatcrttgtaaatgcagtccttaagtgatcaaaatgtattaaaaggcttatagcatgtggaataaagttatgttaactaattaaataatttcaggtgcaattaacttgttctttcataaaattgttagaaaatattttctcaagtgtttggttctttattcaggaatgattgtatttcaaaaattaaatggtggagatgataaattaatagtggcattagatgtatattaagttatctctattatccgcacacacaggcatgttagcacggactcatcattcaattaattgctttttgctacagtgagctttcagtcttgggaaggcaacgatcacacacacagaaaaccagatgagcttttcggccacgttttagaaataagaaatcagattttcactgctgatgcatactgggtctctctctgtatgaccagcagatttttgtactaaatcctttcaactattgccatgtgttctgaaggaacatagtagtgaggccaaaatgggaaattctccgtcgactggaagagtatttaattccttgtttgtttgtttctattagattaaaaacccattagggtgaaggag

SEQ ID NO: 449114 - DNA, 610 bp, Homo sapiens
gcaaatctatagcacacttaagctctctggtttccctttaatatatatctggctagtcttaattgtttgctgtaatgagttgagtgattatttttgtccatggaaatctggcactgtatgtcatatttttttgccatgcattaataatcgggcatttgaagctaatgtctgctttagatcaagcttacaaggtagtcatcatgatggcaaatagaatatttggatgaaatgaccagatttccaacatgccaaagcaaggatcatggccaatacttttttcctcacctgtctttgtgtttcatgaccacatgctcatttaggatcatgtttccagaaagtaagagcaggtgttccagccaccactccactgcatacctctcctctcccatcaaatgtctttccctatgtcctggacctctggcggtggtttgtggtggcataccagactgtctcataatggcacatactatytccccacaactctcccaaaggtgagtaactagacttcttacaacagcttggaatatttctgatatagccaagatctacataagttacggagagaccaatttcacaactgtcctacaaatcaggaatgttagctcttcca

SEQ ID NO: 449115 - DNA, 565 bp, Homo sapiens
actattatggggaggttctgcaggtgatgggaggagacaagacatggagcccaggtgacaaattttgcacaaagctcaggggcacagcctggtgaagtaagggactccttataatataacttgggaatgaaagggccttttctaaccacaacaaatraaccattatttactctacctctgagtaagccttactgattatctgtttaatgagagaccattgtgtactttgcccaagaaaagtaagtaggtttggagttacttaatactaagaagaaaacaagaggaacaggcaaatacatagggtctatatttacaccataaaaaaaaggtataatggaatccaaaacccctagtcataattttcttctgttcactggtgtaagagtcttggccagtactcttcaaagtgtccattcttaatagtgggttctaaatattctaagatataatgggttgtaagcttgattttccaaagttagcctataaatatgtttagtcttcttgttccttttataatcattttggactcaccttagactctttaggataaaattgctgcttccta

SEQ ID NO: 449116 - DNA, 501 bp, Homo sapiens
tgtccaatctgcggcccgtgggctgcaatgtggcccagggcagctctcaatactgcccaacacaaattcacaaactttcttaaaacattatatctttttgtgaatttttttttagtgtattttatgtgtggcccaagacaattcttccaatggggtctagggaagccaaaagattagacacccctggtctagtatttgtctgtttaaactgtttcacaaaagccagcaggagacactagctgtattatgaacatcacgtgaatgtttcttatctgaccatactgctcagatatgttgatttcctcccccatatatagtataagcttgctcctaggacagaataggaaaatatctaatattatcctttgagttcagaaacctcactgtgcacactgatatgytagttttacatcttaatgtagtgaaaatctaaccttcccacctatgataaatacacgtaacttgacctgtaactagatacttttcaaataacactgactg

SEQ ID NO: 449117 - DNA, 594 bp, Homo sapiens
aaatatgtgaatgttcatggagcaacaacagagtggaagagagtgcatacacacaccaataacacacacatgtgattagttttagtttcctctttttcacttaactacttggaaagaarggaagatttttcactgtattacatatgttaccttttgatccgttaaaaattactcttcactatttgcttaaatatagctgcaaataccaatttataatggcatttaaaattacatgagaaatatggatggtgatattttattttttaggaaaaaaaaatctaaaataatggaaatatatatctgcactgattataactactttgctgtgtctagcttccttcacacctgtggtgatcaatgccatgcaatgaatatttagggcatatattaattcatttgttcaacaaacagaaattaaatgtttttaaggtgtctgccacttatctaggcactgaggtttcaaataagtaatttcactttcaagttatagttttgcagcttcttcattaaaaaaattgttttctctctctgttttctaataaaaatggattaatttaacagacctgctccttcagcttactgttatgagaagac

SEQ ID NO: 449118 - DNA, 594 bp, Homo sapiens
aaatatgtgaatgttcatggagcaacaacagagtggaagagagtgcatacacacaccaataacacacacatgtgattagttttagtttcctctttttcacttaactacttggaaagaaaggaagatttttcactgtattacatatgttaccttttgatccgttaaaaattactcttcactatttgcttaaatatagctgcaaataccaatytataatggcatttaaaattacatgagaaatatggatggtgatattttattttttaggaaaaaaaaatctaaaataatggaaatatatatctgcactgattataactactttgctgtgtctagcttccttcacacctgtggtgatcaatgccatgcaatgaatatttagggcatatattaattcatttgttcaacaaacagaaattaaatgtttttaaggtgtctgccacttatctaggcactgaggtttcaaataagtaatttcactttcaagttatagttttgcagcttcttcattaaaaaaattgttttctctctctgttttctaataaaaatggattaatttaacagacctgctccttcagcttactgttatgagaagac

SEQ ID NO: 449119 - DNA, 537 bp, Homo sapiens
gcaccgtttgttgaaaagatcacctcttctccattgtattgcgtttgttcccttttcaaagatcagttgactaaatttatgtgggtctatttctgggctctctcttctcctccgttgatctatttgtctgttcttttgccagtgtcacactgtcttgattactgtagctttatagtccatcttgaagccagatagtgtcagtcttccaactttgttcttctccttcaatattgtgtattctgkgtcttttgcctatctatataaactttagaatcaatttattgatattcacaaaataacttgctgggattttgattaggattgcattgaatttataaatcaagttgggaagaactgaactgacaacatggagtcttcctattcatgagcatgaaatatcttccatttattctttgatttctttcatcagacttgtataatttttagtatagttttttaaatgccatctttacccagttctgaggccctgcataaaagtcagtgaattcctcttcttgatcagccaaattaagtcta

SEQ ID NO: 449120 - DNA, 594 bp, Homo sapiens
aaatatgtgaatgttcatggagcaacaacagagtggaagagagtgcatacacacaccaataacacacacatgtgattagttttagtttcctctttttcacttaactacttggaaagaaaggaagatttttcactgtattacatatgttaccttttgatccgttaaaaattactcttcactatttgcttaaatatagctgcaaataccaatttataatggcatttaaaattacatgagaaatatggatggtgatattttattttttaggaaaaaaaaatctaaaataatggaaatatatatctgcactgattataactactttgctgtgtctagcwtccttcacacctgtggtgatcaatgccatgcaatgaatatttagggcatatattaattcatttgttcaacaaacagaaattaaatgtttttaaggtgtctgccacttatctaggcactgaggtttcaaataagtaatttcactttcaagttatagttttgcagcttcttcattaaaaaaattgttttctctctctgttttctaataaaaatggattaatttaacagacctgctccttcagcttactgttatgagaagac

SEQ ID NO: 449121 - DNA, 610 bp, Homo sapiens
gtagcccaacaggcagaaagacagacacaaaggaacagacacacacacacacacacacacacacacacacacatgcacacacacacacagagagagagagagagagagagcaaactaaacctattggagaacaaacttgtatatatygtttacctgtgttaatttggtggattattccattaaatctcagaaactctgagatatcttactttctaagtggatgaaaagaaatgaaaagttatattcctttatgaacactgagaggaagtagcctgggccctctggctggtcttggatttgtctgatctgcacctttatgttcaaatggctgctttccatttttgcagtgaaagaacattttactatgcaacagctttgcaccaggcagtgaaacatatgggcctatgcctgaatccttagtctgtcgtcagtatcccagtacctaccagttattatgaccttcaaatatagttccaacactgctgtccccctcagagatgtctctgctgattcatgttgcaatactctgtcattgggagtcatgctctggactaaccatgtcacacagaagcctttacccacaaagaagtcttagaacagacaaccagaa

SEQ ID NO: 449122 - DNA, 470 bp, Homo sapiens
aagatctctacaataaaaactataaaacattgatgcaagaaattaaagagaacacaaaaaaagaaaagatattccatgttcatgagttggaagattcaatattgttaaaataaccatactacccaaaccagtctacagattcaacgcaattcctatcacaataccaacgacgttcttcacagaaataggaaaaccaatcctataatgtatacagaacaacaaaagacccagaatagccaaagccatcctgagcaaaaagaacaaaactggaggaatcacattacctgacttcaaattatactaaagagctgtagtcaccaaaacagcatgatactggcataaaaacagacacaaagaccaatggaatagaatagagaacccagaaacaaatccatayatctacaatgaattcatttttggcaaagttgtcaagaacatacattggggaaaagataatttcttcaacaaat

SEQ ID NO: 449123 - DNA, 529 bp, Homo sapiens
gcacaggcaaccaaagcaaacatggataaacgggatcacatcaagttaaaagcttctgcaaagcaaaggaaacaatcaacaaagtgaagagacaactcatagaatgggagaaaatatttgcaaactattcatctgataaggaattaataacaagaatatataagtagcccamgcaactctatagaaaaaaaaatctaataatctggttaaaaaatggacaaaattgatttacatagacacttctcaaaagaagacatagaaatggcaaacaggtatatgaaaaggtgctcaacatcgtcaatcatcagaaaaatgcaaatcaaaagtacaatgagatgttatctcatcccagttaaaatgacttttatccaaaagacaggcaatagcaaatgctgttgaggatgtggagaaaaaggaaaccttgtacactgttggtgagaatgtaaatttgtacaattactatagagaatagtttggaggttcctcaagaaaataaaaataaagctaccatatgatccattattccact

SEQ ID NO: 449124 - DNA, 529 bp, Homo sapiens
gcacaggcaaccaaagcaaacatggataaacgggatcacatcaagttaaaagcttctgcaaagcaaaggaaacaatcaacaaagtgaagagacaactcatagaatgggagaaaatatttgcaaactattcatctgataaggaattaataacaagaatatataagtagcccacgcaactctatagaaaaaaaaatctaataatctggttaaaaaatggacaaaattgatttacatagacacttctcaaaagaagacatagaaatggcaaacaggtatatgaaaaggtgctcaacatcgtcaatcatcagaaaaatgcaaatcaaaagtacaatgagatgtyatctcatcccagttaaaatgacttttatccaaaagacaggcaatagcaaatgctgttgaggatgtggagaaaaaggaaaccttgtacactgttggtgagaatgtaaatttgtacaattactatagagaatagtttggaggttcctcaagaaaataaaaataaagctaccatatgatccattattccact

SEQ ID NO: 449125 - DNA, 389 bp, Homo sapiens
gtccatctagcaaattattgaacctcaatatggtcttgagaaaccatgaacttgcagccaatgttagatgtgagtgactctttgggagtccctcaaatgtgcagttagtgttagaagtgagagtggtcttgagggctcccgaactgtgttgtactcacataagaaataatacattcctccagaaatcaaagttacataaaggtagttcagtcatagagtagaacgggaragaaagtacaataaaatgaccagatctttccctgaagcaactggaatctaagagaaagatctaaagaacaaaaggattgaaaacagaaggaacaaatttaatactttaaacctaaactaaaaagtactgggtaacatgagatgctatgttcaatttgcct

SEQ ID NO: 449126 - DNA, 584 bp, Homo sapiens
aagtctcagtgctgttaccaattctgacttgacatttaaggagcatatcaaccctgtttgttctacagccttttaccttctcatgaatatttcctgagcaacgcctctcacctaacatgcaaacaaagagacattaatatttttatctatcctgtctcagcatttagtgtttactatttcacttacacagatttcaagatgaatccacaaaaagcaacagccagatcttttgttaaaaaatatatatatacacttaggagcagcacttctgtatttcagaacattgccagtggatctccttaaagagtacattttggatcattaagaactccaggaaaagaaaatttataataccattttggggatagagtacaaggasgataaaatttaatgaaccttcattttatgtaaatataacagaatgttggatttatagaactgataacatcatttacttttatataacccaaggtcccaaacttaaggaattaatctgttaaagttgttgctctgttagactaagggccagtaactttgtaaaatatgtactccaagacactaagcctgggtagcagggagcagac

SEQ ID NO: 449127 - DNA, 645 bp, Homo sapiens
atttcatatccaatcccacttccctccccttcagcattcattctcaaatatttaaggtatgtctattcattctacatttcagaccctacttccttawaagtgtttctatgaaaaaatatagcattatattctgtatttttagatgtatatgaattttattttgctactaatttcgtatttctcatcttttatcattgtagcattatgtatttgaaatctatccatgttttcctatgtaaatgggggtgtagtaactacgcagtgtttactaaatgactctactgttcagctggtcaaagatttgtgtgaggcatgagtttaaagaaagctcccacaaagggggaacctggggaaactcactttcttaaaggctgagctaaaaaccagaacatggctattgaaccctcaaggcctgtacatgcagagttagcttctctgtaacagtgttggctcttggctggagacctcggctgggtcccaagcattcccatggttgcttcctctggtttgctcttgaatttggctgctttcctttttctgaactcagctccttatgggatgaaagaggagggtgcctggtctctcagacttcaaagagctaaaacttcttccataaggtcttctgaaaactacgtgaagcccatg

SEQ ID NO: 449128 - DNA, 608 bp, Homo sapiens
cattctcaaatatttaaggtatgtctattcattctacatttcagaccctacttccttataagtgtttctatgaaaaaatatagcattatatwctgtatttttagatgtatatgaattttattttgctactaatttcgtatttctcatcttttatcattgtagcattatgtatttgaaatctatccatgttttcctatgtaaatgggggtgtagtaactacgcagtgtttactaaatgactctactgttcagctggtcaaagatttgtgtgaggcatgagtttaaagaaagctcccacaaagggggaacctggggaaactcactttcttaaaggctgagctaaaaaccagaacatggctattgaaccctcaaggcctgtacatgcagagttagcttctctgtaacagtgttggctcttggctggagacctcggctgggtcccaagcattcccatggttgcttcctctggtttgctcttgaatttggctgctttcctttttctgaactcagctccttatgggatgaaagaggagggtgcctggtctctcagacttcaaagagctaaaacttcttccataaggtcttctgaaaactacgtgaagcccatga

SEQ ID NO: 449129 - DNA, 608 bp, Homo sapiens
cattctcaaatatttaaggtatgtctattcattctacatttcagaccctacttccttataagtgtttctatgaaaaaatatagcattatattctgtatttttagatgtatatgaattttattttgctactaatttcgtatttctcatcttttatcattgtagcrttatgtatttgaaatctatccatgttttcctatgtaaatgggggtgtagtaactacgcagtgtttactaaatgactctactgttcagctggtcaaagatttgtgtgaggcatgagtttaaagaaagctcccacaaagggggaacctggggaaactcactttcttaaaggctgagctaaaaaccagaacatggctattgaaccctcaaggcctgtacatgcagagttagcttctctgtaacagtgttggctcttggctggagacctcggctgggtcccaagcattcccatggttgcttcctctggtttgctcttgaatttggctgctttcctttttctgaactcagctccttatgggatgaaagaggagggtgcctggtctctcagacttcaaagagctaaaacttcttccataaggtcttctgaaaactacgtgaagcccatga

SEQ ID NO: 449130 - DNA, 645 bp, Homo sapiens
atttcatatccaatcccacttccctccccttcagcattcattctcaaatatttaaggtatgtctattcattctacatttcagaccctacttccttataagtgtttctatgaaaaaatatagcattatattctgtatttttagatgtatatgaattttattttgctactaatttcgtatttctcatcttttatcattgtagcattatgtatttgaaatctatccatgttttcctatgtaaatgggggtgtagtaactacgcartgtttactaaatgactctactgttcagctggtcaaagatttgtgtgaggcatgagtttaaagaaagctcccacaaagggggaacctggggaaactcactttcttaaaggctgagctaaaaaccagaacatggctattgaaccctcaaggcctgtacatgcagagttagcttctctgtaacagtgttggctcttggctggagacctcggctgggtcccaagcattcccatggttgcttcctctggtttgctcttgaatttggctgctttcctttttctgaactcagctccttatgggatgaaagaggagggtgcctggtctctcagacttcaaagagctaaaacttcttccataaggtcttctgaaaactacgtgaagcccatg

SEQ ID NO: 449131 - DNA, 613 bp, Homo sapiens
cttgatattgtctgagttgttttttgccaatcgcatagacacaagttggtgttttatctttattttcacttctttatcagtaagaatgaatgtctcttcatgtatttctcagccattcagatttctgttttgtaaattgattatttmttttgccacattatctatagaatgttttatctttctcttgcatattttagaattatttcttatatattttatactaatcttcaacagaaatgttgcaaatgtcttcttgcaaccaagcatccaattctaatttaaataattcatagctgcatactattaaaagaatgacagtggctgggtgcagtggctcacacctgcaatcttagccgaggcaggcaaatcatttgaggtcaggggtttgagaacagcctggccaacgtggtgaaaccctgtctctactaaaaatacaaaaattagccaggtgtggtggcacacacctgtaatctcagctacttgggaggctgaggcaggagaattgcttgaacctgggaggtggaggttgcagtgagctgagatcgagccgtccagcctaggtgacagagttagaccctgtctcaaaaaaataaaaaataaataaaaaataaaa

SEQ ID NO: 449132 - DNA, 613 bp, Homo sapiens
cttgatattgtctgagttgttttttgccaatcgcatagacacaagttggtgttttatctttattttcacttctttatcagtaagaatgaatgtctcttcatgtatttctcagccattcagatttctgttttgtaaattgattatttattttgccacattatctatagaatgttttatctttctcttgcatattttagaattatttcttatatattttatactaatcttcaacagaaatgttgcaaatgtcttcttgcaaccaagcatccaattctaatttaaataattcatagctgcatactattaaaagaatgacagtggctgggtgcagtggctcacacctgcaatcttagccgaggcaggcaaatcatttgaggtcaggggtttgagaacagcctggccaacgtggtgaaaccctgtctctactaaaaatacaaaaattagccaggtgtggtggcacacacctgtaatctcagctacttgggaggctgaggcaggagaattgcttgaaccygggaggtggaggttgcagtgagctgagatcgagccgtccagcctaggtgacagagttagaccctgtctcaaaaaaataaaaaataaataaaaaataaaa

SEQ ID NO: 449133 - DNA, 465 bp, Homo sapiens
tgtgaaatctagaagagaagccctgcaataaatatgatttcatatttattgtttcaaagccagtttcaaagcccctgggtaaggaaggaccaaacagctatatctctgccttaaggcaggtggggtaaccaccataggggcgactagggccttgttagtgagagaatgtcagactgctccccagctatcacagtctctctcttctctctcagtcatcccttcctataaatcacaactcaccagtccagatcttcaagcagagataacctcaamactcaagaaccatctttagataaatgaggtctcaggcaaatgtctgtcaaccaggcagataccccagcaaactattattcccaccagaattaagaatccctgctgagagccaagcacagtaacacatgcctatagtctcagctactcaggatgctgaggcaggaggatcacttgagcccaggagttcagggt

SEQ ID NO: 449134 - DNA, 623 bp, Homo sapiens
ttccatatatggttctgggaactccctgatgcttttttagaaagctcattaataatcctcccctgattcagcatataattagaagtaggtgtaaatatagctagccagcaatccaggagtgctactctgcctgtgggatacccctgctctgtctacggagcagcaattttgctgcaygctatcgctctaataaaatcgctttcttccactgttggctcactcttgaattttttcctgagtgaagccaagaaccctcccaagctgagccctgatatgggggtttgcctgcatcaaaatgtcgtgcaataagttgtaaactgctttgctgctcctagtgtgcaccttggactttcagcattggtaccacctaagagtttgttgaaaaagcagtattttgcactccacccttaccgattcagaacctacattttaccaagatctctaggtggttgagatatacataatataagtagctttgggataaagaatgagcctggactttttagtcccacagagaagatctcagataagttcacgacttttgactttagacaaatttccagacttctttaaatgtcatattcttcttttgtacaaagagtacagtaacatgcattaccaaa

SEQ ID NO: 449135 - DNA, 556 bp, Homo sapiens
tgggttctattagtattaaagtcttcaactctattagtaactttttattattgaatttgttaatgggtacatgaacattcatggtgttttttcaaacgactttgtatttaaaactgcaaataattttttactaaggcttaccaaaaatgcaaataaaatgtatatttatagcttcaaaaatagcaagcaaaacacgaaataaacaaaaatgtggatgattttttaaaactatgcatttcaacaagaaggaaagagagagaaagagagagagagaaagaagaaagaaaagaaaaaagaaaagaaaaagaaagagaaaagaaagaaagaaagaaagaaagaaagaaagaaagraaagaaagaaaaagaaagaaggaaggaaggagagaaacagaaagggaggaaggaaggaaggaaagaaggaagggagaaagggagggaaggaaaagaattagttttgccttttgatgggagaagctaaaaaacactatggccatgttttccttttaccccagtaggtaatgatgtatttattagcatgaaaacatatttatgaatt

SEQ ID NO: 449136 - DNA, 577 bp, Homo sapiens
ccccactcttattgtgctgctgtctatctcatttcttaggtctattagtaattgttttataaatttgggtgctcctgtgttaggtgcatatttattcagtctttaaaaggaaggacattctaacacatgctacaacrtggatgaatgtggagggacattatgccatataaaataagtcaatcacaaaacagacaaatactgtatgatttcacttatacgaagtgcctgtagtagtcaaattcatagagaatttggttgccagcagctggggagaggggataataagaaattttgttcaattggttttacaacatggaaagacttctggagattagttgaacaaatatgtgaatgtacttaacattactgaactgcacacttgaaaatggttaaggtgttcaattctatggtatgtatattttaccacggttttagaaatctctttcaacccacaataagacaaacaactcaatttacaaaaagtaaaagatttgaagagacacttcacaatggaaaacatacaaatggccaaaaatattagctgcattgccagttatcaggaaaatgcaaattcaaa

SEQ ID NO: 449137 - DNA, 574 bp, Homo sapiens
caaaaaaaaacgttgaaaaaagacgatttatttagaatgttagacaaccaacaatttttaggtcaatttatacatcccaatattccagtatgacttctagaaatagttaataataactgtatttttatatgctaatagatggactatgattaagcatgttattgctttggtttgtctcaaataaaaagtaaaatagagtgaggttccaaggctttatctgaagtacccctgcccrtgttggttcagtatcattctcaccaaatcatctttttaacttttttcaaaaaaatattttagtaactgaacaaaaagccttatcctaagagtttctatttttggtctttgatctctcacaacactgtacagatgaggtatatgagaaggtagcaacaaccttatgactgcatttttttaataatttaaagactatttttagagcagttttaggttcgtagcaaaattaagaggaatgtatagagattttacatttacccctgcccatacacagcatagcttccccattaacaacatcctccaccagagccatctttaaattcttacagtagataaacta

SEQ ID NO: 449138 - DNA, 574 bp, Homo sapiens
caaaaaaaaacgttgaaaaaagacgatttatttagaatgttagacaaccaacaatttttaggtcaatttatacatcccaatattccagtatgacttctagaaatagttaataataactgtatttttatatgctaatagatggactatgattaagcatgttattgctttggtttgtctcaaataaaaagtaaaatagagtgaggttccaaggctttatctgaagtacccctgcccgtgttggttcagtatyattctcaccaaatcatctttttaacttttttcaaaaaaatattttagtaactgaacaaaaagccttatcctaagagtttctatttttggtctttgatctctcacaacactgtacagatgaggtatatgagaaggtagcaacaaccttatgactgcatttttttaataatttaaagactatttttagagcagttttaggttcgtagcaaaattaagaggaatgtatagagattttacatttacccctgcccatacacagcatagcttccccattaacaacatcctccaccagagccatctttaaattcttacagtagataaacta

SEQ ID NO: 449139 - DNA, 539 bp, Homo sapiens
gtttctatttttggtctttgatctctcacaacactgtacagatgaggtatatgagaaggtagcaacaaccttatgactgcatttttttaataatttaaagactatttttagagcagttttaggttcrtagcaaaattaagaggaatgtatagagattttacatttacccctgcccatacacagcatagcttccccattaacaacatcctccaccagagccatctttaaattcttacagtagataaactatagtgacacatcattttcacccaaagtctatagcttacattagggtttgttcttgatgtgtacattctataaatttggacaaatgtataatgatgtgtctccatcattaccatctcatagagagtttgtcactaccccaagatccctctgtgcttcacatacctttactcaatttatattccctcaaatgtttttgtttattaatgtttctgaattttcaaaaactagacattagtgaatttatgaagattatttctagaaaaggaaacaaagctgaaaacctagtaaag

SEQ ID NO: 449140 - DNA, 523 bp, Homo sapiens
aacaaccttatgactgcatttttttaataatttaaagactatttttagagcagttttaggttcgtagcaaaattaagaggaatgtatagagattttacatttacccctgcccatacacagcatagcttccccattaacaacatcctccaccagagccatctttaaattcttacagtagataaactatagtgacacatcattttcacccaaagtctatagcttacattagggtttgttcttgatgtgtacattctataaatttggacaaatgtataatgatgtgtctccatcattaccrtctcatagagagtttgtcactaccccaagatccctctgtgcttcacatacctttactcaatttatattccctcaaatgtttttgtttattaatgtttctgaattttcaaaaactagacattagtgaatttatgaagattatttctagaaaaggaaacaaagctgaaaacctagtaaagactccagaccatatttaaaagtttcttggagaaatcgctgattctag

SEQ ID NO: 449141 - DNA, 620 bp, Homo sapiens
tgtgaggtagaccctgggcagagccaaatatatgaaaattgtatacaggcagtccccaatttatgatggtttgacttaaaatattttgacattacaatgatacaaaagcaatatgcattcagtagaagccataccttgacataccttgagtacccatacaactgctctctgtttttcatttccagcatggtattcaataagttacatgaaatattcaacactttattataaaataggctttatgttagacaacgttgtccaactgtgggctaatgttaagtgttctgagcatgttttggggaggctaggctaagctatgatgtttgctaggttaggtgcactaaatgcatttacaacttacaataggtttactggaaaccaaccctattgwaggtcaaggagcatctgcatagtgccaaactgatgaccccaattattgttccagaatataattagtctaaacctgatagtcatatctcagtgcctttctctgaaagggcctgttgtaaccagttattagactcctcccttaagtcatattactggcccatataccatcactcaacaagcaaatctatggtaacagaaggtgaaaaagcaacttcaggttaacatagtga

SEQ ID NO: 449142 - DNA, 270 bp, Homo sapiens
catgcatgttttatccttgctaaacatttgatcttttcttgataacactcagtcctcattctaaacactacagtatcagaragtaaatagctcaataaactaaaagaaccttctccttatgcatttcagtatatggaagaagtcacactaaattatcaggtttcatttaaaacccaggtctctacctattgaaaagaattctttatgtctatatttttgactaattaaaaataacaagaaataaaaccgctaatctagaaaagtttctca

SEQ ID NO: 449143 - DNA, 559 bp, Homo sapiens
ggagttgtcaaactaggaagaagaggggtggagttcattagcaggtgcatattaagataggtgatgttaagtccccactcccgtatgtatagctgtgcacctaaagtaggtctatctttctggaaaggcaatgggaaatcaggcaccagctttcccatgatttctcataacacagagttctaggcagtcagaactcatagaaataaccatgaaaaagataaatgaaattatattaatcttcagaagacagtgtgatgggccttccccatttcatgggctttactctatttgggmatttactgctgggtgtttgctttctattatattcttccatggaatcatgtcattttctatttcctctgtaagatctatgagaaaacagcctcctagatgagcatgctattaatgtattagggagaaaatggcatccaaaagactatgaaataccagggccaaattacactggctctttgtgaagcaggcatacctcatccatttcatctctagctagttatttctgtagctgcctcttaaaaatcatttaaatcaaaccacactt

SEQ ID NO: 449144 - DNA, 559 bp, Homo sapiens
ggagttgtcaaactaggaagaagaggggtggagttcattagcaggtgcatattaagataggtgatgttaagtccccactcccgtatgtatagctgtgcacctaaagtaggtctatctttctggaaaggcaatgggaaatcaggcaccagctttcccatgatttctcataacacagagttctaggcagtcagaactcatagaaataaccatgaaaaagataaatgaaattatattaatcttcagaagacagtgtgatgggccttccccatttcatgggctttactctatttgggaatttactkctgggtgtttgctttctattatattcttccatggaatcatgtcattttctatttcctctgtaagatctatgagaaaacagcctcctagatgagcatgctattaatgtattagggagaaaatggcatccaaaagactatgaaataccagggccaaattacactggctctttgtgaagcaggcatacctcatccatttcatctctagctagttatttctgtagctgcctcttaaaaatcatttaaatcaaaccacactt

SEQ ID NO: 449145 - DNA, 622 bp, Homo sapiens
tgagttctggctctggccatgaggaatgagcagccaccttcccaggcctcctatgctgtccagatccttcagcacccatggggttgcctgacccatgcagaaatagcacctctcaaatgtaaaaagggattggttagtacctatggctctctggaaatggaagtcattccttataaggtatttgtctacctttcaacttttggatttttgactgtcaaacacatttttaggacagtaatctgtagtcaagctcattatagggtcttcttagaaaagaaagacattaacaaagaaaactgtaaaatagctgtcatcaygggcaaagtgccctcacatggttccactaaatgcagagatgcttttagatgtgctcagatttctgatgggtacacaaaactgtggtcctgaaacacagggaacaactcttgtcagcaatattctgagatgtcaaatgtcaatttaacatggaaatattataacaagttaataatttaaaagttctattttaatatgattgaatcatataatactaatagtaaattgtcattgatataatcaataagtgtttcctcatctttatatgtatgcgagacagtgttaggactacaacactgaatttact

SEQ ID NO: 449146 - DNA, 599 bp, Homo sapiens
ccactgcactccagcctggcaacagagcaagactccgcctcaaagaaaaaaaaaaaaattgaagtagatttctcaaaactaatcaacaattagcaacaacaatttctttcattagtatattggtttataagctaaaaacatttgtctagactgggtgtggtggctcatacctgtaatctcaacactttgggaggccgmggtgggtggatcacttgaggtcaggagtttgagatcagcctgaccaacatggtgaaaccctgcctctactaaaaatacaaaattagccaggtgtggtggcaggtcaaggtgggcagatcacgaggtcaggagtttgagaccatcctgactaatatagtgaaaccctgtctctactaacaatataaaaattagctgggtgtggtggcggctgcctgtaatcccagctacttgggaagctgaggcaggaaaatcccttgaacacaggagccaggagttgcagtgagctgagatcgtaccattgcactcctgcctgggccacaagagcgaaactccttctcaaaaacaaaaacaaaaacacttgtccattcataatcttatttaatcttcaggatgattccatg

SEQ ID NO: 449147 - DNA, 577 bp, Homo sapiens
ggattttataaaaatgataatttccttgcttggctacagatcagtaaaacagctactttatgcagcacctagtgtatttgtgacaacatttctaaaggcaatttggcaataagagccaaatactttaaaaatgtgcaaatatttcacattgttgttatattttatatcatttatcataatttttaaattgaaacaaatttagggattaacaataatagaatggcaagtaaatcatggaggatctatatgatgaaatattatgcattaagggtgatattatggccaggcatgggggctcactccggtaatcccagcactttgggaggcagaggcaggtggatcacctgaggtcaagagttcaagaccaacctggccaacatagcaaaacctatttctactaaaaaatacaaaagtagctgggcatggtggcatgcacctgtaatcccagctactcaggaggctgaggcaggagaattgcttgaacccaggaggcataagttgyagggagctgagatcatgccactgcactccagcctgggcaagaatgtgagactccatctcaaacaaaaaaaaaaaa

SEQ ID NO: 449148 - DNA, 474 bp, Homo sapiens
cacagggacgtcctcatgggtgcagcgctctggggatttccccccatcctcactccatgggagattttgtcatggggctccatgacttttttttttcttaaaaagagatgtttgaaaaccactaggctagatcaaaccatctgaaagagaaggcagagaggctccaggaggcctctggggaacgtggctctgcctctgcccagaagccagggctctgcagacctcccactcccctccctgagcctggcgagcagrtgcaggggagagcggtgtcagcaccagtgccctgaatgcccagaatgctgcccctgcctcctttcctggaccccccttcagtcaatttccaccaggagagccggctgcctggggtaggcagcgacaggatggggtcgctgtctcaagaaggcccctctgaaaatggacctggagttattgacacgtttctttagattctcctctttggtcacacatagg

SEQ ID NO: 449149 - DNA, 474 bp, Homo sapiens
cacagggacgtcctcatgggtgcagcgctctggggatttccccccatcctcactccatgggagattttgtcatggggctccatgacttttttttttcttaaaaagagatgtttgaaaaccactaggctagatcaaaccatctgaaagagaaggcagagaggctccaggaggcctctggggaacgtggctctgcctctgcccagaagccagggctctgcagacctcccactcccctccctgagcctggcgagcaggtgcaggggagagcggtgtcagcaccagtgccctgaatgcccagaatgctgcccctgcctcctttcctggaccmcccttcagtcaatttccaccaggagagccggctgcctggggtaggcagcgacaggatggggtcgctgtctcaagaaggcccctctgaaaatggacctggagttattgacacgtttctttagattctcctctttggtcacacatagg

SEQ ID NO: 449150 - DNA, 474 bp, Homo sapiens
cacagggacgtcctcatgggtgcagcgctctggggatttccccccatcctcactccatgggagattttgtcatggggctccatgacttttttttttcttaaaaagagatgtttgaaaaccactaggctagatcaaaccatctgaaagagaaggcagagaggctccaggaggcctctggggaacgtggctctgcctctgcccagaagccagggctctgcagacctcccactcccctccctgagcctggcgagcaggtgcaggggagagcggtgtcagcaccagtgccctgaatgcccagaatgctgcccctgcctcctttcctggaccccccttcagtcaatttccaccaggagagccggctgcctggggtaggcagcgacaggatggggtcrctgtctcaagaaggcccctctgaaaatggacctggagttattgacacgtttctttagattctcctctttggtcacacatagg

SEQ ID NO: 449151 - DNA, 550 bp, Homo sapiens
ctgttccttcttgccaacatcccttcaaggctaataggtttttatggtcgttttatttttaagcaagagtcacatcctgaccttctaaattgggcctgctgcctctgggtcctggaacatgtgttgctgtgtcacagacaccgtgggttgggcatggggacctggatgcaagagtcttcctaatccaccattccgtctacaagagcaaaggcaaacccagacttacccttctctgtctgcagtattccttctcccatggggccaggggagcctgggataatggtggctgccagggactgagctgtctggaagtgaggggaagctgcactgcccaaagtcactacaaaggtgacagatttgagacaggcatggtcagaagggttatgttactttgcagggcctccatttccccatctgtaaaatggggatgatactgcccattgggttaaatacgtgtgacgtcttttcaaaagagcttacatgctgtccacasttgagcgtttctttttgcccttggaggagtctgtgcacagggctgggtgtagggtga

SEQ ID NO: 449152 - DNA, 553 bp, Homo sapiens
tcttattgagagatgaagaatgagtcagaaagtgagagccagtgattgagacagagatacagagagagagagagagagagagagagagacaaaaacagagagagagagagagaaacagagatagagagagagaagagaatagatgagaaaagaaaagaaaagaaaagaaaagaaaagataagaaaagaggctaaatggctaaatgggttctgttactgggatgaccaagtcctcaaatgcccagtggagtcaaagcatcctcacggtcaaaatggcaggtgtgaatgtcctargagcccaattgggataactgttctctaaccccaacctgtgtttctggcctctgcttatctctagcttcccagcaaaggccactgggtgtggtttatcttctattggataagtaccataaaatgcttaagattgtgcctgcctggcacagagtggggctcaacaggttacctggtggagttttcctggagaaaccagatggggcacacatgataagacctcattactccattcaggtatgaaaagatgtccaagaatctgc

SEQ ID NO: 449153 - DNA, 405 bp, Homo sapiens
gcttctcgcatccaacacatggttattttttacaaaatcgctgaactagccatgttagctgtattgatcaataaattactttgatgaaaactcaataggcaatggccccctggcactcgttcccacacaaaggaaggacttttacactttttccatttcaaaaaccttggtgccatttcctgtcccatttttctcctctgtgtatcactcccaggtgttgctgcytcggccagcacctgcccagacaggacttggagatctctggggccatagacagagattattctggcccaaggcatgggggaggtggtgcatgggaggtggagttaatccatctgcccacgtccccccaaaaaggtttgctttccagggcactctggaagccctggcatcactgttgcttgg

SEQ ID NO: 449154 - DNA, 510 bp, Homo sapiens
gaacagaaagcactcagtagacattacctcttatttatttttctcaagaataaatgtaaaaagtaaaaagaataagtatccatttctatggctcttaacatatttacaactcattctgagcctcaggcaactctgggagattgaagccttgagtttgtctttcttaatttgcagctgagcaaggagtggcccggcttgggtgaygtgtccaaggtcacacagctggctagaagagaagcacaactcaaattcacatctgtggatctttttctcctgcactacagttgccctcctgttccaagtgccccgtgcttggaaacccagccacccccaaagatgtcggtaaatacagcagagctggcctctctgaagactctgctcccccctctttctaggtgtctgtgttggtgccgaggcctcccctgctcagctggcccagtacttgcctcctcttctcccattaacagggcataggccaccccctccaagctccccccaacagtccccacc

SEQ ID NO: 449155 - DNA, 340 bp, Homo sapiens
gatttgactgcggacagtctggcttcagagtccgtggtcttaacgatatcacagctgcctcttcctttttagcaagaaaagaatcagggagatgggctggaattattccattgttgtaattctatgataatgacttaattctctcctgactcagggcaagrtattggctaccattcatctccctggcatttctcagaaatcagtatgtcagaattttctgacctcgctgtcctggaggcagtggagctcagaccacatcaggcaagcggggccatccctgtctgggagcaggggtggtgagtgcatggagctctccagggagacaggacactggcctggc

SEQ ID NO: 449156 - DNA, 615 bp, Homo sapiens
atgctaaaatccaaacacaccaccttggctgggcccagtgccctctcccttttcccatcccccccatccctgggatctcagggttctggctggggctttaagaatttaggccctctggagtgtgctaggtgcttctgattctcaagactggcacctgagccggctgagcttggagctgaatgcttctccagcagccaggcatcgccgagcaccagcccggagagggctttcttgcaggtgccagaggggctctctgggctgaggagcatcgtacccrccccctctctttgtgcctcttttgggggctgaaatttcctcttagacaaggagatggatagctcagcagtgtgacagagtgttcaaacaatccgtcttgaatagatgaattgcattgctctgtctttttgtaattgtgtctatcagaaggagaggtcaaggcattgattgcttggatggtttgcaagtaacaaaagagagtgagggagagagcaagggagagagaatgattggattgtagtctgcgagaaaaaatgatcattgattattttatgtgaatatgtggaagatgtattctatgtatgattatcaaatgttgtgcattgaaggttttcaagc

SEQ ID NO: 449157 - DNA, 580 bp, Homo sapiens
caatacaagtcaattgaaactgcctcatcaggagaaatatgttccacttagatcattaaattagctcgacaccggcctttgatgaggcctgcttgagaaaggcgtccgcccttgtgctccagtgatcattggccactgtgggccatttgcttaatgaacagtgtggccgacggccaggggtggagccagctgggcacacytgctgcccacaggccagcatggctggggcagcctctctaggtcttgccttgctaccaccaggctcagcagctggcccttctgagagggcaccagggtcagctcagccactgctagagaccataatataaagatggcacaagccactgttcgctagactcttcctgtgtcctctgccaggtgtggactgagagctctgcagacattacctcgctgaaaataccagcagccttgagacgtcaaggtgggtcgttctcccattttaaagatgaggaaattgacatagacccacatctctctgaccccaaacacaaacccctaaccaccacactcagtggccttgggagatcacagggaagggggtgcggtggaggactgaggt

SEQ ID NO: 449158 - DNA, 344 bp, Homo sapiens
tgctggtgagtgggaatgtgtagtgggtacaacacttaraacagcacctgccacatagcttcatgtagttgttattgttttgcatagccttgtaatctgaaggtggggggagtctgcaatgagccccaaaccctcagtccactgagctgccctatcaggagagtggtcccccacttccccagggttagcagttccctgggctgccagcttcacctcagttctcctgggatggttagtgcccaggagccactgggaggtggaaccatgggggcggggtttggcccctgacttcctagttcccctccagctacaggcaaggcatgggggtgggttttggcccctga

SEQ ID NO: 449159 - DNA, 592 bp, Homo sapiens
gcaccttagtacagggataagcgaggccccagcaacgtggcactgggagagatctctctgctttgcagttttcacatctaattactatttgtaataagagtcatgaaggaaaatactgaggactgggaggtcgggaaaggcttatctgaagatgtgacatttgagttgagacctgagagataagagttggctgagaagagtggatgagacagcatcccaccagaggggacagccttgtggacccctgagctggtgaagagttctttgtttaaggaaatgaaacaagatcaccatgactagggcagaaggaactgcgggtttagcataaggaakatgagattcagaaaagtgcttggtgaccaggaagagagagcaatgtcatgggagtctgcacacaggagagtaggcaggcagaaaggtctgggcatctgtctgggctgcatgccagccagagggagggaggcccaggagatcgggtcagctgtacagactggatacagactctcacccagaaaatccagagtggaagagccttgtgtccttaccaccctgtgccatccaatgctaccaggacctcagggaagacttgtcc

SEQ ID NO: 449160 - DNA, 509 bp, Homo sapiens
tggggcataaagatgaggtggtggggggcgagatgctcaagtggaagttctccttcctctggggaaaagcagaaggtcgaagagagggcagtgaggttcctgccacacacccaggacttacctggtctacccagctgaagaaatagagaagggacatgacctccgtcacacagcagcatctgactttcagccttgtgtgccttctrtcataccttgctgctgtccttgaacttggaagtaatgttggaaaaaagtgtgtaagacacatgaatgtcttccgctgcctcaagccaaccaaagcaactagagatagtgtacctttgattatgacctagtcactcagttgtcggtgagtggattaacaggctggcaggtaaaccacaggaaaacaaataattctaaggaaaataataggaaaagcagatgtgatggtggagggggaaatcaaattgattaccaatcagagataacatctttatttaaaaagatgccaactgtttgaaactaca

SEQ ID NO: 449161 - DNA, 509 bp, Homo sapiens
tggggcataaagatgaggtggtggggggcgagatgctcaagtggaagttctccttcctctggggaaaagcagaaggtcgaagagagggcagtgaggttcctgccacacacccaggacttacctggtctacccagctgaagaaatagagaagggacatgacctccgtcacacagcagcatctgactttcagccttgtgtgccttctawcataccttgctgctgtccttgaacttggaagtaatgttggaaaaaagtgtgtaagacacatgaatgtcttccgctgcctcaagccaaccaaagcaactagagatagtgtacctttgattatgacctagtcactcagttgtcggtgagtggattaacaggctggcaggtaaaccacaggaaaacaaataattctaaggaaaataataggaaaagcagatgtgatggtggagggggaaatcaaattgattaccaatcagagataacatctttatttaaaaagatgccaactgtttgaaactaca

SEQ ID NO: 449162 - DNA, 420 bp, Homo sapiens
cctgtttcgttggctgagctcatgctggcagataagggtagctctcaagatacaggttttgagggagacaactcctcgttcctattgttcccttggatagtggtgacaaagtcactcagggaaatggtactattccaaatggggctataaggagcccattccrtaatatttcccccataccccactccaaaggcaccactcacaccatccctggcctggtgtccacctaccttggcccattgtggtcaggcctgtggacagttcaaggctttgggtagggatgtaatgccccatgtggaatttcaggctagtagacttacattcatgtctcatcaggcatgtgtgatggaccagagcacaagaactaaggcatggtgatgctggacaattcctttgcctgtattggcctccattttctca

SEQ ID NO: 449163 - DNA, 420 bp, Homo sapiens
cctgtttcgttggctgagctcatgctggcagataagggtagctctcaagatacaggttttgagggagacaactcctcgttcctattgttcccttggatagtggtgacaaagtcactcagggaaatggtactattccaaatggggctataaggagcccattccgtaatatttcccccataccccactccaaaggcaccactcacaccatccctggcctggtgtccacctaccttggcccattgtggtcaggcctgtggacagttcaaggctttgggtagggatrtaatgccccatgtggaatttcaggctagtagacttacattcatgtctcatcaggcatgtgtgatggaccagagcacaagaactaaggcatggtgatgctggacaattcctttgcctgtattggcctccattttctca

SEQ ID NO: 449164 - DNA, 576 bp, Homo sapiens
tgcttctgaatttctaattgtataaagaaactttgtgagataatgtttattgttgttttaggtcaccaagttttggaacaatttgttacacaacaataaatagctaatacaccatccctgaaattccaaaggcagggactcgaatatggtgcttcccagactttatttgctgggtctytggccccaggagatattcactgaggaaaaaaactagaaaatccctgaaataaagaaagctatttagttttgtttaacccagggtttctcaaacccacatgatgatggacaccctttgtgcctgagatttccagaaattcatgtcctatggaatgtggtttgggaattactgttctgggataaatagcacatttgatttttaccaatgtactataatcttatgtgcttgttaaccccaggatctattggggttgaaaatatatctaaaatatatctaaatttattcatgcatccatcagtaccttcacccatttattctacaatgttcacagatgcctctctgctggagtatagattcactcctatactcctggtgctcacaatgagcaccttcgaaga

SEQ ID NO: 449165 - DNA, 530 bp, Homo sapiens
gagctccaacgttgggcacttgaaccttccactctactccatgccccatctgttcccctgagccaccctcccaggtctgttcatggttggggggcccatccctgctccttccctccccacccccaacacacacacacatacacacacacacacacacacacacacacttycaaagttctgcagagtagggtagggcagaggttagagaggctcttatgggagctgcaaaccctgctagatggacattcaatcactgtggcaggagcctcagaagccccttgggctttagccacttggaggggcccttcagtggttctggggacctggaggcttgctatgctcctccttactgcctcaaactgaaattcaaactgtcactggagagggtctccctttgacactatgggaccctgggaagagcaacagagtgaagtaaagggggcttctctgagcttttgtagaagttcctcttctataaaatggagatgataaccccatggcacaaacccatcgggaggctcaggtgagat

SEQ ID NO: 449166 - DNA, 585 bp, Homo sapiens
gtgtgtgtgtgtgtgtgtgtgtgtgtgtgtgttagtattttgttgagtatttttagatgatatacagcagaagaatttaaggatctctagtctttcatagcaacaaaatggacatcacaaaaaacttttgaatctgtccctttctctctgtggccttagtttgtctccactctctactttcacaccttcctgtcaagttcctcctatttagtctctttctcactctgatccatcctttccattgccaggagggctgtctttctaagacatccatctatgtatagttaatgtcctatctcccgtgttcggcatgcaaacccctccatggtgtaagtttgcccctatttctccaatctagtcacttccctcttcccaccctatactccaaatatactgagttattygcgttttccccagtgagctatgttgttcaacaaatctgttttttttttccatattgattcctttactcagagtactctttttttctcacccccatctccttttgttaaccttgaaaactccttaacttaaattcctagttttgttgttgttgttgttgttgttgaatttgagacagggttt

SEQ ID NO: 449167 - DNA, 572 bp, Homo sapiens
tagcaagcagagcctatgttgtcttccatgacttttgtgtatccccaaaacctaggtgtcattcacaagaactttcaacaaaccaggtctctcccacattaaatatacataacttatttcttgaacccaaacacagaaccagacatttacctattttgaaatggtatctttttgttttggttttccacccttccagcctagaacaatctatttaaatcctgattctgtgagctcaccagtaagccatctacagagaataagcaggtgatacaatcacacagatatcctttggggagatagaggctcaggaggcaaactgataatttcagaagaatttagagcccacccacctaaattccccagagaacatcacatagtcttttgagatgaacttagaagactccttcyctcctggagagacgccttggaagaactagactcttccaggaagctctcccagggcagggctgaaagggaaatgctgagacctaacaaacaataaagacaatgcttggaagggagcatctgtgaaaaaagcaagctcctccctctgagaataattccaaagggtg

SEQ ID NO: 449168 - DNA, 654 bp, Homo sapiens
tgactcaaggcctcctcatcagctctgtattgtgactcctggcatggctgcagtcccatacagaagccatcctgccagactctccagctttgtctgcagttgccctccctgtgccctctgcactctacacatcatagccttctcactgttcctggaacattccaagcccacagcccatgaactcatccccctaaamctccaagggactttgtaataggttctcctttgacttgaaagctctttcagttaatcacttcagtgaagtgggtaagagacggagaacaaaattaacctggaaagaatgttagattgtgtgtaccatcttttcacccacacccgctctctgagattgcaatcagcccttctcagatacagaaacaaacaaacaaaaaacaattgtaatgaggaatttcacaaagaccacttaaaatagaaactttcttttaaagtaaggagctattttttttctcttgcatttggcaaaatactctaagttagaggcatggaatctgtgctttacttttttttacactggaaagtccatattggagttggcctctaaaactggcatcccagttctcataaagttaatggtgttaattattgataatcttctgtccttcaacctggcttactctagcttcaataaggaca

SEQ ID NO: 449169 - DNA, 654 bp, Homo sapiens
tgactcaaggcctcctcatcagctctgtattgtgactcctggcatggctgcagtcccatacagaagccatcctgccagactctccagctttgtctgcagttgccctccctgtgccctctgcactctacacatcatagccttctcactgttcctggaacattccaagcccacagcccatgaactcatccccctaaacctccaagggactttgtaataggttctcctttgacttgaaagctctttcrgttaatcacttcagtgaagtgggtaagagacggagaacaaaattaacctggaaagaatgttagattgtgtgtaccatcttttcacccacacccgctctctgagattgcaatcagcccttctcagatacagaaacaaacaaacaaaaaacaattgtaatgaggaatttcacaaagaccacttaaaatagaaactttcttttaaagtaaggagctattttttttctcttgcatttggcaaaatactctaagttagaggcatggaatctgtgctttacttttttttacactggaaagtccatattggagttggcctctaaaactggcatcccagttctcataaagttaatggtgttaattattgataatcttctgtccttcaacctggcttactctagcttcaataaggaca

SEQ ID NO: 449170 - DNA, 641 bp, Homo sapiens
acatttgttatgtatcttggtcaattgaactatttatctttatttaacatccatatttatctctggtaatattccttattctgaagtctactttgatattagcagacattatttattcacagttacatttytattcaccttcgaaaggccacatacaagaagggactcttgagctagatattgaaagctgaggtgcttcccaggtgaatcatggcagcgggcaaggaggtgggatgggcatttctgataaatgcaccagtaatctgatccaaacatgaaagtatgatataataagttatagcaaccggctggacatggtggctcacgcctgtaatccccgcactttgggaggctgaggcgggtggatcacaaggtcaggagatcaagaccatcctggccaacagggtaaaacccaatctctactaaaaatacaaaaattagctgggcatggtggcacatgcctgtaatcctagctactcgggaggctgaggcaggagaatagcttgaaccagggagtcggaggttgcagtgagccaagatcgtgccatggcactccagcctggtgacagagagagactccgtctcaaaagaaaaaaaaaaagaaagtgaaataatataccatgtgttagtctgtgttgcta

SEQ ID NO: 449171 - DNA, 641 bp, Homo sapiens
acatttgttatgtatcttggtcaattgaactatttatctttatttaacatccatatttatctctggtaatattccttattctgaagtctactttgatattagcagacattatttattcacagttacatttttattcaccttcgaaaggccacatacaagaagggactcttgagctagatattgaaagctgaggtgcttcccaggtgaatcatggcagcgggcaaggaggtgggatgggcatttctgataaatgcaccagtaatctgatccaaacatgaaagtatgatataataagttatagcaaccggctggacatggtggctcacgcctgtaatccccgcactttgggaggctgaggcgggtggatcacaaggtcaggagatcaagaccatcctggccaacagggtraaacccaatctctactaaaaatacaaaaattagctgggcatggtggcacatgcctgtaatcctagctactcgggaggctgaggcaggagaatagcttgaaccagggagtcggaggttgcagtgagccaagatcgtgccatggcactccagcctggtgacagagagagactccgtctcaaaagaaaaaaaaaaagaaagtgaaataatataccatgtgttagtctgtgttgcta

SEQ ID NO: 449172 - DNA, 548 bp, Homo sapiens
atgcctgtaatcccagcactttgggaggccaaggtgggcagatcacgagatcaggagttcgagaccagcctgaccaacatggtgaaaccttgcctctactaaaaatacaaaagttagctgggcatggtggcatgtgcctgtaatcccagctactcggaaggttgaggcaggaaaatctcttaaaccagggaggcagaggttgcagtgagccgagattatgccactgcactcgagcctgcatgacagagtgagactccgtctcaaaaaaaaataaaaaaaaatttaatattaggttggtgaaaagtagtggtaaaaactgcagttacttttgcaccaatctgataatcaattttatatatcttgtaaatgatattcactctcatcttaaaagtttagcttatattaaatgtttgatgtaartaaagttgaaagaaagtttcttctgttaggtgtgaaacataaaagatatactcataaaagtggttctaaccagggccatacttaagatgaggtattgtatgattgttgaatattacctataacatagt

SEQ ID NO: 449173 - DNA, 548 bp, Homo sapiens
atgcctgtaatcccagcactttgggaggccaaggtgggcagatcacgagatcaggagttcgagaccagcctgaccaacatggtgaaaccttgcctctactaaaaatacaaaagttagctgggcatggtggcatgtgcctgtaatcccagctactcggaaggttgaggcaggaaaatctcttaaaccagggaggcagaggttgcagtgagccgagattatgccactgcactcgagcctgcatgacagagtgagactccgtctcaaaaaaaaataaaaaaaaatttaatattaggttggtgaaaagtagtggtaaaaactgcagttacttttgcaccaatctgataatcaattttatatatcttgtaaatgatattcactctcatcttaaaagtttagcttatattaaatgtttgatgtaagtaaagttgaaagaaagtttcttctgttaggtgtgaaacataaaagatatactcataaaagtggttctaaccagggccwtacttaagatgaggtattgtatgattgttgaatattacctataacatagt

SEQ ID NO: 449174 - DNA, 565 bp, Homo sapiens
ggagggaggagaataagtcattgctccagcattctgatttggataatggtggtgccattcagtgtgctgaatggaggtgggctgggataaggcaaataattattttgttcatgttgattttgaggctacatgtaaaggaagtttttttttttgagactgagtcttgctgtgtcgcccaggctggagtgcagtggcacgatcttggctcgctgcaagctccacctccccggttcaagtgattctccyacctcagcctcctgaataactgggattataggcacctgccaccacacccggctaatttttgtacttttagtagagacggggcttcaccacgttggccatgtcttgaactcctgacctcatgatccacctgccttggcctcccaaagtgctgggattacaggcgtgagccaccgcacctggccataaaggaagatatttatcaaaatttggctgcccacatctgaagctcagaggaaggggattgggcaagagattgagatgtagaaatctttggtatatggtaagtgaagccacgggcatggctatatttcaagattga

SEQ ID NO: 449175 - DNA, 522 bp, Homo sapiens
tggtctccgtggctgattcattaacattgaactcatagccagaggcactcctgcctgaacaaagcttacctaacacataagttttctcctaaggcatatcacagctttgtgatgtttaagaagtagatggcacttcagcactagacttgggaccattgtaaatggtgaaaatggyaataaagagcacaaaaatattaaaaactaatgcactaaatatatcacaaaaaggacacttgtttatagtatgagtgctgagcagaagttctgcttcacctgggaatgtgtttatccagggactctgtgcatgtattcaaatgactgggaaagtgcttttgaggttacaaataaattctagccagtagacaaatttacacatacagaatctataaatgatgaggatacactgtatataaaaatgactatgcaagtcagactgcaataaagtttccatagaaatacagggcaatatagcacagaccagagagaaactgctccagtctagggtaatcaatcaggctccac

SEQ ID NO: 449176 - DNA, 522 bp, Homo sapiens
tggtctccgtggctgattcattaacattgaactcatagccagaggcactcctgcctgaacaaagcttacctaacacataagttttctcctaaggcatatcacagctttgtgatgtttaagaagtagatggcacttcagcactagacttgggaccattgtaaatggtgaaaatggtaataaagagcacaaaaatattaaaaactaatgcactaaatatatcacaaaaaggacacttgtttatagtatgagkgctgagcagaagttctgcttcacctgggaatgtgtttatccagggactctgtgcatgtattcaaatgactgggaaagtgcttttgaggttacaaataaattctagccagtagacaaatttacacatacagaatctataaatgatgaggatacactgtatataaaaatgactatgcaagtcagactgcaataaagtttccatagaaatacagggcaatatagcacagaccagagagaaactgctccagtctagggtaatcaatcaggctccac

SEQ ID NO: 449177 - DNA, 485 bp, Homo sapiens
cacagcagagtactattcggccataaaaaagaataacatcctgtcatttgcaacaacatggatggaactggaggtcattatgttaagtgaaataagccagacacagaaagacaaacatcacatgttctcatttatttgtgggatctaaaaatcaaaacaattgaactcagggagatggagagtagaagatggttaccagagactgagaagtgttgtgggagggtgggggaggtggtgaggatggttaatggggacaaaaaaagctacttagaaataatgaataacacctackatttgatagcacaacggggtgactataggcaataatgacttcattgtatattttaaaataatgtaattgcattgctcatgacacaaaggataaatgctcgaagggatggataccaccacattctccatgatgtggttatttcacattgcatacctgtatcaaaacatctcatgtaccccataaatatatacac

SEQ ID NO: 449178 - DNA, 615 bp, Homo sapiens
attttttttacactgtcttttgcagagcaaacatttttaatttgaaagaagtgcaatttatccatttttttcttgaataaatagtgcttctgtgttatatgcaaggaatctttgcctaacacaaggtcataaagattatttcttatgctttgttctaaaggtttcataattttaatacttaggtaacattctttttgagttaatttttcatgtaaggcatcaggtataagttgaggtttattttcctgcatgtggatgcccaatcattccagcaccattttttgaaaagactatcctttctccattgaattttctttgcacctttgtcaaaaattacttggccacaaaagtgagtacatttctagactctctgttgtgttccatttatttacgtgtcttttttttctttttctgagagacaaggtcttactctgtcacccaggctggagtatagtggtgtgatcgtggctcactgcagcttcaaattcctgggctcaagtgatcctcccacctcagcctcccaagtaactgggctgcaggcatgcamcactatgcccagctaatttttgtaaagacaggatctctttatattgtccacactggtctcaaactcct

SEQ ID NO: 449179 - DNA, 538 bp, Homo sapiens
aactggccatttctcttcttatctcctcctagtgcaaagtgcctggatcccttaagagccagcattctcttagatctgcagtggggtcaacactaaagcctcagcacagtcttctttgtagttttagcctttttccagaaaactggtttagtctgtccaccacggccacttggcttcctgtcataacaccactttccctgggcatccagagaatccttgcccttttgtactgtgtcatttgtagggtttgtacagaaagtcaggcgggttttaagaacactcaccatgtttgtgggagtgctatcagcaaggacagcagggtgtgtgtgtgtgtgtggtatgtgtgtgtgtgtgtaactttcatttacactcctgtgccatgctcaytactgttttcaggaagtagctcaaaaaataaatgtcattacttcattatttaacctaagggacatgatctggctttcagaattacacccttattggatcatagaatgataaattgtttgaagcaccagtatttttagtttaataaattgag

SEQ ID NO: 449180 - DNA, 331 bp, Homo sapiens
tgaaggagtttgttattacccaccttctgaagcctacttctgtcagtttgtcaaactcattcgtccarttttgttcccttgctggcaaggagttgtgatcctttggaggaggagaggcattctggtttttggaattttcagcggttttgcactggtttctctccatcttcgtggatttatctaccttcagatgaggttttggtgtggaggtcctttttgttgatgttgatactattcctttctgtttgttacttttccttctaatagtcaggcccctgtgctgaaggtctgctggagttggctggaggtccactccagaccctgtctgcct

SEQ ID NO: 449181 - DNA, 373 bp, Homo sapiens
tggtctcatttatcatcatctgtgaaatgggtataataatacctacaaaattgttttgttttaaataagttggtatatacaagaagcatygatttacacagtgaacgttgtccctaaaagcttaggtaaagcaatatattgcagaataaggtacatagtaataagaataatagcagcttgtaaatggtgggaatggcatttgatgccgagtgatctgacttcagagccagtatttattaccactacgctaccctttggatatcattctcacttaatgttagcaactctccctgattctgagctcttgttttataaagtacaatgatcctacctgaagtcctaaaaagcaacccagggcacagagtagaggtat

SEQ ID NO: 449182 - DNA, 525 bp, Homo sapiens
tagaacatgaatgttggatttccttcgttagtactcaacagagagcaatcagcctagagacattcatgcagaggtaaactctggacagcagtgaaactctggtgtgataatgcccctaagaaaacrggaggttaaaaagcacagtcctaaataataaagagccacagagtggtggggggaaagctacttggaattgagcctactggggaaccttggttcctttcagaacacaatactgagtgagaagtcccacggtcagctaaacaattctcacacaaaggagcagaaaatataaacaaaccatatagacaggaacaacagcatgaaatggtcagaaaaaaattctcgtaggagtccaggagcatgccacagagagcaagagctgcatgcatttggaggtctaaatgaagcacttggcaacgtgagcagaagccccacaaagacagcccccctcaccatccagtcccctgtctgctcttcctttatggctggctcattttagtgctctggagaaaagtgtccctc

SEQ ID NO: 449183 - DNA, 585 bp, Homo sapiens
gctgctggtgctaccatgaaaaagcaccggtattttgacaggctcagcactcccaacccccttgctggcccttcttctccagcgacagcctgaattgagccagctctggcatggagtcagatagtgaagttcctcttgtcctccgtggaagggaaactcggggactcatgcacatggggtacacctcatttgaatcattgcactcaatgcattatatacagaattgataaagtctggttcaaattaattttacagggcctgaacccacaaactagatacattttcaggctttagtataccaaaagaactcaaataagatgcctcttggtaaagtgtgatttttataggcctttgctactggttagaattcctagatgaaaaaaaaaatgaggcagtaccaagtgccaggaactctgacttcagactgagggtacacaggaatggaagacacacacaggtatatayaattcttacacatacgaggggtgataagattgagggacttactagaaagaaatgggaactggaaataggcaaatgtgaggaaaacttgtctaatatattacgtcattacctatctcactg

SEQ ID NO: 449184 - DNA, 435 bp, Homo sapiens
gcctatagggctgcacggtaatcctatgtaaatacttgtccattcaaccaaccttgagattctgggagggtcaccagttcatgagaaaaggctgggttgcttgaccctatgttgttctctgcaaaaatgtccacctggtatgctgtttcaggctctaggcccttgagctgatactgagtgatggtggcattctttatcttcacatcaacgtgctggtcttcattcttgccttgaaccttgtaacggatagtaatagaagaaatagaatagccatccaatattgtccaagaaatcacagcygaggagtgtgtaatgttggaaatcttgatgttttctggttgaggaggaagaactagaaattaaaaagaaaaaagattcacttaagatatactaccatggcctagatcattatgcttttgagatagagttcatgtc

SEQ ID NO: 449185 - DNA, 601 bp, Homo sapiens
tgccttctgaaattgtatttagttcttccaaagcccctgaatgccccaaacgtgattgacactggacataactttgctgtcatcaacatcagctctgagccttactttggggatggaccaatcaaatccaagaagcttctatacaaacccrttaatcactatgaggcttggcaacatattcaaggtaagctttggacaggatagatgccagctggggatgtggcaccaggagaattatttttctccaaatctagaaattcccttctccctgcctcaatcctctacctcaaggtggtggctgttgcagaggattctgtttcagagtattcaagagagagtgcagggggcccctgagctctggggctaactttctgaagtcactgtgcgctctagaacacagaaccagctcacaccatgagttactatctatatcaatatttctttttggatctccagtcctgtttttagttattctatcttggctggtcatggggaaaggcacttgtttatgccatgaatatggtagcaggaaagtccagagcctgctggaagggcagagaggcttaatctgcctaaatcctgggggtgattgttgctgctg

SEQ ID NO: 449186 - DNA, 601 bp, Homo sapiens
tgccttctgaaattgtatttagttcttccaaagcccctgaatgccccaaacgtgattgacactggacataactttgctgtcatcaacatcagctctgagccttactttggggatggaccaatcaaatccaagaagcttctatacaaacccgttaatcactatgaggcttggcaacatattcaaggtaagctttggacaggatagatgccagctggggatgtggcaccaggagaattatttttctccaaatctagaaattcccttctccctgcctcaatcctctacctcaaggtggtggctgttgcagaggattctgtttcagagtattcaagagagagtgcagggggcccctgagctctggggctaactttctgaagtcactgtgygctctagaacacagaaccagctcacaccatgagttactatctatatcaatatttctttttggatctccagtcctgtttttagttattctatcttggctggtcatggggaaaggcacttgtttatgccatgaatatggtagcaggaaagtccagagcctgctggaagggcagagaggcttaatctgcctaaatcctgggggtgattgttgctgctg

SEQ ID NO: 449187 - DNA, 601 bp, Homo sapiens
tgccttctgaaattgtatttagttcttccaaagcccctgaatgccccaaacgtgattgacactggacataactttgctgtcatcaacatcagctctgagccttactttggggatggaccaatcaaatccaagaagcttctatacaaacccgttaatcactatgaggcttggcaacatattcaaggtaagctttggacaggatagatgccagctggggatgtggcaccaggagaattatttttctccaaatctagaaattcccttctccctgcctcaatcctctacctcaaggtggtggctgttgcagaggattctgtttcagagtattcaagagagagtgcagggggcccctgagctctggggctaactttctgaagtcactgtgcgctctagaacacagaaccagctcacaccatgagttactatctatatcaatatttctttttggatctccagtcctgtttttagttattctatcttggctggtcatggggaaaggcacttgtytatgccatgaatatggtagcaggaaagtccagagcctgctggaagggcagagaggcttaatctgcctaaatcctgggggtgattgttgctgctg

SEQ ID NO: 449188 - DNA, 520 bp, Homo sapiens
cacagttggtctctatttattttcttttcctttaaaaaacgggccttaattctccatttcttctttggattgtatcttgaacattgaaaatgttacattrtggagactctggaatatgatacattccttttgggaatgttgattttgttttgttttagcaggcaattaacttggtaggattcaaacctcaaactctcactgttaggaatcaggtcaaactcagtttagttcttttatctttagctgggctgctttgagtctatactgagcatgcatggatcaaggatcagccaaagatctgggacttttctctgactctttctgggttttccctctctctccagtggctgtggttttcctgactctgtctctgatgcatcaggccagtagactgcaggttttctttggagttgtagcttccatacgtggtgtcaactgtacctaacagttaggctaaaagctgaaaattgggaaacacatcattcccatcttccaaatttcaattcccctccagaatctt

SEQ ID NO: 449189 - DNA, 544 bp, Homo sapiens
aggacattcctgtatctttttaaaayctctgtcaaatgtatatgtttctgggagggaaaaaaaatcccttggcaataagaagtttactcacacatcactgttggttgtgtacacactgtaattcagtgactcgatggccatccagcgcactgggagccttccctggagagaacaaagtgagatttcacttaactgggacagggtctttaagaggctctcagcctgcctgagctgtggctccacaaatgattgctgggtagactcagaaatcattgctttgtgtatgtcccagctacatgtgttttcaaatttcaaaacatgcaaacaaacagtataagtcctatttatctttcggggtccagcagcgttatatgaatggaagtgtgagtgtgcacgcatggtagtcggtcattccttattcaccttatagccctcagaggcactccgaggcttgaaaggggagacaggcatagacactgagtgagaatttaactgtattaataatatggaaaagggaagcagggtggaaaagggaaactggggt

SEQ ID NO: 449190 - DNA, 578 bp, Homo sapiens
cctctttcttttgtaaattgctcagtcttgggtatgtctttatcagcagtgtgaaaatggactaatacacttgccccaccctctgggagtgctgtgccagggggattcagatctctgtcagctagaaagcttgggtcgggggtagctrgaggcccctgctgggaggtcctgcccagcggggaggaacgggattggccacccagttaaagcagcagtctgtccgtattttggtagagcagctgtgctgtgctgggggatccccttctgccccgggttggctcagacactccaaagcctgaaggctagaacagctaaagtgcctgaacagcaaagatggtggcccacccctccccctggaaactccttcttaggggggtgcaatgctgctagtggcagctggctgcaattccaagccaacaggtcttatcttgtgaggtgccatgaaaatgaggcctgcggcctgccgctgctcagccccctggattcagcctctttcctaggggtatgtacaatagtctaacctccctctttgccagagctgcagctacttttgccagaaagctcaagtatctaagcct

SEQ ID NO: 449191 - DNA, 588 bp, Homo sapiens
gttcatccctcctttcccccagaccttggcagctgatctttttactctctatagttttgtcttttccataatgccacatagttggaatcatacaggacccagccttttcagattggctcttccacttagtaatatgcacttaaggttccttcctgtgttttcatggcttgatagctcatttttttttttttagtgcttactaagacttcattgtctggatgtaccacagtttatttatccattcacctactgaaggacatcttggttgcttccaggttttggcagttgtaagactactgtaaacatctttatgcaggtttttgtgtggacataacttttcaactcatttgggtaaataccaaggagcacagttgccagattgagtggtaagattatgtttagttttagagaaattgccaagctgtctttcgaaccatactattttgcattcctaccagcaaagaatgagagttcttactgcsccacattctcttcagcatttggtttgtcagcgttctggattttagccactccagtagctatatagtggtgtcttattgttgtaattccaaattccctgaaaataga

SEQ ID NO: 449192 - DNA, 524 bp, Homo sapiens
tttgtctcacacaaagtcattttcatctcctgatttctttaatctgaccatggaataggtcttaaatgatcagataattatccttccaaaatgcatgagtttattcttcttggaacatttctcttttgtatttttagtcttttttggtctgtctgtgtctagtaaatgtcttatgctgttacattggaagattatttgaagtaaatatgttagtctctattaaagtagacataaactgggaggtcagatagaggtctgagagaccatggcctttgtggcttcattcatttaatctcatttctggtcacrttttagggaacactcatctcagctgaaatactagaattgcctcttacggagttaccttgcatctactcttgcttcatctacaatatcttttccacatggtacctagataaatcttttcaaaatataaattttgattttagacatttttcctccacttctttgtatatattccctttaaccttcagtggcttcctattgcctttagggcagagaca

SEQ ID NO: 449193 - DNA, 524 bp, Homo sapiens
tttgtctcacacaaagtcattttcatctcctgatttctttaatctgaccatggaataggtcttaaatgatcagataattatccttccaaaatgcatgagtttattcttcttggaacatttctcttttgtatttttagtcttttttggtctgtctgtgtctagtaaatgtcttatgctgttacattggaagattatttgaagtaaatatgttagtctctattaaagtagacataaactgggaggtcagatagaggtctgagagaccatggcctttgtggcttcattcatttaatctcatttctggtcacattttagggaacactcatctcagctgaaatactagaattgcctcttacggagttaccttgcatctactcttgcttcatctacaatatcttttccacatggtacctagataaatcttttcaaaatataaattttgattttagacatttttcctccacttctttgtatatattccctttaaccttcagtggyttcctattgcctttagggcagagaca

SEQ ID NO: 449194 - DNA, 594 bp, Homo sapiens
gtagacataaactgggaggtcagatagaggtctgagagaccatggcctttgtggcttcattcatttaatctcatttctggtcacattttagggaacactcatctcagctgaaatactagaattgcctcttacggagttaccttgcatctactcttgcttcatctacaatatcttttccacatggtacctagataaatcttttcaaaatataaattttgattttagacatttttcctccacttctttgtatatattccctttaaccttcagtggcttcctattgcctttagggcagagacaaaggtcctctgcatggcctgcaaggtttcctggtctctcccctgcctgttkatgccacttcagtttttgctgctccctgtcacttagtgcacacatgagcatcctcctattttctggaatatggtatgccttcttctgctagaagacctttgatgtgctcttccttctgtctagaaagttctcgtgtcccttcatctttcctcttgagtcgtcacactcagcccaattgtcatttcttcagggaaacttcctcttactctctggatgagggcatgtcttcctagtgtagactcc

SEQ ID NO: 449195 - DNA, 572 bp, Homo sapiens
ctttgatggagtctgagagaaaatttttcccatttcttaaaatctaatggttttactaggagtatatttggggtttgaccattcgggttcagktttctcagtcatattttcaatctttcctatatattttctatatagactcaggtcttctttttttcacacattttttggggattactaatttaaatacgatgctccattgctttgttttccttgtaggggacttcaaagttttatctgttgaaaatgttggattttctttgctaaagttaaacagctaaagactttttttctttttgctcctttttatcatctatttattttaattctcttgatttttctcattcttctacttaaatttctataatttcagtcaaagcagttatccctaggtactttacaaagtccacatttctgagatgatcttgtttttccttcaatttatttcctgagtttggtgaactcttatacacattgctccacttttttgtctgtttcacttttgaattttaaatttccaatttaaagtgttctttgttttatacttgcaaatgcttaatgttcaagaaaat

SEQ ID NO: 449196 - DNA, 572 bp, Homo sapiens
ctttgatggagtctgagagaaaatttttcccatttcttaaaatctaatggttttactaggagtatatttggggtttgaccattcgggttcagttttctcagtcatattttcaatctttcctatatattttctatatagactcaggtcttctttttttcacacattttttkgggattactaatttaaatacgatgctccattgctttgttttccttgtaggggacttcaaagttttatctgttgaaaatgttggattttctttgctaaagttaaacagctaaagactttttttctttttgctcctttttatcatctatttattttaattctcttgatttttctcattcttctacttaaatttctataatttcagtcaaagcagttatccctaggtactttacaaagtccacatttctgagatgatcttgtttttccttcaatttatttcctgagtttggtgaactcttatacacattgctccacttttttgtctgtttcacttttgaattttaaatttccaatttaaagtgttctttgttttatacttgcaaatgcttaatgttcaagaaaat

SEQ ID NO: 449197 - DNA, 581 bp, Homo sapiens
ggtttggactaaaaaccactatcctagctgcttctgggagtagaaagattaaaaagggggatgggaatcttatttcaaaattcaaataaaataattcaaattcaaataagaatctttaatagatgctacatcccatatccaggtcaacatggcaggagaaatgaacaatacaaagagggcagaacaaatatccccaagggaaagaagccagtggggggactgacagtctttcctttccctaacaaggctgcctttattcaaagggatagcgtttgcggattccgtctctccatcctttgtaaaggtgctagctagggagcygagctcaagcgggctgctctaggcatagcaagccccaccccttgcacggtgtcctaatcaccagctaacccctggaataaattctccactcgccctgcgtgggttcattcacagctctgtagtccggggctgggcgcttcctctctgggactgaaataagagcgctctagacagatcaggtgtgatgcagccagccctgctttagagcctattctttttcctaggcaacaaaaaacacacacacaaaataaaacaccaaa

SEQ ID NO: 449198 - DNA, 533 bp, Homo sapiens
aattgcatcatggataacccacattgtggtttctttagatgcaatgtggccaatggcaatagtgtgtgtgtatgagggggtggtggcaggatgaggggagagatatcaaggactcttgagatctggaattcataaaaatgatttgttctttagtttttagatgaacttaaatttttctyttattatagaaataatgtttattgtagaaaacttagaaaatatatatgggctcccaaaaataaataaacatgatgtctcagaattagtcacagttaagattttggttcaacttattccaatctcatgtgtgtggggtgtgtgtgtgtgtgtgtgagtatgtgtgaacattcatacatatgtttattcttacataaataagcctatagtataaatattcttctatgaattatcttttcagatgtatctattcatccaatattcttccatgacatcatttttaatgtctgtacaattcttgttatatggctataccatatcttttggacataagatttattattatgatctcgtct

SEQ ID NO: 449199 - DNA, 533 bp, Homo sapiens
aattgcatcatggataacccacattgtggtttctttagatgcaatgtggccaatggcaatagtgtgtgtgtatgagggggtggtggcaggatgaggggagagatatcaaggactcttgagatctggaattcataaaaatgatttgttctttagtttttagatgaacttaaatttttcttttattatagaaataatgtttattgtagaaaacttagaaaatatatatgggctcccaaaaataaataaacatgatgtctcagaattagtcacagttaagattttggttcaacttattccaatctcrtgtgtgtggggtgtgtgtgtgtgtgtgtgagtatgtgtgaacattcatacatatgtttattcttacataaataagcctatagtataaatattcttctatgaattatcttttcagatgtatctattcatccaatattcttccatgacatcatttttaatgtctgtacaattcttgttatatggctataccatatcttttggacataagatttattattatgatctcgtct

SEQ ID NO: 449200 - DNA, 620 bp, Homo sapiens
agcacccgggaagcagatatcttctcagattggttctccagatgcagcgtctcttgctgatgaaatcaccagtcccatgtgtcacagataatccatatacgttaggatttaaatgaggcagaaactsagcctgcatgtggaatgatgcgtatatgattctggcacaaccagttctttccctgaagcagctgttgccaccaccctcttcctgccaggcagtggaggaaggtgcttgcgggagctgcggacacactgttgtgtgttaggcatctacttagctggcctcatgttctgcttttgctggcagaattccttgctgaagctgcaagccctcgaatctgatctgtgctctgcatttttaacaaaccaggaagaagctgctcaggtgcatggagtcaaggacccggcgccagcatcaacccagagcgtgcttgccgatgggacagattctgcacgtaagatacagggctgggggttgtcccaaattgtactctcaaggtagttcagtctcttgctggttcacactcagcctgagccccctgagggaaaacagtgcctggggcaacatgaaagcccaagaggtgcttctgagttgcccaggagttgctgagggggagcag

SEQ ID NO: 449201 - DNA, 509 bp, Homo sapiens
caaacaccacagacataaccagaaggggccttctctatataatcaatatcattaaccttaatctaccacaatcactgtcactagaacatgaaatgcatgagaagtggccgcttccttcaggtgttgtttttccctcatgcttccttaccaaaagcacccataaaacagcatttgcaaagtcacctggaaagcaattcctagctgctcaaggacacctaaagccaagaagcaagaccagcaaagaaggaatgcccaccattcaagacractttttacaaataaaaggcagattaaattcactgagctggcatcaggaaggatgagttccaggtagtctttgggaaaagagcaaagcaaatatcaagataggtggtctggaacatgaccagggtgcagttggacaagatataaaaataaaactacgtgacatagttaaacttgaatccagaacaaacgtagtgctatctggtaaaggagaatccaacaattacaataattatttaatgtta

SEQ ID NO: 449202 - DNA, 509 bp, Homo sapiens
caaacaccacagacataaccagaaggggccttctctatataatcaatatcattaaccttaatctaccacaatcactgtcactagaacatgaaatgcatgagaagtggccgcttccttcaggtgttgtttttccctcatgcttccttaccaaaagcacccataaaacagcatttgcaaagtcacctggaaagcaattcctagctgctcaaggacacctaaagccaagaagcaagaccagcaaagaaggaatgcccaccattcaagacaactttttacaaataaaaggcagattaaattcactgagctggcatcaggaaggatgagttccaggtagtctttgggaaaagagcaaagcaaatatcaagataggtggtctggaacatgaccagggtgcagttggacaagatataaaaataaaactrcgtgacatagttaaacttgaatccagaacaaacgtagtgctatctggtaaaggagaatccaacaattacaataattatttaatgtta

SEQ ID NO: 449203 - DNA, 535 bp, Homo sapiens
tgatcctgcatgagaaacaaaagaaagaacagctgcctttacagttacctaaatgccctcattcgagtaggattatagaacactcaagaattttaaaaaatagcttttcaaatctaaaatgactcttttgatagactcattcccaaaataatacctgaactttgtttttatatcatgttttcaagtcaatcaaaatttagaartgtaattttgtttacttccttgacttggaaagccaggaaaggggagagggggccaaaagcatctttcttgcattacacaaacgtaaaacctggttacaaaagtcatatttagaaacatattttctcacatattattggttcctcaggatctccgaaacagaaaagcacaggttatgtaatttatgccactacttatcggaataaatcatgactgagaaaaagcatggtgtcctgaaaaaagccagagtctaaaagatcctcccacttattagttgtgtggcctgggcaacatcacttcacctctatgatcctcattcataaaatagatgtaa

SEQ ID NO: 449204 - DNA, 598 bp, Homo sapiens
tttaaagaagaaggaataccagttgtactcaaattattctggaaaatagtggaggagggagtatgtccaaactcatcctaccaggtcagtgttactctgataccaaaactggacaaagacacatcaacaaagcaaactacagccaatatctctgatraatattgatttaaaaatcctcaacaaaatgctagcaaatagaattcaacaatacatcaaaaagatcattcatcatgaccaagtgggatatctccctggaatgcaaggaggattcaacatatgcaaattaatcaatgtaatatatcatatcaatagaatggagaaaaaaaccatatgatcatttcaaatgatgctgaaaaagcatttgataaaattcaacatcccttcttgataaaaacactgaaaaaactgggtatagaaggaaaatacatcaacataataaaagccatgtatgacagacccacaactaatatcatatggaatgggaaaaaattgaaagccttttatctaagatctgaaacacaacaaggatgcttacttttaccactattatttaacataatgctggaagtcctagctagagcaatcagacaagagaaag

SEQ ID NO: 449205 - DNA, 616 bp, Homo sapiens
taatgctgcttatcagcttctatacagcattgtttataaggagcatcctgacttcagtgatattaaagtgttggaaatatgtgaatcttaggatggatgaaaagaggtcaattctgcagtgtgtaatgttcacaccatgcactcaacaatgggcaccaccactatgaccactgctcacggctcagatctcatttcttgctgcattcacttccactcctagagctgacttcttggcttcttctctcaagccaagattagggtgtgtacttctgactggtatcaccccagttgtgcccatgtcctagctgaaagggaggctggaaaaacaaatagtggccttttcagcttttatagtgaacaaagcattctgcttttctccctccaatgggaaattctccaagtgcaagaacagagttcagatgcttggcagccaaaatagaatgacaaatatcytctatagggagatttcaaagaaactccctcttatggtaaaagttcagtctcctcagctgttagaacttagaaatagaaaaacgtttgcaaagcaccagaataagaaaactcattaggatggaatccaaggcccttacaatccagcctctacaaacttcctgtc

SEQ ID NO: 449206 - DNA, 622 bp, Homo sapiens
tcaactcatgataactttcaagtatttgggagaaactgttttttgagctgcaaatccatgggaatgctgagatcacttgaacattcccaaatctcagttgtgaaaagctatatttgaaaacctgcttttctgtattccttcactacattgtgtttgcaaatgacatgaagtgtgccagctcactgcgctgattgcctgagcataagagcactggatggagaagtccatctgaaacagcaggcatcgccatattttaaacgtgtgcayttccatacagaggtgacgctgctgatccagactggttgaatacagtatgtgctgacagtgtttttttttccatcagggggtgaactatatagattgacccacattctttcacacagtttctgttatggccaaaatttgggagaccagaaaagaccttggggaaacttgaaggacgtgcaatatgaatgggacagagatcatcaaagagggtggatgtgttcacactcatggattgaaatgtcctgtatcattcccagcatttctcaacttattgaacaccaaactcttttatggaagaaccacctaataacatttctttaggcgacagagtctctatggaacacaaatgggaaac

SEQ ID NO: 449207 - DNA, 622 bp, Homo sapiens
tcaactcatgataactttcaagtatttgggagaaactgttttttgagctgcaaatccatgggaatgctgagatcacttgaacattcccaaatctcagttgtgaaaagctatatttgaaaacctgcttttctgtattccttcactacattgtgtttgcaaatgacatgaagtgtgccagctcactgcgctgattgcctgagcataagagcactggatggagaagtccatctgaaacagcaggcatcgccatattttaaacgtgtgcatttccatacagaggtgacgctgctgatccagactggttgaatacagtatgtgctgacagtgtttttttttccatcagggggtgaactatatagattgacccacattctttcacacagtttctgttatggccaaaatttgggagaccagaaaagaccttggggaaacttgaaggacgtgcaatatgaatgggacagagatcatcaaagagggtggatgtgttcacactcatggattgaaatgtcctgtatcattcccrgcatttctcaacttattgaacaccaaactcttttatggaagaaccacctaataacatttctttaggcgacagagtctctatggaacacaaatgggaaac

SEQ ID NO: 449208 - DNA, 564 bp, Homo sapiens
aggtgtctgtctcccccaggtatgtttcccacatggtaaggagtctaagtgggatgactcactgtaggaacatagaaaaatctaaaaccttaataaaattaggaggacagaataagttcagttgcagggagtgaatgagatagaggggatggggactgtgtttagaaggtttgagatccttgaagtttattgcaacttgctgaggcagccagccatagtgaagtggaaggaaccctggaactgagggggttgaggaattatgaagccagacaatagcatgattgtcagcctggacmttgaagtaactgaatgtcaggggccactgatggagaggaagaaaccaacccagatggaagtcgctgagtcctataatattcaggtcatggaataggaaaggatggtgttgtcttttgtaggggagaagaaattggtagactcaacagtgagggtcaaaaggggatgataatctattcatcccaccttgcttccccatttctaactgtgaggtagagagtaggaaagagaaatgatttttgaaggtggagaaatttcagtcacattgtt

SEQ ID NO: 449209 - DNA, 563 bp, Homo sapiens
gaaaacttaggatcaggataggctctatgcatggctaggtccagggattgaaaactcatcactggagatgccatctatttctatctctgggttcttctttttctatattggcttcatctttatttaggtcagcccctttttagggacaaattatttagtaattccagtgtatattagttttctattaatgggtaataaattaccaagagcttagtggctttaaacatttatttattagcttacagttatgtaggtcagaaatgtgggtggactcaactgggttttctgcttagggtttcatgaaattgaaatctaggcactggctggggtagtttcttatctggaggttctggagaaaagcccccgtcccagcttcttcaggtcattgcctgaatttagttccttgtagttgtgcaactgtgtgtcctgcttccttgctgggtgtcacctgagggcagctctcagcttctagaggctgtcacactccccctcctcaccctttatcttggagccagcaacagcrtggcaaatccttcttgtgctttgaatttctataatgttgt

SEQ ID NO: 449210 - DNA, 598 bp, Homo sapiens
ttgttcttaaaattttcattttgtgaggaaatgatggggaggggatttgtttgttttctttcttacatgctctcacttggtgaaatacaaagttgacagctttcataaatatattctgttccccctacccctgctaacttttagaaaatattactgctgaactgaagaccaaatttttcctgagagctgtgacctttgaaatgttttcttctaagggtaattctttctttcaacaggatttattgagaagcaaatgtgtatccagctttgggtctggtacaggggtgaggtgaaacagctgcagtacaagagtggactttgctgtcctcacttcccataggtttacagggacacatatcaagtcgggacatctggccttcctagccttggcacctattgtcttttttaggacatttttggccttctgaaggttataaaactcaagtttatagagagacaagagctgaattttcttattttcttacaaaatattagtatttgacwacctaagtgtctatcaacagacaaatggataaagaaaatatggtacttatatacaatggaatattatccagtcataaaaaagagtgaaatattg

SEQ ID NO: 449211 - DNA, 612 bp, Homo sapiens
gagctttggcctaagtaaatgtgcctatgttttcactggtaatctccttacataaatgcctttgtctgcttacaatatgataatctacatctctttaaaatgctcaacctctgaacattattcctgttatatattgtattaatgaccttaagtcattaattaccattttattaccattaacagccattttattttgttcatgattgtgagggtcaggaattcccagagagttcagctggacacctcatctctgatccatgtggtgacatctgggacaggtgsaaccagaggaccaccttccaaaagggtttcttcactgaaagagccaatcactcaatgctccctgcagggcctgtctctccacatggaatcttatccttcagggcctctccatgtgccttgaacttctcacagcatagtgattttaaggcaatctacctttttaaatagcagctgatgcacaagagaccaaggcagaagctgccattttacttaaaggcttgacctagaactggtgtaacattacttctgccatactccactggccaaagcagataaaagtcagctcatattcaatggcaaaataatagacccaacttcctgatgagaaga

SEQ ID NO: 449212 - DNA, 624 bp, Homo sapiens
attataaacaatttcatgccaataaaattgacaayctaggtgaatttagcaaagtccttcaaaaacacagattaccaaaattgaccaaagaagaaatagaaagcttgaacagcaatatatcaatgaagaaattgaatttataatctaaaatcttcccacaaagaaaaacctaagtgtagattgctttactgacgaattctttaaaacacttaaggaagtgataatatcagttctacacaaacactttcagaaaatagaggagggaacactttccaaggtatattatgaagctaatgttattctgatttgaaaaccaaagagatcacaagagaacatcagaccaatactcctcataaacacaaacatgaaagagttctcaaaaatattaccaaattgaatcaaataatatataaaaatgataagacattgtaatcaagtggttttatcctgggaatgcaagattgatttaacatctaaaaatgaatttgtctaattcacactattaatagaataaaggagaaaacccatatgattatttcaataaaggcagaaaaacgtgacatatttatcactcttttgagatgaaaatctttgggaaactagaaatataagggactttcttca

SEQ ID NO: 449213 - DNA, 624 bp, Homo sapiens
attataaacaatttcatgccaataaaattgacaacctaggtgaatttagcaaagtccttcaaaaacacagattaccaaaattgaccaaagaagaaatagaaagcttgarcagcaatatatcaatgaagaaattgaatttataatctaaaatcttcccacaaagaaaaacctaagtgtagattgctttactgacgaattctttaaaacacttaaggaagtgataatatcagttctacacaaacactttcagaaaatagaggagggaacactttccaaggtatattatgaagctaatgttattctgatttgaaaaccaaagagatcacaagagaacatcagaccaatactcctcataaacacaaacatgaaagagttctcaaaaatattaccaaattgaatcaaataatatataaaaatgataagacattgtaatcaagtggttttatcctgggaatgcaagattgatttaacatctaaaaatgaatttgtctaattcacactattaatagaataaaggagaaaacccatatgattatttcaataaaggcagaaaaacgtgacatatttatcactcttttgagatgaaaatctttgggaaactagaaatataagggactttcttca

SEQ ID NO: 449214 - DNA, 624 bp, Homo sapiens
attataaacaatttcatgccaataaaattgacaacctaggtgaatttagcaaagtccttcaaaaacacagattaccaaaattgaccaaagaagaaatagaaagcttgaacagcaatatatcaatgaagaaattgaatttataatctaaaatcttcccacaaagaaaaacctaagtgtagattgctttactgacgaattctttaaaacacttaaggaagtgataatatcagttctacacaaacactttcagaaaatagaggagggaacactttccaaggtatattatgaagctaatgttattctgatttgaaaaccaaagagatcacaagagaacatcagaccaatactcctcataaacacaaacaygaaagagttctcaaaaatattaccaaattgaatcaaataatatataaaaatgataagacattgtaatcaagtggttttatcctgggaatgcaagattgatttaacatctaaaaatgaatttgtctaattcacactattaatagaataaaggagaaaacccatatgattatttcaataaaggcagaaaaacgtgacatatttatcactcttttgagatgaaaatctttgggaaactagaaatataagggactttcttca

SEQ ID NO: 449215 - DNA, 553 bp, Homo sapiens
ctgggattacaggtatgagcctccatgcccaacagattatttttttaagttctcacagtgttatgaggtgggtactacaaaatccaacttgcgaaggaagcaactgaggcctggaaacactgagtgtctgacccatagttacacaggcagtaaaggcaaagttaggctctgaacccaggtctgggtgaccccaaatccctgcctctgtggagtgtgcttgaggctgtgggtcagaagacctgaattgggatcctggctttgcacagcgtagctccctgactttgggtacgtttagtctctctgggcttctgtatcctcagttgacagcgtcccatcctcctgtgcccgtcagcagcaggagatcattgccccacaatacgggcattctgcttctgtttcttcctgtctcataggctcatgtgatgactgattcaactgggagaaaactctgggaggatcttactgggcgacagaatgggcaatggyggggaggctcttgcagagagagagaggagacttaaggtgaatcataaacactgcccccctctcacct

SEQ ID NO: 449216 - DNA, 603 bp, Homo sapiens
acataattgtagaggcaccgctcatctaacgaccagcagcagaagtgccatccagaggctgtgatcagagatctgtctccaagagtcactgatagtttcccagaaaggaaggtcagagatgaaagagcacagagtgataatggcacagatctggacctggtggtccggcggggttgcggggtgatcctattgcactctcactgtcttaaaattattgactttcttgttcatcatttgcagaagccaaactccacatcttgtaaactcctatgcacccagacttaacacagaagcaacaaatgttaacaggctacaggcaagtggaattaacattgggcagagattttagtgtggagattccttaaagaactaaaactaccatttgattcagcaatccgactcttgggtatctmcccagaggaaaagaagtcattaagcaaaaaagatacttgcacacacgtttatagcagcacaatttgcaattgcaaaatcgtggaaccaacccaaatgcccatcgatcagcaagtggacaaagaaactgtggtgtatatatatatatgatggaatactactcagccatagaaaggaatgaattaacggcat

SEQ ID NO: 449217 - DNA, 603 bp, Homo sapiens
acataattgtagaggcaccgctcatctaacgaccagcagcagaagtgccatccagaggctgtgatcagagatctgtctccaagagtcactgatagtttcccagaaaggaaggtcagagatgaaagagcacagagtgataatggcacagatctggacctggtggtccggcggggttgcggggtgatcctattgcactctcactgtcttaaaattattgactttcttgttcatcatttgcagaagccaaactccacatcttgtaaactcctatgcacccagacttaacacagaagcaacaaatgttaacaggctacaggcaagtggaattaacattgggcagagattttagtgtggagattccttaaagaactaaaactaccatttgattcagcaatccgactcttgggtatctacccagaggaaaagaagtcattaagcaaaaaagatacttgcacacaygtttatagcagcacaatttgcaattgcaaaatcgtggaaccaacccaaatgcccatcgatcagcaagtggacaaagaaactgtggtgtatatatatatatgatggaatactactcagccatagaaaggaatgaattaacggcat

SEQ ID NO: 449218 - DNA, 603 bp, Homo sapiens
acataattgtagaggcaccgctcatctaacgaccagcagcagaagtgccatccagaggctgtgatcagagatctgtctccaagagtcactgatagtttcccagaaaggaaggtcagagatgaaagagcacagagtgataatggcacagatctggacctggtggtccggcggggttgcggggtgatcctattgcactctcactgtcttaaaattattgactttcttgttcatcatttgcagaagccaaactccacatcttgtaaactcctatgcacccagacttaacacagaagcaacaaatgttaacaggctacaggcaagtggaattaacattgggcagagattttagtgtggagattccttaaagaactaaaactaccatttgattcagcaatccgactcttgggtatctacccagaggaaaagaagtcattaagcaaaaaagatacttgcacacacgtttatagcagcacaattygcaattgcaaaatcgtggaaccaacccaaatgcccatcgatcagcaagtggacaaagaaactgtggtgtatatatatatatgatggaatactactcagccatagaaaggaatgaattaacggcat

SEQ ID NO: 449219 - DNA, 603 bp, Homo sapiens
acataattgtagaggcaccgctcatctaacgaccagcagcagaagtgccatccagaggctgtgatcagagatctgtctccaagagtcactgatagtttcccagaaaggaaggtcagagatgaaagagcacagagtgataatggcacagatctggacctggtggtccggcggggttgcggggtgatcctattgcactctcactgtcttaaaattattgactttcttgttcatcatttgcagaagccaaactccacatcttgtaaactcctatgcacccagacttaacacagaagcaacaaatgttaacaggctacaggcaagtggaattaacattgggcagagattttagtgtggagattccttaaagaactaaaactaccatttgattcagcaatccgactcttgggtatctacccagaggaaaagaagtcattaagcaaaaaagatacttgcacacacgtttatagcagcacaatttgcaattgcaaaatcgtggaaccaacccaaatgcccatcgatcarcaagtggacaaagaaactgtggtgtatatatatatatgatggaatactactcagccatagaaaggaatgaattaacggcat

SEQ ID NO: 449220 - DNA, 593 bp, Homo sapiens
gctctctggtgagggggccatgaggtcccaggaaagtcctgggaacattactttgggtagagcagaaagaggccagaaagttgcttctaaaacctgaaaatgattccatggagttggagaagcgcccttgcggtgtaaaggttggatgtagctgtgaagacatcagaaagcgtctgctggtgtgaggacgtgctggtggcgtctggccctttcttccctgggctgcttgctgctgtgcccggttcctgtccccacgcctttgtttggccctttgtcccactgtccactcactggaagaccccaacaggattcttaccaaatagatgagttgatgccaacccaccgaaattaccattcgctgggtaggaaaagatggtcacacctgttctcatcccattcagtgtctttatygcactcaggagtagttcagcagctgttcagaccattaatgggaagtgggctaatacttctgtccctgcttttttttttttaaacttgggaggaaacagagtgatttcttaacatgatcacaaagcaagataaaggcagatgaaggcacagaactcacaaatgcagtcatgaagagacctccc

SEQ ID NO: 449221 - DNA, 601 bp, Homo sapiens
gttatttgtagtttgatgtatattcagtggagaggatatcgatatggtttgtttcaaggtatgatttttaattaaaaattgttgttcacatttgaaggtggcataatctgtggttttctgtattctcaaagttggtgagcaagagcctttgaaacagatataagtattagattacataaattgaagataataaaccaactccccctagatcttcttatgctctggtattgttttgggataaccttattcatattcaagatctctctagtgatgttccaaattcatgatcaatcattttctgattgaatatataatgtgccagcgccagctattagtacatatagagcttttaaagctttacccataatgataatccttaatgtgtttagtaattgaactaaacaggactgccttttccatttgtaaactggaagcttaaacattgtacttgtagtrctggatattaccttaaatattgtttgggctcatttttagaaatatcacacagtttctaagagttctggagttaggtgtttgtaggcattttcttcaaaaagtaatcctcttgataataagtttgtgttgcctaaacccacagaat

SEQ ID NO: 449222 - DNA, 611 bp, Homo sapiens
atttcactcctgagggtcaggactttaggactgctggaatgtgcccagtaaagacgtgggggtgtctgggcagctgaaagcctccacacgggaattcagtaaggacaactgctgaaccctgggttatggatttaaaaataaacctcagtgacccgcatgccttaagaatcatttgggaaagaacgttgctgaatccagcaactatgtgccccactggggtgaactacagagarggaaaaagagaaaaatgcttttactacccctttcaaggagtatgataggacaaaaagacaaaggaaatccaaaattggcttccccaagagcaaagatttacaaactacctgtatttctatatttcttatattttaaggtttcaggaaaggtgttagtacatgtgcactgtctgtgaggtactaagattatgttcagtacataaacgaatgaaaaccaccatggcacatgtatacctatgtaacaaacctgcacattctgcacatgtatcccagaacttaaagtaaaatttaaccaaaaaaaaaaaaaaaaagaatgttgaaaaggaaaattacaatgtaaggtagcacactggctgacctttatgggcttactgagga

SEQ ID NO: 449223 - DNA, 611 bp, Homo sapiens
atttcactcctgagggtcaggactttaggactgctggaatgtgcccagtaaagacgtgggggtgtctgggcagctgaaagcctccacacgggaattcagtaaggacaactgctgaaccctgggttatggatttaaaaataaacctcagtgacccgcatgccttaagaatcatttgggaaagaacgttgctgaatccagcaactatgtgccccactggggtgaactacagagaaggaaaaagagaaaaatgcttttactacccctttcaaggagtatgataggacaaaaagacaaaggaaatccaaaattggcttccccaagagcaaagayttacaaactacctgtatttctatatttcttatattttaaggtttcaggaaaggtgttagtacatgtgcactgtctgtgaggtactaagattatgttcagtacataaacgaatgaaaaccaccatggcacatgtatacctatgtaacaaacctgcacattctgcacatgtatcccagaacttaaagtaaaatttaaccaaaaaaaaaaaaaaaaagaatgttgaaaaggaaaattacaatgtaaggtagcacactggctgacctttatgggcttactgagga

SEQ ID NO: 449224 - DNA, 465 bp, Homo sapiens
tgcctgggcaacatagtgagaccttgtctctagagaaaatcaaaaaataatccaggcgtagtggcacatacctgtggacccaaccactcaggaggctgaggtgggaggatcatttgagccagggagatggaggctgcagtgacccatgatcgcaccactgcagctgtgatcatcatcatccagcctgggtgacacartgagaccctgtctcaaaaaaaaaaaaaaaaaattgcaggaaagattgagtcttgctttgggaggaaaaagaaacaggtgaaaggagggcaggagggcagaaagattctgttttctaagacttgacttgcttctgaggtctacagtgcctcaacattatagcagaaaactatgacaagggctatagaagttatgagccaggaactgtgaacgaaaaaacccatatattgcaaccccacttctccctccccagttatgtataagaaagtt

SEQ ID NO: 449225 - DNA, 457 bp, Homo sapiens
caacctgggaaagatccatccccacaccaagggacaatcaaaggctcactacaggataactggtcagtgatacttttagaaaaaaaaaatrttaaccaaaaaaaaaaaagaaagaaagaaaaagaaatgtgaaagttataagaattaaaatggtcacttgtgttaaaaaaaaatgagtggagcccggggaggctataaggtaaggttctcatagatgaacatctgataaaaagaattatcacaaaagactgtaaaaaccacaaccttgtaccagggcaatcaaaactttatacacaaaatgatacttctgtgaggacatctgctcagcaactgcctgtctaaacttggactggtgccacccttgttattgatctttgtagcaaggataattacctcaaaacaattatgtaaatcctcctcatttttttctttaaaaacctttggcttccctttcctc

SEQ ID NO: 449226 - DNA, 599 bp, Homo sapiens
tgtatacttttgtaacataacctaaactatttattaatttgaaaatattctcatggggattctctttattagcagtgatatctaataaccatatgtctttttgtcactgttttctgatggctggcatggtatctggcatatagaaataatgcaatgtaaattctttgattgcattaatgaaaaagaacaatataccaatgataaaggaaaggagrgaagaagggaagaaagaaaacaataaagggaaggagggaattccatatgataagatacaaatttccattccctcaaatttcctgttttccaataggaaaaaaaaagaagaagaagaaagaaaaacaagcctaacctttaatgtatgtatttaataaagacagtcattcctcaaaagtacagcaaaataaaaaatgtattttagagatcttaatcttctagtaatataagcttcaaaatacaaacatttctgtgtttatttttttctaagtgagaaaacttttcagtaaaaatcctttatgtatagtaatttcctatagattgatattttcttctgtagtgctttaatttattcatatgcttaaacatatacttttgtaagtcaa

SEQ ID NO: 449227 - DNA, 610 bp, Homo sapiens
gtaaaatgtcatgttttgatatatatatataaataaaatataaagattcaatcaagctaattaccatatccatcacctcatcaacttaactatttttatagtgacatcattaaaaatattattttaacaagtttgaaagatataatacattattattaaccgtggtcaccatgcagtgcaatagatcactaaaacttattttttcagtctaaatgaaactatgtaccttgtgattaacatcatccctaaccccaccactttccaggccstcctccccaacccagactgtctttctactccctttccaagagataaaccgttttagattccacatacaaggtaagatcatgcaatatttgtctttctgtgcctggcttattttacttagcaagatgtcctcacattccatccatgttgtcattaatgatacaatttctcattttcaaaggagagatgagtttttgttagaaaggagtaaaatcaattgaggccatgtctcaggggaggagaagatcggcatggcatggaaaaagtcgaagtctgagcagaaataaagaagaaatatatttcagacaggaggaacagagtacagaatatatacagaaacagg

SEQ ID NO: 449228 - DNA, 557 bp, Homo sapiens
ttatagtgacatcattaaaaatattattttaacaagtttgaaagatataatacattattattaaccgtggtcaccatgcagtgcaatagatcactaaaacttattttttcagtctaaatgaaactatgtaccttgtgattaacatcatccctaaccccaccactttccaggccgtcctccccaacccagactgtctttctactccctttccaagagataaaccgttttagattccacatacaaggtaagatcatgcaatatttgtctttctgtgcctggcttattttacttagcaagatgtcctcacattccatccatgttgtcattaatgatamaatttctcattttcaaaggagagatgagtttttgttagaaaggagtaaaatcaattgaggccatgtctcaggggaggagaagatcggcatggcatggaaaaagtcgaagtctgagcagaaataaagaagaaatatatttcagacaggaggaacagagtacagaatatatacagaaacaggaattaaaatatgatttactaaaatatttcctaaacccatatg

SEQ ID NO: 449229 - DNA, 630 bp, Homo sapiens
acattttcatcagccaatcaatatatgtttgttttgtgtgtgtttctgcttaaagacacctttttaaatatacattgttgatttagcaacacagaagtatggttactagaactataacttaatggctgaatgaaggggaacataaatgtcctccattatctacatcatagcatagccttttattttctttccttttttttttcctcgagatgagtctggtcctgttgtccaggctggagtgcagtgccatgatctcagttcactgcaaccttcacctgtagggctcaaacaatcccactgccttaccaccrgagtagctgggattacaggcattcaccgccacacccagctaatttttgtatttttggtagaggcagggttttacatgttggccaggctggtctcaaactccttgtctcaaaatcctcaagtgatccacctacctctatatcccaaagtgctgtgatgacaggccatcctagccttcttgtgcttaggaacactagtcagcacttaagcattatgcactgggaccaattcaaacagtgaaatcaacaacaaaaattcacagtgcaaaaaatgccacactaaatacattgaaaaaaggatgcttgtttacattatgagagc

SEQ ID NO: 449230 - DNA, 596 bp, Homo sapiens
gaatatacttcagcaaaatatgtaacatttccaaatggtaataaaaggcatctagaatctgaatattgtgtgacaactaatattatcggttaatattaatattagaaagatttagatctgtctttaaagtatatctctttaaaaaaatttgaaagggaaaaatagatatgaactggtagttttgacccagaataaaagctttagtatgtattgtatatattaagtcctttccaacagtctgaaataagtccagtgtaatcattttggtaacaaaatttcttagagctttggcataagcaacaaaagaaagaaaactcgcttttcctgtyggttgccacatttgagaattaattaagaacacgtgatgattttcagaaaataaccttttttctctttatttgcagaaaaattgtaaaaaatatcaattccaagagcaagttatcatgcaccatgtagaactgatattgaaaagtagcaaataaaaagcattacattaacttcttttgtaatacaaagtataaaatgtctagatggttcactaaaatttaaattgttattgtgaaggattatgaatacgtgaaagtacaatttaaata

SEQ ID NO: 449231 - DNA, 526 bp, Homo sapiens
tgaccttaaaccacaagtaagaaagacagaaaagtcaatgcttcacacttccccacaaagactggaccatctggacgctttatatttgtaacaggtgcttctgggatttagagcctaattctggcccagattctgttctgtatgggtgactctgttgctatgtgcaattgtgcattgcattaattgaagaraatagaaaaggccaagtacagcaattagtcagttggtcatgcagaaaagagtctagtggctttgagccacagaatgctgaatgcacagatgcacagtaccatcagttttgctctctgtggtatgctcctagtctgtgacaggtaaatgcctttgtgacttgattccagttttctgtcccctttgaaaataaactacattttttaaccacaggagagagaaaatgcttgttttggataccctaaaaaccagctacattgacacaatatgtcttgaatatacaacagaacaatataaaataggcatagctgtcagaaaacctaaaaattataagtga

SEQ ID NO: 449232 - DNA, 587 bp, Homo sapiens
cctgtaatttatatattggctttcttgatgttctgtaagttttgtaggctatcttcactctgtcattttttttttatcctttcgtcctttggactaggtcatttcaaatgacctgtctttgaatttactaagtctttcttttatttgataaattctgctgttttagctttttgtcttggtatattttctggtgctaaaacagaatgccacaagctaggtagctyatagaaaatggaagtttagttggcaattggttctgaaagcagggatgttcaagatcaaagggccacatccagtgagggccttcttgctgcatcacagcatggaaaaagggatacaatggtgaatgagagagacaaattggaccaaactcatctttttattaggagctcatgcccacaataaccaaaccaatctcatgataatggcattaatcaatttatgagggtagaaccctcatagcctaatcaccccttaaagattctacaactcaataacatgacattagcaattatttttaaatgtgagttttggaggggacattcaaatcatagcagtttttatggaatttcttagttcccttgttg

SEQ ID NO: 449233 - DNA, 587 bp, Homo sapiens
cctgtaatttatatattggctttcttgatgttctgtaagttttgtaggctatcttcactctgtcattttttttttatcctttcgtcctttggactaggtcatttcaaatgacctgtctttgaatttactaagtctttcttttatttgataaattctgctgttttagctttttgtcttggtatattttctggtgctaaaacagaatgccacaagctaggtagcttatagaaaatggaagtttagttggcaattggttctgaaagcagggatgttcaagatcaaagggccacatccagtgagggccttcttgctgcatcacagcatggaaaaagggatamaatggtgaatgagagagacaaattggaccaaactcatctttttattaggagctcatgcccacaataaccaaaccaatctcatgataatggcattaatcaatttatgagggtagaaccctcatagcctaatcaccccttaaagattctacaactcaataacatgacattagcaattatttttaaatgtgagttttggaggggacattcaaatcatagcagtttttatggaatttcttagttcccttgttg

SEQ ID NO: 449234 - DNA, 413 bp, Homo sapiens
cagtgagtcattgtagtctatagtaaaaagaatgactcctattattattttagggatttaagtagaggggagatataacctaatttagtaatttatcattattccggctggtgcgtgtagaataatttggaagtagggaaaattggaaatagaaatacagattaggaggctcacataatgcaattcatagcaagtacatggtggtaatttggcctggaataacagcagtagagagggtaragaagtaaacatatacaatatttattctaagaatagaactgatagaatttgcagatggattgaaagaaaagtgaggaaattattgggtttattatgggttattatatctggcttaataaatttgatagctttactagaactgaaggaaaaataagtttgggatgggctaggag

SEQ ID NO: 449235 - DNA, 505 bp, Homo sapiens
tagagaaaaaaatgaaaaggagacacactaatagatagttgaagtttcctagaaaccaagagaacattttagaaaggaggtaaaggtcaattctctggaaagctgccaagtggcagaataaaatgagttcagaaaaatgtccactggatttttcaatgaaaacccttggagtcctttacaaaagctatttttatggactcattggaacagaatatataaaccagatcatagtgggttaaaagtgaattgatatggaaaaattggggacaacaattttgaaatttacagttagaaaaagcaaagaaatagarcatgaaattgtggcaaacggaggtggaatcaaagaaaaattattatcattttgtttttgtttttagtttgatttggtttgattttttttttcgaacaggagaattcagagttaatgtgtttctttgtaggatgcatcaggaaaaaggcagagcttgataatttaaaagtgaaagtggataggtgaagaaatcta

SEQ ID NO: 449236 - DNA, 505 bp, Homo sapiens
tagagaaaaaaatgaaaaggagacacactaatagatagttgaagtttcctagaaaccaagagaacattttagaaaggaggtaaaggtcaattctctggaaagctgccaagtggcagaataaaatgagttcagaaaaatgtccactggatttttcaatgaaaacccttggagtcctttacaaaagctatttttatggactcattggaacagaatatataaaccagatcatagtgggttaaaagtgaattgatatggaaaaattggggacaacaattttgaaatttacagttagaaaaagcaaagaaatagaacatgaaattgtggcaaacggaggtggaatcaaagaaaaattattatcattttgtttttgtttttagtttgatttggtttgattttttttttcgaacaggagaattcagagttaatgtgtttctktgtaggatgcatcaggaaaaaggcagagcttgataatttaaaagtgaaagtggataggtgaagaaatcta

SEQ ID NO: 449237 - DNA, 398 bp, Homo sapiens
atcatcaaagactatgtaatggcataagcagaaggagagttagcaatgtytgaaatacttagcttggagttttagaaatgaaaatcagggaaatgtaatagcatcattagacacttttgagaacccatttgatatatatatataatcgtgtattgatataaatctattgatacaggttgtgtttgtgattagatattaacttactgttcttgtctccttcccttgacttgacaactgatgaatggcttctagatctctggacttggcagatgtttgtagactaactctttatctcgttatttttttcttgagtttctaaaatttgatctgaccagatttatctttatttaagtagtcctttgagactcctgttgtgtcctttcaaaatctgccatgta

SEQ ID NO: 449238 - DNA, 603 bp, Homo sapiens
caatgaggaggaaatccaaaagataggatctagcaaccaggatgyggtgagaagctgatagacacttacaacatgagcttcaaaggaaaagaggtttttgttcttttttcttctgttggcttctgttttctctttttatataaatatgggaaaagattttggatatatagatggagaaaagaagagaatatcttaacttgtgcctttgggtatattagtgaagagttatgtaagataaataagaaaaagagatacaagcagcaagagatgaaagaaaaaaattcacttgaattaaatgcaagggagattgtgatctaataatacagctaatttacaggaaagacaaaggggaggaaaaaattcttaggaatgaattttaacattgtgaaaatacctgatcccagatgaagactttcaaagtaactgggtacctttaagctggagagaaatctggagctgggtttggtagaagatatgtgaggctgtatgaggacagttagataaaattagataactttggttattgcagtaaagggaaagtgaagcacactggaactaactcagaacataaaagatggtggtggctgtctgagtgaaatgatt

SEQ ID NO: 449239 - DNA, 619 bp, Homo sapiens
tatcttaacttgtgcctttgggtatattagtgaagagttatgtaagataaataagaaaaagagatacaagcagcaagagatgaaagaaaaaaattcacttgaattaaatgcaagggagattgtgatctaataatacagctaatttacaggaaagacaaaggggaggaaaaaattcttaggaatgaattttaacattgtgaaaatacctgatcccagatgaagactttcaaagtaactgggtacctttaagctggagagaaatctggagctgggtttggtagaagatatgtgaggctgtatgargacagttagataaaattagataactttggttattgcagtaaagggaaagtgaagcacactggaactaactcagaacataaaagatggtggtggctgtctgagtgaaatgattgctggagataggcattctctccagaaaccataggcagcatccctactgtagtatgactttggttgtgatctctgtcagaagtgctaatttggtggctaacactcctggaaaaataaatgaaaatattctagatgaatgagcatgcaaggacatcagaaaaaaaattttaagtgaataattataaaatagcatatagtatagttg

SEQ ID NO: 449240 - DNA, 652 bp, Homo sapiens
tcatagtatacaattatttttattgtgctagtattatcattttatggaaataaacacctatgtctttaaggatggaggatctgctcagagcctcatccagatgagaaaataataatagctgctaattatcgagtattcagtgtgcatcagagcctgttttttgtgtgtgtgtgtattaattcaactgatcttgctagaaatcctacaaaatgactattattttcccatgttgcaactgtaactgaaagacaagacagacaggcattttaaagagmaatgtgtatccttcctctaatgatgaatattacacaggaaataaaatagaaaacattactaagccctctttgactttgtaccacttgctctctcttgactttgtaccatttactgtctagccacagatatcactttcatgtgttgtgtctagaaaatgtgctgctcatttttgtctcagagactttgtctttgctgttccttgtgcttagaaagcttggaccaaattttttatttcatatatggtccttctcatcagaaaattcctccagtttctccaagaaaaaaaaagcccctctttcatctatcataggcattgtgctgccttgtttgatggcagaataacatatttggatcctaattctgtaatttagtaaca

SEQ ID NO: 449241 - DNA, 619 bp, Homo sapiens
gggaggcggagctttcagtgagcmgagatcatgccactgcactccagcctgggcgacagagcgagactccatctcaaaaaaaaaggctacatgacttgcttctgaattacttttgggtaaacaatgaaactaaggcagaaatgttctatgatatgagtaaaaagaaagacgttgcatctgaaatcactcggattcagcaaaagcagtgttaagatgaaagttagtgaccccaaacacctactcagacaagttagaaagatctcaaattaataaaattaataatctaatttaaccaagagaaaatagaaaaacaacaaatacacactaaatctaacagaagaaaagaaatgactaaaatcagagtagctaaataaaaattataaatcaataaaacttagctaaagaaaattaaataaaatttaggctcccaaatccatgcaaagaattaaataatgaaagttggttatttcaatggataaacaagatatatggaccattagctagattagtaaagaaaaaaacaaaagagaagatccaaataaatacactgagaaatgacaaaggcaatgttacaaccaatccctcagaaatacaaaagatcctcagagactactgtgaa

SEQ ID NO: 449242 - DNA, 619 bp, Homo sapiens
gggaggcggagctttcagtgagcagagatcatgccactgcactccagcctgggcgacagagcgagactccatctcaaaaaaaaaggctacatgacttgcttctgaattacttttgggtaaacaatgaaactaaggcagaaatgttctakgatatgagtaaaaagaaagacgttgcatctgaaatcactcggattcagcaaaagcagtgttaagatgaaagttagtgaccccaaacacctactcagacaagttagaaagatctcaaattaataaaattaataatctaatttaaccaagagaaaatagaaaaacaacaaatacacactaaatctaacagaagaaaagaaatgactaaaatcagagtagctaaataaaaattataaatcaataaaacttagctaaagaaaattaaataaaatttaggctcccaaatccatgcaaagaattaaataatgaaagttggttatttcaatggataaacaagatatatggaccattagctagattagtaaagaaaaaaacaaaagagaagatccaaataaatacactgagaaatgacaaaggcaatgttacaaccaatccctcagaaatacaaaagatcctcagagactactgtgaa

SEQ ID NO: 449243 - DNA, 588 bp, Homo sapiens
gaagagcagctaccaatcctactgaaactattttaaaaaatcaaggaggaaggtctcctccctaactcattctaygaagccagaattattttcataccaaaatctggcaaagatgcaacagaaaagaaaactttagacaaatttccctcatgaacatagacgcaaaattcttaacaaaatacttgcaaagtaaatccagcagcacagcaaaaagttagttcaccacaatcaagtcggttttattctttggataccaagttggttcaacatacataaatcaataaatgtgattcatcacataaacggaattaaaaacagtaccatatgattatatcaatagacacagagagttttcagtaaaattcaatttccctttatgataaaaaccctctacaaagtagattttttctttacgataaaaaccttcaatattgaaaaaaacattctcaaaataataagagccatccatgacaaacccacagccaacatcatactgaacaggcaaaagctggaagcattccccttaagaagtggaataagataccaatgcccaccctcaccactcctattcaacatactactggaatt

SEQ ID NO: 449244 - DNA, 464 bp, Homo sapiens
agggcctgtcagaggatggggggctaggggagggatagcattaggagaaatacctaatgtagatgataggttgatgggtacagcaaaccaccatggcacgtgtatacctatgtaacaaacctgcgtgttctgcacatgtatcccatgacttaaagtataataaaagacaaaataataataaataaataaaaattaaaaacggtgaatacgaatgagacaggagaatttccttgaccccttcatgggaacccttgtgaagggggtggctcatttacttggccaccatgcatacaggagggggtgcatgcaggtaaaacaggaagggagcttttttttttgagggggggctccagccctacrgcagtgtccatgggtgttacaatgctcttttagctttgcatcattgatggctaagtggtaaccagctcagtggcgagtcaggatgacagccttttacacccctc

SEQ ID NO: 449245 - DNA, 583 bp, Homo sapiens
actgaagtgctatcctcctcagtttgcacaatatataaattttccaattattggtgatgcttatttcgattctttgatgaaggtggcatctaatagacttctcaattgtgaaattactctttctttttataagaaagtattttatgagatggtattttaaaaccatgcaaataacccattgttattaaagactaagtttactaatttatttatatcagtatatactcaacatttttcttgaagttgatgggcaaaattggtaaatatcattatctgttttaatgctcaaatttctcctgatttgcttggtctatattacttaaggttgacatctgtatcttttgatatatcattattatttttaagtaattttttkatttttggttaaaatacaattcatgattatcatgtattttttctgctccaggcctaaaatcaggcacttccctaaggatttctggatcttttcactggaaaaattatacgtagacatcataatcaggctgctagctgtgctcatagaaagcatttcttggccgggtgcggtggctcacgcctgtaatctcagcactttgggaggtcg

SEQ ID NO: 449246 - DNA, 633 bp, Homo sapiens
ttttcagtattctttctttgaaaaaaatcaaagggattctacatggtgatatttttatgagtgttctattagcactattagagacttgtttcatttttacactcacacaaagaaacagatacatgattcaataaatagtttcatgtatatgtttcaataattcactgaaaagcaaaacacatgccatactcatcaaattgcttttagctggaagcttgtcttttatcaaaattggaagagctcgtaagaacacttttcaatgaaaaagcaaaacttgcagaaccagtcaccaagaatattraagttgttagtactcataacactcaatgatggcaacattttcttttattttcagggtctgtatataaaaagaagcagacacttatgattctagtcatgctttcattactgatacccattttttccctaccactatgagttgaggaggaaattgaggaggaaaacagaggctaaaagtgttttctttttaccctcagcatcctgcctttactcctctggcaatgagtaaattgctggtgtgaaaacaaaaaggaattagagaaacaagaatgtggaaaaatggtagcagaagaaagggaagaggaaattattgcttattaaagtttttatgat

SEQ ID NO: 449247 - DNA, 633 bp, Homo sapiens
ttttcagtattctttctttgaaaaaaatcaaagggattctacatggtgatatttttatgagtgttctattagcactattagagacttgtttcatttttacactcacacaaagaaacagatacatgattcaataaatagtttcatgtatatgtttcaataattcactgaaaagcaaaacacatgccatactcatcaaattgcttttagctggaagcttgtcttttatcaaaattggaagagctcgtaagaacacttttcaatgaaaaagcaaaacttgcagaaccagtcaccaagaatattgaagttgttagtactcataacactcaatgatggcaacattttcttttattttcagggtctgtatataaaaagaagcagacacttatgattctagtcatgctttcattactgatacccattttttccctaccactatgagttgaggaggaaattgaggaggaaaacagaggctaaaagtgttttctttttaccctcagcatcctgcctttactcctctrgcaatgagtaaattgctggtgtgaaaacaaaaaggaattagagaaacaagaatgtggaaaaatggtagcagaagaaagggaagaggaaattattgcttattaaagtttttatgat

SEQ ID NO: 449248 - DNA, 563 bp, Homo sapiens
caggctccctgatacatgttcttatttttcccattttacagatgaggaaatggagttctaaagatagtaggtaactttcttgaagtcacctggcaatgtcagagccaggatgtgatcacaggcctgctattctccttacataaaatgagcttaagtaatcaaggcccaggtggagcagaaactatacaggatccagtcatcaaagttgtctagactggattagcctcaaatcaatctagcagctgtgagctctctcttacattgagagtaccatgcaagasagagaaaactctgaggctattgaaaaatggtcactggttgggggtgttcctctgcattttttacattaaataaagtataggttataagacaaagtgcatgagaattagaaccattcattttctgatactgtgtggctaccttgggtatttttggagaagtggttgtcttaagtcagccaaactctaacttgtacttctaatttatagaattcatgaacataggaacattaacagtaacattaaagcaagtacacatttcaaagcacatattgaaggaaataa

SEQ ID NO: 449249 - DNA, 656 bp, Homo sapiens
ttgtctgtgtttacaatttgtatctttcttgtgtcactttcccacagaacatatatttgtctgcaattcccttggatttctcagagcaagcattatttagaatatctgcatcaggcctgttccaagttccagggaaaaactcatttaattccactgagagggtagaagtaatgttaacggggattcaaaaagtgagcaattgtacagttttgcctatacatgcagttcccacttcttgctgaattcatatgattaattttctttgtgatttattcactcattttgtttactgtattactgcaaaatagaaaagtaagatctggggttttcaatgatcttaactgatgcttaagtgacaaaacgttatctggtcatggctcatcttttttttaggtgtttgtaaaagttatattcctggtgyttttgtgagcttaccttgtctgacggctagtgtggtggtatagaccaagaagagaagaatgtaattgaggaaactctggaagactggtgtgttggcgtggaaatcttctgacagatacttgctagtcaagccaattccacaaataaggagggataacacctggcctagggccacagagattaacatctccctgagaaataaaggaaaaaaaacacagcaaaggtcagcaggaagc

SEQ ID NO: 449250 - DNA, 615 bp, Homo sapiens
tgtttaatctgtgtatacagagacagatgctgagatccaactggactgtggagtgagtaggaagttcagctggcctgcagagcagccaagccaaatgaagggctgggcagggtcccatacaacagtcagcacagatggctggtacccggcatctaaatgcttccaacaggggagatttcaccatgctttacctttttttattcacatgcatctttttgttaaacaacataaactgtgtttctgttgtagaaacataatatagaatccaagtagcatggaaggttcttgaatggtattttagagagtatgttatgattgactaagagtttataamccagagaatgattctgaaggacagaataattattagctttttggtttgttagcatgttaacaaataagaggcaaaattgaaatttggatattttgagttttaatgaccctctggtggacttgtgtgtcctgagtgtacttgtacactaaagatcggatgtaaggcagtattctttacaaaatgcctagcaggatgccttatttcagaagtatagatcataacaaagaggaggatgttttactcataagcccatagaaacgtgacgtccttgttcttgaatt
